United States Patent Application Publication US 2013/0034624 A1 - sequence listing, part 3

SEQ ID NO: 21801 - DNA, 600 bp, Bovine  MMBT03597
gtgccatttcccagaaagtagtgaatcatagttttgaaactgacagtgctccatacataacaaaaaaatattgtgtttagaatgttttcaggtcctgggttgaggggagaagcagactgcagggtattaaaaatctttttttctaggctgttagctttcgttatgctattgtattttttagattatgaactaaaaaagtgcttctgacagagatgttttatagctatatatttaaatatgagggatacctctttaagaagtgggcatgaaaagtggaaacaacaatgaatctgcttcagyttgcctctatatccattgagacaatgtcaaggaaggtttcactaatccgtccagttttgtagtgagtagattggcgattgcttgtagacttaattcaaaatatggttctccttggtcagaaaaacagattgaaaagactaggacaaatggcttttatgtaatgtcctatacttctgatagtttaaaattttaaactattgtcttcaatttatgaggttagttactttaaaaattcttcaaacaagcatttctggtaaccatttcaatgccacagaattacaaagatgtaagagttattgt

SEQ ID NO: 21802 - DNA, 600 bp, Bovine  MMBT19473
ttatagctggaataaactttaaattgctgctttaaaagagaaaataaggggaagaatgactcctgaatttctgacatgagcaaccaggtagatggagttagcatatattaagacatcacaggcccaaacgggcagatgaaagaggatgagcaagttccaaacatgtagcatttaagatgcctgtgaggtacctgggtgaggtgatcagtttggcagttgtatgtggggaactgatgtttagaagaaagatccaagctagaaacagaaaaaaaggttacattgttggatcataaattatakgcaaaactttgttaggagataagatttctcaacaaaataagtgtaaagtgaactgaaaagaaggtacaggactgaaagggagacaaacagtagaaccaggactgtaatgccatgaaatccaagaagaaaacaatttgttccctatttacttttaagaactagatctggttctcagcagtcagagctcactcaccccacatttggcatacactcaaccccacatctgggtacaaatacacatcactcatcccacatctgggtacaaacacttctctactctctgctctcctataaatcttc

SEQ ID NO: 21803 - DNA, 600 bp, Bovine  MMBT04258
atgattagtgtatgtagtatttatgactcagagatactgagtttccaacaactacacactttctctttttgtaaaatctgcsccacactgatagtgttggcctggacctctggaatgaatccaatcaatgcatttgatcttctaaagagtgaaaatttggtcttgtttccccaccagactttgcactttagaaagtatattgtgggattctcccacaatttcttctccctccactatagaagtttctttttcatcactctacttaaagggcctaatattattgcagtcttagcccttttkgggggatgcagatttccaggttcagcaactatagattagatttgagagaggagattcaaatgcaatagtgctgcaagaagatagctcctatgctgatttagaatcagtaaaatgcaggacaggaaagactatgtgttggcaatagggcttgatacatgtttcaagagcaaaatggaaactgtcttcccatggtttgcaactatcaatcactaaaaagatcttataagcgaaaggctgcaggaggagaaggcctgcctcctccttcctcttctcccagggtggagacataggtttcaaaat

SEQ ID NO: 21804 - DNA, 600 bp, Bovine  MMBT07838
ggatatctgtatttgcgtatcattgattgggtgacctctttatctagcatagcttttcttcacattctccagatcaacaaattcaccctcaatatttagaagtccacaagatttatggcaagaaaattagatrtgtcacattatcacctgctctaaggtcagtattgtgcaggatccttatttattaggcagaacagcctgctggttaaaaaaaaaaaaagaaaakaaaactgcttaccatctctgcaaagtctgacatgaggcacgactgcttctttttttaaaaaagtactacagtawcaagaaggttttgtatgaagtgacctcttcatgttgtttgatgcagtagagccagaatgatgtttctagaaatctgttctctgggtcaaataatagcagaacacaattagtctagaaaaaattaatccaccttatgtgaaartytcaaagctcgcaatagtgacacacatagtaactattgggaaaagggcaaaggaggtttacataaatccctgaaaaagtryatgtttaatttgaaaatcctggcataattttctctttgctctaggacttgatttacacatttttcttttcttacca

SEQ ID NO: 21805 - DNA, 600 bp, Bovine  MMBT09179
aagaaggaattatctattaaagaagctcttaattataaattcaatgaccaggacattgaagaggtaagaaacctcgtatcccagagtctggagactcatcaagagccaagtgttagagaagatcatgcctgtcttttctttcctgtattttgacatttttggctctaccactattgcatgaggaagagggaattctgttattactaccttagaatttatagttcatcaggattttcttgtacactgtcacttgaaatcacagcctaacaaagtagattcagggctcagggatctctgttyttctgctaggcttggtccttcaagagtttcctttctccaagacattttggtaaaatggtttgatctctgttctcttggacagaggatagccttacagtacaaggcccttgggctgctgctgtttattggtgcatgttcctttgcgctagccrggaagactctctgggaccctggaagcagcatagtaccccttggaatgaactcgttctgggtgtggggcatggcactgccataggaagagcagccctcttttaactatctgcttacctccacaatgggctcacctgtcctgcctacaaa

SEQ ID NO: 21806 - DNA, 600 bp, Bovine  MMBT05209
aagaaataaatgcttccattctgctggagggactgtgaattaccgtcctccttctttgcaatacagaagatatgacacataattataagttaatgaaactgatttttacatgtgaccagagaattatgaaattatagagctgaaagggtcctcaaagttagatcattcagctataagttactgcttgtttacaaatgcaaacacttttactagcagccatggcttcaaacttaaaaacagaaactcagtgatcttgatgcccttggatacagtcctgtccattgtctgatcctcggcttyctgaatgatgagaagtgggyacagtaatagccaagcggctccctggtccctgggtcacagctagggcgctgtgttcctgaagtcaggygttcctgtcacagtycagtggtcaccttcctgatggtggcacacaaggcagctctccagcaggccagtttggaactgtgttccctaaaccattcctgcagccaggagcctactgctctagcctttcattgatttctatgttcctaatttcatgcatcaaattccttttctgcttcagatactcagagtggttcttatttcctgacaaragct

SEQ ID NO: 21807 - DNA, 600 bp, Bovine  MMBT01889
aatcccctacaaatataaatcatatttataattattttatatttattttgaatttaactaaatttataatttaatttttgtggtattcagttaatagtgctttgttaaatcaactataatgttaatttaataaaatatcttgaatatttactgaattaatttttctggttaaaatgcaataagaatgtttccatctgaacttagcaccattgctgatagaacaccttaaacaagaggaaatctaattattttgccattgaaaaggtaacagtaagatcatttgtaatgatgtagaataaytgcaagatgatcctgagcataaaaataattcctgaataaaaaacaacttgatttcaaaggactgacaaagacaagagggcaagttctatggaaattggacagtatgaaatgaacagtggtgaaagaatgataagtcaagaagatggaaagttaaacataaaatatcttattatcatatctattcagaatatataattctaacattaatgaatttgaggtaacgtcaaaaaaaagctagaaatagtatatttaaattgctaactcatgtggaaatgttgcattttctgcaacaaaaacaaa

SEQ ID NO: 21808 - DNA, 600 bp, Bovine  MMBT13624
tgcttaaattcaacaaccctaaacatcgtcatattactcatttatgttgtattttgctcaattatttcaaagtgtgttttagaagacctgacttaatcactaagtacttratcatgcatctcttcaaaaaaatactctcctacataagcacagtatcattatcacaattaacaaattgaaaatacagtcagttctgttataatgcttctcatgaaatgtgaatttgttccaatgcaattaatacattaggaacaatttgagcataacaggactttgaatttgcttatgactatgatgttktcagaaagctataaatactttcagcttttctattatttggaacaggatccaatcaaatatcagattgmatttggttatgtctcttaaacaccttttttttttyctaatgacactgattttttgttttgttttgtttttttgattgggccaactgtcttaatagactatcttagattgtttctgggcttatctaattgtatcctcaaaatttaatttgtttctcccttacattttctgtaaaatgttatttagaaccaaagttttaattacagtcagttatatatttgggaagagcaactc

SEQ ID NO: 21809 - DNA, 600 bp, Bovine  MMBT07163
ttttaatatgctgtctaggttggtcataactttccttccaaggagtaagcatcttttaattttatggctgtaatcaccatctgcatttagtcacttagaaattgtgaatctaaccactggacaagaatgacagcaaaattactaggagctcaaaacacacaccacattatggcaactgctattattgatataaaaaaaccataatgtgatcatgattgcacaaaagaaccaacatttgcacatgcaaagcacatataatttgaaaaatataatttctctggaatttgcaaaataaccaawcttgttttttttgaatgaccgttacatgtagaattttttatagataccactaagattaactatcctaataggcctttaaattatgctgataatagtacataatctgtgctaaaagaagcctacatgttattcccctaacaaaccacctggcttgctctgtgctaaaagcacgtcatggctccaatgacatggagtctcttgcatcatgtcttatcaagtttccacaattttgtgactgcgggattttctcctataagacttctgttttccatcatttgcttgtgtggcctctggccactt

SEQ ID NO: 21810 - DNA, 600 bp, Bovine  MMBT00639
atcttgtttcagtcatttatttaaaaacaattgtttatcaggagtcatgttggacaccaagcttggtcctgggaatgtaactggattatgtgacattggcatcattttatatagttgaaagcttctattatgcataattttaaattaaacttgttttcaaagtataattacagatagtcccagtgactgcctctcccaaggttaacattatcctaacttctaataacaagattagaagtgttagaagattagaagtaaaagtattgcatgtttttatgtttatagcagtgacatcctacyrtgtcttttcccttttttttccttacttatttcattttgtttttccagttcggatatttttgyaatgyagacatcttgttacctagttcttcactcttgctgctgcatggtatttcattgtgtgaaaatactaccattggttaatgcattcatctatcgatgggcctttgggttgtttctggtttgagctattttagaactgttatgaacagtatgtatcctcagataacattgtatacattttatttgggtatgttgccaccactgtattgctcagtcataaactgtataaacattaag

SEQ ID NO: 21811 - DNA, 602 bp, Bovine  MMBT11367
  misc_feature (1)..(2): n is a, c, g, or t
nnttttttttttttttttttgcattttaagtcgtaactcttgacttcttttcttttcatggagtcattggaacaggaacgaaactcacagtatttgatatattggttcactggagatttaattttctatgggtctctgcttttacatttggttaaggtttgagagctcaaagtattattcctgacaacatgctaaatgtttgaggtgtggatgtataatgaaataaagcaataaatgtcttgtgcccatatttattttgtagatgaatctgctttgaaaaatctggcacccagtagtccaawatcatttaactggtaaccttttattttttaaaagagtgtggcatctctatagccaggtataagccccagcagaatcttggtgacagaargagaattgttccttatcctctcatgctataaggtcatttcaaggaatctggctctcaagagccacacttctaagaaagctaggcagtaccaatgagcagaaacaggatctgatattttctacaatatctgtttttattttcaagaagaagtgttcctcaagaattaaggaaatactgtggcatgtggctttaagatgtgatgaataggaag

SEQ ID NO: 21812 - DNA, 600 bp, Bovine  MMBT01979
gcaataacatatcaagcccagaaacaaataataatcacagacaaaatattgggtgaaaaatttgttgaaatgagtagtgatatttccccctcatttattcatatattttgtacttaccaaatattcatgcatcttgaaataagagactatattttgcataattgaagtgatatcggtggagatttaccaaagacagatagtgtgaagatattttattaagccatttacttcatgcagattgtatcattctgccttagatgctattttctccctttctagcccaaggacagtacataagtsactcagttttacacaaaataatcagtgaaagctagtaactaagaacattctatgcattttgtaattgctttgtgataaaagagtaaattctacaagcactctgtgtggcatttctaatgtttaggtaataataaagtttgatatgtacagcacaggcacattataaaaattaattagccagggacccatgaaactcttggagctcaaaaatgaaaaagagctgtgtgaactagtgccaaaaccgtgacagaagtgccagtgttgtagagatttttcctgtttaaaatcatttctaaattc

SEQ ID NO: 21813 - DNA, 600 bp, Bovine  MMBT13900
gctagagccctttcctaggatgtgggtttatcagtgcccaaacagggaaagtccgtggtgagctggattggtgggccaccctaccatctagtggggatacagataattaagaggccatcccaggctgtccagcagaaaagtttgggggtcatggaagcactgagttgggggtgagtgaagcttgggatcagggagggcttccgaaaggagaagggcatttaagctgagacctggaggatgagagaggatgagctgagtgaaggagaggtgcgggagaggggagtgcacaagcagacaaaygcatgtgggcagagctggaaggcagtgaggttgtggcccccaggtgggtgctcggggaggatgtaaggggcagtgtggcagagatgaacatgcatatatttgcttatatacaacggttgtcttttggggmaagcattgggggagggggtgctggagaaaagggttagaaatcctatggagcttttgaactgtgggaatgtaatacctataccaaaagataaaataatctaaaccaacaaccacgcatgcctgtgctcacccctcccctacgcccagctcattccagccgggggcctgcag

SEQ ID NO: 21814 - DNA, 600 bp, Bovine  MMBT10248
ctttacagtattgtgttggtttctaccaaacgtcaacatgaatcagccacagtgtgttcattttaaatatgttactctgcatgttcacagggtgtcaccccttcagacatgatatatttcacttagaaaaggaaaaaaggctttgggtggtgaagacagcaacccaaagagaaggaaagtcaggtaagaaccaggcagatgggggtccttagagaagccctcccatgtgtttttgcttctctccaaccctttggctggcatctcgtccaaactgccagacctcttctttaacacaccttwgtactggttgccctgccccgcctatagtctgttttccaggtagcagccaagagtgatgcttaggcaagactgccattgctctcttccaaatcttttatagcttcttatttttcttamagtggctctgcagtcctccaggatctgctcgtggtcccccactgtctctctgattcctttcctctcgctccttgtctcctacccatgctgtacaccacaccaggctcagactcgccagggatgctgtatcacccgcggctgcctgaacaaatcactgcacacaccatagcttaacacaacaca

SEQ ID NO: 21815 - DNA, 602 bp, Bovine  MMBT23121
  misc_feature (1)..(2): n is a, c, g, or t
nnttcacatcctgtttcttatgattgcccagccagaactttgaaaacaactttacttctttcttcatgaacactgttctcaaactgatgtccttactctgaaatcttctgcactcctccccaattaatctgaccgtrtgactctccatttcataaaccgggaatgattcttcattyccaaccaaataaaatctaggctttgtagcttcccttttctatgatctgaccctgaacctccctctttttttttttctctttcctctacaatgccttctccaccatttctccccacaatatggcccmaaaggtcatctctccacttcagaactcttccagaactttatctttacccaacacacttctgtgcaaacagtaaccatccaataaccaactgaatgaatgaatgaccttcagtcttgaattctaattctgaagggtctgggggctaactctcgtgaatgtccctacaactggtgttctcaaccatagcattttggttcttgtgagttatgttataattaatttgtttctagtaacaaaacacaacatttccaaatgatttatttttctcataactagagtagattcaagatgatccctata

SEQ ID NO: 21816 - DNA, 600 bp, Bovine  MMBT17480
tgtaaatagctagatcattatgttgggacatatagttattgttcagaattcatgtggcaactcattatcttaaaagtggcttcataaattaccctgatttcagtaattactgtgtgccatgttaacttgtactgaagcagagttaaagcataaaaatctatcaatgacaaaaatattttaaaaaaattttttctattgacataacacaactgaaatatcatgtagaaacagcattaaaaattccaaagaaagaaaatgtcatgttttgaatgtcttgatcagttcaatgaatacagttargagttcaatcaatgttcttcaataaacacatgaattagtattttataktatgtttcattgagaactgacatattatctatatcctgtatctgaaaaagttaccatttttgtaaaataagaaatttgctgcttttgaaaaataatcctctgtatctttaatatagcttcgagtgttaaatgttcactttgattatgagttgatgcatgtgaaacaaacaatttatcatgaggaaagtaacttaaattttatgttgaaattattttcttatgcaaggccaactcttaaataattcaaagcaa

SEQ ID NO: 21817 - DNA, 600 bp, Bovine  MMBT22052
acagtctgggtctttttttgctcctttattgcttgtccaagygaatctagggtatagacaccccatgattcccaggtttggtcatttgcatgcagaacttaatttgactgcatcaactcctattcccaaaatgtgggtgaaagtctatgtgtccatatttacactgtgtttcctggtgtttaaatgtgtggttataatttttatgtagggtctmaaaaatgattattcctaaagataaaatttttggaaatttgaaaacatagctttgctatatccctggtcttcagctttcactgctgktctttctcctggcacactcagctccctcctgccccttcaagcagctttcctctgatcctcacatctgatttaattgccctctgctttttcccctcctgtctggaactttgttctcgtcagctctgtgctgtgggctttttgaatctcttctgtcagcctttcagagaatwgccagcagagcgtgttgctggctctgtataaaatcttggggtacttgggcggagggtgagggtgccgtccggggcctgtccctcccgtctgccagcgtgcacatcccctgctcatccgcgtgcccccgtg

SEQ ID NO: 21818 - DNA, 600 bp, Bovine  MMBT14395
gttggaggctgacgcatatttagaaaggaatatgacaatttgccaaggtacagaagatgcttgctccatattgcacattacacagaagtctagcacagtttaaactacttctgatgtttttcacaaagaaataaaaacactttaattctcaatatttctaatgtttaaattatattctactaaagaaatattagttttacaatgttttcattttcctccttataactggcagtaagagggttttcaatgttttgacaaacatttttagcrtatggaacaatgttcatcttcctattgatkactaactttgcatgatttcagtttactcagtcatgtttagggwcctgcataaccattcagagtgagcactgtcygcagtctttaaagcagggttacaaactcaaatgacttctagagccaggaaggtcaggaaaatgagggaagcaggaaggtaatagataaattccccagcctttgtgggaaatggtggagactgtgccctagagagctttatcctgtctaagaaaggcagcctctactcaactctatggagagctgagccaggagaaatgctggccagggttgccagatctgattcct

SEQ ID NO: 21819 - DNA, 600 bp, Bovine  MMBT14742
cctcaatttcattgcctctacactaggaggttagtaaaggttttcagtctctcactcttgtgtgtattaagatgtgcaagtagagaaagagagaaaaatactacttttcccaaaacttacaagaaaaattaaggcctaaaccttgggttgcatctaactttgttctttatctttaatatagcagatgcttaataaaatttagctgcagttctctttataattatcagtattatttttagtagtaataggatccaggatttggaagcaggttgtctttataacaaagcaagtgtggggaayatattgccctggacctaccttctcaataggaagtggagattgtatatattagctggagttcacccaagctacttttgggacaaacagatcatgtgttctgaacagaggtcaacagctgtttctcctctgtggcttccagaaatggggacagatgtattcagactgaccttccttattcactgagtgtgggaacggttggaaagggtaggggggagggagataaaacaagagggagggtgggaagattcccatgggggcccagtaatatgagagagcattgaaagcaatgttcaagttaac

SEQ ID NO: 21820 - DNA, 600 bp, Bovine  MMBT04849
aacagaaatactcagtgtataccttaaactaacacaacattgcaaatacctgtacttcaatttttaatggtttaaaaaaatactcagaaaatatagggaataaagtatatcaataaagcataccaaacacatttataatgattcaatgcagtgaaaaaataattttaagaaactcagaagacagagatagaaactaacctctaaaggctgtgcatggtaatgatctgtgggatctttcaattctgctgcttctttcatcaaacgtttaacagctaaaacaaaattcacaagatagagacwtttcaaataaactttttccatgtgattagcagatttacagacctaatgaataagttcctacttcaacaaaaaacgtgcagaggacttattcaatacagcatatgatttaattatgcgataatagtaataatgggggaagaaaaggcagctaggcactagaagagttacatattaaattaaatatatagggaagtttcaaagagacactatttttctctactaagtactattatacactccttattaggtagcactaaaatattaactcatgtaatcctcaaaacagctgagataggtgct

SEQ ID NO: 21821 - DNA, 600 bp, Bovine  MMBT02425
cagaagataaagaaattaagggtttcccagggagctcagtggtaaagaatccacctgccaatgcaagagaagcaagctcaattcctgagtcaggaagaacccctggagaaagaaatggcaacccactccagtgttcttgcctggaaaatcccatggacagagaagcctagaagtttacagtccataaagtcacaaagagttggacatgacttagtgactaaacaacaaagaaactgaaggaaatttgactcatagtacattaaatgtttcattaacttaaaaattaaggttaaagaaaawttttaaatgttatgagaaccatggcaagttgtagttacattttttaactagaattttaaatagtattgactaacttgctgcttcaagtagcatggaggtgataatactctcatacttcctcccactcctctacccttcaatgtctactgattaggctggttcattttgccagagttataatagtagcattctatgctgcaaccacactttgctgagaaaaaaaatagttttttattcaaatgaattcattgctcaccactaacccttttttatagctttgtcaaacctgatctcattgcc

SEQ ID NO: 21822 - DNA, 600 bp, Bovine  MMBT06232
ttaaatcatgttggctagtgacagaatgaaacgaattggaaactgcttccctggcattcctagcctagtttcattttaattatagacttttaaacatttgtgttgtgtttgataatgttctttgtgctttcacagacctcatctcctttgattctctcatttgatctgtttcattccaggcatttcaaaactagttctgaatcaaagccatgatcatttattttgctgcattgatttatcctgatgaagggtcaagtcagtgtccaggcagatcaaagtctcttcattgctgtgctttgwtgagtatatttgcttcctaaaatctcccttattagcctatttaattctttgaaaattcctcactaaaagaaaaaaaaaaaaacaaacaacaaaaaaagtcacacatgcactcaatctccaaatatttactcaagtctagtttgacacaattcactccatttctggtcatggactagctaaggtattcagtccaactcttagtacttgtcactatagaacatgttgtgggttccctttttctctgcaagcaaaagtaacaaacccaaacccatctttttcttaaacaagaaaatacattac

SEQ ID NO: 21823 - DNA, 600 bp, Bovine  MMBT08392
ttaacggtttctagtatagctacgaagagcactcacatcctggcagccaatttctcccatcctgaaagaggtctaacctatcatcagttctgccagcataaagtagtggctggtacccggggcacaaccaaacagatcaattagcttttcagccaaagaggcttgactacatagaattcattctccttctttataaagcccactttcctcctgagaagagagccttctgtaagagaagccaaatgagacattcaacaagtagagactatcactgacttcttgatctttgtccttccactyacycacttttttattacccaaatctacaggagctgagatctagaaagctgattcrtctaagttctaatgaaaagtcctaacaatgttatttagataactgtgatgaattttaatctgatgacagcttgtgacccacaaattgctgtttaaattaagatgcattcaaaatgaaactggcaagacaaccacaatattaaacttgcaatctgctrtgaaaaaaacacctatcaaaagcactacattaaaaatatgaatgtaattaatttctatatggcatcttgcaacttaaatctggagaca

SEQ ID NO: 21824 - DNA, 600 bp, Bovine  MMBT05617
acaaggcttctagattcagttttaccagtgaaagatactcatgagaattctagcaagtagaagacaagaagaagcctctgttgcaagaagcagcagcaggcataagggctttgcagaccaaagacaagggtttccccagcacattctgattacctgagtcagctttctctggccttcactctgcagcccttcctattctcccatatttaatgattttctacatgaactacttggaactattaacagtttttgtttctctgatggatactgaattctacaaatgtcccagaagaagcagaytttgaaatctataatgattttatcatatgaataattgacaaatcttcaccttgtttctgatgagtactcaaaggcaaaagatcaaagttgtgatatcacaaaaggtgctgaattaggcaatttttatttattttttacctaataggagtctaaggaaaattctaatcctgtatatatctttttcatgtagaacttcatcaatatgtttaagtattaattcttgttatgatttactgaaacaagatatgaagaaaaactgaaaacaatatggatatcgggaatatataattcagtcctatt

SEQ ID NO: 21825 - DNA, 600 bp, Bovine  MMBT08532
tctgagcattgccagggaagttagataggaaattcagcgaatggcacactatactaatctttgctagaactctggagaatacaatcacaagatcagcccatcatgtctaaatgctcacaggcagctggattggatccacaggggccagtgcccctgtcatttattctttaaatgtcccgcctcactgttcagaggcaacttggggcagatctaaatagctggggctctatctgccagaaggctaatttgcaaagatcgctgcaagatgaaagtgatatgaaacatgacaactgaattttmcagcagcaaagagaatagccaaaggcacgaacagccatcttaagctacaaacagagaaagggaggggaaagcttctctyaggaaaagattaaagccaggtgagatcaagtaagtttagcgtgcttgtaagctccctttgtatttgacacatataagggtatcatattgggaaaaagaactccagtttcaaacactacaaagaccaaacaggtcacacagtgagggggcacaatgagctaaaggaaaacagtagtggtagagactgttgacaactggaggaggttctgaaaaaaaatgcag

SEQ ID NO: 21826 - DNA, 600 bp, Bovine  MMBT00581
ggcacctgctatgtccagaaactctactctactgctctactgcattcggctcattaatgcccaagacaactctacgcgatagatattgttaayccccactacacacataaaacagaagttgaaagaagttaaagaactagcgtgaagtcacaaaaaattagagaacagtagaactgagattagacctcaagtcaattacttgaaagcttgagctatattatactatcaagaagtctattgcctcttttcgtcaacatcactaccttctcacattcttagctacggatcccccaaaacttmctttctatagtttcaaaaacaaaaacacactgaaagattagggtacagaatcacaaactgatttattgctatctcaatgaaggcaatgcaggttaaaaaaaaaaagtttcaaatgctgttactcagggaatacacccttcatttttcagagttcccacacagggacttctcacttcatataaactgcctggtccctgatggacagggaccatataagttgtaatgcaaccctgacacagaagtcaataaagacaagacagaaagaaaacaagttctagtttatctttcacttaggtggta

SEQ ID NO: 21827 - DNA, 600 bp, Bovine  MMBT04034
tttgaatgcatataaacacttctaaagtacgataggcttggaatttttcaaactactttcttttttaaaactgtatagtaatttatgtgaaaaaaatagatcagatgttctttataacagtataaaagtatataacatgcaagtactaaatgtgaagacatttgctttcaaaatgtggtagatatatttttccttttctgccttctattctaaatatttaataatgccatgaaaaaatttaaattgccaaaaacacagtaaaaagcccttttaaaatgacatatttggagttagttactratcatcatttcaaaaatctggtttaatatccctttaaatataatatttaattaatgaagtaatgtagaaattctcccctgctctctcttcattcatattatatacataatatatgcatagcacgtgtgtgtgtgtgtgtataatatacacagatatacatgtattttgggacatagtcagcctgaggctttattgtgtgatattatgataattaaaatataaaattgctctttggaacaaaatagataaataatttgtctctgtcaatcagaatgcacatgttttgctgttcacttgaag

SEQ ID NO: 21828 - DNA, 600 bp, Bovine  MMBT05424
tctgcacagaaccttcttgtgaaagattgaggttatttttctgatatgactgttctctctgtggcaaataactgtaatgccaaggcatggttccaaattagtcattcgctacaatttaaaaatacttcactccaatattttgccccgacacagatttcactgcatttcctcagggttcttacagtgtcttcatatgaggagtcacagaaaaatagagatttgaatcgaaaaaccacctcagatagagtagtctgttttctaccaggaatgcttgtccagcttctcctttctataatatcyctttccccatgtctgagtaatacataaaaatttccgagtgaagcaacactagaagcctgcaaacacacatgattttaagagtgagtgagtgagagagaaaaagcaagtctgtcacattcatctctccgaatgacattttctaaggggaaacctcagccctgggctggtccgagcacagcccgggtgaacctgctgccttcacggatgctttctgcgagtgtacaatttttgtttgggatcaaaccaacttagatcacccgcggttcctttaaataagttaaaaccagcagtcgttcacat

SEQ ID NO: 21829 - DNA, 600 bp, Bovine  MMBT11814
gaggattaaggatcactgaaagcagtgactaatccatggctgggactagttagccgcctgcctggtatgtggctgtggctgacatagagaactgagcctgagagctggtgctttcctcctgctttaatgagagcagtgctgagaatagacaacagtgtgggtgatgcatagttaatcaagactttgggtgaacactatattcccaattaaatatgatttaattctgcttatagtggcagaaaaagattcttacagttcttttgtctgattacatcacttgctacattaagttcattaggratattaggcaatgaataaaggccaaaggaaatgaaccatttttaatgaatgaagaatagtatggaggccatttactagccaagatgaatagtagcaataaactggagattcatttctttgacactctgtttaaatgcattcctgttgcctcttccattcagaagcatagattgagcaggccrtaaaatttacaatgttatttggaacaatttttttttttttttaggaaatgctatagctgaaatagctgaagartcttaaatgatagactgtggataacatcttgagagctaggtcytc

SEQ ID NO: 21830 - DNA, 600 bp, Bovine  MMBT07288
cccaggcaccttccccagacgggtggccctggcgtgtacttactgccgacggcggagcctgcggcggcacctgcggaaagagggggggtcacagaagagtaaggagggggtggcagggctggggacaggaaaccaggggggctggggcacctcaccatgcagggactgggtcggattctccacttacaccctcactggtgcctgagagggaagggctgctctgagcccattgtgcagatggggaaactgagtcttggagctgtgacttaccccatcaggggacctgctgataagcctctrctgggggcctcacatgcacccttctcatttgactttagactctcaggtcctccagtgcaaggcaaggaggccggaggtcatcctctggcgggtaatggggtgtcggagaacatgagggtcctaggcacagggacagactggtttactggaggctctgatggaagctgccacagggggaagccgctgtgcctgtgcccatctgggaaacacagggatgcctgtggggtagacgggaaggcgatcacagcggctgtcacgtgctgagggctttctgcatgtgggcccatgctgagtgccgcc

SEQ ID NO: 21831 - DNA, 600 bp, Bovine  MMBT12205
gaaatggaacgatccagatctgtccttggagttgttttcctctgacctctgcccctatcccaacatatatcctgagcctttcctacaagagggaacagttttcttagacatactattggaggacaggaaagagcagctttgtgtcatatcatagaatggcccctagaaggtagcacatttcctgaggaggtaaactttttatggtttaatttttaattgctcactcaacatctccacctcaatgcccacaggagcctcaatgtctctatgccccaactgaaaacgcccaccttctccatytctatggtacctcccttctcccagctactcacttcaaaacttcaatgagtgagagcttcccaggtagcaaagtggtaaagaatctgtctgtcaatgcaggagacacaagaaacatgggttcaatcccagggtcaggaagatcccctggaggaggtcatggcagctcmcaccagtattcttgcctgggaaatcccrtggacagaggagcctggagggctgcagtccatggggtcacagagtaggatatgacttgactgagtgactgagcatacacacacacacacacacatacacagtgga

SEQ ID NO: 21832 - DNA, 600 bp, Bovine  MMBT12934
attctgcctgccgtcagagcacaaaaatatacattcacatcgtctgtttgttgtatcgtattcttggatcatacagatttagttacaatacacacacaggtcagccagtgtaaaaagactgaaaagaatgaaaactacaaatgaggacagatgagctatgcattatgtaatgataaaacaggtgtttggggagataaacaatgttcaaaagcaaaggagatttaaatactgctgcatctgtaattgctttattctggttattagacaaaaagaaaatagctttcaaatgaaatccaaacktgctgtgctataattgaaatatatgaacgttgggtagttctgacttcatttacttttgttagaaaagcaaactttatgcatgggagggaaactttttaaagaaactgttcctagtgacattaaaaaacaatgttaattctgtcatgatgcttttgacagtatcatagggttgtttagcattagttgtgaattattggcwtgtgcttctcagaatcatacatacaaaactgagcaatctagggggtgaggatgctaacatactatctatttttgtttataggacggtgaactttgacataa

SEQ ID NO: 21833 - DNA, 600 bp, Bovine  MMBT21061
gattccatttcactaaagtaattggcttggcctgttgtaaaaaataatcagccccctctccggaacaaatgctagcacatgctaatgagggagtgagttcgttacattgatggcgtggactgacagttattaatgattgttatgataaacagacgagtgcgaattgggatgagttgggcaaaagtgacagtttaaaaataacgtatattggaaagtactaacgaagtaatatactgttaggaaaacaatcatgcaagttgtcaaggaaagaagtgtaattatacagccgcatgggctgcytaggaggacagggaccggcctgataatggacacattttttgttggcaagagggaaatatgttatggcagaaagaggtgcagattgataaattaattggtccttctcgcagctccgagagcaaacttggctggcagtcaccatgcagatgagggagatggaggttgcccagcgcttcttctctccagagtctccctggtccttgttgccaggcttttctgaagcctctcttgtgtcctctcctcacttttcttcatgagctgcaacaagttatagaaagtgcatcctgaggygcaatggac

SEQ ID NO: 21834 - DNA, 600 bp, Bovine  MMBT04803
atgcctcttgaaaatctcatgtaatgtttattaattgcaaattaaaatgtgttttcgttaggtggttgtaatctgaagaataaatctactcagtcattggaatattgtgctgaattactgggtctggatcaagatgatcttcgtgtaagtttaactacaagagtcatgctgacaacagcagggggcaccaaaggaacagtgataaagtaagttccctgctcactgctccttgcaagtcctgccttgtgagggaaaagccagatcctgtctctgttccttgctgagtaaggcaaaggagtktatcaaaccatttyaataaatttaaaaagtaaggataaaaaaagcccttttagctrcacagaaaatcctgtaacttactttcagaaatrttagcaaggtatgtttagcctggttctctgctaagctaattcccaattattgtcatgatgaagaaaatctgtgcctgcagtagcatggtccttcagagacatttctggaggccacggaaaggctggtagaagccctgggtgtggtcctctgctccatttcccctgtgtgctaaagcagttctatgttttatggatggagtgtccacataag

SEQ ID NO: 21835 - DNA, 600 bp, Bovine  MMBT16552
gtattaatgtagacacatgatacagacctaaaccaatcagaataccagtttgtcctatccacatggttggttttgatatgtccatgtgatgcccttggagacctgagactgcgttgaaatggcaaacagactgtattctagtcaaagagggaatgattatctagggatggaaaagggggtcaagaagtggagagagtcaaacagggccttagtgactatgtttgaccttgtatacagtcatgtcaggtcagagtccacaattttcagatccctaagctgatgaacttctctgtgattaargctaatttgggtcaagtttcctgtcacttgcaatgtaattaacaaatacaatcaatattaacgatttatgccctctccctgttactagcaagaaaaaaagtgtatcttattttttgcttactgctttccgggctacccttcctggtctgaatttctctgacatgtctatacttggctcataccaacctatacacccttcatctctaagtcacacactgtcagagacttactttgtaagggatgggttatgcttatccatactaagtagtctcttatgtgacctgatgttcatagttactc

SEQ ID NO: 21836 - DNA, 600 bp, Bovine  MMBT08902
tggtgactgtctgtaaaaacaaaggaaagaggaacagtgtaattttaaatgtgttttcaagaagataagtcataatacagactctgtgaacccttaaacagtggatatccatctcagctgcagctttcagaggagttcatgtgagaaaagatgtgccagataagtaaatgttctaatgttagtcttcatatctgttatgggctaaatgattgttcaccacttctgcccaccaatttgtgtgttgaagttttcaccctgaatgtgatagtattaggaaatgtggctcttgggaagctattytgtcatgagttagagccctcatgaatgagattaggggctttataaaggagatgccagacttctggcctccagactgtgaaaaaaaaaaagtttctatcgtgaacaaaccacccaccctttagtgcttcatatcatctcaaatcagagaaggcaatggcaccctactccagcactcttgcctggaaaattccatggacagaggagcctggtaggctgcagtccatggggtcgctaggagtcgtacacgactsagcgacttccttttcacttttcactttcatgcattggagaaggaaatgg

SEQ ID NO: 21837 - DNA, 598 bp, Bovine  MMBT09922
  misc_feature (1)..(79): n is a, c, g, or t
nnnnnnnnnnnnnnnnnnnnnnnnnnnnnnnnnnnnnnnnnnnnnnnnnnnnnnnnnnnnnnnnnnnnnnnnnnnnnnncgaggaagagatggctggatggcatcactgacttgatggacatgagtttgagtgaactccgggagttggtgatggacagggaggcctggtgtgccgcagttcatggggtcacaaagagtcggacacgactgagtgactgaactgaactgaactgagctgtttgggtattttaattggaaattaatcccttgtcaatcatatggtttgcaaatattttcttmcagtctgtaggttctagattttgttaacgtggggttaattaactatgactgttttgcagcctaagaggtcaagatgtttatttctatctttattttcacttaaaaaaaaaatctctcctccaattaaaaataaataaattkttataaagtaaattaaaaaattctctaaaaggtacatcacttttttttttwaactggttagtccagcatttatacctcacctcccatatgtttgcagtacacatttgctatgatttgtgacaatgacatttgttgtaacacagcatttaacagttgt

SEQ ID NO: 21838 - DNA, 600 bp, Bovine  MMBT21363
gaggggactccaggtggctgacacagagaagttggagagggacaggacaaggggtggggtgatgaagatggatctggagaggggaagatgtgggcagagaargggagggaatgggcagtgctatcccaactttgccattttctgctctgtgaccttgggcaagtcactcarcctttctgggccttccgtctgaaagatggaagcttgacttacaggctggtgagaatcacatgcaaggcaaagtaccttgtcactccattsattcattccttcatttatccatccattttcccgagttcyttaggcacaacagatgtattgtacatggtgggcttcttcccctatcccagacttagggttggctcaaatcccaactcagaaaggatggagctgggaggctgaagttaataatactgattctatcatcagggcctgaaaagctccatagactgagagatgsagagggggtccaaggtcaccccctgtccctcactatacacctggcttgtgctatagatgggacagtggctgaaaagtcagagatcagaaaagttccacttctttggattagcccttraaagcttcctggaggaggggatt

SEQ ID NO: 21839 - DNA, 600 bp, Bovine  MMBT05787
tatgcttacttattttgagcatgggttttgaaatctgacsatccagaacttgaacccagggtcaactaattactatttaggtgactttaggcaatttcttatctgctccacacctcyactcccttgtatgtaatgtgaggttaataatatctaamtttcagagaggtttgtggaattcagttagataatgtatracatgtggttaaaaaatattggtcatttattaagtgcttcatcagttggaacttacttttagttggcatactaatgtatacttagctgtgaatggtaaatgagttytcaatttgctcttagtcctagggtatctataaagctcaccttgggtctcataaattaaacacatttgccttagtctttacaaataaatcagaaatactgaaattataggtacttagagtattttggaactcagtgaccttggagaaacatcaccccatgaatgtcatcaacgtttcttgaggctgccaatagcattaatatacccaccaacaaatatttccagagtccctaccacaccagtgtaggtggagctgagaggaggggacagatggacaccaagctgagggcagcatgatttgc

SEQ ID NO: 21840 - DNA, 600 bp, Bovine  MMBT07454
caggctagaagtacttccaggtcgtttggcattcacatcattcattccagctcgactctctcctccttcaaattggaaatgtaatcgaatctcacctcccttagcagaggaccgcttcctcaactcagtgtcagcttctcttggttggaaccttgaaggtttatttgctgtttgagcagaactgctatcttcctgttcatcaaaacctggacttgtctcttcatctgcttctgaatcctgacaactatttttggaattatctacatccattggtgactcaggttcactttctttctcaamtggaggagaatttcctagactactttcttgtctattcaatctgttggcatttttcagtccagtaccaacatcctcagagccagtgtccgacaaggggctctcggrcaccacgtctgtctcctcctgctgacaccctgcacaggcttctgcaggatggcaagccttgccacacttctggtggcttctggcttctctgccctgttcatcttccatcgtctgctttgcattcgcaagctttacatgtgtcaaaaactgctgattatctctactctcctcactatttgtgtcactgtgatcatc

SEQ ID NO: 21841 - DNA, 600 bp, Bovine  MMBT01178
atgataactgatcagtggcaactaatacttttatttctctttcttgaggtgtgagaagcatgaacagtactgacattcagtggtcagccatcctgagctggggatatgctgataacatttttgaggttgaagagtaaacaaagtgagcctccaataaactttatacaaagttcacagcaatatcaggtaaacatttttatgaagtactttataataataattgaacataatgctttaaaagggagtcagactgatgacagctaggctttaatatcctgtagttagttgagaagctgatgrcgctagacatatgccttgtttacagtgctgacagccttcctaactgctgctgtactgactgtgtccccaragtttgttctctaccccagcagtccccagcctttttggcaccagrgattggctttacagaagactcttgtcccacagagcagggaatagggggatggtttcaggatgattctcctaaggagcccacaacctagatcccttgcatatgtagttcacagtagcattygtgttcctatgagaatcaagtgccactgatctgacaggaggcggagctcaggcagtaatatgagt

SEQ ID NO: 21842 - DNA, 600 bp, Bovine  MMBT09339
agttagatctcttgggttcattcacaagtaatcctcactcccaacctcagcctyaggcaaccactagtcttcttgtctacgtagagttgcctcttctggacatttcacgggaaatggtatcatataaaacgaggtctttcacgtcctgcttcttttactacttagcatactgtttccagtgttcattcatgtaacacataccagcacttcatccctttctattattgagtagtgttccatcgtttgcttatcccatatttcatttatcatcggctgatacacatctgggttgttcctacwttggggctattttgaaaaatgcygctatgaacattcatgtacaagttgtgtgggcatgtctgtgtgtgtgttttttaaccatgtgaataggttatctgtttaaaaaaatctttgatatcacaaaagattaaacagcacatgaaacaatcttataaggaaggaagtagcaaagcaatgggcgtgtgtgtgcatgtgcctgtagaatgatttgattctgttaaataattaaataagaacataaaaaagattagaaaggcagaaagctaaaatgttaacagtgttgtctctgagtgatgggat

SEQ ID NO: 21843 - DNA, 598 bp, Bovine  MMBT05511
  misc_feature (1)..(48): n is a, c, g, or t
nnnnnnnnnnnnnnnnnnnnnnnnnnnnnnnnnnnnnnnnnnnnnnnngaaaatataagtatataaatgcagaaaaagtaggtgcctttctcaaacccactttataagtaaatggaaggccaaacctagctcctggcatctcttctccttaatagtggtttcaaaacttataatggatgtgtcttcctacgatgatgaccttgagtttttgaaagttgatgaaactcgggtttgaatctcagcttttctttttactagctatgtggctacaagcaaacaatttaaactctttacaatatyattttctgacatgtaaactggggtgataactgggtatttaggcttatgaaagattaaatgagataatatttgcacaacactcaacactaatcagaacctgaatattaactctagtaattgtcataagaaaacttgtgttcttttttataaataattctctacataagaaatattcagcatgtgataccaacagagatggttctaagaattaaaaaaaaaaaaactttactatttgtaaaaatgaaataaatttcttttcctggggtgcacaaaaaatgaaacacttatcaagttgcac

SEQ ID NO: 21844 - DNA, 600 bp, Bovine  MMBT12344
gcccacagctcactctttctcaatgacagtgagaccagtgaaaaagaagacaaaatcttagttcactatgaacacggaataccagtaataaaagtgactgtggtaactgtgatgatagtggcagaaactgggaactgattctcggaaaggtctactgggcttgatttattttaagcagccaggagagatctagaatttggatgcagtgtttggatctatccttttatttttctccattgcccactgactttaaaaacctaagatcataccaaacttctattagcatgtccaccatgaatrcacaattaaataactcaaataaataatgggtagctaaagaatactttaaaggtagtaaaaagatagcacctcagtgatttcttagcataatgctaatctttcaaatgtgggtaaaatcccatttagtgggaaggtttggaatcttacataaaaatataacatgcattatatatttcttgaatataaaaaattcaagcgactgtatccttactgatattaatgtaacacaaataaaattataatgaacattttaacacaaaatgcagttcatttctagttaacatattgaaataactgata

SEQ ID NO: 21845 - DNA, 601 bp, Bovine  MMBT01263
  misc_feature (1)..(1): n is a, c, g, or t
ncttggaaaatcagataataattctcttctgggcttgaacctgcagagtatactgattctctgccaagtttttttttcagaatgatcaggagaagttgaaaacagatcaatttattcattttaagatcaaaagggtatgctatgacatgatttcattaagaattaaataatgcacatgatttcaaggttaagagcaaaaaataactactccatataatggcttaaaactcccagaaggagtctgaatgaggaatgatggcctttaactaagagcaggcccgtctaggtttaataacaagtratttctcttaattgcaattgccttgaagaaaggtattcaaggtctcagaatctaacaagttgtagctagaattcactccaggatttaactgggggaaaaaaataatttttaaaaatactcaaccagctctaggatctcctgacagaactgaatgattttactcttcttagtgtagagcctcaggaatatcaagtcaaactgaggaagaataatatgtgggaattactgaattcattgcttgcaatgctttttcccattagtagagggcgccagtggtaaagaaaccacctgccaatacag

SEQ ID NO: 21846 - DNA, 600 bp, Bovine  MMBT09771
attgtgtttcctttcatgacttctaagccaactgggagtaaggaatgctttctcacacttctgacatttgtaaggtaaatctccgtgtgtattaacatgtgattctggtaagttattctccacaagaaggctttcccacatttcttacattcatagggtttctcccctgtgtgagttcttttgtgttgttgcaaagagtttcgatatgaaaaaacttttccacattgtaaacattcacagcatttctctccagtgtgattcctttcatgtgatatgagagcactgggagaaaagaatgcyttcccacattctttgaatttacataccttctcagcgtacttttcgatgttctcttgatttgtcttcaatgtgacatttcatgtatctagtaagggatgaaccactcatgayggtattttcatatgcactgcattcccatggttttaaatcaggagtttcccccctcattttgagagttttaataagattgaagttttctccaaaggaactaatgtctttactttcagagagtttctctatcattggcgttctgtaaataataagaacaacattctaaatacctttattattttacatttt

SEQ ID NO: 21847 - DNA, 598 bp, Bovine  MMBT02200
  misc_feature (1)..(6): n is a, c, g, or t
nnnnnnaatcatccctgcgcagtgaaagattctccttgtccactgaagcttcctgatgctcaggctcaacaggacctcacctaacattcaaattccactctttatcttatttaaaaacaaaaactcctatctcatgtgaacaaagtttgttagggcaataatcctgtgaaactgttcattgccggcggatgtcattaatcaatttgtttacacttggtctagggtaatttggcagttataaaatctgttgattggtttctaacagataccaagggcttatcccataaattctgcagctgkggaactaaggacattagggctgtcccttcatattttggagtatataccaccacagtggcaccccacccctccacttcagaatagatrtattacagatacagcatacgttccataaagcaaagcatcrtcttttcttgactcagcagttcttagctgcaaagaccatgattcatctggtcaggtgaatgccagcttccaaatgaraagaaaaaaaaaagaaacagcattagggagattcacctgtaggctctctctcaccatttctcctctaagcctactcttataaagccactgggtt

SEQ ID NO: 21848 - DNA, 600 bp, Bovine  MMBT15364
agtggggtgccattgccttctccgtaacttctccaggtagtgataaaagtgatgacagctgtttgtaatccttaagatatcagtgttctgttgcctgtaataggaacctaactgcagcagcttgagttgttttcctcatctacaaggagttaggaagtccagggctagtgatgtgctcctgcagtgccctcagggacacaggttccgtctgttgttctgtcctgtcatcattagggcgtgggtcttctctttgtgtttgccaaatgactgctgtacatctcggtccaatgtctacagtaycagcaggcaaagatccttatctaataaagaaacttgtaacttkcctggaagtctcacaggacatcccttcaccatcttcttggctagaactgggtctcatatctttgtctgagaataaaattgttctagtttatagagatactaattytataagtttgcccatacacaggaaaggccatgtcttttggcctttaatactgtcctaaattctcttcattttcttttctacttcttagtccttgttttctctccttgttttcaccctgatcttgtctttctctccattaatcctccttttca

SEQ ID NO: 21849 - DNA, 600 bp, Bovine  MMBT16566
aatttctggctaaataaaaaaattttgaatacgtttgaaatatgtgtagattcatggtgacacagcacaaataactgattttgtgagttgtacctggtcttcaaagtcttctgtttatagtatttttatatacttattttttttttggcatgatcatttctcttcacttggcattgggcttttccttttttgctaaaatttgtcccttcgttaagagaggcatcagtctccaaatcctaggatgtatatttgtaactgagtcctgtattgcattgtgaaagtcttctacagtgttgtatrttcttggcatagtgtcacatgtttgttgatagactttctgaagttctatggaaaatgtgggttcaactctgcgccactgaggtcctcagcctcctctcctccagtgtastgtgtttcaaaataagaaaccatcttgaagcaaatcattgtcatctctcagctcagtaaagctatcaatatcatctctagctgaaagaaatgctaacacatttcacttcgttgaaagcatattgtcaggccccgaattgtcaaccattcgtttatctttcattgcaaaactggmatacagtcagtcagtta

SEQ ID NO: 21850 - DNA, 600 bp, Bovine  MMBT21577
tttaacaaattggaagtgactggtgactttattaagaatccatttagtagaaagtggggccagagaccagaattgaatgtactgaagactcgggagttaggggtttgtgggaggcaaaaatgacgatattcaccaagacacagaaatgtaccaacacctcactaaagaatacagcatcttttaatacttggtgccactctggactctgtttcataaacaggaggatgtgtgacattattttcgttttctaagggctgaagatgtcagagactgtacctccttactagattgccrgaaagmgggattttggaaactctagcatttcaaattggattggaccactgttgtcttagacttcatttgttttaggcctaaagaaatgtaactgttcccaaagtcgaaatatcttgtttgatcctacttaaggatgaattgctggtcctgtaggggcgtgaacacgtctattttcatgagcttaattgatgtcctatcaaactttgtgacacagaacactgggaatttccccctgggactgcaatacactcttaaattttctgtgtgccgtttctccacagatcgcaagacaacagcagcagcttc

SEQ ID NO: 21851 - DNA, 600 bp, Bovine  MMBT10063
ttaataaaagagctgctttaaacagaagaggcaacacctgggaaatgagtacaaagtccctgggctaaatagttcattggcacctctagcagaggtcaagtgagggccgggttatgcaacctgaagggagcattttgttgctacctgacaagagattttggtagagagagataaccaaccggctgtgccttagaagctagggaacagggtgacaagaaaacatcctgtccttattcccattcttctctctcctgtgtgttcctcaccttgctttaaccttagaagtctgagagaaagacygtctgttgagaccatccataaaggtcagcttcctggagcacagagcagacatggtcagatccactctgaagaggtaaagaaggaatactcagctcagtggccatcttctctctttacatgaagagttctcttaacctttgaaattgtaatgtcttccaaagccaaaaacacagtaatgtaggccatgaattggaaggcttttctgtgaaagcagttgaagtgaatgagctatgagtgaacacttgtgcagagagcatcaaatgtgtctgttaatgactgctgttgtatcttgttctatta

SEQ ID NO: 21852 - DNA, 600 bp, Bovine  MMBT21512
tttctggatcttcaactctaccatgctgaatgggttcaggagcgccacagtccacggctacatgaggaagacaggagagagatggtcaggatagacacttcttcccaggaagagtccctgggccagtccatcctcccagctctgatcctcactccttccctgcctcccccatccataagcacatctggggtgaatcccccacatcagcttctgtggccatgatcatctccccagcctactgagtcctgccacttcaaatggcccttagaacackgcaagaactaacctgcttcccagtgrttggtgaggcctctgtagaaatggacccatagaatgctattaactctactaatctcatagcccctttctttctaagaaagctgctagtctggcaggcctggggtcagatcaggactaggattctacgactgatttcccttcaaaacccaatccactatctcacaagcctaagaagaaaccatgcatttgtatctcagtgccttaatctttccatttcctttgggagaggggaaattattcccttctttattcttaagggaaagaaggtttattcagtagacagactgtgggccatctcag

SEQ ID NO: 21853 - DNA, 600 bp, Bovine  MMBT14991
tatacaaacttataactgagagacactgttgcagggtataaataagagatcatggatcatcgtcactttcagatgtcatgtattctgctttttaaagaagccytsgaagtcttattctaaaagcatgactatgtgaaaactgggcagaagacatcctattgtgtaccgctaaccatcctacatagtagccctgggttcccgaggctgtgagaaccatactgatgacagagaggctagtttcaaatagggacctcggaatgtacactcagaagccatcagaacatcttgcttgaagttccygacaggtagattagaatatcgtggcactcagccacagccccagtgttcggaagagagagaaaaagagctcctgaaacagcctcccttgtgatgctaatggcccacctccaacgacacatcatttattgaattgaaaggaggtctgatatgggcaaggtgtgatgacctggcaatttattttacttctccgtgtcacagacctgtttctgtgggcccagcagggtcaaagagcttaaaacgttatctagaataagacaaacgtgttattttcctcttgctttattcttctatttttttycc

SEQ ID NO: 21854 - DNA, 600 bp, Bovine  MMBT19834
cgaaagaatttttactaagcctatgtaccgccacctccttcccaaatcttttctgtaccgtatcatcctctcaggcataaattttccaccagagaaggatttagccttctctgtaaagtcttttaggatgatgtgtcttctggctggcagtgtttgaaagtcaagcaaacaagccttccagggctcacattgagttaagaaaacattttctgcatgacatttagggccaaattagggaccaaagtcctcattcttttactcaagactaggtttatgtctccacaggcaatgtgaaatggrgtgtggagaaatgatctcatgaaataaattaatttagacaggatgcctattttgttcataccccacagagagagagwgtgtgtgtgtgcgtgcctgtgggcttaacagcaggttagggaaacagtaacaacgaagagatgaagggaaagagctctaagtagtggtaagatcaggcttttcctctaggcattactgtttaccaatcatatgacctggggcgagacttctagagcctctgttttctcgacttttagatgattttatgaaacccatttgactacttcccagggttgtaaggaa

SEQ ID NO: 21855 - DNA, 600 bp, Bovine  MMBT06675
ttggcaaccacaaacctgctctccatcagtctgcttctgtctcatagataggttcgtttgtgccacactttggatttcacatgtaagtgatatcttacggcgttcgtccttctcttcctgacctacttcacttagcgtgataatctctagttacatcaactaccctgttcactgctgacctcccacacttttcagctgaaggtggcatcagctacaagctgcaggaaacaagagaacaagtttctgctttgatagatgatgcgtgtcattatgccagatgaatatggaatgccttcaacygtgaaggaagcaggaatctgcaagatcaaactaaacccaaaataaaatcgttgtgcaggaaacaatttaagaggtcggtgcgggttctcccctcaggtatgcaaacatggcacagttgatccagctggcatcagtcagcctgcctgattgttctttaaaaagcccttgttttgggttccattgtaacctgcgcagtgatgccatatcccttgtaccagcaacagactagaggaaaagccaatcttctgcactaaattgttaggggcagggcatgcgtgaaccctggctttgaagcttcat

SEQ ID NO: 21856 - DNA, 598 bp, Bovine  MMBT05183
  misc_feature (1)..(41): n is a, c, g, or t
nnnnnnnnnnnnnnnnnnnnnnnnnnnnnnnnnnnnnnnnnattcaagttccactgcctggaacgaaaagcatgttgaatcatgtatccacccttgaaagatcacccattccctgccttagccatcatcctgccatagtcttcaccataggttacaggcactatagacaggatcataagaaaaaaacgctggttctcactgccaagatggcaggcggactttaagtgcccagctctactccagtgaagctctagtctattccaagccaaactccaaatgcctttataataatagaaataktattatatatgttgtgtgggccccatgatgattttagagaagaaactgtacaatatggtttaaataggcttttgtgggttggcctggaaacctaacattgtttctatggaaaaatgctttaaactmcaaatgactctgttcgaactgaactttggaatgcaacctgttttaaattgggagattgtgtacgtgtttacaattaaaatacacaggaatgaaagtgagttatcaactgcaaaaatcacatttggactgtggatttaaattgatcaataacccattgtcattttggataaaa

SEQ ID NO: 21857 - DNA, 600 bp, Bovine  MMBT13741
ttggagaattccacacatcagtgcctgtaaagatgggtgatttggaacacacagaggagacacaaccaagggaacaatggagtaagtgcctacagtctcgtccctctgaccatgacagctgagcccgcagctttagagaacccaggagcatcaaggtaggcagcacacatgactctggcccccgaccctctgtggcacccacagccacagataactagggcagcagtggcaatsgggtctgggatcccatccgctcagatgttgagatgcccacccccaggctcctgaactccatccacrgtagcggagccttcaaaccttaaaacaacaggtacagtagaggtttctgaacagyaccggctcccctccaaagatcctccttaccccacaatcagtggcagactgtgcctgcaactcaggggattccagagkcaagggaatatagcccaccatcctggtgtttgacagtggctctggcagaagcaacacagccagaaccccagagggcaagaagtgatggcaaagacacggagtcatacctcttacaaagacagtagtggatgcaaagtgtccctctccaaccaaagacagcacagctaa

SEQ ID NO: 21858 - DNA, 600 bp, Bovine  MMBT09265
tactctagctcaccctggcacactagatcacattatacagaaaagtagatagaacacacatataataggcaatggccaggctccgttatgaccttattttcactgataaagacaaatctcataattcactcgtagcaatgtcagtcttttatctttccctggactcatgaggatacaagtcacatccactgagcctgctctctgtgtgacaaggaaactcaggcagccaatcatcgcaaaggtgattcattcatctgcattcagaaatcctgttggttaaaaagcaataaaagtgttagrgacttttttttccccctttcactctataaaaagtggctcactgttaaaatatatgtcttcactcatctctcagagctgctgtaaaaataacatttggcagtgggaagtggaacttttgctyaaagaactggcgtgtgtatatagtatttgtatatttcttagatgtccacggacacttctcagtgctttcgtgttctagagacttgcrtggataaaatttactatggcatgggttcttgatttttaaagtgtttgtgmggctttgtagagtgtggggttgcagaatgaagtgataagaga

SEQ ID NO: 21859 - DNA, 600 bp, Bovine  MMBT00904
acaacacccatcttgttgagatggcatcaaagcccacagaaaggaccctggggccggagtcatggttggttcctttcttgaaggctgtagagttgaacaatgttaggcagacaacagggctgcccaaccagggaattagctatgcagcctgatgcagggatcttttcctctctgaggcgttattcccaagagctttccctgactcccctggctggagaagaatagcaaacttactgatgcttcagagtaatagaagcaaatggctgaaactggtgttaatttcagctgaacgctgttagyctccagcagcttatagttctgtgagctatgatcacatctaggggtcctctagcccaacctctctcccatactgaagacactagcatatatgccagcctcagtttcaacactaggaagcgttcttgctctctttctccagtttctggaacttatttgacttttagggcctcagaggttttagttattctgttaagcagtgtaatcggtatgtaccagaagatcaaagaatttaatctatactaccacaggccaattaaaacttttagaaatttaagtcttatcttccatcaagcataaaag

SEQ ID NO: 21860 - DNA, 600 bp, Bovine  MMBT13628
ttctagtggaggaaccaggtattagaaaagcaaataaatggacacttcagataattttaggtgttgagaggaaaataaraataagttaatggatagagagtgacttgagaagagaggacttgggaaaggatgctcgggaatgaagagatgacattttagcaagatcagaagaagaagggactagttgttcaaagacctggtggatatcatgttacatttagaaggaatagcaaaaggaaaagctctaggtgagaatgaccttggtatggttgaggagcaggaggagtgcccacgtggccrgagtggacagaagaaatatgcaagacaaggtgagaaagatggctgagggcagattatagctgacaccatgctcasgtgtctggatagttccctaagtatagtgggaagcctctggataactttaaagccaaagagtaatgtgatattggtggggaggaggttaaaaattctggcagccatgtggatggtagaaaggcaagttacagggtctgtttgcatagtgcagagaggtgatggtggcttagaccagagtggtagcagtgtaggtgataagaactaaatgaattggggaaacagtcg

SEQ ID NO: 21861 - DNA, 600 bp, Bovine  MMBT04236
cctgtcattacaaagtaccatragctgagcagttyaaaacaayaggaataaattgtctcacagttctgaaggctagaagtctgaaatcaagggccatgctccctctgaaggtggtatggaaggaactgttcttttatagcttgtagtagcctcagaagtcccttggcttatagatatgtcactctaatggttcctctccatatggtattgccatatgatcacagcatgttccctttgtcatgcttgtctctgggatcacatgcctgatcacagcatgttccctttgtcatgcctgtctcygggctcacatttccccttcttgcaaggacactaattgctctgatttaggaaagatagtgagggacagggacacctagcgtgctgcagtccatgggactgcaaagagctacttagtgactgaacaacaacaaaggaaggaccacatcctgagagtcaagactccacaatatcttttattattattatttgcatgtgtgtgtggtgtggggatggagacacaagtcaacacaagtcaacacaagtaattaagttaaaatgaaatcattacagtgcatcctaatccacatgattagtgtcctt

SEQ ID NO: 21862 - DNA, 598 bp, Bovine  MMBT11365
  misc_feature (1)..(7): n is a, c, g, or t
nnnnnnnagaaaaacacaaaaaatggaataaggccttcaagacatcagcttcgcgctgatgggtctgtcagtacctcagttccctgttcgtttgcctttctgaactgtttatttaggcactcttgagtgttcctgcacattgactacattagctgaagttgatggaaatgaggttattctgtagtaagctgacagtctgggtccttgatgtccaacaattgaaaaaccagaaatgatgccctgttagaagaaagtatattaaggaagtaaagtgagaaaacaagttagagacggaaaacrttgtttccattgcagggtcagtcgtttgtaattgtggagtggttttgaaagctagttttgtctatgatgcaggtaaagccagttttgactgcagaacaaattagtagagactagatgtccttactaattgactgtgatcacatgacccagatggaaaagtcccaggccaagtttcttagtggacaaatgtcccctttaccaatggctgtctcctcagccagggaaacaactgaataagccaggaaatgacttccacgataatgtcttagcaatcagtgtttaactaccaacaccataa

SEQ ID NO: 21863 - DNA, 600 bp, Bovine  MMBT09160
atgggatttgactatgctgcttttgactcaaagaatccattttcaagtcttcttttaaaattcatgtgagaaaataaaatatagcatttcttacattctcttgcattaatgacagttaagttcttatttttgaatacccatgtggaatttttgaagatatcgaggcttcatgattttttctattcacttgttatgttttttaaagtaggtctctggatcagatattgtcccccacattttttgatttatattgtatcacatcatattgtcattaaagaaaatatctttcttcatattttrtgggaaagatctcrgagaagttagtttttttttttttttttaatggaattctttgtttcctggattagtttgagaggctaargcccagaaatataattggaagggaattttaactattttggttgagtgtctaatttatgtacacatttagtggttattagtagaggatttagaaaattttcaataaattcagaaaagcagtcatccactatgagatagaataaatcctttcttctttggttggatatctctttgcatatctctgggtcatagacttccattcaacaagggccaagtttc

SEQ ID NO: 21864 - DNA, 600 bp, Bovine  MMBT12768
ttatgaattaaagcattaaattaaaacagaatttaagaaaagtaaacaaaacatctgataagtaatagggaaatattatggtgaggctttctatttcttcttatattctaatccagggatcagcaaactagagcctgaaatccagatatggctgctgcttgtcttttgtaaacaaagttttattggagcaaagctatgcccattccrtcatgcgtgcctacaaccgccttcccgctgtaacggtagagttgagtagacrtggaaaagacyttattaccaactcttcttctaaactatacrtagctatcttaccagtcaaaactggcagccaaaattttttttttagtgattttgcactagctttgtttactctctactaaacagtccaggctttgtaccatacatagagaataccaattatgtgattctgaaaacacacaaagtaaatataatatcatactgaagatacaagatatatttgtatcttccaggaaaagcaatgttaaaataaatttctaaaaatttaaaaatgaacaataaaaagatgccaagtacaataacaattaacagtaccaataacagttgtacttatgccaagta

SEQ ID NO: 21865 - DNA, 598 bp, Bovine  MMBT11617
  misc_feature (1)..(158): n is a, c, g, or t
nnnnnnnnnnnnnnnnnnnnnnnnnnnnnnnnnnnnnnnnnnnnnnnnnnnnnnnnnnnnnnnnnnnnnnnnnnnnnnnnnnnnnnnnnnnnnnnnnnnnnnnnnnnnnnnnnnnnnnnnnnnnnnnnnnnnnnnnnnnnnnnnnnnnnnnnnnnnnncacacacacactcttccagaggccagcccatccacttggccgctcccaccgccccaggcttctggagcgggaggtctgagatcagctgggccaccccaggatgggaggaagggaaaagggaggagagaacgctgcatcagayccaaaatcaagtctttaaatatacactgctgaatagctgggctaagcatcagccagggtgacatgacaacactctccaaatatttagaatgtgtgagtcctcaggaaggggaattgtttttttttgtctgaaatgaggaggtggggctgggggagcggctgctgacgagcaatggcacaggattcagaaggagaaggaactcgaatgtcggcccagaacccttttctctggctctgcctcagtttctccctcgtaaagtcggggctgaatgttctctgaggtcagcccaactctggaa

SEQ ID NO: 21866 - DNA, 601 bp, Bovine  MMBT02596
  misc_feature (1)..(1): n is a, c, g, or t
ngtattcctagttaggcaactgacaacccctagaatgtacaccaaaactaaacacacatacacacacactgctatgtgacattctttatgggttcctcccaatttcctagatcttcaaatgctggagtgttttagactgcactttagtactcaaactattccttcctaactgttcttattacttttagttattaatccagtctctttgctttaattattaactcttgggtaaatgaaattgccagtatggcacagttttgactgaaaaaaaaaaaattgacaattactgtggttcaacctratattctgactaaccccaaaatttatattttctacccaaattctccatgagttccaccttcatgtacccaactgctaagtttcatattcatttaaaggtttgattggctgtagtgtcaaatatgttgacaaaataagggcaaaaaggactggaaaagggaacttttgattgacttccaggttattcataaggaagtagcaataggagagttgagagagagtaatcagattacaaagttttttgtatacatatcaggttcagttcagttcagtcgctcagtcatgtccaaccctttgcaac

SEQ ID NO: 21867 - DNA, 600 bp, Bovine  MMBT08049
acaccagaaacattttcccagctgtccatttttggaaaattctctggaaaaaacgctgaggttcagcatttcaaatttgagtatgcagacacatgcagctcgcctgagaacatttatgtactggccatctactgtatcagttcagcccgagcagcttgcaagtgctggtttctattatgtaggtcgcaacgacgatgtcaagtgcttttgttgtgatggtggcttaaggtgttgggaatctggagatgacccatgggtagaacacgccaaatggtttccaaggtgtgagttcttgatacraatgaaagggcaggagtttgttagtgagrttcaagccagatatcctcatcttcttgaacagctcttgtcaactgcaaatacttctggagatgaaaatgctgatccaccaattgttcattttggacctggagaaagttcttcagacgatgcagtcatgatgaatacacctgtggttaaagctgccttggaaatgggctttagtagaagcctggtaaagcggacagttcagagtaaaatcctaacaactggagagaattacaaaacagttaatgatattgtgtcggcacttcttaatgctga

SEQ ID NO: 21868 - DNA, 600 bp, Bovine  MMBT08439
gataagattttaattatggcatgtggtagtaaacttagaaagctccagatgtaggtaactttaaacttaaacatttcaggcattttatcattggttactatgtgattgctggcagaaatgcttaagtaacaaaatatataatgtaaattttttggcatctatttaagagtctgtaagcatatgtacatttctcgtttgtgtggtctcacatgatgttctacattatggttataacttattgggaggaatttatggtgtttggaatgacaacacacaggaggagagatgattgggtatttmgctctttcgggactgtatttcttcatcgcctcatctctatttcctagcacagcattctcaaatctggtacagtttcaaaatgtagcgtcactattgtcttattttctctgggtgggcacagacatacacaccaaggtgaatgtttagatctttatgtttctgtaagaaattggattcccgcccccccgcccccacacacaccaaattgctttagaatgttaacagttatgtgtgcacttcaacatagcaaaagcccaggatggtgcagccatggaaatgcagcctctgaagagtgaagaa

SEQ ID NO: 21869 - DNA, 600 bp, Bovine  MMBT08284
aacagctgcatctggttggatgaattgcttaacttctgttctcactttcttcttttattaaattaagagttttgtagagatttaatgagtcaatgtatacacagtgttttgtgcctacatgtagtgcctttgttcccartcgtgtctgactctcygcraccccatagactgtagcccgccaggctcttctgtccatgggattatcccaggcaagaaaactggagtgggttgctatttccttctccatgggatcttcctgacccaagagtcgaagcttcatctcctgcatcttgtgcattkgcagacagattcttcaccactgagccatctgggaagcccttgtgtctacctgataaataataaataatatctattgaatttttctccaaatgatggtactcattttcctaattttcagtggactgcaagcttcttgggacagggaccatattttatttattcctagagcctagcacagcatctggcataggttggtacttaataaataaatatgtgttgaattaataaggaaaataaatatttaaacaactatttggtgactattgtgcatggtacatcatataacttgtaactgaagta

SEQ ID NO: 21870 - DNA, 600 bp, Bovine  MMBT08584
tagctgatatttgtgtgcttctactgtgctctctgctgtcttagctcctcgacgtacttacccagtactcctgtgtgagagaaaatatataattagaaagataattgatgacagaattttataaactgctgaggaaagcttagcttggggggaaagatacgagttgatggtacaaaggcagagattcagctttctttgaaatattggagaacatagacgtggctgagtgttgagattttttttctaaacttattttcctgtatgaaaaggttatgtccgtcatgggtaatgacttttagrtgcttctctttgcttattactagtctgaacgtgtgtaccttgtgaccatagaactggagaaattgctttctcctaaagggctcccaaacaaataatcgtaatcagaactccactatttctaacttctttcatctgtgttaattaatttcacaggtgtttatttagctctttgctatttgaaggacatttattattaggtattgtgtcaatataatgtgtgacccttgtctttagagagttcctgtatgattggaagggagccatacacctacccggtttaactgcagtgaaaccagggag

SEQ ID NO: 21871 - DNA, 600 bp, Bovine  MMBT03996
ttctacataggaagtaagtttagagagaacaggtccacgggctgagcccagatgcctcccacaagtgcagaagtctaggagtagagcaggaacccaagcaaaagaaggagataagccagaagtgtaggtcagtgtcatttctcaggtgccaagagaagcccgtgtctcttgtcgtttcccacaactttatgaggtcagtgtgattttcacctccattgcacaggtttgaaaactgaggcgcatcgtcaatgataaatcccttacccagagtcaccttggctggaagtgacagggatgcartttgaacctccatcactatcactttgaatccagcagctctatagtcttcaatacacatgatatatggtggtggttgttcatttgctaagtcttgtctgactctttgcaaccctgtggactgcagcacatcaggcttccctgtccttcactgtctcccagagtttgcacaaactcagggccattgagtcrgtgacgccatccaaccatctcatcctctatcctgcctcccttctcctcctgccctcaatcttccccaggattagggccttttacaatgagttagctcttcacatcgggtgg

SEQ ID NO: 21872 - DNA, 600 bp, Bovine  MMBT09073
caggccgcaacacaaacattgaaacgctgtgccagtgcaataatcccatcgcaggctgaagacactgtgtgactccattcctgtgagagacccggagcagccaaactcagacagacggacggccgggcggcgtgagcagaggctgrggaggcggaagggaagtcggcgttcagcggggacggcttcagaagccgagaaacccctggaggcggacggtgccgatggctgcacagtgtgaatactctcrgtgmcactgaactccacactttagaagtgtcagtatggtacaatttatatctrtatgtaaccatgtaaccacaatatttttttttaaagatgaggagaggaaggaggaagaagagactgaggagaaagatacaggatttgggaagaaaagctcaaagcatttttgactgagatgactggcggtccttttcttttttccacagcagagggaatttctgatattgcagtctggcccacctccccagttctcctctcagagaacccctgtgctctagaaatccgtggacaagtgggcctgtgggtctgtacgctggcatgggaactagttttttcttacttcccagtttaatttag

SEQ ID NO: 21873 - DNA, 600 bp, Bovine  MMBT12981
tgaagagaggattgagaaaggagyagagaggaatcttgtrtgcctttccttagaagtcagcaaatctcttccttactggttcattatagatattcaatggcataatgcagggaaagtacagataacaatgctgaaaatagacctagctacgataagtaggagacggcagaaatatttgttgaatcgactttatcattttctcaaattgtctatcctgctttctttcctttgtcttcactgcaggaaattgagttttgggctgcaccatgactttgtaggagatggctgcattttaacctytttagaagcatttcccatagagcttcgtgcaatcaggacataaaggtaaaacgatctgtatyattgctttgaaaagctcaggaccattctaattgcttagcaggagagaaagactgtgcagaggtctgaagcactaagatgagctgttatgaaaagggttacatgtatcttagctctgttggttctttgaaaatcaaaacgtctgacaatacaccctggggaagcagctgtgcctgttcttttcaggcagatgagcttaatacttgctatagcagtgatttcagacatactgcctttctg

SEQ ID NO: 21874 - DNA, 600 bp, Bovine  MMBT11009
gacagaggagcctggtgggctacagcccatagrgtcgcaaagagacagacaccactgaagcgactgaacatgcacacacacactaaactaatcatctgagctactagaggtctgtaaatcaggaggctggtgcaaagctctgaggcactgtggggtcatcgaaaattagcttcataacttcctgcatcccttcctttacaaaggcatccccatatttcagatgtctttgcatcccagtgcaaaggtatccggaagtactggagggaaaagctaagtattgtaacttagagaccaaggcarttcttcctaaacccatatggtattggtgtgtgtggtaaaagggagggtggatttaagtagttttaaagtttacctaaaggatgaactgatgagaattactaagaaatttttgaaaaataggagaggtgaaagaaaacttgtctttccagatattaagctcttagcattgcataaaaatagaactaaagataatgtaggccaatgttatctgatttaaggatgaaagaaggacttaataaacccaaaataatgaagggaagctacaaaagaaaagtagattttaaagttatataaatcaaa

SEQ ID NO: 21875 - DNA, 472 bp, Bovine  MMBT03559
aatgccagcgagctggtttcccatgatggcagcaagcacctctgagacagcaagttaggatacaacacgtactttctgaaaaaaaagaaagaaaaaaaaagaagcaatgaaacatcattttttatctatccttctacaaggtagatacatcatatttctcttccatcccacaggactgtacttaacaacttcttggcagcctctaaatttcagacatatttatcttaaaagatattattttgtcgtcctttccgggatattaaaggaaaataggccccatcaatattaaattgaaatgtyacaatgtgtattttctgatacttgaaaaatttaacaaatctttactacgtgttcagtattgtgcttggggctgaaagaggcaccaaagtgctatgtgacacagttatctgtccaagaagaatgtgtaatctgaatacgaaacccaagcacatcttaaatctaactgctgctg

SEQ ID NO: 21876 - DNA, 548 bp, Bovine  MMBT01611; identical to SEQ ID NO: 4501

SEQ ID NO: 21877 - DNA, 600 bp, Bovine  MMBT09016
ctcgcctcagctggagaaagcccatatgctgcaacaaagaccaacgcaggcaaaaataaattaaaaaaataaccccgtccaaggcagtgctgccaaagcagctccagttatactgcttaaggaccactgagaccaggggcgggtgacaacttcctgctacaagttgcctccagttccacaggccgcccagttggtgacccaagagaccaaaggaggtaccttttaacacagcagacaccccttatctgacacagagcagagctgtggctgtttgtttcactggaaaagttggttaggagrgaatcatgaaaaagtgatacatgcataccttaaccacttcaaatgaatggagaatataccaaggaatattcattcaagagccttttgaggtaggaccaaagattctctttgattttcggtccccataatttgagtttctttcttaaataaaccacacttgaaataaaccacccagttttgacctccttaaagtacatcaagaatttaaaaaatacttttaaagcaactgtatgttgacctctttcatatttttattctttttttcatggttttttttttcaattatcttacccataccaa

SEQ ID NO: 21878 - DNA, 598 bp, Bovine  MMBT09991
  misc_feature (1)..(158): n is a, c, g, or t
nnnnnnnnnnnnnnnnnnnnnnnnnnnnnnnnnnnnnnnnnnnnnnnnnnnnnnnnnnnnnnnnnnnnnnnnnnnnnnnnnnnnnnnnnnnnnnnnnnnnnnnnnnnnnnnnnnnnnnnnnnnnnnnnnnnnnnnnnnnnnnnnnnnnnnnnnnnnnnctccaggaggtggtgaaggacagggaagcctggcgttggcatgctgcactccatgggatcgcagagttgaacacgactaagtgactgaacaataacaaatcaggttttatttgttaatatttgttacctctctgtctagctkagatgacgatgtggtgatcacgcctgtagttggatgcatagaaaagagggtgggtaatgctggaaactgctcaatgatggagtacttcagacgcgtgtggagtgtgtcaggctcatcttggtctgttgcacaaacctgtcccacggtagtacctacatacacaaaaatccyctttactttccaaaacctttacagtttcaactttccctttgactcctatctatcacaaaaaagtttcrcacgacaaaattaataataagaatagcrtttgtacattttcaggattccatataaagta

SEQ ID NO: 21879 - DNA, 600 bp, Bovine  MMBT08876
gctattttgaatactttacctatattcatttaatgcgcataatagctttatgagttagggaatgtttttatctccacttcacagacgtgaaaacttagtcactcgccaaaggtcacaaagtaaaatggctgaggaagaacccaatcatgttagctgggctccagcatctgtgttctcactcactgttctgtatctccaggtttgcctcaagactccagtgattcagtgacagctattattgtgaccatggacgcgcaatttcactccccattcaccaccgtaaatcaagttctacccagytgtatcttctattcaaaagctttcacttgttaatatgcatatcttggcagttttcatcttgactccagagcatatcacaaaaggtaattgtaattctaacagacaatttgttcttagttgatctcaacatgcagcttaaagtctgagaagtggctcaatcagataatgtacaactttaagacaataaagctcctgctgctgcatttgtaacagtgtgtttaacatttgtgattagacctcaactyccaaaattcttctgacttattctcctagtgagttcagctaacctccctttctact

SEQ ID NO: 21880 - DNA, 598 bp, Bovine  MMBT15078
  misc_feature (1)..(161): n is a, c, g, or t
nnnnnnnnnnnnnnnnnnnnnnnnnnnnnnnnnnnnnnnnnnnnnnnnnnnnnnnnnnnnnnnnnnnnnnnnnnnnnnnnnnnnnnnnnnnnnnnnnnnnnnnnnnnnnnnnnnnnnnnnnnnnnnnnnnnnnnnnnnnnnnnnnnnnnnnnnnnnnnnnngcccagaggtctcttacctactgtaagagaaagttggatgatcacttttcctttcctgacaaaaattggaggctgttcgagtgattatctgccatctgttgtctacagcagttcaattgctgaagagtcctctagaagkggggagaaagagctcattcttgacggaaggttgaatgtacattcagaggtagattcagctgagcaagtgcccggctaatcccctttgcacacagggacaaggctgccaccaactctaattgattctgaaatgaatctgtatagaaaattagaaggttttggattcccatgtgagcttcaataaagagccaggatgtaagcctgacagctgaatggattcagaaatgaaaatctgataagcggcttaaaactgtacttaagtccagaaatgatttgaatgctgttgttaatggcacatt

SEQ ID NO: 21881 - DNA, 584 bp, Bovine  MMBT15962
agatgaaggaaaacaagctgggcccttaaacttatctcactggtacttgtgaatatatacgaataaatatgggtatgtatttctgggcatgaaggaacaatggccagaactaaaacagcgcaaacctgagtactaaaatcaggcttggagaaatgtctgctcaactatgcagagcatttcatcagggttcaccagagcttttccacctcagtaatctattactctgtattcctagaatgagaacagggctcaacaggtagattagtaatctaatgttacatgttattaaggatcacaackaatttttaagcaatacctttgataaaactggtttcacattcagaaaaatttccacatgttcagtttactttcaaaaaattgaaactgcctttcataattctttgaaatatgcattttatgtcactgcaagatcacattaaactgcagtgaaataaaaaacctttaggtgaataaaaagctctgggggaaaatcagttaaatttcataggctacaaatatgaaccataaaaacaacatgctcctttatttttactttttactgtcagtagaagaaatgcagcagt

SEQ ID NO: 21882 - DNA, 600 bp, Bovine  MMBT00793
tcaatctttctttgtatatatacaagcatgtatgcatgcacacacaaattttcttccctgttggcttggcaatagttgtcatgaagttgatgttggaaaaaaaaaaaagaacatccgcttaaaagacccactccatacttaagagctgcatttcaaatgctatacaagacttggcacaagttaaaacagcaaaaaacctttaattttagtcagcgacatgactgtaccttctataaggagtcttagttaccatagctgctgtcctctacttaataagatctctaccaagcctcctagaayatttcagaaacaaaaaacttgctaaaaccaaaaacttgatggtgtattccttccctgctcagtgagtcacggatttgacctcctccaagatcaygtatgcaacggaatwttgaatcacgaatccaaagattaatgaatcaaacactgcttaagggcaacgtatgcgtccgaactcctccctacctcttctctaacatgttagatccagctggcagtctagacagcacggaaaaggctgtgtgtacttagagaaatgaggtatcactgatccacgaccacatctatcagtgccaccatggc

SEQ ID NO: 21883 - DNA, 600 bp, Bovine  MMBT14076
gtgtggggctgttggaaagaattctaagaggtcagacacagagggctcactgctcttcctgggatgtttgagagaggccttaaattaagtaaataaagaagctaatggtaaaactgtttgatttaatacataacagtgagtccttttaaaatgctgattggagaaagcacataatatagcagttttaggagagtttatcgtttgaggttctggtatagagatttgactcacaagcataaatcccagtatgtaatgagccatgtaataatagggttctgctgttaattatggtgagtactstcaacgaaatcgaattttcttagtaccacccccgaaaaaatatcctaactcagactttatataacagtcccagatacactgtaaactttgtagatatgggatattgaccgaaaaaagagagaaaacaaatcttcagtatttccagaaaatcttactcatcctcagtgcaccgtgttgtctgtgggagcctatagggatgggcagttaccttttcaggtctctgggcgccgccaaattctaaagattaatatgtgatatttcttatggacatttgaaccttaggtatagttcctggtttgc

SEQ ID NO: 21884 - DNA, 477 bp, Bovine  MMBT18483
tccgggcccatcccctgccactatttttagtggtgatctggaggaaggaggactttcctggacttgccttcagagtctggaaaacaaacaccaccccctccccaccctcrccctcccagttcccctggcaggaagcgggagcccggattcccgggcctgccactcaccctccrtgcttctgcttgagctctgagctcttcagagctgagggacgggcggcagcaacagtgtgcccctgccctcaggtaggacctcagacagcctgcracaggtcccctctgccccctacagtatctcttyttattacactgtctgcgggtgtctgatcccctcctgagggttggccttgccctccgtctcaagtgtttcccagggccccaggacttccctgatggtccagtggttaagactccgctttccaatgcatggggtgagggttcaatctctcattagggaataacgtcccacatgctgtgg

SEQ ID NO: 21885 - DNA, 600 bp, Bovine  MMBT11195
ctttaatttttgtttgtctaaggagttttttccctccaacttgatccacgagatactactctgtgcaaaatgtaattaggctaatttttatatctatttagtattttttctgggataacttgtttgtcacttaatggaatagaaatttaatcatttatttttatctgtagaaaaccaggctaagttagtgatgaagatgtctatgttagaaagcaagagctcaagtaggatcttagtctgtaagaatatttgataatgctacaaatagccagtgctaactttgtattctgggggaaaagrttttaatttggaaggacaaatatgaaagttgtgagctcggataaagtcatcttgataattaataggtatgtgtatatccacaggggctcttatatttaaaactgaatagagtgtgtttgtgagacagtgtatgtatacgtgtgaatgtgtgcacattgcaagaaatccaaagagagattacatgaatctgggaaaaatctttgaaaaagagattttggatgcagatcctgtggtatgtatatgttttaggagaacaaatgcagatgatctatgatgttgtgacaacttgagtgggtgttc

SEQ ID NO: 21886 - DNA, 600 bp, Bovine  MMBT12357
aaaaactcatcttcaccaaaagatacagatgttttccagaaaatctttttatacctagtcatyaaccataaaggttactcatttatctcaattctcctttccaaacttgcataactcacaaaaggagttactttactctcctgcctacagctgttatatctaaagcctaaaatagaccagcatgtaacartctgtaagtagatactggtagaagaaagggagaggggaagtgagggagggaggaatgggagacaaaaatgtcaaaagaaagacttcagaaaaacaagttggaagctacayaaactacaaataaatccctagtttgactgaatataattttggaarccaactgacagcaaagtgaaacacactgaatccttgaattttcatcatttatgaattccagaaatataattctcaaaagcaatggaagaaagcctcatggaagarcagaagaagaacaactacaagaggaaaagaaaacaggaagaaggaaagttagcgggaagacactgaatgagacgcgacaaccaaccaaccggaggtgggayaggrtcaagagctgcagtcacagaaagggtcacctgctcacagcaaaga

SEQ ID NO: 21887 - DNA, 600 bp, Bovine  MMBT04906
gaaaactttcaccattatttcttcaaatattctttcttcctctttccctcttttccttctgggactcccatggtgggtgttgctctacttgacttccaaaataattgcatcagacagatttttccagtgggattgttatttaggtggggagatgaattcctgatacttcttactccaccatcttcccagaatctcctccagctgccattttgaacacatatgttgtaaccggctacatgcattttcagaaatctaattcaaatttgcataaaatttgtcaatcctaatgacccattgctwcctgaggagagcaaatgaggtgacctaaaagtatgcgtttttaaaatatttgtaaaataactaaggtatcttctttatttctcacattctttcaagaagcctgtgaatttagaaaatgcagaagtagctatggtataagattccttttgatttcttgtggtcatctctaccttttcagcttgtattgttgggatggggagagactaagagatttcttcaaaggataaggacatttcctacaaaagagaccggtaaggagaacttctgtgatgtaagtttttagtacatcaagaatagaaa

SEQ ID NO: 21888 - DNA, 600 bp, Bovine  MMBT06863
aaagattgaaggcaagagaagaaaggggtaacagaggatgagatggttggatagcatcaccgactcaatggacatgagtttgagcamactgggaaatggtgaaggacagggaggcctggtgtgctgcaggtcagagtcagccaggcctgggcgactgacacgggctcccmgcacacgggarctgttcctgtgytagtgtcattactagggatagactgtggtgtgcgccaggccaggaaccgctatagaaatactgctcttgcctccgacactcggtgatgtttgttcttagcactggcrtctcatcgacagtgttatagatgggtgaaacaacggggccattgtccatagtgaggtcacatgagatcaactgtaaaaacaggagtttcagaatttttatcaagtctcgggaagaaggggaaacagctgcaggaagggaggaaagcctgagaaaaggagaagacagggtcttttgcaaaatactttgtcgcaagaggccacaagctatgtctctgactgagatttacccagctccaaacctagagggcatacagaagcagctgctttgatcagataacacaagaaaagcacatgagtata

SEQ ID NO: 21889 - DNA, 601 bp, Bovine  MMBT04580
  misc_feature (1)..(1): n is a, c, g, or t
ntgtgcctctcaccatcagtttgggggctttcaagatgcacaggtgagccatcactgcaaggaagttatgtctggtccctcccacctccggaaaggctccgaaatgtaagaaatctatagtctgattactttgggaccaggatttttttttcattttcattttgatgwattgcttaatattagacctgggagacttcgagaggtgatttcgttgcccgggacctttggggcttctatctggggagtgaaaagcgtgtgtgtggctgcttactgcccaggggcctttagatgccaactgaakttgtcgcacttggaaggggataaagccctggaacatctctccctaggatattccgctgtccccactggcagaaatgatgatcctatggcctaaaacaaagtcttatttagaaagaaatccagctacagcgtatggtcatgtgaccagcagtgtccccccgggggaaagatgctcatcagggactgtcttagttggttcaggctgctgtaccaaaagtaccttagaccaggtggctcagaaacagcagacacttctttatcatagttctgcaggcttgtccaagatcaaggagccgtcatg

SEQ ID NO: 21890 - DNA, 600 bp, Bovine  MMBT07006
ggtaagaatgattttagaattgtattcattggctttttttttttttaatttatggtgtctgtggcttgcccatttttttagtctttattttccccctctttgcatgacttcagtgacattgtgtgatttataattctttctgcattttcgtctagttgctgccattgtgttgatttggaattggagacatgcaataccatgggtgatcatgttattccattcaaacgatccaaaccatctcagtcgtgtaacacactcagtgaaatggtgtcagcaatgtaaacacaagcccacacccaytggrtcaccgttagttcctccacatgcttacaacatagaaaaatacrtcrgaccracacttccttttaatatgcccctaatttgggggtggggggagatatgtatcttctggtgatattctgatttatgcaaaggaatgagcaatctaaaggaatccctagattcgaaatggagacctgtttctgatgcagaggactgtaggcccctgtccttttctcccacarcccatgctaactcatctgagagaggccagggtcattgttccagccagtggggctgtatatattggagttcacaccg

SEQ ID NO: 21891 - DNA, 600 bp, Bovine  MMBT16364
actaaggttatctgattaacttctacaccttggtacaatccatataatatggtgaaattgaagtgaattattgaatagttaagtgaataatgcatttacctctgaaatcaaaccttcaaagacttctgttcaaattttgcaattctaatttcttccagaaataccatttccttacgacatatttatgacaaaacatgaaaattttaagctgaggaataacaaatttgttttcctaagataattaatattaaaaaagaaaaaaataacaaatttcaatttaccttgtgcctgctaaagaarttagaagatatgaagtggtcatcattcaaacacaaaggtgaagaattaaatacaatacaagaaataaagttacttaaattttcttccttaaatcagattattttcttctaaaaagtttctgagatcataccaatcaatttgtcatgttttctctaaagactaatcattcagactttatcttttactcacacacttagaaatgccattcacctcaaaatgatacattaacatatttttcaaagacatattcmcagatatgcataatgtgacttattagcataatccacctgcttataacat

SEQ ID NO: 21892 - DNA, 600 bp, Bovine  MMBT13334
ataacagtacatcccattttaaggaatccccaaaggtgtccagagagagatcagtgagtctgccttgacaatttctttgttcaaagcacaccttaaactatactgggcacacactgagattgctttcagcttttcagtagcgctacagctgatttccagtcgttacagacttgggagtttttcgtgatccctgtaaaaatagttcatcgttgccaatcatttccttgtcataaacaggtcttgccgattggtttaaaatgtaatatagggcttccctggtggctcagtagtaaaaaaaamatccacttgccagtgcagggaacgctcactggcccttgatcratcctgatccgggaagatcccacgtgccgyagagcaactaagcccccgtgccacagctgttgagcctgtgctctggagcccaggaaccacaactactgagcccacaagtcgaaagcactggagcccacgcaccctgyaggccatgctacgcaacaggagaagcctccgcaatgagaagcccctgcaccgcaactagagcgtagcccgctcggccgcacctagagagacgcccgtgcagcagtgaggacagcggacagc

SEQ ID NO: 21893 - DNA, 600 bp, Bovine  MMBT06860
gcacgtggcacaatgagatgaaggactggtaacttctaaagcacgtggacgataccaaaaggagacagtgcttgcagtctgagcacagccaccacagtgatgagggcacagttacctctgacagtcacaggaaaacaggaagtgtcccaaaaattggggccaagggaagaaggataggatgagtgatgggcaccaggagaaaaacatgaaatgcttaaaaacaaactgtctagtgcctactttggcagagggctggccctgatgtgaagggtggctcaaaaggaaatgactgcccgacayaggagtaaagaataccaattattttcctcttaagtagggccagaccaactcagcagaaaaccagaggatgggcactgctttcctggaaggaagctgatggtgctgatgccatcggctgggttgactaaggagacatgatccaggagccacccagctgaaggctggtataccacagacagacatgcttctaagacctgcggcaattaggaattcaaggttagccccaacttttcagatgaagccttctaattttccttttccctcccccgagcttcttccaggaaacctgccttgtcctct

SEQ ID NO: 21894 - DNA, 600 bp, Bovine  MMBT05415
ttgcatacaggataatctggagaggagacaggcaattttacagctctgtaaaagtgcctttgaaagtcaaaacatttttaagtctttgtagagctaaactgaagaactcccaacaaaacattttctttctttcctctcaaaggaatgctgacatggcaagaaaaatagtttcaccatgtgtttgtactttcttttataaggagtataaaagaattgctatactcttttaatctgagcagctcagtctacagaaactttaacttctatctagaaattttactgtgggaagctttcctctcracatgcatactagatattttttcttgatgccttaataattcatctccagtttggtgatttttatcttaacatggagaaattgatgagggctccctgcctaygaattcaaataactaaaagttgaaagctaaaatctttaagattagaggaactatggttatttagtgaagactagagaataacttaaaastttcccctcagtggacatagttgtatcttattacatagcttttaatctcttactaaggataagcaagaataaacacatttgttttgaaatatggtttcaaggggagccca

SEQ ID NO: 21895 - DNA, 600 bp, Bovine  MMBT12921
aagaactcccaacaaaacattttctttctttcctctcaaaggaatgctgacatggcaagaaaaatagtttcaccatgtgtttgtactttcttttataaggagtataaaagaattgctatactcttttaatctgagcagctcagtctacagaaactttaacttctatctagaaattttactgtgggaagctttcctctcracatgcatactagatattttttcttgatgccttaataattcatctccagtttggtgatttttatcttaacatggagaaattgatgagggctccctgcctaygaattcaaataactaaaagttgaaagctaaaatctttaagattagaggaactatggttatttagtgaagactagagaataacttaaaastttcccctcagtggacatagttgtatcttattacatagcttttaatctcttactaaggataagcaagaataaacacatttgttttgaaatatggtttcaaggggagcccagaaagaattttttatacagtggagcagrtattaaggaacgtgatagactttcctagaagagttttgctaaggttatggaggtccactttgagtttaggcaa

SEQ ID NO: 21896 - DNA, 598 bp, Bovine  MMBT20689
  misc_feature (1)..(78): n is a, c, g, or t
nnnnnnnnnnnnnnnnnnnnnnnnnnnnnnnnnnnnnnnnnnnnnnnnnnnnnnnnnnnnnnnnnnnnnnnnnnnnnntctgtggtcactgtttatatttccagtgcaactcatttttatcttattaccctttggcaggtggtccattttcacctcatttttgaaactaattgaattgtgttcactgaattagtaagaggacaccatattacaatcaaaacatacaaaatcattttatccagttaaactatcaatagattattataattatacaaacactcctgctgatctaaatttttrtttcatagctggaagtatttaacccaatatcagtgcatcactttaactgggcaaattcttatactcagtaatctgttttgaccattctcattcctattcttctttcatcccttctaccatgtttcatttgactagggctaaattaacatgatttattgctattcaagtagaaattttacatcacctctgtagacagagcagctgaggtcctgcatataaaacagacaactggcttacatgtaaggttaaagtaatgaaatatggatcacaagtagtaatagctatatatgtgtgagaa

SEQ ID NO: 21897 - DNA, 600 bp, Bovine  MMBT09376
attttcaccttcataaagatgtagggatcaaatgggttggcatttatgaatgcccctagcaaagggccagttagtggcacccaatggcaaagggctcaccttgacttactttgaaaagtttggattttggcaaactaggaagacaagataccaaaaaagggggraaaaagcacaatccagcttccaattcagaccttctcagccgtttaaastaaacagctctcatgagtaattaccagagggaatgtgaacgggccatggagaccctagtcaggagggaatgaacaaaaaatctccaaratacaaaaagctgagaagccrtggtgatcaaagacaattttaaagacataggactcaaggtaaaactagtttaaaaggactgctttgtcagctccagcatatcttcaactggatgttgacaattacacagcttttttcattctagcataaaatttcaggcaattaaataaatgaattactgtgttggccacatccatctctgaagcccgtattcccttggggcagctcagacagtcctagaatttttgacataygcagtgaattgctcaaaaaaaattttttttwaaatgaagtattaat

SEQ ID NO: 21898 - DNA, 600 bp, Bovine  MMBT16830
aatttggaagctttattattagcttaggccattttcaactctcacgtgaataagagatggagaaaagttattagaatctatttttttttwaaactactgctcttaggagtgacgtcaaactaaacacaaaggtaggtactgagacaaaggtgtcggggctctttctttctgagtggtaaaatgacgtgggtctccctcatctttaccaaggcaggcaggcttcaatatgactcaaaataaatgttgatataggtataaaacttgaagtatttgacactcaggtaacaggaatcctttggkgttaaggagtaaaaaactattctgacaagtgaaaatggagcattggttggaattctaaggggatagttcacagaatccaaggataggaggtagaaccagaaacagatgttacggaaaccacacaactgctaacatctctgatttctaaatgtgcactgggctccttttgctttctccatagggcagctgttttctggaatatatctacacacagcagccatgtcgccgccgtgttaccgagtttactaggtccttcagttcaagggagcagaaagaccacctactgtttctttgtctttt

SEQ ID NO: 21899 - DNA, 600 bp, Bovine  MMBT09945
aacactgtcctctcaaaggatcctcaaaaagcaagcaatctagaacacaatcgccaagatttacgagtcgcaggaagtatgctagggacttcaaaataaaataaattctactgcttattttggctgtgtatttatattcttttcagactccagacagatggttccccagtaagaaaaatttcctcctggattcatctctggacagtcactctagccggctcccctgggccacctggggctggaatgtactgagactatggaaactaatatctaaattaggtgcaaacaaatttaacctasagggaactcaactttatagtaatgatatttagcattttcagtattaagggtttttctggtgagtgagacagtgaagaatctgcctgcaatgcaggagacctgggttcaatatctgggttgggaagatcccctggaggaaggcatggcaacccactccagtattcctgcctggagaattccatggacagaggagcctggcaggctacagtacatggagtcacaaagagttggatatgactgagtgactaacgctttcacactttcattttccaagctccccaaaaataatgctcagagaat

SEQ ID NO: 21900 - DNA, 600 bp, Bovine  MMBT12882
ggcctgggtttggggcttcctaagatcttatttagctacatgtgcactgtgacattaggacttctttctaagaacaacttactttcttgtcctttcctctgaagtatgaacctgattaatcacagaagcttacatggtgttttattgaaaactcctttcaagatggatacaacttggaaagtttatcatgaaactggagaattatattcacaatctggagaatgtcaacccctctcagtaaaaaagtgaaagtcgctcagccctcctctgtccatgggattctctagacaagaatgtggragggratagccattcctccctccaggggatcttccagacccaggaatcaaacstgggtctcctgcattgcaggcagaatcttaaccatctgaaccaccagcaaaagcctgccctaaaagctccccaggtctgactcaactcccaggaaggacagcacaaagaaaggaaatcaaacctcccgttgatgaacagggggtggaagggyggtcctccagtttcagtggccactgctatcaccctgctcagaggagagcactgcgcaatgggtacgtcttgtttataaatgataatcggtggctt

SEQ ID NO: 21901 - DNA, 600 bp, Bovine  MMBT11101
gaacaaacttaatgagatrggcaatctggtcctctctttgtaaaaagtagtgggaaagtcagaggaattgtttatgaaaatgctatatgaaaatattcctttagctaaccctgcaggggaaatcatagtgcaatacataaaagtatcaaatcaatgcagttgtgcacctcacatttacacaacaatatgtgttgattacattccagtaaaaaaactgaaaaagaaaagaaaagaaaaccttccaaacactggttgagaggccatctcagactggggcaagggtctaagtaaaagcagtaytgaacaggtggcccattagaaaatcctttacttatgatcaaagctactaggtaactaagataaatattagatgtttggcgtggctagataagacactgamgatgcatgtataactgaaaaattgaggagcaataattgatgcttgttgtatctgaaaagcagatcagtttgggtccaactgtaccgctggcttcagtatttggaggtaaaacccctttactagaatagaagaatatattcacagcagtgctcaaaaacaaagattatacacaccaaatagatggaaatgactcaaaaatt

SEQ ID NO: 21902 - DNA, 598 bp, Bovine  MMBT22618
  misc_feature (1)..(129): n is a, c, g, or t
nnnnnnnnnnnnnnnnnnnnnnnnnnnnnnnnnnnnnnnnnnnnnnnnnnnnnnnnnnnnnnnnnnnnnnnnnnnnnnnnnnnnnnnnnnnnnnnnnnnnnnnnnnnnnnnnnnnnnnnnnnnnnnnnnaagagaagtgaaaaggaaaggagaaaggaaaaatatacccaaatgaatgtagagttcaagagaatagmaaggagggataaaaatacttttttttttwaaattaacaaagcaaaaaatagaggaaaacaatagaatgcaaaaaactagagatctcatcaagaaaattggagmtatcaagggaatatttcatgacaggatggggcaataaaggacagaatctaacagaagcagaaaagtttaaaaagaggtgtcaaggatacacagatgaagcatacaaaaagtcttattgacctagacaaccacgatgttgtggtcactcacctagagacagacrtattagagtgtgatatcatgtggaccttaagcatctttactacaaagctagtggaggtgatggaattctagctgagccaytgaaaatcccaaaagatgatgccgtgaaagtgctgcacacaatatgtccatatat

SEQ ID NO: 21903 - DNA, 598 bp, Bovine  MMBT00644
  misc_feature (1)..(13): n is a, c, g, or t
nnnnnnnnnnnnnatctgctttccctaaattactatgctttcaccaaccaagccatatatcttctaacattttattttaaaatatcttgtattattccctcatggccagttcagcttaagtgaacagtaaacttctataggtaagggactcagaaaaacttgggtactaactctagctctggatgtactggccatgtaccttttgtttcttcatcagtaaaatggaataatgccacctattatggcagatctggaagttaaattagagaataatacatataaaacagctagcacagtgaytggcactgagcaaacatttagtaggcttttttctgtcacccctcctctttcacttcctattgaagccagaatttcagaaaagagaggaattatccaaaaggaattccttatgtctctgtttctctttccttgactatttagactgaaggaatacctcatttatctagttctaaaggtaaggcaatttctggcagatattcatctccttttggcttattgaagaagcacacttcaggaagcctggggaggctcccacagggacttgctaaaattttctgaacatgttcaggcattagat

SEQ ID NO: 21904 - DNA, 600 bp, Bovine  MMBT02749
tcctttttcttataattctttggaggagggaaaagcccccatttctgataactcagtaactggcagtgagtagaaatcttttaaagtcataattggtaatgaattagtttcataaaactttccctttgaagaaataaaaatccagtttctacaaaatgttgtatctgtgtatacagagagtacctcactagatagaagtgagggggtgtttttcttatttttaaatttctgccactcctcttgttcttccctttctcagtttcttctttgacttgagacaggcacccagagggaacttgsggccagctaaaagcattgcagcactctggtctgattgccccaagggtggygaggcacccagcaggtaccctccagcatttccaaagtgcctccatccccattcctttggaccctgacacacgtgtcatttgcacatcttattctggtctccactgacctcctgattttttattcttgtctttctgcctcctttggtttctctctggctatttggtcttttagagatattgaaagtcaattaggattttccaagtctacactgtgaatgaaagaattaccgggtattgagtatgaccttga

SEQ ID NO: 21905 - DNA, 600 bp, Bovine  MMBT04096
aacccatagttctccagggtttgcaatcacaccatatcaaactagaaaatgagtgcaagaatgttgttttcttagtggagaaatttcactataaattctcatggcatctgagatctccaaagatggagtccaatattaattgatatagtgactacagtcagccctccatatgcttgggttccatatccacaaaaatcgatcctcggttggttgaattcatgaatgcagaaaccatggataaaaaggactgactttacaacttcattttatgtaagacacttgagctttcacagactttgktatctgtggtaattcctagcacaaatccctcatggattccaawgtgttagtctcttgatcttgtccagctgtttgtgatcccatggactatagcccaccaggctcctctgtccatggaattctccagcaagaatactggagtggatagccatttcctcctccaggggatcttcccgaaccagggattgaatccgcgtctcctgcattgcaggcagactctttaccatctgagccaccctccaaggatgactgtatttctcctgcagagtcacttaagaggttaagaatttaccatagtcc

SEQ ID NO: 21906 - DNA, 600 bp, Bovine  MMBT09262
aatattcaggactgatttcctttaggattgactggtttgatctccttgctgtccaggggactcgctccaaagtaaccatgaggaaatctcccttttgcccttcacatgcttccacctacctgttagagcagaacgcaggtgctgctgctgaggtgtcacctgtgtgacgagtgatggacatgccaaggcctactctcacaccaggcaggtcatctgtaagtatgccagggtgcagaagtaggtggaaatcagtactccacagcctgacctcttctgatgctcttgagaagctgtgaggcrtggtgcaaaggcccttgcctggacaccggtgtcctgcataactgggcaagtcagtcaccctctctggacttcgtttttctgattgtaatattgagtcgttggaccaacgttcatctctgcgctgcgatattaaggcttcctttccatccagttagtccttgggactgcctgcctttctgagccttttcccagtctattcttgcccctactcgtcccttacccaatccctccccaaagaccacttaattcacagtaatttcttcctcgccctcctaaggcggggagtacttgtggtctgtg

SEQ ID NO: 21907 - DNA, 554 bp, Bovine  MMBT08123
gggaagcccgtgaaaaagcataagcacttttaattggtgcatgatttgtgtagttggattttagaattcacttagtgaaaagaagtaacagatgaggttggggtgatagggtggggccaaataacagagggacctgaatgctttattagggcacttggactgtgttcttgaaagcactgaggaaccagtaggtcttaatagaccaagtgatctgaattagatttataatttgtcccagtgagatgtccatatgaaccaaccttcraataattactcaggtctggcaatctatatatctcwaaataattgtcagttgcatttttcttttcttgcatttagtggtttggcattgcatgtgccaaccatgcagatgaccaactgaaaggtttagtttatatccagatgtcttcagtgttgtatagacaatcacaaacattgaaagaaaaaatattccgtgagggtgaaagtccctgtaccatgcttcccaaataaatctttgtggagggtatcactaatagcagttccactctgtctaaacacagttattaagatca

SEQ ID NO: 21908 - DNA, 600 bp, Bovine  MMBT08094
aatggaaacaaatgttgcagaagccagagaacatcacagtcaccagctttaaccaaaatctaaaggtctttgggatgaaaggggctgaacagtgaagactcctcaacatcaatttaccgtgtgacttggacaattttcaagtacgttctgtggtagactatagctgaggacaagtcttcggaattcagacaattgaaacagagactgaaataaagaaggaaatggattaatagcctttctttcaaaataactgcagcaaaaaaatattttttatcttaaaaatatgtgtataacccattracttggtaattctattctaaggaaataatggctatgtataaaaatttacaaggaagaatattaatcctttttagagaaaaactagaagcaacctaatggctaataggaaaagattacataaactacagtgcacctgcacagcagattattatacagtcattaatactgtagaaacaacgttttcataaaacrgacacgtacacagtaaaaacgaaggctccaaagtgacatgtatcaacatggatgcgtctcagaaacatcccgtgtagaaaagtaagagtatatgctgtgtacatgaag

SEQ ID NO: 21909 - DNA, 600 bp, Bovine  MMBT12063
gacaattatatctacacaataagatattcttccaagtgcatttcatacaagcagggccactgggaatggttgggcaggttgtacacttaacaaagtattaatattactacttagcagtatgcagcaaccatgcccaaggggaactccatctcagactgtgtgctttctagagtgggagagtacagctgacctgtgcctttgacccttttttgtttcaacaatcaaacagtaattattcttcattttcactcattattccttatttcacatggcccaactcacctaaatcctccaaacaaytcccttgaaatgcatggcacacaaaagaaggccagagccaggaacagaacgggtgtgaaacctcagccttycggctggttggatttgaaacttttctatctacttcctgagtctgtactgaccatctgaggactccatctgtctcctcctaggccctgcaaccctgggttatgattcttgctaacaattgattgccatgattccatttcaacaacaatgatctggagttttactttgagtgtttaagaatccttcattatctcctaatggcataatagcaaacacactttaaccactaaa

SEQ ID NO: 21910 - DNA, 600 bp, Bovine  MMBT12381
tttacagagcctacttgatggtctcttcatgtataaccattgctgctcatatttggaaatatagggctccctataagtcacctgaatgtttgtggtggtaagatgtatcagaatccccctggaccctaattgttttataattgtcaaaaaagttargcaatttggatttgttgttatgaatgtttatgaaatgtttctctccctttcttttagtttggtagaacacttatttctaaatttgatataatgtgatttataataaacaggaaaagaatcattctcaatattattgtcaagatyaaatagccatagtgctagcaactatgaagacaattatatgaaacaaataattttctgaaaataatttttggcagtaacatggggaaataagaaaatagtttagcaaagggaaaaacttttgtatccataatctacttctacttacatttattaaatttgctacattgtgaaatggaatgtatctctattattaacatcaaggagacatttgttatacaatgacatcctaaaagaatgagttctaaattatttaaaggagacaaaatgctatttctgaacaccacatgaatacataaatgg

SEQ ID NO: 21911 - DNA, 600 bp, Bovine  MMBT07964
tttcttttttctaaataattaaaaatacaggtaaatttatgaatataaaagytatgactgaataacaacatgcacaatatttcatatgtgagtggtttaaagcactttaatactcatgtaacttatagatctcttgagtgatttaattatcagcatctgtcattttaatggaatgaatacagatgtaagcaaaatgcagattagaaataaatctaaagtctgggaacagttctttctaaaagacactataaaatatctcaggcctctttcctgataccacaatgcaatatgacacaagtyaataacaaaaaaaaggggtttccttggtgtttcagtggttaagaacctgccttgtaaggcaaggaacactggttcaatctctggtcccttcatgcctcagagcagctaagtttatgcgccacaactactgagccatgctctggagcccacaagccacagatactgaagcccatgtgccttagagcccgtgctccgcaacaagagagggcaccacgatgagaggcctgcacagcgcagcgagtgagtagccctggctcgctgcagctagagaaagcctgcacacaggaaggaagacacacc

SEQ ID NO: 21912 - DNA, 600 bp, Bovine  MMBT03928
cttttttgcactggaaaaccaaaaaaaatgtgtgagcctcactttaatgacatcttgtctttattgcggtgatctggaatcaaacctgctttatctccaaggtctgcctgtataatttaaatattagaagagtctcacttcagaactgggtcctttaaaccaagagctttgggttaaggccgtgttcatactacaggacgtgaagaataaaaagggcacatttataaataggctggttgtcaagctcctccctctctggaactttactactgttcttctctgacattttgtcaaattctkatgttaggctctcatgaaagctgttggaacattggaggaagggggacctgtgtagkgtgacatgtgcctggcaactgaagcttataaatcaagctgaaacctggtgaatctacaagatttatggctcatgggaaaatatgctaactcaactgcaaattgataccacaccaaactggcctccgtcttcttacataacaccgctcaaattgtcaggccgtctttgggggaatttattgcagcacgttcgatggaaacagagtctctggccacttgactgagccctttcagaccagctcgaaa

SEQ ID NO: 21913 - DNA, 600 bp, Bovine  MMBT12331
tttttttaagttgttttttaaagaaagataaatcaaatcctataaaaattcaagatccatgataaagctaagctcatgtttggatctgaattagaagaaactcttggaacctcagtggcagattttgtggctcttcatgtaaggatttctcccttttcttgattaatttatcacatatccacctgggccagaaagccaggggtataatttgttacaaaaagttgcctgccaatactgtatcagttgatagaaagtaatttataaaataaatcttcaaaggtgccagaggttattccctaygtctgggaatttggaggtagcattagagaaaaactgtatttaaattaagaaggacagtataaggggtgtggtctttctttagaaagatatggaaaggtaacagacaaagagcaattatcaaagattaaagtggtggatttatgatagtgaaaacagactcccatattctgaaacaaaattccaatacaaagatcatggtagtgccacattcacagttgttggttagctctgtgtgtgtatgtgtgtgtatgggcaaaccccactaatttccaacatactcatggtccctgttctcttgtc

SEQ ID NO: 21914 - DNA, 600 bp, Bovine  MMBT08783
gaaactgagctatcattggaagttcatttatctaaacgcccactagattgtgaggtccttgagatctcaaataatgtcatgctccatgggtgcccaataagtgtttattaagtaagtaaatgaaattgtacctagtaactatgtgagctgagaaacagtaatagaaatagtggtctacaagaaatgtacccaatttacccaagagttggaaaaatgtaggtagtgtgcccaaaaacaccaagaccatgtggaactcagcgtccaccctacaaaaattttaagaaggaaaatgatcttggkgtttatgcccrcctaaattaagcataattaatgagataaactacaacaaaagttttctcttaaggcactccaaagcaaagtcagaccaaataatgtttaattgcctgggtgttttattcaaacaacgtcattaacaccacttgaattgcaacttctgggatcataaactttatgtatacctgtcatcaaagtccttgaggggctcctagttkaaatgcgtttcactacacaatgattatatgatattaaagaaaggaatgagttacttttcagttgctgaaggataaaaaaggttgttgg

SEQ ID NO: 21915 - DNA, 600 bp, Bovine  MMBT13417
tacagttctaaatcgttaggatcccaaaatgccaaaattgtaaccaaaaaataatttgaygtttatagctaaattgaattgagtgctaagtgaaacaggataagccccatttagcactgtggaaaacatgatttcagaaaaagagggagtataatttgctgctgcttgtttttcaggctgtcagaatcatgtcttcctggcaaggcagtgttggccagtggtcaggatgagggtggctttggagccaagcagagtcaggttcagtctgtacaggcgtggctgtgtggctttggacaagtyrtttacgctctgtgagtgttttcctyttccttgttaggcagttgatagtggtccctataccaccaggtctctgccaagaaaagtaagacagtacacttgacaagcaggtggcatgccgcccgatacactgtgagccaacagacagyagggttaggagggagatgtgcagctgatgaaggtaacaggacatggatagtgttggtggcggtaccttgcttcagccccaaatcaagacgccagagcatatgttatttaatggcttatggtaactcttcccataaggaaaacaagaatcataaa

SEQ ID NO: 21916 - DNA, 600 bp, Bovine  MMBT13081
gcattagggtcttttccaatgaggtgactctttgcatcaggtggccaaagtattggagcttcagcttcaggatcagtccttgcaatcaatattcaggactgatttcctttaggatggactggttggatctccttgcagtccaagggactctcaagaatcttctccagcatgacaatttgaaagcatttattcttyagcactcaggcttatttatggtccattttagacaagttatttaatcttatgtatcttaactttcatcatccataaatgggtctaatgttaggagttactttgtakagctatcatgcctgacacataacaaattctcagtaaamtagtaactcattggcttgaattcaagctcgtcatcttccagatggggaagctgatccagaggatgaactgagttggcagagcaaggactgtgtgtgtgtgtgtgtgtgtgtgtatgttatttgctcagtcatgtccaactctttgtgaccccatagactgtagcctaccaggctcctctgtccatggaattatccaggcaagaatactggagtgaattgccrytcctttctccaggggatcttcccaacccaggaaatgcac

SEQ ID NO: 21917 - DNA, 600 bp, Bovine  MMBT11235
ctcattcatatttatttatttattgacttttatgaagtctccctgccatccaatccctcttgcctatgttgtcctgaccatccccaccccacccccagccatccagctgtctgtgcagctgtctgtctatctgtcacaaggaaaataaaaacagcaagcagcaggacctatgtgtgtggtctatggggagggatgactggggggtacagcgcgtacacaatgccagggtactgggacggggcattccagccttttctggaccagtgagaaccgaggtataccacctagcaccttaggacyttcctcccctgccctctgaccctcctggcccctcacctgtcccttatttcttgagaaaggaaagatgtgggtgtgtttctccctctaaagtttctgaaatcctggcaggaccactgaatccccacccccagcctctaactatatgggtggccccgacttcttctcacatgttccatcatcgcaatgggaggatgctgggctctggaagggaccagcccacacccccatcctggctcagccttcttcactctgttcaggggacagggcagctctgtcctgacccctggagcagagggggtt

SEQ ID NO: 21918 - DNA, 600 bp, Bovine  MMBT06250
tacctctatgaactcttgactacttttaaggataactgtgcccttcttggcgtaaatcacaacacaagaatgaaatcctcatgtggatatatcatgagaaaaaaartttgtatcttcatcatgggagcagtttagttcaaacttggcaaccttcttcgtaaatgtttatgaaatccttttggtcaagaccaaaatagaaatcaaaacttattatcctttcccccgaaaccaaaagagtgacattatttaaagtttaagttttaaaccaacacaaagataaataaaaacttttaaagtcamgatggtaactgacgaccggtgcttcacattataaatagtagaaaggttcgtaggaactcatgcactttttttttaatggctcaagtctcaatctgacagataatgtaaaatagacaagatcttcccttctcccttccaaaaagtaggaaagccaaaacttgaaaggattaacagcccttgcttttatacagtgttgtccataagaagccacactcaccttggagatttacctgcacaaaagcatcattgcctttctcagaagggcactgccatatcttctgtggtttcataaagccctat

SEQ ID NO: 21919 - DNA, 600 bp, Bovine  MMBT12449
agccacaggtatacatacggcccctgtctcttgaagctgcctcccatctctctccatcccacccctctgcttatctgtctttgggtccttggaggtgattcaaacagacttcattgccagtgaaccacattgttggtttacatttcccagaagtcatgtgtggtacatattatcttcaacccatatttaaaaatttacagtaaactagggacaattctaaaagaatccagcaaaataatggcactagatataggtcagtttcaagttacctaattatggtgtacaggactatattggacygtgtgcctctgcctcctagaatgatgaatttgctattaagrggaatgtcttagactgtatatattccctgaaatataatcctgtgattgggacactggggattgtatcatggggagtttcctggtatgcagaattcttacaagaaacactatatttgtagggttggccaacatgatgccttcttatttattatttagtattaccatgataaatagtaacatttatataatactttttatttaaaattattgcactaacattattttctactttgatttcccaaataatcctgtgaggtaa

SEQ ID NO: 21920 - DNA, 600 bp, Bovine  MMBT09649; identical to SEQ ID NO: 4699

SEQ ID NO: 21921 - DNA, 600 bp, Bovine  MMBT01660
agttaagctgaaatttaattcaagactatattttatgtaatcccacatatcaaaaatactatgcttttaaaatgattamtgaaatatcatacattcttttycraattaactctcaaagtccagtgtgtcctttactcttatcacttatctcaattataatttttcatcctttaaatctacattttgatatttatttaggttacaattgaaaaaggagacttmcattcctaccttgttccaaatattcttattcctataactgagtcagttttcagttcttaaaattttatttcaattaamtragtaaagtataattaaatgtttggtttacatgtgactagaggtgtgtactggatactgtggatatcgaagaatgaggagcagactcaccctggggagttggagtgaaattaggaggtgatctactgcactgaagaagcctaactggaaaactttctttatctcctccaccattagacaggtgagagatattccctaaatcaaaactttagtagcaagatggaatatgggttattcatttacctactaaattattgttattttattttagctcttcccacaacttmtaagttctaggac

SEQ ID NO: 21922 - DNA, 600 bp, Bovine  MMBT05406
cgggcagccgagttgctcccacagaagcctgcaaagcctgccagtgcatactgagtaaatcagggcaaaggcgtgaaccgagtataatggaaaaaacccaaagcctgtcgccagggcacctcggcgaaagggcaggacgcacctcgccaggctcccgtggctcccgccccgttcgacctccgctcgccgagagacagccaggtctgttgtgaacgcctccagtcgccagtgcgtgtttcccagctcacaatggagcgcttgtgccgccttcgttttcactttcaccagcgagggaagcgragcacaatggggcagtrcccacggcttgggaacaggacacgtttttccttagggttcccagggctggggacgtggaaaaggccagagccaagacaaacacgcgaagcyrgccagatcctccgttacgctttctcagtggcaatcaaacacatttccagttaccatctgatgggtagtctctgcctgtggggtaaaggcagatgctgttgaccacggtgagcaccttccctgaagaaagagcctgtattcctcaccgtacaggatgccgccgtggcgtgcctgcgggtgcctatcgcatcg

SEQ ID NO: 21923 - DNA, 600 bp, Bovine  MMBT10498
gaaaaaaaaccccacccatttcatttggactgtgtactaagaataattgccaccaatattgattggcccttggggacccagctgaatttaaaaattgcagactgtgaaatcccagctgatatagcctcgtggagcttgctgcttatttgtgacatgttcctatgtttaaacttacccacaaaaactgtgaaattaatatcctcacgttgagtacaatatggtgacacacccagctgacatgcgcagctatttttgttcctattgttttcatgctggcttctgtctgtaaacacagcagayctttctgatgatgaagcataagtccatttgtttcctggagtctccttttccraccattttcaggggttgggccaacacgtgaagtttttcagtttctttggctgcacrtttcgctgtaatgagtcaacgcagcagggtctcccrgtggcctctggcctggggtgaactgactgcgctggccccattcagcttctccttggctatgcctrcctctagcacaggcagcttgaagctagacattcctgttaaaagcaggggggaagatgtgttagtttgcctaaatccacgtaatgaaggatg

SEQ ID NO: 21924 - DNA, 600 bp, Bovine  MMBT09714
ataaaaaacaaagctctgtgtctcccccggccccttaggagtctgggcgctgaaagaagacccagcctgtggatctgatgcctggagccccgagggggacgggctgcgcatgctctctgcgcactggcagcttggcgcttagcctctgcgcatgctctctgagtcccgcccgccccttgcctctgcgcctctgcacctagtgctgccgtctccccaggccccctctgttctgtgattacttcccttccttggctttctctgcggggtggagcctcgttttatgacccctgtaaaacgctrggagctgttgacttcttcctctgggtttctgagatacctgcagcagctgggaagagagcagtgaggaaggaaagagcaggccaaccttcccaggttcccccagcccctcaccccagccctcagcagggagatgtggcctgatcccaagacttggcaaggcagccacacacatttgcagagtgacaaaaggagaggaggggcctaagaggaaaacagctttcacatgtgtaaatgcctggaaaagttttttggattcattattctactctgggtgattttcaagagcaacagagcttgggg

SEQ ID NO: 21925 - DNA, 600 bp, Bovine  MMBT11723
gtaaggaaacaacttgaagttgctccatctgcatggtgccttttacctttagaaaaccagagtaaagcaatcctgactyacccctgggagtgaacagtgctgacctgtcttctgctgtagttccactcttgagctcacattggttgtctcactttggtttaaaaatctcaattagaaaagcagtctagcttaccagttaagaatagggccactgtgtcaatctcatcttcagatttttgtttgccactgaggaaccctgtaataccggacatatcacctaactttagtgctttcgtttgsttatagaattgttaagagtagatgatgataacatgaaaagcacaagtcaggcacctcataagcattcaagttgtcatcgtctttttttctctcagttgttgaaaactcatagaggcattttttagaattttagtagtttgtgggaatttttctttttttttaatttcattttaggcacgtttaaggcctgtgttcctaattctgccrttctctttttgccatttgaaggaagagccctagactggatgtgttgatcaataatgcttggggtcttccagtgcccttatatgaagactgaag

SEQ ID NO: 21926 - DNA, 600 bp, Bovine  MMBT10510
ggaggtggggtaaggtgggaggagtcaggaaaggtactcaattgcttgagagaatgtcatggtttcctactggcgcacagcaaagcaaccccacactgagcagcccaagggcttctcaggtggcactagtggtaaagaagcggtctgccaatgcaggagataagagatgtgggtttgatccctaggtcgggaagatcccctggagaaaggcatggcaacccacttcagtaatcttgccatggacagaggggcctggtgggctacagttcacagggttgcaaagagtcggtcggacacaamtgaagtgactagcatacatgaacagcttaaaactacacacagcaaccgtctcctagtttctgggaatcaagagtctgggagtggctcagttggctacttttagctcaatagccccaggtgtcagctasggaatggtcatcgcaaggcttgactggggagggttcccttccaagctyactttcatgggcgccgggaggtctcagcttcccatgaaagcgaacaatctttttctgccatgtgggcctccccatcggactagtcactgcccattagcttgctcctcccttagtgacaactcca

SEQ ID NO: 21927 - DNA, 600 bp, Bovine  MMBT13074
tattgctacccattgattctcatgctttacttgtaataggacttgtcttattatgggcattttgatacatttaagcttattaaaaggtaaaggaaaacaatgtctgaaataacaggttcattaagcaagaaaatgagaaccataaacaaggcaaaggatattaaactattttgcttttcattgaacttgcgaattctgtagaaggcaatgctgggcttagtgagaagtaattcaaaaagtaaattattttagtaatggactggtcgactgacactattttctagctgtactgcactaaaygtcatttaactgttctaatgaatgtttatgccacaggtacaactgacaagcagttctctatgtgtatgtatgtgtgtgtgtgctcagtcatgtctcagtcgtgtccttctctttgtgacgccgtggactgtatgtagcctgccaggttgctctgcccataggattctccaggcaagaatactggagtagagtgccattcccttctctaggggatcttcctgacccagggatctaaccagtgtgtatgtactctgtctcctgaattagcaggagggttctttaccactagtgccacctggg

SEQ ID NO: 21928 - DNA, 600 bp, Bovine  MMBT09492
cctgttattctctcaatcccttaggcaacaactctttcactttggcatgtgttaaaaggagtgtaatttattgtttgatccctaagaaacactggaagtataaaatatggttacaaatttttaacagtacatagataaatatatacccatatcatacacacacacacacatgcatatatttacataaatgggttcatatactatataatctggtattccagttttttaaaattagtattgttcttttctacaaagtaaaaacagacctagaatgaactagatgttaatcagtgccagagratgagtgcttaatccaattaagaggtctccttaccatatttaaaactaacatggattcacctgatgaaggtagctcccaattttttgttatttcaaaaccaattcagtaacaaccttttgtcagtgtagtattacttctgcaggataatttcccagacttgatagagtcaaagagaatatatattttctttcaaacataatgccaggttggtcaccctccagaaataatggaccaattacatgtacattaacagtgcagaggacatttttgtcactctcttgggtcacaatgatatttca

SEQ ID NO: 21929 - DNA, 600 bp, Bovine  MMBT02739
gctggtcacctgaacctctcaccgcattgttaatcggccataccccagtgcaaaataaaagttcaaaaggaaaaaaaaaatagtgctaggtaagccttaaaaaaaaaataaggtgataggttcaatttggcttgtgatccatagtttgccaacccctactctagagcctaaaatcaaaacctgcagaaatgaagaaacttaagtttaaggatatggaagaaaaaaaaggaagacaaaaaaaaaaaaaaaaagaatatggaagaaccaggactgtgctctactttttcctgcttactcaasttcatgggttgtaccctaacgtaaagaaatgaaaataatgaaagctacaaggaggtaatttaattatatgtgggaaaggggcattttaaagccaagarccatggctgctatgaaacattcttaattaaagccaagtcagaatgcctggcattatwactccacatgccttatctataatacaatacactctttctattagtaatgttctcttccctctgccacaaaattgtatactattactaactgcaaactctgcaaatattaagctaaagggtcataggggaggaattgatgttgttc

SEQ ID NO: 21930 - DNA, 600 bp, Bovine  MMBT00665
gctcaaggatcaggtgtaatttcctttggcagccttccatagctagccctgcaggtccatgggggttcatcatttcatgtatttatctcaggtgtcttgcaaagattcagagaagccaataagtgtttattctcctttcaattgataaagaaagagattgatgtacatgtacaatacaggctgttggattggttggtcacaatggtgtaaacaccatcaatgaatcccaaaacagttttgggcacttatttccatgtaaattgtattacttaattctctgaaatgttttataggattggsagtataacacatagttttaaaatgctgttcctcttcctaaaagatctttcttccctttgctgtctgttaaatacacctgatctttcaggatccatctccagtgatatctcttctgtgattccttttcctccaatcccagccagattcataggcttcttcctttctgcttccataagaccttgcatatacatcgagcatggcactcaaacaattgaaatcctttctgcgtgttggaacatgagctcctcaaagcagcttccccatcatattcctcatcacatgaattgcacttaaatccac

SEQ ID NO: 21931 - DNA, 600 bp, Bovine  MMBT03931
gccagagaggaaggggccctcagcaaggtggcaaatccggtagcttttgttgtcaagaagggagagttacaggtcttcctgttggatgtcagagtgtggggctgagggaaagagacttgcagaaaggtgctttgggagagtggagttttatctgtgaccttggataatagcgagtgtttatttaattatagatgacaggtgcatattcattgtatttaatctttccatcatccctgtgggaatggtgtgggttctattattgtcctcagtttacagctgtccacaacatcctaagagacygctgaagaggctaaagccctgtaactagtgaaagatttgaaytccaggctcatgtgactccaaagccagactgtctcatcgtcaccctctccgggagctgagagttcgcttccacgagtggagtggcagccagactgcaggcttttccgagccacagtgagggggctgtggtgggaaggcaggtgcacagtcaagagtttagctctcaagggaatgtgacacctcaagtcacaagcaagcgagtttcttcccagaaaggataaactctttggaatttgtaaaagagatgctacaaggaaa

SEQ ID NO: 21932 - DNA, 600 bp, Bovine  MMBT08736
aatatcagactatacagaatgaaaataaacagatacctagatgttgcccaatatacagatgcacaatattaaatatattcaattgaaatgttctctttaacggagttttgttttgaaatgggaaggtgggggtaaacacaagtattattgctgtactgattatttaaatcaaaagacaatgtatataacactataattacataaaacatatactgttcctcactgtttagtcagtataagcatagacacacatgtagtaagtttaagaatgtatgtatatacatgcatatgtccttgtaytgaacagattttgccatggaaacattctttgtattatcaattacaattcattccctttccttagagactctaggtactgtactatgctggcctggtggataattcaagttctttggctgaacatctgcagtagtcacagggaaaaagcatatcccatttagagttcaagagcaggaaccaggatattattattttttaataaaaagakaaatttttgtgaactctagaaaaacacataagtcatgtcctacattaggaacatgttaggaaagcagcgtcctatgtaactgcgttagtaat

SEQ ID NO: 21933 - DNA, 600 bp, Bovine  MMBT22822
aaggcaaatccttaatgaatcgtatgataaaaaccctattccccaagaaaatatattggacatattctgctaactttgttatttttcaaagcaaagctgacatgcaccacatacagagaaatgtcatttcaaatcgagtgcatcaagcagaactgtattaattcacaaagaggcttttcagtgtttcatagaaagatgtacaattagctgcgatgactaataggtgacccagtatcacagactgtgtttcagatgccttctttgtaagcttttgtgaaggaaggcttgtccatcacttgkgtagttaccagctagaggacagaccctttgtctctcctacaatgagtaactttttaaatagaactattatgtagaaagcccacctccatcctctgtatgcaaacaggacttaaataaggggctatttgcctcccactctccttcctataaacccttgagtcacctagcctggctagagtgtggttggaaactgacttccagaattcacgttcggagaatgaatcagtctggcaaattttccattgcacggtttgtacaatgacagcaccagtgagataaaggtttcctgtgttgtgggta

SEQ ID NO: 21934 - DNA, 373 bp, Bovine  MMBT13083
aacttggaatgctgtgtaacccctgaattgttcttattaatattactagctaactcttagttttcctgtgtgctgaacagttagctcatttagttctcgaaacaatcttgtgagtaaggtacacttttttctgtgctttataaagatttggagaggttaataacttgctcaagttcacaggactggtaagttgtagaaatactgacaaatgcttaatagcacttaccatgctctgtaattacttatatgcttactatctgtctcttccagtagaacataagtcccaagaaagtgaaagtkttagttgctcagtcgtgtccaactctgcaaccccatgcactgtagcccaccaggttcccctgtccatggaatt

SEQ ID NO: 21935 - DNA, 600 bp, Bovine  MMBT02271
acttacataatgtgtacactattgaacatgtctttgctccaatatttttgaaggaaatacaaaaaccgatggtgacaactgtggttgtcttcagggaatacaaatgtatgtctagtgaaacagggtttggaaagagattctaaaatttttacttattcttaaatatttattacctgttttataaaagaatatgataaaaaactaaacaatctaaaaacaaatttattgagcacattagcttgtgtcaaatactttcctaagtactttgtctgtgtggtgttatttgagaccaggaggaayragataaacgaaagggaaaagtctgtagctagtgaacatgtgagcttgtatgtattgggggagggggtggaaatggcagagacttggaggttttcatgtgttatagattctgttttttctttgaataagagactgtcatctgttgagtgggaggaggcagggatcatgaagactaagatgaacatttggcatagttgctatagagaataggaacggaggtgatcaaaggcagataaaagaattttgtgtattgtttaaagttgcataggcatcaatctttattgcagtgctatttttctt

SEQ ID NO: 21936 - DNA, 600 bp, Bovine  MMBT05039
tagtagcaagatacagagaaaagaagtaattgtctaatattaacttactgttggagctacattactctgaagttactatytatggagttacagtctataactactcaaagaactgggagctaatataattcaccatcttttaaaaatattactaataagatattggtgaatcctgtgctaaagatactgaaggctcttccaaaaatgagatctatgttggttgagtataccgagtcatataaaactagaatagttgagttagtctcttattctaacttctttttaagactgatcttatcraaagaaaagtacacaatacctctcttaattctctcagatagagatattctttggaataaaaataagtatttttttgtgtgtgtgcacrtgtgcarttgctcagtggtatccaactcttttgtgaccactgtggactatagccagccaggctcctctgtccatgggattctccaggcaagaatactggagtgggttgccatttcctcctccaagggatcttcctcgcccagggatcaaacccrtgtttcctgcattggcaggtggattcttcatcactgtgccacctggggagcccaaaca

SEQ ID NO: 21937 - DNA, 600 bp, Bovine  MMBT19713
cagagattgtacagtgtcccataaaccccctcttttatgtattattgtcttttaagtctgttaacaagtgcgttgctacatgcatgctcagtgtgtccagctctttgtgaccctgtgactatagcccaccagacttctctgtccatgacattttccaggcaaaagtactggagtgggttaccatttcctcctccagaggatctgcccgacacaggttcaaacccgtgcctcctacgtctcctgcattggcggaaagtttcttcaccactggtgccacctgagaagcccctgggaacatayacttttttttttttttggtaacatatacttaacgtaaaacttamcattttggccattctaggtgtaccgttcagttgtgtggagcacattcacgttgccctgcagccatcaccaccatccctctgcagaagtcttttcatacttccaactgaaatgtcattagacaacaaggccccagccccctgcccagtccctgatgaccaccgtcctagtttctgtctctgtgcattttgactgtcctagggccttcaagaaagtggatgataccatatttgtcttttgtgaatcgtttatttcact

SEQ ID NO: 21938 - DNA, 600 bp, Bovine  MMBT03330
aatacaaatgaaatagttttagaaagttgtgacagaacatcttaagagggtagatcaaggacaaagactttttctgaagtagcaaattttaaatatttcccattatcaaagaagagctataataattctctatatatgtatgttacgtgtgtgtgtgtgtgtatcctttccttctgctatactaccttgagcttaagtcttagatcttaaaagaaaaactgtgaccgactagtagataattggataggcgtctacaaaaggaaactctagtgctttaggaaatgtagtgagtgactaagyggatctgccttctttccttggatgtcaaattgaatgaatgcatgccatgacaaagtctttatttaagacatgtatgaagaatgtcttcctataaatyctacactatacrttgtattttatttctattttcccaatgtaygaaatatgatgattagatcataaagttmaatagtaaaatatccataaaaagctttgtacaagaaagtccaaagctttatccatacaatccacaaactagaaacatacaagacattcctcgatggaagaatagataaacagaatacagtgtattcacacaat

SEQ ID NO: 21939 - DNA, 444 bp, Bovine  MMBT17460
caccagcatcagtgacattgatgaccacagcagcctgcagagtattgggagtgacgagggttactccagtgccagtgtcaaactttcgttcacttcctagaacccagcatgacatgacagtgcagggcaaagtattcactgggccaattcaatccaaacaatctcttaaattgggttcatgatgcagtctcctctttaaagctaagcaaaactatacttgaacaagagtcaagagacctctatttaagcaaatacttagcaaaaagtggggcagagcctcccctgcagaacaaatattcrtatttgaaaatcacagtttctaatggcagcagaaaatgtgtgtgaaattttctcaatttgatttagttgatttgaaagaggacactggagattacatcctctttttctagtttgctcctatcatattgattgagtagacacatt

SEQ ID NO: 21940 - DNA, 600 bp, Bovine  MMBT22058
gaaaataaaagacatcagtctttttacctgattattttaagactcaatatattccaatttcatctttaaaaaagtccaaaacagtgttgttaaagcatttcctcacgtaggtgatggtcaaaacacaacttcccacttttgagaaccagaatctggaaatctcagcaggtaacagcactagattaggtgtctaaggacctgttttgggttcaaatctaatggcctatttttaatatacatgtgaataccctcaaacacctttctttaaaaaaccaaaattctgcttctcattaataaagyctttagactatgaaattaggttaatggatcttaccatagggtttcccgaataacctgtgtttcagtaacaaaaactctgtcatctggaacatataacgggtcactgctgtacaaatgttggtccctattagataacaaacatcaaatgccaatgaaaagatgtctcattaagtaaagttagaagtctcaaagaatataagtaatttactagcaatttaacaagtattcaataagttaataaacataacacatgctttaattttcctcccatattcattttcacaagtcaacggaaatact

SEQ ID NO: 21941 - DNA, 600 bp, Bovine  MMBT09425
atttaggttttgctggataccgcatcttgtagtgtgctggtctctcagttgtgtctgactgtttgtgaccccgtggactgtagcctgccaggctcctttgtctggcaggaattctccaggcttgaatactggagtgtgttgccattcccttctccaggggattttcccaatccggggatggaacccgggtctcctgcattacagagagattcttcaccgtctgagccaccagggaagtcactcggcaacaaagtggttctctttccagttgtctttcggctcttctgattccatcaaggrgaagatgcgtctctgactgtaattttccttcttctctctctttttttaaagctmtatttctttttattagtcacaatatcacaggcagtgtgcactctttgtgtctggcttctttgactcagcacaaggttttgtgaatcatccatgatgtacatgtagtaggagttccttttgttccttttcattgctgagtagcgttccattttatggccatgtcacactctggctttgtgtgtgtggtcatgacgcatgcttgcagagtctagttccctgaccagggactgaacccgggtctgctgc

SEQ ID NO: 21942 - DNA, 600 bp, Bovine  MMBT08708
ttatgcctgaggtttaaagacaaatgttagatcgatatcataagttttatcaatgagcaaaagagtatataaagccaaaaaagtccaagtgaattgtgtgaataccagaaagtgcttgatataaagtcacctactggctctctgactcccagtacacaatgacacctactcaacttcaccgtctcgcttacatttgataaaacaactgtaacaaaagaggagtggtttcttgactcttggagaattcacagggaaataaaatatcagaccctaatctactgcagagagaaaaagaacatrataatgagaacgaagtcaatttcacaataaactcatatgtctgtatggaatgaaattggtgattttaaaaagtgcaccatcacaaaataaattttacatgacagaaataaaggagcagaggaaataagaaatgtattaaaaatgcatcattacaccttacctcaagaatacattatagtatctactggtttaacattatgtgaaatttaaaaataaaaaagtgccttgggtatttctccttgaagaacaatcacaggtacttagatgataatgagactttgcaaaaccaatggaagccat

SEQ ID NO: 21943 - DNA, 604 bp, Bovine  MMBT14835
  misc_feature (1)..(4): n is a, c, g, or t
nnnnatggacagagaagyctggcaggctacagtctgtggggtcacaaagagtcggacatgacttagtgactaaacaacaacaatctgtccaagaagtcaaggtagtcacagccccartgaccagggttacttcctcttccctgcacctgggggccataggttttcctttgggagggggtcaagaggtgccccaaggagagagagagagagattttgaggaattgtctcgtgtggttgtggatgcttggtgagtccagaatatgatgggggaggccggcaagctgggaagtcaggaaggagttaragtccaaagcctgagaaatccctcttgctcaggagatgtcaggtttttgttctatcagactttcaacggattggatgagacccatccacattctggaaggcaacccactttatttagtgtctactgattttaatacaaatctcatccaaacccatcacagaaatatccagattaatgtttaatcaaacgtctgggcactgtggcctgccaagttgagacatcacattaatcatcatagcatgtaaactttgaggaccttaagaagattgtcctgtgctgagactaagagggaaggacatg

SEQ ID NO: 21944 - DNA, 600 bp, Bovine  MMBT09532
gtgaagaggtgctgatgataaagagattatgtccacaagccccaaaacaaatttatctgtagagataaacaaaaagtctagctcacaaactggcaatatgaagcaagaaaaatgaaaagactaaatttttatttgtttgcacttttgcaaagagagagctattcaatcttgattctgggtgctccaaaaagagttattgagaaatagaaactggtcaaaggaayggagagactgctccaaagcagaacataaaggatgctgtgaccctatttgctgatgcagagctgaagtttaaataaytgtgtaaacaaatggacatatccttcagttcaaaatgtaaaatgatttattcttcaatagaccttttgttgattgtctaaaaccctgagttggggactttcctgtgggttcaggagctaagattctgcactccccaatgggaatttgctgtatgactcagggaactcaaccagagctctgtgaaactcaaaggggtcggatggggtaggaggtgggagggaggctctagagggagtgggcatatgtatgcctatggctgatgtatgttgatgtatgacagaaaccaacacactattgtaa

SEQ ID NO: 21945 - DNA, 600 bp, Bovine  MMBT00947
ccccatcacagacaccctgaactctatctacaagctaggacatcaggtggagactatatattttttttttgcctgcgccccatggcttgcagtatcttagttcccttatcagggtttgaacctgggccacaacagagaaagagctgagtcctaaccactgggaaaccaagaattcccaagaccctatcttaggtctgtgcttgtggagcctagttctgacccatgatggcattttctcatgagagtcagacccgggtaatttacccaacatgaaggattcacatgcagtctgagcatgtkacccagatcctcaggccctggtcctgttgtgcctgtgggagtgtgtggtatatcctgccaggaaatggacatttggagggaaggagcaatcagagagaatgaaagagaagaacataacctgaagatgggaaagggtgggaaagaagggtgtgatcaagttttttgaaattaggttagggttcaaatgaaggaatagaagggactggtacttttcccaggcagcacgggtcacgctggcctgtcgggcagcctcaaggcctcgcggatggtgatgacagtaaccagcagcaataacagcgg

SEQ ID NO: 21946 - DNA, 600 bp, Bovine  MMBT02058
gacttggttacctcccattttgccagggccatcagctggaggttcatttcttaggctgagacacactctacaaagtacctgccatgagattaccacacaaaacgaagtctgagagtctcagtctttgaatattttcaacagattcaggttgtttgacgacatatgtatttggatggtcaagagtttgcaagtcctacagggcagtgggccccaacaccagggaccagcttcgtggaagacaaattttccatggactgggaaggaggggatggtttcggatgattcggacaatacgtttaktgtgcactttatttctgttgattattacgtcagctccacygcaaatcatcaggcattagatcccagaggttggggatccctgcttgagggaacagattggtggttgccaagaggtgggggaggggggatgaaagactgggagtctgggatgagcagaggcaaactgttacatacaggatggagagacgagaaggttctaaggttgttagcaggaaaccatgttcaatattctctgatagacggtagtggaaaagaacatgaaaaggagtgcatttagtgtatagctgaatcactgctgca

SEQ ID NO: 21947 - DNA, 600 bp, Bovine  MMBT04731
ttgtgacatttttcagttgacaatttttatgagcaccatctttgtccctaaggagcttcatattgaagacagataattattatgtggacatgaacagttcaagtgcaaatattaaaggaacaagtaaatagatcatattaaaggaacaagtaaatagatcatatgcttaaaaaatcttaaacactggtacaaggataacatgtaaaatgggggaaagagtatagaaaggggaggatggctctgtatttaactttctggtgacctctctttggaaacattctttctttgacaatgagaacygaatcattaccttttcctagcaatatctcttctccaacagaaaatttccaacttgcagatacaaaacacgtaacatcattgtttttacttttaggagagtgagcaaggaagggagtctgtctgattatactactttatgtcrttactttaggaaagaaaatatttatagagaaaaaatattagactgtttcattaactaattaatatattagagckaatacttgtcccaggcatacttatcagtatgatatgatttcttcctatttaatagtgagatatgtattttaaattttactaaaa

SEQ ID NO: 21948 - DNA, 600 bp, Bovine  MMBT06364
acaaaaacaaacaaagatcctgagatctggatgttttacacactggcattaagaaagtatttatcttgcttggtctcttgggagcaggcagaaaagcaatcacaggtacttgtctaggtgtctttaataatattttgacctcaatgaggaaaatacctttctttttttcctttttagtagtgtgatctgtagcaattctttagttcagaaatctgagatgaaagtctggttcttatgtactgtaatagaaagaacttagaaaatctatcttatgctctcaaacagacagtccacagataycagagttcactgtcagaaatattgctttaacctacattttatatatatcttagtactagcaaaaatgatattctgtagcagtcaggttttcagtgattgtgatcatcaataggaaggaaaatattcaggtgtattgtcaaaaatcataaaatgaggctttgggacaaatgattttataaaatgaatgaagtaatgtaacaaatcaagtgtagctataaagaaagctctgcatgagatgattgagaaacactttaaagaaggggcaaagtctctcattttatttcattattagcagcacac

SEQ ID NO: 21949 - DNA, 600 bp, Bovine  MMBT07778
gacactgacaagacaactcttaacaaaaaagcctgagaaatggaagttaaatgtagttggcttaattctacgttaggacttagagtgatgaagaaaaagattctcataggagagtatatataaattccatagagtaggcccaaatatatattctaggagctccctaatttatcacccctttccagcttctacaatcagaatcttcaggaatgagagaaatatrgaaaatgtttattttctcacttacaagagtatgaggaataaaggatataaaatgttttatgcgtggtctaattatarctyggcatagagaagtacttaacaatgttgactgaatcaatattaaagagaagtaaggaaaaacttttgaatagcttccaaacattcttggaaaataattctatccttagaggtgctctggaggaggcagtggctgcttggctgactattatgtcagtgaatggacttaagaatgagtgkactttcaaatttatgccagtttgaaatgtatgctaattttctgtacataactatgagctgaagcagagttgttcaataattgtctgtcattcaggcaratcatggaagcaaaatgatcat

SEQ ID NO: 21950 - DNA, 598 bp, Bovine  MMBT22999
  misc_feature (1)..(64): n is a, c, g, or t
nnnnnnnnnnnnnnnnnnnnnnnnnnnnnnnnnnnnnnnnnnnnnnnnnnnnnnnnnnnnnnnncagtttcccctccgtaaagtggggagtgggtggatgatccactgttggtttaggactgaggggagtcgatggcctggaggttccackgaagtcacggccacagccttccagcaggagttctgcaaaacacagatggcttctgacagccacgctctttccagaagcatcgtaggttcagagttcagtgataaagctgacactgagcagaactgggactcaaacccaggtcttctgtytcctgatgcttctcccttgccgagataaccagactgagttttgctgatgtcgttgaaactgctacccaggactcccccaggcttctgtgactgcccttggctttgaattttaaatgacccaggagcytccaaccagagccctcggacacacagcagctggcagcagctcagtcctctgagtggatgagagagtcccataacctgggctagatgttaacmtgtcttttctgtaagaacgcgacagaagagtgagactcawgcagggaaggaggaamccccttattgtgtaaaccctttt

SEQ ID NO: 21951 - DNA, 600 bp, Bovine  MMBT14274
ttccagaagcatcgtaggttcagagttcagtgataaagctgacactgagcagaactgggactcaaacccaggtcttctgtytcctgatgcttctcccttgccgagataaccagactgagttttgctgatgtcgttgaaactgctacccaggactcccccaggcttctgtgactgcccttggctttgaattttaaatgacccaggagcytccaaccagagccctcggacacacagcagctggcagcagctcagtcctctgagtggatgagagagtcccataacctgggctagatgttaacmtgtcttttctgtaagaacgcgacagaagagtgagactcawgcagggaaggaggaamccccttattgtgtaaacccttttgcaattcctgggcaaggttagaacatgtgatgatgcttgaaatctaactttaggggagagaccatttttggtcatagctggtgtgttgacacctttgcaactggaaatggcatagcctctgtccatgtgctatgagtaactgacycstcctgcttgccaaattcgtgttcagatggcaaaacagcctgagactgccacattggaccccygccagttgttcc

SEQ ID NO: 21952 - DNA, 600 bp, Bovine  MMBT22978
ggacacacagcagctggcagcagctcagtcctctgagtggatgagagagtcccataacctgggctagatgttaacmtgtcttttctgtaagaacgcgacagaagagtgagactcawgcagggaaggaggaamccccttattgtgtaaacccttttgcaattcctgggcaaggttagaacatgtgatgatgcttgaaatctaactttaggggagagaccatttttggtcatagctggtgtgttgacacctttgcaactggaaatggcatagcctctgtccatgtgctatgagtaactgacycstcctgcttgccaaattcgtgttcagatggcaaaacagcctgagactgccacattggaccccygccagttgttcctgtgctgtgtacatatgaccagggcttagcacgcacctgtgtgtttacatggcagggagccagctaggctgattcaaggtggacccacggcctgggcaggctggaaggacagagacagtartggggggaaaagggtaaatagaaaatggacaaaaatattgtgtatcagccatgattcatctccatgtaaagcccttcagaaacaattttatcatttgctggta

SEQ ID NO: 21953 - DNA, 600 bp, Bovine  MMBT04023
actgggcatatgtgtgtaacatacctggtgttcaattaaatgccctcaataatatagagcaactacagaggcaaacagcactataaatggaagaattatataaataayttttgctaaataaaatgcatatgttgaaacattcatatgaatatgcatatatgcaaaacacatatgctggtatgcattgccccaaaatagttttcaacatttgccatgagtataattagcaccccaattttaccaccatactacccagtttggtttattctgtgtgagggttttttgacctgagcactattsatattctggaccagaaaattctttgttgtggggactcacttgtgagttgtaagatgttcaggaccacccctgacctttgcctgcaaatgagartaatattcttccctcagttgtgacaaccaaacacttcatcagacattgycaaatgtccccaggtagggggtactttggggattcccaggtggctccgtgataaagaatccgcctgccaatgcaggagacacagattccacccctgggtcaggaagatcccctggagaaggaaatggaacaatctccagtattcttgcctgggaaatc

SEQ ID NO: 21954 - DNA, 600 bp, Bovine  MMBT07177
cactgcttgttctcaactctggcctcactttagaatcacaccaagaccttttaaaacctgcagaaaaccagaccccagacaaatgaagaaccctggacgtggggaggactgggcatcagggtctaaggtacagccagggttgagaaccaccaaagtccttgtgacctgagctcctgcattctaatttcctgaataaccctcttctcctctagccctgccacaaggcccatgccaaactgatgaacaaatggtagggaggaggaggaaatccccagcaccattcagctaaggacaatttgragcagtaatgctgggcactgtcctttgccctgttgtcattttctcctttcagtgagaaaaacagcagcagtggacaacagtggagcaagctaggcgggtattctcttacacggttgcagggaatataaattactacaccttccaaaaaaaagagaacacaatgaaagaccttgaaaaaattgggcaagcaccagacccaacagttttaggagtttgtgctaagaaataattacggaaaagatcaaatacagagatacaagaatagggtcatcactgggcttccctgggggctcagtggta

SEQ ID NO: 21955 - DNA, 600 bp, Bovine  MMBT10061
gcctttgaccaatatggtgtcattgtgctttcctaaactggtctttaatcactctgggtgaggaaaggacacttcttgggcaaatgggaacgcctttcccattctgtccaaggggccactgcctcttcaaccccgctagtggtcatggaggcagaagtgcagtcaatattgaaagtgattatgtcctaaggatatgctaatgacatcctaaagagtccaaggcaagacatgattagaagatgtgtctttcaacttccccactataaagtttaaatcaaatcaacatgtctggaaaattarttgttcatgtataagatacgctataagagtcattagaagccagtattgaaaagtagcacaatggatgatgcactcatgagtaaacagtactcagaaattgcaaaggcaaagaaatctatgtgtttcaataaaaacaggttctaagaagccataacactatgggtaaaaccatcattactaactgtcccagaggaaaagatgaaattagtcaagaatggtgcatttgataatgatgaaaaagaaggaatggttcttgagcctgaaaaaatggtacctggacaccaggaaatactgacaggt

SEQ ID NO: 21956 - DNA, 555 bp, Bovine  MMBT19117
gcagcagcaggtgccacatgcagaagagtgaccagcagcttggtcacagagaaatccttcctgaggaagtatttttttttctcataaaagtgccttttaattgaccactgtaacagccaccctccaagacactccccagcacacagaccgcaagtcacttaagacgtctttcctggtgcttgagtttcatgaataaaaggaaaaggtcaaatatcactcatgtcttatgtcactgagatatttatwtttaaaaagagttaraagcagaaaaggatcttcctctatggctttatctagcayttatatagttttctgattatgaaagtaatatatataccttgtatatgcataaagccaacatctgacaggaaatgcacccacatattaacaggttatttgggaaagtggagtgcataggagtttgctttctgtttttcacaattttatattgttctctttttaaaatgtgtgtatatgtatatatgtgtactacttttgcagcagggaaacgatttatataataataaagaagaaatataaatcaggaaaaggact

SEQ ID NO: 21957 - DNA, 600 bp, Bovine  MMBT09603
gtaattgacattcatttattaaaaaaaaaaatgtttgctgagtaagcatgatgttccagaaattgtgccaacttctgagggtacagcagtggcccaaacagtgaggagctaatttatagtccagtgagtataaaaataagaaaacagctcaataagctcagtattgctacacccattctagagacaagcaatgaaggcaaagaggagtaaactaacctcttcaaagtctctgaattataggtggcctggacaagctcatctgtctcacaaaaatcagtgccatttccatcactttcccaytttccttagggacagttcaatgatgcagatctaaaattctttcacacacataaccctcttatattcttctaaattccctgaggagtgcatacatgctttcctcggatgggacaggggccatttctaaagctgttttgaagcatagcacttctcaacttccttctcctttggaccacagtcatgtaccttgttataggcaacccctaatattttgattattttgatgcaaatccatcacccataataaattcacctgctttccaaatgcaatagattttagaagcacgaaagcaaaaacta

SEQ ID NO: 21958 - DNA, 600 bp, Bovine  MMBT11133
caaaaatctctccagaaagacagtagaaaaagaaacattttttaaattattattattccataagcattaaatcgctctcagaggctacaagaacagagaggaatcttaactttttacataccctagccgatacaagtcatcctttacatgttcaaaaaaaatagtaattagtcctcaagtaagaggacttgccagcaccgtttgtcacatgtagttcattctaacttaacctggtaattatgtgggcagctacataacaacatacatacatacatacatagcattggcttgttggctttmccaagaagaaaagctaaattcttattttttttatgataggaggtagtttggcaactcagaaccaagcacccacctaaataagtctaccactgtcccccagaaactgggagagaggggtgctaccttccttgatgttcatattcaaagaggccactcccagtctcttgagagaaacattctcaggttacaaagctgaccaaatgccaatccagtcttcaaaagaattcgaagcacttcccaattatagcttttctaaagtaaatgtcaaagaaggaaagagaaggaaatctctcattttct

SEQ ID NO: 21959 - DNA, 598 bp, Bovine  MMBT03448
  misc_feature (1)..(103): n is a, c, g, or t
nnnnnnnnnnnnnnnnnnnnnnnnnnnnnnnnnnnnnnnnnnnnnnnnnnnnnnnnnnnnnnnnnnnnnnnnnnnnnnnnnnnnnnnnnnnnnnnnnnnnnnntttaagcacagggccactttctaaatcaattcaatttctaccaaaatttctcatcataaaatttctgcctgaaagagtccagcaaaaaatgcattccctgccaggttcctctgacacagctcaggtttacagctctccttcagaatttcagcaaccttggctaaatcaccagatgggtctgaaagaatgtcattacmatgcccttatgggagttggcaaatagatgtcaacaaaagctttgtgctttatccagaacagtccatgctgagaagtccaaaatctaaatctcactgctgaaaaatctgcaactagaaaataattcccccctgaactctgcagccatgctccctctttgctcactctctgtctcctcatttttctttttaaggaagaagcccatgttatttaaacttcaggctttataagaacaaaatattttaaatgagttacagtttcaaaagttataaaacaggctaaatcaaagacactgaacaa

SEQ ID NO: 21960 - DNA, 598 bp, Bovine  MMBT16852
  misc_feature (1)..(34): n is a, c, g, or t
nnnnnnnnnnnnnnnnnnnnnnnnnnnnnnnnnngaattgtgtcctatctgtggatccgggacggccgagtccagcagctggagtgagtacttgaagagaattgcccctggaccagtaatcattacgtctatgttagtttgctagggctgcatagcaaaataccacaggaggggcagcttcaacaacaaatatttatattctcccagttttggagactggaaggtccaagatcaaggtggtagatgactggttccaactgccttcttgttgtgtcttcacatgggagcagggctggagarggagaggaaggaggggagagagaggrgagagacagggctctcgggtgtctcttcttacaaggacactaatcctatggatcaggaccccacctttatgacctcagttcagtgcagtcactcagttgtgtccgactcttcacaaccccatggactgcagcacaccaagcttccctgtccatcaccaactcctggagcttgctcaaactcatgtccatcgagtcagtgatgctatccaaccatctcatcccytgtcttccccatttcctccttatgacctcatttaaccttaattacctca

SEQ ID NO: 21961 - DNA, 600 bp, Bovine  MMBT01167
aggagccaaggctgtagtcatggaaagagtctggcagcaaatggaagaaagtcaggaaccccgtcactgggggcccctgggtccacaagcaaggtcctgaggatgcctgggagacaggcatgccccctgtctgtggcccctttatctttaggttggagaaaacgtgcttgctatggagcagcttcccctctgaagttcactgaaatattcaccagagatggtgggaggcagtgaggcagttggagggccccagagatcagccagctcaggactgtccccaaccacagggttagagggggwagccagggccagacagggagagactctctgggtcaaggaggccccaccagagtctgcatggactctgagccactggactcccaggcctgyacctgtyctgctaaactgggcagcccggacctctgcagggccttcccatcctgtctcacctcatcaagctgggyggaaacatacagtctgcgtcctaggtcatcaccttgacattycaygtatgaaaaacaggtggaaaaggaaaagtggctcatgccagaccacagctggtacctgacctrgcaggtttggggtccctttgcctagggc

SEQ ID NO: 21962 - DNA, 600 bp, Bovine  MMBT18735
attcaccagagatggtgggaggcagtgaggcagttggagggccccagagatcagccagctcaggactgtccccaaccacagggttagagggggwagccagggccagacagggagagactctctgggtcaaggaggccccaccagagtctgcatggactctgagccactggactcccaggcctgyacctgtyctgctaaactgggcagcccggacctctgcagggccttcccatcctgtctcacctcatcaagctgggyggaaacatacagtctgcgtcctaggtcatcaccttgacattycaygtatgaaaaacaggtggaaaaggaaaagtggctcatgccagaccacagctggtacctgacctrgcaggtttggggtccctttgcctagggctcacttcaccacatgcctgggtctccctaaggaaatgccccgagtctcagcccaagccaccccctcgtttccctcctggaagatgtgcagagcatccaaaggctaacccagaagacccctgcattgccatccctagccctggaggctgaatgtctttaccttcaaatgcccgggcagcatccacgaggtgggtccaatctaaccct

SEQ ID NO: 21963 - DNA, 600 bp, Bovine  MMBT18736
caccagagatggtgggaggcagtgaggcagttggagggccccagagatcagccagctcaggactgtccccaaccacagggttagagggggwagccagggccagacagggagagactctctgggtcaaggaggccccaccagagtctgcatggactctgagccactggactcccaggcctgyacctgtyctgctaaactgggcagcccggacctctgcagggccttcccatcctgtctcacctcatcaagctgggyggaaacatacagtctgcgtcctaggtcatcaccttgacattycaygtatgaaaaacaggtggaaaaggaaaagtggctcatgccagaccacagctggtacctgacctrgcaggtttggggtccctttgcctagggctcacttcaccacatgcctgggtctccctaaggaaatgccccgagtctcagcccaagccaccccctcgtttccctcctggaagatgtgcagagcatccaaaggctaacccagaagacccctgcattgccatccctagccctggaggctgaatgtctttaccttcaaatgcccgggcagcatccacgaggtgggtccaatctaaccctgtg

SEQ ID NO: 21964 - DNA, 600 bp, Bovine  MMBT16558
caggacacttcctgtatactagatataaacctgtgaacatataaatgcaatatggggtgaaaaaatacagaatgaaaagatctcttctagataaagggatcaagataatcatttttattttttaagtatatttaactggctctggaatcctaagtaggattagagtaggaaaaaaattaggggttgagacacaaagatattccaagaggtggaaacagtagtttcagagaaataggatgggttggggtaaaacttcacttcagtttggccttaaccttcagttcttgaggaggaagcatrggacagtggrcctggagagatagattaatatcatattagtattatcagttaaatgtaagtaataacttgtcttgttttggaaaggattgcaggttctttatgaaggtacagaagccttttttttggcagacttgaaacagggctatttctcacattcctatcggtaattgcctratggtgtgtagagatgaaattgaaaacctggaggcttgccttctcagggaakagtgtgccttgacacttcttactgaactgttggtttcagaagaaacaaattatttaagctaatatttctttctc

SEQ ID NO: 21965 - DNA, 600 bp, Bovine  MMBT12583
tgaaattgtcaacacagcagcagctgtgtaagggttaacccgtttcccatgctttttctccatgaagatgaactaacaaggttttgttctcttctaaaaaagattatttcagagcgtaggatgctttattatgattatacactattagtgttctcaattctataaatatatgctttgaaatatagcagtgaggtagactttcagcaccttatcaaccaagaaaggaagtatgtacctaaattaccatcaccacactgacaatttgcaactttaaattattcacaaagttyaaaagaagtygatcccaactttatggaaaatttaatatgaaaagtaatgtttttatcttatygcaaggaaatgtttccagttctaatactgaacacatactgaagaatgaaaatagcaaaatcccagagtgaaaaaaaaaaaaaaaatacaagtctcttttaacatttctgctctcagaagtgagcaggattaaaatgtatttccccaacaaccgttatttctcattaaaggaggggcacacacatgtgtatattaaagaaactatgagatcccccccacatacacacaccctttttcaacccctctgac

SEQ ID NO: 21966 - DNA, 600 bp, Bovine  MMBT09546
ttaaaaaaaactcaatacatacatttctaaaatagtcatttagctacaattatttcatttttctatatacaataaaccatttttttctatgcacaatagatttgagggctatgatacaccttgccacttactatgttcatttttttcaaacctctgttctatctttctcaaggtgagtttctaccttaaaaagtcatgrtaaggtctgtatgagattacatatgctatattcttagaagcatagtaaaacacacatggtaaaaatatcagtaatgtggattttgtgctgttcattttttwaattaactaaagttttaatttacagaaaatagagtagtgtttcatttctttgaaacratgaacctgttagcgtctgtttagtaaaatgactctgatttgtatttcaaagtttttcagttatccatatcaaacttgatcaatttaaacgaatcttttatgactatccttttcaaattatgcagaataaagttatctattagattaaaaatattcacatgagcttgtcatgattctttaggctgatsttatttgctatcagttattttaatcaatgaattctgcatgaaaaaatctgttgaa

SEQ ID NO: 21967 - DNA, 600 bp, Bovine  MMBT05496
gtgatggttcaaggcatagcaggaaagaagctagaagaataaaattcgaagccatggggatagaaaaggtagagaagaaaggagcgagaaattgacagaagtagtgaccagattgtacagctgtcagttaattaagaatttgaagcctgtcgtcatatcatcatctactttgggaaattctggttatcttttgtcttattttaggtcaaagaagaaagagagaaacctaaaaaagcatattcaattttcattcacccataaaaatattgtttttgatatggtttaaatctgtttgcaaartctcccatttcagtatttttaaaaagttcattaaaaggtgttgaggtaagcaaatctgatgtaaaactattacaaacccagcaccgtacactattttctagatttttgctaaaacaatgtctataaacaagaacctacagaatgaaggcctgccaaatatctataatctatatatatctatatatctataattgttacctccagaaacaatttgatatagcaaagtgccggaaaagaaaatggaactatttcctttaaacctcaacttaatttttaaaaaataaagtgctgaaactcttg

SEQ ID NO: 21968 - DNA, 600 bp, Bovine  MMBT02239
tttttgcaggttgtactgcctttactttttctgctcttagaataaaacccaaacatatgatcatagcctctaaggtcactattccagtctgttcaggctgctgcaataaaagaccacagcctgggtracttataaacaacaaaatattatttctcactgttttggagatggaagcctaagattagggtgccaacccggtccagtgaaggtcctcttctgggtcacagacttttctttgtatccttacatggaagaatagacaagggagctctctcttgaggctcttttataagcgtcctragtcctaatcccagagccctcatgatatgatcrcctcacgaaagcctcattttttaataccattgcccttgggggttagttttcaccacgtgaattttgaaggsacacactcaggccttaatagcctggtgttatctggctgaagcctctctattccatttcctctcatcacaactccttactatatgcattcaaaccagtctcctttcagctttataattttgccaagttttccctacctcagagcctttgtaattgctgttccgtctacctaaaatatttttcaacttttcaccacat

SEQ ID NO: 21969 - DNA, 558 bp, Bovine  MMBT20477
tcttttccaggagcgtkttcagatttgaggttacttctgccttagttctttgagtaaaagaaataagaatgcaaagctgacagtgctgtgaagaatgatgtgaatatgaatgcatttgtgtaagtgtaatcatttccactgtatgtcttttatcaccatgatgaaaataataatatcatattacatgtttgtgttgattatggagtttaggaattaagtcactgggtgacatgctaccatcttttgctgaagaccaaactcaaatcctgctctcatttaagtggccttttccagttactytagtgttctatgaactctctaaactgtgactttattttctatccttctcacaaaatccattatgtattccactagattgtacaattcatggggccaggccaggcctgacctgttcaccctgtctcagcttccagcacaggcttggcaaggtggttggttctaaatgtctattcattaaaggaatgatgatgttgacttgcagagtcatcattgcatcgttgcatctaattacattgtgagtgtgctctcttcatagga

SEQ ID NO: 21970 - DNA, 600 bp, Bovine  MMBT06798
ccccccattagaaatgtcacccctaattaggatacagatgacctcaggccctctcgcgggccccggcatccctgccaatggacatcctgccctgagtgggaccttctgctgccagcccagagctgtggaccagcagcctctcctgaaaacagctgctccttttgggctcccctggaagggtrgcccgttagctgagaggaagccaggccctgttaacatacagtgcacatgtacagcttaaccagcgtccagataatcttaccagacatatttgacgtggctgtttggagcctggtcagmgtgcagatcacttggctgatagcgctgtttgggaagctgagaaagtccagctccgtgtaaaatacctgtagtaagagaagtaagggggttttactagttgttttctggaaaacagcttcatgctacagtgatgtcatctgctcagaggcatctgtaaaatgctacagatccaaaatgatgtcacatctctggaagtaagtgtatagataatcattaaacattgcaatgctcttaacccaggtgatcttctattagctgcaagctgaaatatgaatgagctacagtccaagtacaggcggg

SEQ ID NO: 21971 - DNA, 600 bp, Bovine  MMBT17031
caaaggcaatatttgaaaagacaatgagaatttttcaaaactaattaaagataatcatctacagattaaagaagtccaaagaaactaaattcacacctagatacataaaaagaacttagaaaacaaaaacaaaaaacaaaacagattagcttcaaagaataatcatgagtctaacagcagacttaataagaacgaaggaagccataagccaatggaagggtatcttgactaatatcttccatgtactaaaagaaaagaactattcatcccagaattcttaagtcagagaaaatatctccygkgaatgagggtgaaataaagacattctccatcaggcaaaagtgcttgtttcccaccagcagactctcattaaaggaagttctaaaggaaataattcaagcagaaagaaagagatcccaaatgcatgctctgagatgtaacaggaaatgaagagcaccaaatacaacaattaaaataaaatatggggtctaaaaacaaccaaaatttaaaatatacgacaacagcattcgagggaaccaatggtgttaaaatattctaaggtctttgtgctatacaggaaacaaagacatgaattttaga

SEQ ID NO: 21972 - DNA, 600 bp, Bovine  MMBT18599
aacaagaatgttatttttttaattccagaacattttttttcctggccagaaatggattagggaatcaatctagccagtgcacctcttcaatcagacaggtccctgccatgtgggtatgctttagcacaaatgttycatgagtctctgagttcattcataaggcagatctccctaatgtcatattcattcactcagtgaatgatcattaaacctgtacaggtgctgtactatttagattataaacaatcctcgctcagaaggggtcacaatatagtgggaaattacaggagacacaggttygatccctgggttgggaagatcccctggagaaggaaatggctacctgytgaagtattcctgtctgggcagaggagcccggtgagctacagtctatagggtcacaagaattgggcccaacttakcgaactaaaccaccaccacatagtataaataaaaatcataataaaacttgattatgctgtaagaatattgtgaattaactgctaaagtgatgcaggagagggagcctgtaattgcctctgactcaggcaagatagggtagcgtcagcctagctcctttctgtgttagtcctacagcag

SEQ ID NO: 21973 - DNA, 600 bp, Bovine  MMBT10014
cttcttgactcaagttyaattctgtccatttaacaaagatgttttgagcagctgctttgtatccaggcctggacaaagccttgggaaagtgaagcatacaggatggggggtgcggggwggttctttcccacctgataataagtatccaactggaaagaaggaaatcacaaagcatataccagcttgagtatggtcaagatgatttcartaataaaatgtaaatttggaagttagtctgaagaggaatattgatgctggtaaagaaggaagaaagaggcaggactgctgttttttggacgyatggtagaaaattcagcacttttcactgcactcaatttctagctcttttctatcaagacttagctcaggaataacacaaaaactcccatggagcaactctatttatacttgagggtgcttcaatttcttatagtgaaaggaggaggaagaaagtggtataaaaaattctaatagttgtttcctttattttaggaaaacagggtaacggaaatgtggtcctctttcacctagttcatgaagttctaaaatggagtctctcctatattgatataaaaaaatcgataggcagggattttagca

SEQ ID NO: 21974 - DNA, 600 bp, Bovine  MMBT04720
tggagtgggttgccatttccttctcaaatgcgtgaaagtgaaaggtgaaagtgaagtcgctcagtcgtgtccgactcttagtgaccccatggactgccccctaccaggctcctctgtccatgggattttccaggcaagagtactggagtggggtaccattgctttctctggaatcttgctttaagtccgaatatttttgccatcagtttgtgtatctgttcagtattctgctgttttatttctgtttctatccttggtggcttgttataacctcagagcagtgaagaaaaaatatgtgastgtataacagcggtagagatcaggcaatccccttaagtatatttggcattgctctatctttaagcaatttgcccaacctgtataattacaccgcctctgctgggcaagggtttttcctaatcagcatcagtggactgtgtgggtctgaatgttggcgcaagctcagcatatttcatcaacacagtgatttccttggaggtgtgccatcatcaagatatcaaaacatcaagaagcagaaacatgctttcactgttagagcaaaatggagaaaattcatttaaaggagtccttaatctagaa

SEQ ID NO: 21975 - DNA, 600 bp, Bovine  MMBT03101
acacctacctcttggggtattgtgacagtgagtgagataatgtacaaagtgtttagtatcgggcatgaaacatggtaagtgaacaataaatggtggctgttatcactcttgatctaaacaacctctgcttcttgctctcacctccctagttcttgactcccccatcaatcttagagttagttttgatcactatctccctaaacctgcagcactttaaggtcaagatcttaatgtctatctgtggcatcctatttagttccctacatctaataaaaactgcatgctcaataaatgctgggyggtggaatgggactaatactctgacttagataaggtgtagtggggctgattccmgggctcctgagtcattacctacgatacaactcctctttaackgggcttctgattgagttccattctggtttcccagttctccagagaggtctaaacattttctccaccaaagacactgcagtcctatccctgaatcccatttcagtctggggctaaagcccaggaacaatcccaggcatcagtactctgcctcaggttctatatggcccatccactaatggatgacttaaactccaattcttttca

SEQ ID NO: 21976 - DNA, 598 bp, Bovine  MMBT05685
  misc_feature (1)..(87): n is a, c, g, or t
nnnnnnnnnnnnnnnnnnnnnnnnnnnnnnnnnnnnnnnnnnnnnnnnnnnnnnnnnnnnnnnnnnnnnnnnnnnnnnnnnnnnnnnctttttaaaaagatctttgtctagcatgacaccatctgatgttgtttgaagagttaatcttaacatatccatacactctttcaacctgggatcagacgttcgcaatcctgtagatttgagtgcctgtttttaaaaaaataagagtctgtaaatacatagtgcaaataatgtatatgcttattccaactacaagtttttaattcctgtatttaraaacttctacccaagacctgaatatatatatatggcatcttagtgtcactattaccctctttctggaaaagtttctcattgtttctttcatttcctttcattgattaccttgaaatgagcatgatgaaaatttgaaaataagagaaatagtgtcagtcagatgactttaagactacattgcaatatcaccgtatattgcttcatattactggtttttaaaagttaggatagaaaaatataaaaacttactgtaataaatttatgaacaggtattttctcttgtccttctgcaattgta

SEQ ID NO: 21977 - DNA, 598 bp, Bovine  MMBT10125
  misc_feature (1)..(193): n is a, c, g, or t
nnnnnnnnnnnnnnnnnnnnnnnnnnnnnnnnnnnnnnnnnnnnnnnnnnnnnnnnnnnnnnnnnnnnnnnnnnnnnnnnnnnnnnnnnnnnnnnnnnnnnnnnnnnnnnnnnnnnnnnnnnnnnnnnnnnnnnnnnnnnnnnnnnnnnnnnnnnnnnnnnnnnnnnnnnnnnnnnnnnnnnnnnnnnnnnnncacagaaaaacccactatattatacccagtaaaggcaattgctaatcaagagatttaagacactttcatctttcacctcaaaaactgacctgttaaaaactgagttstgatactaaaattgggcagcatgatatatcaatttttattgtaarttaaacagtttcatttaagaagttagraagcaattacgatttggcgagtttttgtcaaagaacattttctccacaaataagtgacatggcacattatcggtgttaggtcaaaatgccctccttaaagtgtttcaatattaaagttaaatatttttttaagcggatttctttccagaatcttatgcatcaaatttctgtagcagcagcccaacatgagggatttactgaaggtttatttcaacaccaatctcat

SEQ ID NO: 21978 - DNA, 600 bp, Bovine  MMBT11544
tctgggagttggtgatggacaggtaagccaggtatgctgcggtccatggggttgcagagtcggatatgacagtgaccgaaatgaactgaattgaactgaactaagttgttgaaattatgcatttattgtggtaatgtttttttaatctatctctttatgtatcaaatattcaaaatatttcttaaatctttatatttgtgtgttttagtaaatacattttcattggcctaatagattattgactctggacaaagtagggcagggatttctgctgttaatattttgccaggatccctttayggtgtgttcccttcctctagatcagtggaacttatatttcctatataaactcatagaaggaaaagtaataatgtgtcacttagagaaaatatacttctctaggctaaaaagaattttgacacagaaaccccataagggtcagcaaatatgggctctaacatatggtatctttggcagactgaaagtgtatcaccttgaattgtggctttgtcattatacttctcaatgacccatatcagatctactatatcacaaagtcaggggaagggtaggggcctgagaatccttatatttaataca

SEQ ID NO: 21979 - DNA, 600 bp, Bovine  MMBT05641
gacaacacagccagygtgggacagaccactatctcttcatctgagcatcagatacagtagctaagagccacactttcaaaaaccaagtaatcttcaaaygagagtcatgatcaggatgatgagatgctactattaggagggcacagccgattcaaactgaccattttaccttcactctgagttacatacccattgtttgaaataataagcaaaattaccagcacaatttaaatcattttatttcaggttttgaccaaccgaagttgcaacagttattcctcacactggaggactaccagygcgtcctagtcttgaagaaaggttgcaaggrtctcttaaatctgctataaggttcctaatactgctccttctagagtcaaagtgtgagtcaagttctgcctcgtactgatatttagaaatggtcagaagcatgttaacttttttttactcaagattattacaaatgtctgcagaaggcagataaaactgtggaaaagctttatatgttctgatttcttaatgttctttggagatcaaagcctgagtttcaggataggaattaacagggagtttattacaaatccagtcattgtgattaat

SEQ ID NO: 21980 - DNA, 600 bp, Bovine  MMBT04314
tgtgtggttaatagtccagtctcatatttgcgtgggaccagctgtcaaagatggcaccgtggggaatgcactataattttaagacccgttgcagagtcacatatgtccataaatctgcatcactagaatgcttatgggaagacagtcatcaccagatttgaaaataaatcctttattgctttcattttgaacttcactctttacttgactcaaattatctttatcagataaaggatgaggggccctcataatgagtgaacaagtttttagaagccatctcatttgcacaacttcttaacrttcttgccagascccattttgaacacagccagtgcaattatctccattcccttggagagatatcttcttgacctagtcaaatccacatcttgggtgagtttttcaatacacagaactttgagggaaaatattgggcatgttctacaaacctctctgagcctccaggacttcatctgtgggcagaaaatactttcatgtgggaaaattagacaagatacaggaagaaaggtggtcagtttattatcccttcagcgtgagttccttctccaagcgtggccgtggtatcgctgtttaaaatcg

SEQ ID NO: 21981 - DNA, 600 bp, Bovine  MMBT12560
agtccagtctcatatttgcgtgggaccagctgtcaaagatggcaccgtggggaatgcactataattttaagacccgttgcagagtcacatatgtccataaatctgcatcactagaatgcttatgggaagacagtcatcaccagatttgaaaataaatcctttattgctttcattttgaacttcactctttacttgactcaaattatctttatcagataaaggatgaggggccctcataatgagtgaacaagtttttagaagccatctcatttgcacaacttcttaacrttcttgccagascccattttgaacacagccagtgcaattatctccattcccttggagagatatcttcttgacctagtcaaatccacatcttgggtgagtttttcaatacacagaactttgagggaaaatattgggcatgttctacaaacctctctgagcctccaggacttcatctgtgggcagaaaatactttcatgtgggaaaattagacaagatacaggaagaaaggtggtcagtttattatcccttcagcgtgagttccttctccaagcgtggccgtggtatcgctgtttaaaatcggtcaccggcagc

SEQ ID NO: 21982 - DNA, 574 bp, Bovine  MMBT10670
ctcccaaactcttttatctagaagtgaacattttaaaatatggccctagagatcaaagtgcccattcttacttattttattagatccagatatgttgcctttatcctttaaaaagcactgactttccatttaattcagttttactcctctttaaatgtgtgattctctaccttaaataacctcgggatgttttcctagaaatgcagtcaaccatctgaaagtaatttttctgtctggtatgtggggagtttgatgggtgtatgtgacatgcttataacttaacattccttactatactcrttttcatcaaaatattggctaaaatattcagaacagatgtgtatttgtgtgtgcgtgtatttttctagagaaagcttcttttgtgagcaattaaaaggtacatcagacataaagagaaatttctctgcagccttttttcccccagttctttggcaactgtaatagagaagattacttctcagatgctgtatatcatcctgaaacgtaatgattttagcatgttggggccagagttttaaaaatgtaggggagggatacgactaaaaaggcagca

SEQ ID NO: 21983 - DNA, 25 bp, Artificial sequence  Extension Primer
  Primer
acaggctaatatgttaaatgcatca

SEQ ID NO: 21984 - DNA, 25 bp, Artificial sequence  Extension Primer
  Primer
ctacttcgctagacttgggactatt

SEQ ID NO: 21985 - DNA, 25 bp, Artificial sequence  Extension Primer
  Primer
tcactattgcaggtatccagaattt

SEQ ID NO: 21986 - DNA, 25 bp, Artificial sequence  Extension Primer
  Primer
ttcacaaaagacaatgaaggctaca

SEQ ID NO: 21987 - DNA, 25 bp, Artificial sequence  Extension Primer
  Primer
ttccttcatgaaacagatggtctcc

SEQ ID NO: 21988 - DNA, 25 bp, Artificial sequence  Extension Primer
  Primer
gtggtggcccttttccttactccaa

SEQ ID NO: 21989 - DNA, 22 bp, Artificial sequence  Extension Primer
  Primer
gggtcttcttctccttctcaga

SEQ ID NO: 21990 - DNA, 25 bp, Artificial sequence  Extension Primer
  Primer
accatctgaattccttagtgaaaga

SEQ ID NO: 21991 - DNA, 25 bp, Artificial sequence  Extension Primer
  Primer
catatatgtcagagtccaattatgc

SEQ ID NO: 21992 - DNA, 25 bp, Artificial sequence  Extension Primer
  Primer
tatgtatctgaggacgagatgtgtc

SEQ ID NO: 21993 - DNA, 25 bp, Artificial sequence  Extension Primer
  Primer
cagtattcaggcttctgaaggtgga

SEQ ID NO: 21994 - DNA, 22 bp, Artificial sequence  Extension Primer
  Primer
gtccagaaggcattgtttctcc

SEQ ID NO: 21995 - DNA, 25 bp, Artificial sequence  Extension Primer
  Primer
ttgagagggttttaagtgcagagtg

SEQ ID NO: 21996 - DNA, 25 bp, Artificial sequence  Extension Primer
  Primer
ttgaggtctttcaatatacaattaa

SEQ ID NO: 21997 - DNA, 25 bp, Artificial sequence  Extension Primer
  Primer
agagagaaagcaaaagagaggtggg

SEQ ID NO: 21998 - DNA, 25 bp, Artificial sequence  Extension Primer
  Primer
gtatctggagtaggccttcctttcc

SEQ ID NO: 21999 - DNA, 25 bp, Artificial sequence  Extension Primer
  Primer
gggaggcgagaacaagagatggaga

SEQ ID NO: 22000 - DNA, 25 bp, Artificial sequence  Extension Primer
  Primer
ttctcccaatttaaagagctttgta

SEQ ID NO: 22001 - DNA, 25 bp, Artificial sequence  Extension Primer
  Primer
cgccggctgactcgtcagcagactc

SEQ ID NO: 22002 - DNA, 25 bp, Artificial sequence  Extension Primer
  Primer
gcagatgtcttgcttaaacatgaag

SEQ ID NO: 22003 - DNA, 22 bp, Artificial sequence  Extension Primer
  Primer
gtagaaccttarcatctgtctg

SEQ ID NO: 22004 - DNA, 25 bp, Artificial sequence  Extension Primer
  Primer
agatatgatcctgaagaggtgaaac

SEQ ID NO: 22005 - DNA, 25 bp, Artificial sequence  Extension Primer
  Primer
tgtgcttagaacagtatataagtaa

SEQ ID NO: 22006 - DNA, 25 bp, Artificial sequence  Extension Primer
  Primer
agatattcccaacccagaggtcaaa

SEQ ID NO: 22007 - DNA, 25 bp, Artificial sequence  Extension Primer
  Primer
atctcgattttatgcgcagttcttc

SEQ ID NO: 22008 - DNA, 25 bp, Artificial sequence  Extension Primer
  Primer
cctctcattgtctttggtgttctct

SEQ ID NO: 22009 - DNA, 25 bp, Artificial sequence  Extension Primer
  Primer
atgagctcacatttgccaatgaaca

SEQ ID NO: 22010 - DNA, 25 bp, Artificial sequence  Extension Primer
  Primer
cttcgtatcatcctacacactcagg

SEQ ID NO: 22011 - DNA, 25 bp, Artificial sequence  Extension Primer
  Primer
agwgccagtggtacaataataacat

SEQ ID NO: 22012 - DNA, 25 bp, Artificial sequence  Extension Primer
  Primer
tgctcttctccttattagaaacaca

SEQ ID NO: 22013 - DNA, 25 bp, Artificial sequence  Extension Primer
  Primer
taaacactgataaacaggtgactga

SEQ ID NO: 22014 - DNA, 25 bp, Artificial sequence  Extension Primer
  Primer
agagatttgggagtgagcagaatgt

SEQ ID NO: 22015 - DNA, 25 bp, Artificial sequence  Extension Primer
  Primer
cgtggtcagtgccttaaattagcct

SEQ ID NO: 22016 - DNA, 25 bp, Artificial sequence  Extension Primer
  Primer
gcccaaggtcacagagttggtaggt

SEQ ID NO: 22017 - DNA, 25 bp, Artificial sequence  Extension Primer
  Primer
aagcaacaaatggtacccttaaaat

SEQ ID NO: 22018 - DNA, 25 bp, Artificial sequence  Extension Primer
  Primer
caagcaggtggttcacatctaattt

SEQ ID NO: 22019 - DNA, 25 bp, Artificial sequence  Extension Primer
  Primer
taatgaagagaatggtctataaagt

SEQ ID NO: 22020 - DNA, 25 bp, Artificial sequence  Extension Primer
  Primer
ctattcgatgctcagttagacacac

SEQ ID NO: 22021 - DNA, 25 bp, Artificial sequence  Extension Primer
  Primer
tggctgacagtgagggtgggcccct

SEQ ID NO: 22022 - DNA, 25 bp, Artificial sequence  Extension Primer
  Primer
cttccagctttaacattctatgact

SEQ ID NO: 22023 - DNA, 25 bp, Artificial sequence  Extension Primer
  Primer
gctgattaggaaacagtgtctaagg

SEQ ID NO: 22024 - DNA, 25 bp, Artificial sequence  Extension Primer
  Primer
ttaatgaaggracgaaggcgtccca

SEQ ID NO: 22025 - DNA, 25 bp, Artificial sequence  Extension Primer
  Primer
gctcaccatctttggaggtatatca

SEQ ID NO: 22026 - DNA, 25 bp, Artificial sequence  Extension Primer
  Primer
sttcagatatgttttcttccccagc

SEQ ID NO: 22027 - DNA, 25 bp, Artificial sequence  Extension Primer
  Primer
atttaaacaagaatatttctttact

SEQ ID NO: 22028 - DNA, 25 bp, Artificial sequence  Extension Primer
  Primer
aggccctgactattcccatgtcctc

SEQ ID NO: 22029 - DNA, 25 bp, Artificial sequence  Extension Primer
  Primer
ggtttgttgtcctcagtaatctcat

SEQ ID NO: 22030 - DNA, 25 bp, Artificial sequence  Extension Primer
  Primer
tgtcttgattctactcagttgctca

SEQ ID NO: 22031 - DNA, 25 bp, Artificial sequence  Extension Primer
  Primer
atgataatgtatgaatctcgttgca

SEQ ID NO: 22032 - DNA, 25 bp, Artificial sequence  Extension Primer
  Primer
gatatattaatgaactagatatagt

SEQ ID NO: 22033 - DNA, 25 bp, Artificial sequence  Extension Primer
  Primer
aaagccattaaggacaaaagattgt

SEQ ID NO: 22034 - DNA, 25 bp, Artificial sequence  Extension Primer
  Primer
ctgtataatctttacagaaaaatga

SEQ ID NO: 22035 - DNA, 25 bp, Artificial sequence  Extension Primer
  Primer
ccagtggtctcagaggccctgggag

SEQ ID NO: 22036 - DNA, 22 bp, Artificial sequence  Extension Primer
  Primer
gcctattcatatcaccatgctt

SEQ ID NO: 22037 - DNA, 25 bp, Artificial sequence  Extension Primer
  Primer
cttaaagagacatctaactaatgct

SEQ ID NO: 22038 - DNA, 25 bp, Artificial sequence  Extension Primer
  Primer
taaccactggaccaccagggaagtc

SEQ ID NO: 22039 - DNA, 25 bp, Artificial sequence  Extension Primer
  Primer
agccaggggggctatatatagtcca

SEQ ID NO: 22040 - DNA, 25 bp, Artificial sequence  Extension Primer
  Primer
atatcttagtagtagaaattataca

SEQ ID NO: 22041 - DNA, 25 bp, Artificial sequence  Extension Primer
  Primer
aaagtcaggcaagaggttgactttg

SEQ ID NO: 22042 - DNA, 25 bp, Artificial sequence  Extension Primer
  Primer
aggtttccttccctagaaccagatt

SEQ ID NO: 22043 - DNA, 25 bp, Artificial sequence  Extension Primer
  Primer
ggcccgcctggacctcacctccaac

SEQ ID NO: 22044 - DNA, 25 bp, Artificial sequence  Extension Primer
  Primer
agagaaaacaagaaatatgtaaaga

SEQ ID NO: 22045 - DNA, 25 bp, Artificial sequence  Extension Primer
  Primer
gctcaaagtctgctctgtcttaact

SEQ ID NO: 22046 - DNA, 25 bp, Artificial sequence  Extension Primer
  Primer
attagaacacaaatgttcaaccttt

SEQ ID NO: 22047 - DNA, 25 bp, Artificial sequence  Extension Primer
  Primer
gtggagacagctttgccagccccgc

SEQ ID NO: 22048 - DNA, 25 bp, Artificial sequence  Extension Primer
  Primer
tgtttagtgcttattttattacctc

SEQ ID NO: 22049 - DNA, 25 bp, Artificial sequence  Extension Primer
  Primer
gtgaggacagtaaatatgacaccat

SEQ ID NO: 22050 - DNA, 25 bp, Artificial sequence  Extension Primer
  Primer
agtggaatacttaataatcaggctt

SEQ ID NO: 22051 - DNA, 25 bp, Artificial sequence  Extension Primer
  Primer
aatgaatgagtgaacacatgcataa

SEQ ID NO: 22052 - DNA, 25 bp, Artificial sequence  Extension Primer
  Primer
gctgcttcctctagakcttgtggac

SEQ ID NO: 22053 - DNA, 25 bp, Artificial sequence  Extension Primer
  Primer
gtgtctgagtttcagctacaaacca

SEQ ID NO: 22054 - DNA, 25 bp, Artificial sequence  Extension Primer
  Primer
cacttagcctaaaaatgtggataaa

SEQ ID NO: 22055 - DNA, 25 bp, Artificial sequence  Extension Primer
  Primer
cacatatcctgagagtaaccttgaa

SEQ ID NO: 22056 - DNA, 25 bp, Artificial sequence  Extension Primer
  Primer
gacacctagcattagacacataacc

SEQ ID NO: 22057 - DNA, 25 bp, Artificial sequence  Extension Primer
  Primer
aaaatgtatttcgtacataggtaac

SEQ ID NO: 22058 - DNA, 25 bp, Artificial sequence  Extension Primer
  Primer
tagacgctggcctggtaggaagtgg

SEQ ID NO: 22059 - DNA, 25 bp, Artificial sequence  Extension Primer
  Primer
taaagcagaagcaggtgaaaaaatt

SEQ ID NO: 22060 - DNA, 25 bp, Artificial sequence  Extension Primer
  Primer
attctgcagtattatgyttctcctg

SEQ ID NO: 22061 - DNA, 25 bp, Artificial sequence  Extension Primer
  Primer
ctccaatttgaaacttcacagactt

SEQ ID NO: 22062 - DNA, 25 bp, Artificial sequence  Extension Primer
  Primer
gaacaatcagtcccagacaacatgc

SEQ ID NO: 22063 - DNA, 25 bp, Artificial sequence  Extension Primer
  Primer
caggtagaaattcacaatggaaatt

SEQ ID NO: 22064 - DNA, 25 bp, Artificial sequence  Extension Primer
  Primer
attttaaggagctcacaacacagta

SEQ ID NO: 22065 - DNA, 25 bp, Artificial sequence  Extension Primer
  Primer
gtgcaggaaaaaaaaaaaaaaaaga

SEQ ID NO: 22066 - DNA, 25 bp, Artificial sequence  Extension Primer
  Primer
atgatagcacatacctcataaggtg

SEQ ID NO: 22067 - DNA, 25 bp, Artificial sequence  Extension Primer
  Primer
ccctccccttcactcccactcagac

SEQ ID NO: 22068 - DNA, 25 bp, Artificial sequence  Extension Primer
  Primer
taacttcaatcataatttctataca

SEQ ID NO: 22069 - DNA, 25 bp, Artificial sequence  Extension Primer
  Primer
catcactcagccactgcttctctaa

SEQ ID NO: 22070 - DNA, 25 bp, Artificial sequence  Extension Primer
  Primer
ctcctgtgagaggagagcagaagac

SEQ ID NO: 22071 - DNA, 25 bp, Artificial sequence  Extension Primer
  Primer
tcctacagctgaaccctggggtagc

SEQ ID NO: 22072 - DNA, 25 bp, Artificial sequence  Extension Primer
  Primer
aaaaggtgctccttgaacacacaca

SEQ ID NO: 22073 - DNA, 25 bp, Artificial sequence  Extension Primer
  Primer
gagtgaacacagactttggagtccc

SEQ ID NO: 22074 - DNA, 25 bp, Artificial sequence  Extension Primer
  Primer
cccttctttacttcatttccattac

SEQ ID NO: 22075 - DNA, 25 bp, Artificial sequence  Extension Primer
  Primer
tcattaagaatcatgtgctgagtat

SEQ ID NO: 22076 - DNA, 25 bp, Artificial sequence  Extension Primer
  Primer
tgygggagcgataacacggttgcct

SEQ ID NO: 22077 - DNA, 25 bp, Artificial sequence  Extension Primer
  Primer
gcaagctagaccaggaacagtgtta

SEQ ID NO: 22078 - DNA, 25 bp, Artificial sequence  Extension Primer
  Primer
tgggaaaaggttgaattaggaaata

SEQ ID NO: 22079 - DNA, 25 bp, Artificial sequence  Extension Primer
  Primer
tacatcatattttaatacagacctc

SEQ ID NO: 22080 - DNA, 25 bp, Artificial sequence  Extension Primer
  Primer
ccagagtcagtcctaacgccagcct

SEQ ID NO: 22081 - DNA, 25 bp, Artificial sequence  Extension Primer
  Primer
cgggcttctctgatacctttttatt

SEQ ID NO: 22082 - DNA, 25 bp, Artificial sequence  Extension Primer
  Primer
tgggctgaagggagcgttgagtgta

SEQ ID NO: 22083 - DNA, 25 bp, Artificial sequence  Extension Primer
  Primer
caagcattcaagctctggttgttct

SEQ ID NO: 22084 - DNA, 25 bp, Artificial sequence  Extension Primer
  Primer
ttycagcatttggaagaactcaaaa

SEQ ID NO: 22085 - DNA, 25 bp, Artificial sequence  Extension Primer
  Primer
gtctcccaacccagtacatcaaatc

SEQ ID NO: 22086 - DNA, 25 bp, Artificial sequence  Extension Primer
  Primer
acactacatttcacaaatacacaca

SEQ ID NO: 22087 - DNA, 25 bp, Artificial sequence  Extension Primer
  Primer
ttgagcaaatatttatagcacatct

SEQ ID NO: 22088 - DNA, 25 bp, Artificial sequence  Extension Primer
  Primer
acaaggcaatagatatgtttggcag

SEQ ID NO: 22089 - DNA, 25 bp, Artificial sequence  Extension Primer
  Primer
catgtaaagactatggtgtccctta

SEQ ID NO: 22090 - DNA, 25 bp, Artificial sequence  Extension Primer
  Primer
atgttatgaactaactttcaatggg

SEQ ID NO: 22091 - DNA, 22 bp, Artificial sequence  Extension Primer
  Primer
ggaacaggtggaagagtagaaa

SEQ ID NO: 22092 - DNA, 25 bp, Artificial sequence  Extension Primer
  Primer
ttcagcagccaaaactgcgacccca

SEQ ID NO: 22093 - DNA, 25 bp, Artificial sequence  Extension Primer
  Primer
tcaatcctaaatttaagctgtattt

SEQ ID NO: 22094 - DNA, 25 bp, Artificial sequence  Extension Primer
  Primer
gatcccctcacattcagtaaaagca

SEQ ID NO: 22095 - DNA, 25 bp, Artificial sequence  Extension Primer
  Primer
ggcccaccagtcrtctgccagccca

SEQ ID NO: 22096 - DNA, 25 bp, Artificial sequence  Extension Primer
  Primer
ctagatattttcattgtggttctgt

SEQ ID NO: 22097 - DNA, 25 bp, Artificial sequence  Extension Primer
  Primer
gtaaaacttataacatagagcagaa

SEQ ID NO: 22098 - DNA, 25 bp, Artificial sequence  Extension Primer
  Primer
aaagaccataagttctcaaagatga

SEQ ID NO: 22099 - DNA, 25 bp, Artificial sequence  Extension Primer
  Primer
tggacatatttttccaggctttcag

SEQ ID NO: 22100 - DNA, 25 bp, Artificial sequence  Extension Primer
  Primer
aagcaggtgaatcagtcagcacatc

SEQ ID NO: 22101 - DNA, 25 bp, Artificial sequence  Extension Primer
  Primer
ggggatgtggaggatgcagatcttt

SEQ ID NO: 22102 - DNA, 25 bp, Artificial sequence  Extension Primer
  Primer
tcctcatccataaaagtggaaaacc

SEQ ID NO: 22103 - DNA, 25 bp, Artificial sequence  Extension Primer
  Primer
trtattgtgtgtattttgtctggtc

SEQ ID NO: 22104 - DNA, 25 bp, Artificial sequence  Extension Primer
  Primer
actccactgtttgtacactttaggy

SEQ ID NO: 22105 - DNA, 25 bp, Artificial sequence  Extension Primer
  Primer
actctgtaaacacacacagcaaact

SEQ ID NO: 22106 - DNA, 25 bp, Artificial sequence  Extension Primer
  Primer
agaactaatcacaccgaacggcgta

SEQ ID NO: 22107 - DNA, 25 bp, Artificial sequence  Extension Primer
  Primer
agagggatatcatttttcgtaacag

SEQ ID NO: 22108 - DNA, 25 bp, Artificial sequence  Extension Primer
  Primer
aaaagattaattttcaacttctgat

SEQ ID NO: 22109 - DNA, 25 bp, Artificial sequence  Extension Primer
  Primer
gtgctcacaaactgcaactcttttc

SEQ ID NO: 22110 - DNA, 25 bp, Artificial sequence  Extension Primer
  Primer
ttgagtgtagcctgtgggttataga

SEQ ID NO: 22111 - DNA, 25 bp, Artificial sequence  Extension Primer
  Primer
cttcacctcttgtattgagatgata

SEQ ID NO: 22112 - DNA, 25 bp, Artificial sequence  Extension Primer
  Primer
ttttgtggatatatatggattgttt

SEQ ID NO: 22113 - DNA, 25 bp, Artificial sequence  Extension Primer
  Primer
tggtatattttactttagttttatg

SEQ ID NO: 22114 - DNA, 25 bp, Artificial sequence  Extension Primer
  Primer
atcaataaagatttggcgagctttt

SEQ ID NO: 22115 - DNA, 25 bp, Artificial sequence  Extension Primer
  Primer
agagtgaggtcaagtgttgctatca

SEQ ID NO: 22116 - DNA, 25 bp, Artificial sequence  Extension Primer
  Primer
tctgcattcccttccattttaagtc

SEQ ID NO: 22117 - DNA, 25 bp, Artificial sequence  Extension Primer
  Primer
gagtctcctgacaggttagtggggc

SEQ ID NO: 22118 - DNA, 25 bp, Artificial sequence  Extension Primer
  Primer
gtgccaggtattggtgatatacaat

SEQ ID NO: 22119 - DNA, 25 bp, Artificial sequence  Extension Primer
  Primer
ccagtctcccctgccacacacagac

SEQ ID NO: 22120 - DNA, 25 bp, Artificial sequence  Extension Primer
  Primer
atgactcttgatatttttattttat

SEQ ID NO: 22121 - DNA, 25 bp, Artificial sequence  Extension Primer
  Primer
tgttccctgcaagtaaaagcccatc

SEQ ID NO: 22122 - DNA, 25 bp, Artificial sequence  Extension Primer
  Primer
tgctcaaaagatgaccttgatgtat

SEQ ID NO: 22123 - DNA, 25 bp, Artificial sequence  Extension Primer
  Primer
gaccttgatgtatrttacarttttc

SEQ ID NO: 22124 - DNA, 25 bp, Artificial sequence  Extension Primer
  Primer
agttaagataatgaacatatccatc

SEQ ID NO: 22125 - DNA, 25 bp, Artificial sequence  Extension Primer
  Primer
ttaaaaataaagggatattaagaaa

SEQ ID NO: 22126 - DNA, 25 bp, Artificial sequence  Extension Primer
  Primer
aatgcaaagaatactgtagcctgaa

SEQ ID NO: 22127 - DNA, 22 bp, Artificial sequence  Extension Primer
  Primer
aggcaggtacaatccccggctc

SEQ ID NO: 22128 - DNA, 25 bp, Artificial sequence  Extension Primer
  Primer
taaaagaatataaactatatacacc

SEQ ID NO: 22129 - DNA, 25 bp, Artificial sequence  Extension Primer
  Primer
cacatagacacacacacagatgaaa

SEQ ID NO: 22130 - DNA, 25 bp, Artificial sequence  Extension Primer
  Primer
ccgagagaaccttctcctctgtggg

SEQ ID NO: 22131 - DNA, 25 bp, Artificial sequence  Extension Primer
  Primer
ggaatttgtcctggaaacacatctt

SEQ ID NO: 22132 - DNA, 25 bp, Artificial sequence  Extension Primer
  Primer
tcttaaaatatttttatacagtaga

SEQ ID NO: 22133 - DNA, 25 bp, Artificial sequence  Extension Primer
  Primer
tcccccgttcaaagcccggttgctg

SEQ ID NO: 22134 - DNA, 25 bp, Artificial sequence  Extension Primer
  Primer
aagagctggagaaactatacaagag

SEQ ID NO: 22135 - DNA, 25 bp, Artificial sequence  Extension Primer
  Primer
aatactcaggggcttattatatcta

SEQ ID NO: 22136 - DNA, 25 bp, Artificial sequence  Extension Primer
  Primer
aggagaaaagttatagatctcccaa

SEQ ID NO: 22137 - DNA, 25 bp, Artificial sequence  Extension Primer
  Primer
gggtaggggaggtgctgtgtctatg

SEQ ID NO: 22138 - DNA, 25 bp, Artificial sequence  Extension Primer
  Primer
tcttaaaattaaaaaaaaaaaaagt

SEQ ID NO: 22139 - DNA, 25 bp, Artificial sequence  Extension Primer
  Primer
agaatagattaatgtgagaatgaat

SEQ ID NO: 22140 - DNA, 25 bp, Artificial sequence  Extension Primer
  Primer
actcagcaagttttacagggtagaa

SEQ ID NO: 22141 - DNA, 25 bp, Artificial sequence  Extension Primer
  Primer
tgctttctgcagtcatttttcaaaa

SEQ ID NO: 22142 - DNA, 25 bp, Artificial sequence  Extension Primer
  Primer
tacactgctactccatatgaagatt

SEQ ID NO: 22143 - DNA, 25 bp, Artificial sequence  Extension Primer
  Primer
cccacatctccccagcttcaaacac

SEQ ID NO: 22144 - DNA, 25 bp, Artificial sequence  Extension Primer
  Primer
cagtaagtctccactttgcttttta

SEQ ID NO: 22145 - DNA, 25 bp, Artificial sequence  Extension Primer
  Primer
tggttatccctggtgctgtttccct

SEQ ID NO: 22146 - DNA, 25 bp, Artificial sequence  Extension Primer
  Primer
gcctcggcgtgtgaatcatttaaca

SEQ ID NO: 22147 - DNA, 25 bp, Artificial sequence  Extension Primer
  Primer
gcaggacatttgacaagttactcaa

SEQ ID NO: 22148 - DNA, 25 bp, Artificial sequence  Extension Primer
  Primer
atattataaattcgaataacctctt

SEQ ID NO: 22149 - DNA, 25 bp, Artificial sequence  Extension Primer
  Primer
agcatccttgtgatccaggggccta

SEQ ID NO: 22150 - DNA, 25 bp, Artificial sequence  Extension Primer
  Primer
tgctgctcaggatgctacratgcct

SEQ ID NO: 22151 - DNA, 25 bp, Artificial sequence  Extension Primer
  Primer
ctaggaaagggcaggacaggaaaaa

SEQ ID NO: 22152 - DNA, 25 bp, Artificial sequence  Extension Primer
  Primer
gcaattagtgacagggaagcactta

SEQ ID NO: 22153 - DNA, 25 bp, Artificial sequence  Extension Primer
  Primer
ggcctgcttggtttattgcctcttg

SEQ ID NO: 22154 - DNA, 25 bp, Artificial sequence  Extension Primer
  Primer
taaaaatgcataaagtaaaagtgac

SEQ ID NO: 22155 - DNA, 25 bp, Artificial sequence  Extension Primer
  Primer
ctcctggccactagaggggggtagc

SEQ ID NO: 22156 - DNA, 25 bp, Artificial sequence  Extension Primer
  Primer
gggggtggatttcaagcatccttac

SEQ ID NO: 22157 - DNA, 25 bp, Artificial sequence  Extension Primer
  Primer
agtaaaccaaatcaaaagagggcaa

SEQ ID NO: 22158 - DNA, 25 bp, Artificial sequence  Extension Primer
  Primer
tatttaattgaaaagaattttgaag

SEQ ID NO: 22159 - DNA, 25 bp, Artificial sequence  Extension Primer
  Primer
aatagagtcttgtgttccacgctcc

SEQ ID NO: 22160 - DNA, 25 bp, Artificial sequence  Extension Primer
  Primer
cactcaacagtgctttcaaagggga

SEQ ID NO: 22161 - DNA, 25 bp, Artificial sequence  Extension Primer
  Primer
ttgagatccatacggtgattcaaag

SEQ ID NO: 22162 - DNA, 25 bp, Artificial sequence  Extension Primer
  Primer
gatacaatactacaaacgcggtttc

SEQ ID NO: 22163 - DNA, 25 bp, Artificial sequence  Extension Primer
  Primer
tgacatcatgactttgtgccttgta

SEQ ID NO: 22164 - DNA, 25 bp, Artificial sequence  Extension Primer
  Primer
acagactggcagcttgaattttttt

SEQ ID NO: 22165 - DNA, 25 bp, Artificial sequence  Extension Primer
  Primer
gcccatagttctcagttaccgaccc

SEQ ID NO: 22166 - DNA, 22 bp, Artificial sequence  Extension Primer
  Primer
gtttgcttggttggttcctcat

SEQ ID NO: 22167 - DNA, 25 bp, Artificial sequence  Extension Primer
  Primer
gtaaattctgcatgtaaatgtcttc

SEQ ID NO: 22168 - DNA, 25 bp, Artificial sequence  Extension Primer
  Primer
taataatattaagtctaaaatatgt

SEQ ID NO: 22169 - DNA, 25 bp, Artificial sequence  Extension Primer
  Primer
ttaaatcttagattaaggcaatatt

SEQ ID NO: 22170 - DNA, 25 bp, Artificial sequence  Extension Primer
  Primer
atcccctctaacagtgctcctgtct

SEQ ID NO: 22171 - DNA, 25 bp, Artificial sequence  Extension Primer
  Primer
gtttgcagacttcacttccaatgtc

SEQ ID NO: 22172 - DNA, 25 bp, Artificial sequence  Extension Primer
  Primer
aactccttatacccaagcacttatg

SEQ ID NO: 22173 - DNA, 25 bp, Artificial sequence  Extension Primer
  Primer
accgcatcaacaaggtgcagaaggt

SEQ ID NO: 22174 - DNA, 25 bp, Artificial sequence  Extension Primer
  Primer
aagctgtgtaaactggtcgtgagca

SEQ ID NO: 22175 - DNA, 25 bp, Artificial sequence  Extension Primer
  Primer
attatacctaccatatgagccagca

SEQ ID NO: 22176 - DNA, 22 bp, Artificial sequence  Extension Primer
  Primer
tcgtctgsgaaataacgtgaca

SEQ ID NO: 22177 - DNA, 25 bp, Artificial sequence  Extension Primer
  Primer
ccctcctccctcctccctccccata

SEQ ID NO: 22178 - DNA, 25 bp, Artificial sequence  Extension Primer
  Primer
gtttctagagctgatgaagaaaact

SEQ ID NO: 22179 - DNA, 25 bp, Artificial sequence  Extension Primer
  Primer
ctggcactcmaagcccccactctat

SEQ ID NO: 22180 - DNA, 25 bp, Artificial sequence  Extension Primer
  Primer
tcttcgaatatatgccagtattcat

SEQ ID NO: 22181 - DNA, 25 bp, Artificial sequence  Extension Primer
  Primer
aatagaaaagaatacctctctggca

SEQ ID NO: 22182 - DNA, 25 bp, Artificial sequence  Extension Primer
  Primer
caagaatgcctgatttttttccttt

SEQ ID NO: 22183 - DNA, 25 bp, Artificial sequence  Extension Primer
  Primer
ctgataaaaggaaaggaaaattaac

SEQ ID NO: 22184 - DNA, 25 bp, Artificial sequence  Extension Primer
  Primer
acaaaaagcagcttaagatcttcta

SEQ ID NO: 22185 - DNA, 25 bp, Artificial sequence  Extension Primer
  Primer
cactcttactccacacactttgatt

SEQ ID NO: 22186 - DNA, 25 bp, Artificial sequence  Extension Primer
  Primer
tgttcatcgattggaagatagttga

SEQ ID NO: 22187 - DNA, 25 bp, Artificial sequence  Extension Primer
  Primer
gatgactctccgtaaagaattactt

SEQ ID NO: 22188 - DNA, 25 bp, Artificial sequence  Extension Primer
  Primer
tactgtgtgatttaagaaatggaaa

SEQ ID NO: 22189 - DNA, 25 bp, Artificial sequence  Extension Primer
  Primer
cttttaagaactacagagctgagat

SEQ ID NO: 22190 - DNA, 25 bp, Artificial sequence  Extension Primer
  Primer
atctttacaaattacacggtattcc

SEQ ID NO: 22191 - DNA, 25 bp, Artificial sequence  Extension Primer
  Primer
tatggtccccatcccctcttcttga

SEQ ID NO: 22192 - DNA, 25 bp, Artificial sequence  Extension Primer
  Primer
tgtctatcagctacccaaagctaga

SEQ ID NO: 22193 - DNA, 25 bp, Artificial sequence  Extension Primer
  Primer
gacttcctrctttgagcaagtctct

SEQ ID NO: 22194 - DNA, 25 bp, Artificial sequence  Extension Primer
  Primer
aaaaaatggaaagcggaacattaac

SEQ ID NO: 22195 - DNA, 25 bp, Artificial sequence  Extension Primer
  Primer
ctgtgcagtccatcctgctggtgac

SEQ ID NO: 22196 - DNA, 25 bp, Artificial sequence  Extension Primer
  Primer
attttgtacagaaaaatggacgaca

SEQ ID NO: 22197 - DNA, 25 bp, Artificial sequence  Extension Primer
  Primer
tttctcagttctcccatgctttcca

SEQ ID NO: 22198 - DNA, 25 bp, Artificial sequence  Extension Primer
  Primer
attctggccaaggtgctgagagatc

SEQ ID NO: 22199 - DNA, 25 bp, Artificial sequence  Extension Primer
  Primer
tcagcgggatcgtgtatgtgattga

SEQ ID NO: 22200 - DNA, 25 bp, Artificial sequence  Extension Primer
  Primer
tacttaagacccctcctcaccttct

SEQ ID NO: 22201 - DNA, 25 bp, Artificial sequence  Extension Primer
  Primer
taatgaaaacatcctgttactcata

SEQ ID NO: 22202 - DNA, 25 bp, Artificial sequence  Extension Primer
  Primer
agtcagtgcagtgatggtgtgagtc

SEQ ID NO: 22203 - DNA, 25 bp, Artificial sequence  Extension Primer
  Primer
ttgggaaaagattctgctgtcatgg

SEQ ID NO: 22204 - DNA, 25 bp, Artificial sequence  Extension Primer
  Primer
acactaaatctaccttgatattcaa

SEQ ID NO: 22205 - DNA, 25 bp, Artificial sequence  Extension Primer
  Primer
aatagaatttaatctaatttttaag

SEQ ID NO: 22206 - DNA, 25 bp, Artificial sequence  Extension Primer
  Primer
taaaatgaacaatacacaatggaga

SEQ ID NO: 22207 - DNA, 25 bp, Artificial sequence  Extension Primer
  Primer
aatgctctagtcaatggcttctcaa

SEQ ID NO: 22208 - DNA, 25 bp, Artificial sequence  Extension Primer
  Primer
aggtttaatggcttaaaactgttct

SEQ ID NO: 22209 - DNA, 25 bp, Artificial sequence  Extension Primer
  Primer
tccaacagaggctgtcatagaataa

SEQ ID NO: 22210 - DNA, 25 bp, Artificial sequence  Extension Primer
  Primer
aagaaggaaaacagaccccagaatc

SEQ ID NO: 22211 - DNA, 25 bp, Artificial sequence  Extension Primer
  Primer
ccaaaacccagatcccaagttctcc

SEQ ID NO: 22212 - DNA, 25 bp, Artificial sequence  Extension Primer
  Primer
gggaagaaattttttttttctcata

SEQ ID NO: 22213 - DNA, 25 bp, Artificial sequence  Extension Primer
  Primer
tagtgagttaacttgacattccttg

SEQ ID NO: 22214 - DNA, 25 bp, Artificial sequence  Extension Primer
  Primer
gacattttctccatcttcttacaca

SEQ ID NO: 22215 - DNA, 25 bp, Artificial sequence  Extension Primer
  Primer
ctaggtgctcaggtttcagcagttc

SEQ ID NO: 22216 - DNA, 25 bp, Artificial sequence  Extension Primer
  Primer
agcaagttaaactttctttcaggat

SEQ ID NO: 22217 - DNA, 25 bp, Artificial sequence  Extension Primer
  Primer
ctgtttgaatttggtgtcaaacttt

SEQ ID NO: 22218 - DNA, 25 bp, Artificial sequence  Extension Primer
  Primer
gatcttgggggcccaggaaaaggtt

SEQ ID NO: 22219 - DNA, 25 bp, Artificial sequence  Extension Primer
  Primer
accactggagagcatttttcacttc

SEQ ID NO: 22220 - DNA, 25 bp, Artificial sequence  Extension Primer
  Primer
atgtcaagtgctggagagccgtcac

SEQ ID NO: 22221 - DNA, 25 bp, Artificial sequence  Extension Primer
  Primer
ttcaaacaagcttctgtcggagtcc

SEQ ID NO: 22222 - DNA, 25 bp, Artificial sequence  Extension Primer
  Primer
ctacaatggatctccttaatggctc

SEQ ID NO: 22223 - DNA, 25 bp, Artificial sequence  Extension Primer
  Primer
gaggatatgagccttgaatgaagaa

SEQ ID NO: 22224 - DNA, 25 bp, Artificial sequence  Extension Primer
  Primer
gagggacgggcctgacggggggtgc

SEQ ID NO: 22225 - DNA, 25 bp, Artificial sequence  Extension Primer
  Primer
atccttatttctctaggaagagtgc

SEQ ID NO: 22226 - DNA, 25 bp, Artificial sequence  Extension Primer
  Primer
aaaagccaagttcggttcacggcac

SEQ ID NO: 22227 - DNA, 25 bp, Artificial sequence  Extension Primer
  Primer
tggacctattctctagataccaagc

SEQ ID NO: 22228 - DNA, 25 bp, Artificial sequence  Extension Primer
  Primer
tgtgagtttttgtgtattttaggac

SEQ ID NO: 22229 - DNA, 25 bp, Artificial sequence  Extension Primer
  Primer
tayacctgatggaaatgtaagtcgt

SEQ ID NO: 22230 - DNA, 25 bp, Artificial sequence  Extension Primer
  Primer
cagagccagcagagtgttcagtcca

SEQ ID NO: 22231 - DNA, 25 bp, Artificial sequence  Extension Primer
  Primer
cttggaggtgaaatccataccagaa

SEQ ID NO: 22232 - DNA, 25 bp, Artificial sequence  Extension Primer
  Primer
caattaccatgtgcctttcattttt

SEQ ID NO: 22233 - DNA, 25 bp, Artificial sequence  Extension Primer
  Primer
aaaaggatttgttttcccaaggacc

SEQ ID NO: 22234 - DNA, 25 bp, Artificial sequence  Extension Primer
  Primer
gctgctgctttgaaaaaaaaattcc

SEQ ID NO: 22235 - DNA, 25 bp, Artificial sequence  Extension Primer
  Primer
aaagttaacgatctgtcttatcttc

SEQ ID NO: 22236 - DNA, 25 bp, Artificial sequence  Extension Primer
  Primer
ctgaagcacctacttcttgtccttc

SEQ ID NO: 22237 - DNA, 25 bp, Artificial sequence  Extension Primer
  Primer
actgaattggcacccatggcatagc

SEQ ID NO: 22238 - DNA, 25 bp, Artificial sequence  Extension Primer
  Primer
gttctgtgtgtaagagggaagattc

SEQ ID NO: 22239 - DNA, 25 bp, Artificial sequence  Extension Primer
  Primer
gtattttacaaagtaaaccagacct

SEQ ID NO: 22240 - DNA, 25 bp, Artificial sequence  Extension Primer
  Primer
ggttgcttctatatatggaacaaca

SEQ ID NO: 22241 - DNA, 25 bp, Artificial sequence  Extension Primer
  Primer
ccatccttctcatggagaagacccc

SEQ ID NO: 22242 - DNA, 25 bp, Artificial sequence  Extension Primer
  Primer
gagtagtccgtgcaggctcccccca

SEQ ID NO: 22243 - DNA, 25 bp, Artificial sequence  Extension Primer
  Primer
tttaatattcagactgacatcccac

SEQ ID NO: 22244 - DNA, 25 bp, Artificial sequence  Extension Primer
  Primer
taaggaggctatgtggcattgtggg

SEQ ID NO: 22245 - DNA, 25 bp, Artificial sequence  Extension Primer
  Primer
tattattcaactatgatcatcaaag

SEQ ID NO: 22246 - DNA, 25 bp, Artificial sequence  Extension Primer
  Primer
taataaaggactttgtctcgcctcc

SEQ ID NO: 22247 - DNA, 25 bp, Artificial sequence  Extension Primer
  Primer
tcttggatacaaactgtaccaaaaa

SEQ ID NO: 22248 - DNA, 25 bp, Artificial sequence  Extension Primer
  Primer
ccatttttcacatgtggctgaaact

SEQ ID NO: 22249 - DNA, 25 bp, Artificial sequence  Extension Primer
  Primer
ccaaaacatatttctatcrtcaatg

SEQ ID NO: 22250 - DNA, 25 bp, Artificial sequence  Extension Primer
  Primer
aggttggtttctctccttgcaataa

SEQ ID NO: 22251 - DNA, 25 bp, Artificial sequence  Extension Primer
  Primer
catttactaaggagtaagatagttc

SEQ ID NO: 22252 - DNA, 25 bp, Artificial sequence  Extension Primer
  Primer
caattcataaggcaaacaaaatgca

SEQ ID NO: 22253 - DNA, 25 bp, Artificial sequence  Extension Primer
  Primer
tcatactactatgttaaagcaaact

SEQ ID NO: 22254 - DNA, 25 bp, Artificial sequence  Extension Primer
  Primer
aatttgttgttgttgtttagtcgct

SEQ ID NO: 22255 - DNA, 25 bp, Artificial sequence  Extension Primer
  Primer
aagtaggtcaatgggttcaagcagt

SEQ ID NO: 22256 - DNA, 25 bp, Artificial sequence  Extension Primer
  Primer
gaagggtgtggggatatggaggagc

SEQ ID NO: 22257 - DNA, 25 bp, Artificial sequence  Extension Primer
  Primer
caaactcaccaatgcccaatagaaa

SEQ ID NO: 22258 - DNA, 25 bp, Artificial sequence  Extension Primer
  Primer
aaggagtgttacttctctacagttt

SEQ ID NO: 22259 - DNA, 25 bp, Artificial sequence  Extension Primer
  Primer
tgttgrgacwgggagkggggagatg

SEQ ID NO: 22260 - DNA, 25 bp, Artificial sequence  Extension Primer
  Primer
gtgaagacaagatttgagtgcagga

SEQ ID NO: 22261 - DNA, 25 bp, Artificial sequence  Extension Primer
  Primer
aactctgccctccttccagccagca

SEQ ID NO: 22262 - DNA, 25 bp, Artificial sequence  Extension Primer
  Primer
agagaccaaaactgattcactaaaa

SEQ ID NO: 22263 - DNA, 25 bp, Artificial sequence  Extension Primer
  Primer
aactatgagatgtttccagcttctt

SEQ ID NO: 22264 - DNA, 25 bp, Artificial sequence  Extension Primer
  Primer
ttagatgtttgagtttcattctaaa

SEQ ID NO: 22265 - DNA, 25 bp, Artificial sequence  Extension Primer
  Primer
cgtttcttactaagttttgaaattg

SEQ ID NO: 22266 - DNA, 25 bp, Artificial sequence  Extension Primer
  Primer
tcctgttgtcacttgagtaattctt

SEQ ID NO: 22267 - DNA, 25 bp, Artificial sequence  Extension Primer
  Primer
cctgcctcatgggattgccgtgagt

SEQ ID NO: 22268 - DNA, 25 bp, Artificial sequence  Extension Primer
  Primer
cttccatcattaaaaagtattcccc

SEQ ID NO: 22269 - DNA, 25 bp, Artificial sequence  Extension Primer
  Primer
tctttattttcacctgattttctca

SEQ ID NO: 22270 - DNA, 25 bp, Artificial sequence  Extension Primer
  Primer
ttggygcttgaatgaagtagactat

SEQ ID NO: 22271 - DNA, 25 bp, Artificial sequence  Extension Primer
  Primer
agatggttagacagcatcactgact

SEQ ID NO: 22272 - DNA, 25 bp, Artificial sequence  Extension Primer
  Primer
gagagcttgccttcctgtaagtgat

SEQ ID NO: 22273 - DNA, 25 bp, Artificial sequence  Extension Primer
  Primer
gagccagttccaatcactccagtct

SEQ ID NO: 22274 - DNA, 25 bp, Artificial sequence  Extension Primer
  Primer
cagttcaagcctaaatgaagattgg

SEQ ID NO: 22275 - DNA, 25 bp, Artificial sequence  Extension Primer
  Primer
aatcctattagagattcgttatttc

SEQ ID NO: 22276 - DNA, 25 bp, Artificial sequence  Extension Primer
  Primer
ggtgtatagcaaaatgatccaggtt

SEQ ID NO: 22277 - DNA, 25 bp, Artificial sequence  Extension Primer
  Primer
ccaaatatgaatccacacatttcca

SEQ ID NO: 22278 - DNA, 25 bp, Artificial sequence  Extension Primer
  Primer
tctggccagcagagggactcaagag

SEQ ID NO: 22279 - DNA, 25 bp, Artificial sequence  Extension Primer
  Primer
attccaaaggtactcgccacccttc

SEQ ID NO: 22280 - DNA, 25 bp, Artificial sequence  Extension Primer
  Primer
tgttggttaaaagattcataaagac

SEQ ID NO: 22281 - DNA, 25 bp, Artificial sequence  Extension Primer
  Primer
gtgatgcccttgttacayaaagtcc

SEQ ID NO: 22282 - DNA, 25 bp, Artificial sequence  Extension Primer
  Primer
gacagagactcagagaaaaggatac

SEQ ID NO: 22283 - DNA, 25 bp, Artificial sequence  Extension Primer
  Primer
cgatcccatttccctttgacatttt

SEQ ID NO: 22284 - DNA, 25 bp, Artificial sequence  Extension Primer
  Primer
agttaaattacttgtgtaaggtgtt

SEQ ID NO: 22285 - DNA, 25 bp, Artificial sequence  Extension Primer
  Primer
tccactccatcccattcatttcctg

SEQ ID NO: 22286 - DNA, 25 bp, Artificial sequence  Extension Primer
  Primer
aggagtagtgtattgcactaggaat

SEQ ID NO: 22287 - DNA, 25 bp, Artificial sequence  Extension Primer
  Primer
cttttgaaaattgcttattactatc

SEQ ID NO: 22288 - DNA, 25 bp, Artificial sequence  Extension Primer
  Primer
ggagtcaacccaccacacaggatgg

SEQ ID NO: 22289 - DNA, 25 bp, Artificial sequence  Extension Primer
  Primer
tggacttaaacacacacacacgata

SEQ ID NO: 22290 - DNA, 25 bp, Artificial sequence  Extension Primer
  Primer
ttccgtgtctcatgttgcctctcac

SEQ ID NO: 22291 - DNA, 25 bp, Artificial sequence  Extension Primer
  Primer
tgtgtgaggtggatccacgtagata

SEQ ID NO: 22292 - DNA, 25 bp, Artificial sequence  Extension Primer
  Primer
aagagaaaagactaggtcacccaag

SEQ ID NO: 22293 - DNA, 25 bp, Artificial sequence  Extension Primer
  Primer
tgtggttaactactcaaagagtaca

SEQ ID NO: 22294 - DNA, 25 bp, Artificial sequence  Extension Primer
  Primer
tggtcatagtatcttgctctgggtc

SEQ ID NO: 22295 - DNA, 25 bp, Artificial sequence  Extension Primer
  Primer
agctgtggcaagtgcctgtgagtta

SEQ ID NO: 22296 - DNA, 25 bp, Artificial sequence  Extension Primer
  Primer
aggtcttgttttttgtttccaggca

SEQ ID NO: 22297 - DNA, 25 bp, Artificial sequence  Extension Primer
  Primer
tatccgctgaaactttcctagagca

SEQ ID NO: 22298 - DNA, 25 bp, Artificial sequence  Extension Primer
  Primer
tggggtctctggtgagaattagcac

SEQ ID NO: 22299 - DNA, 25 bp, Artificial sequence  Extension Primer
  Primer
aaaaaacattgtaatacaactatga

SEQ ID NO: 22300 - DNA, 25 bp, Artificial sequence  Extension Primer
  Primer
gcgaggtacatctgtaaacttgagc

SEQ ID NO: 22301 - DNA, 25 bp, Artificial sequence  Extension Primer
  Primer
ttcaaacacatgtccttattcaggg

SEQ ID NO: 22302 - DNA, 25 bp, Artificial sequence  Extension Primer
  Primer
tcctcattttgtgatctggggacat

SEQ ID NO: 22303 - DNA, 25 bp, Artificial sequence  Extension Primer
  Primer
atgaaaacagaatgctgattttttt

SEQ ID NO: 22304 - DNA, 25 bp, Artificial sequence  Extension Primer
  Primer
atgtttattgaattgaaaagatggt

SEQ ID NO: 22305 - DNA, 25 bp, Artificial sequence  Extension Primer
  Primer
ttacttctctctgtatacactgttc

SEQ ID NO: 22306 - DNA, 25 bp, Artificial sequence  Extension Primer
  Primer
tcagggataaagcaaatctccattt

SEQ ID NO: 22307 - DNA, 25 bp, Artificial sequence  Extension Primer
  Primer
agatgagggaactaaagtgaagata

SEQ ID NO: 22308 - DNA, 25 bp, Artificial sequence  Extension Primer
  Primer
gatggagaggttgtccatccacact

SEQ ID NO: 22309 - DNA, 25 bp, Artificial sequence  Extension Primer
  Primer
ctttctctgtgttttaaatgatata

SEQ ID NO: 22310 - DNA, 25 bp, Artificial sequence  Extension Primer
  Primer
attaattccttgttttcgagccttt

SEQ ID NO: 22311 - DNA, 25 bp, Artificial sequence  Extension Primer
  Primer
agtgcactgagcctaacaaaacttc

SEQ ID NO: 22312 - DNA, 25 bp, Artificial sequence  Extension Primer
  Primer
cttcagcaactatagaattttctta

SEQ ID NO: 22313 - DNA, 25 bp, Artificial sequence  Extension Primer
  Primer
tgttccttgtgactagcataaacct

SEQ ID NO: 22314 - DNA, 25 bp, Artificial sequence  Extension Primer
  Primer
cactgtaatggtggatgcaagtcat

SEQ ID NO: 22315 - DNA, 25 bp, Artificial sequence  Extension Primer
  Primer
tgcttaggtacagaagagtccccat

SEQ ID NO: 22316 - DNA, 25 bp, Artificial sequence  Extension Primer
  Primer
acacaaaccctcatcagtaaaagca

SEQ ID NO: 22317 - DNA, 25 bp, Artificial sequence  Extension Primer
  Primer
tgacaaacttcacacatcactacct

SEQ ID NO: 22318 - DNA, 25 bp, Artificial sequence  Extension Primer
  Primer
aggagcaccagcaggatgatgccca

SEQ ID NO: 22319 - DNA, 25 bp, Artificial sequence  Extension Primer
  Primer
aagaagcccagtaaattcccccata

SEQ ID NO: 22320 - DNA, 25 bp, Artificial sequence  Extension Primer
  Primer
taggtgccccgagaaggagctgtga

SEQ ID NO: 22321 - DNA, 25 bp, Artificial sequence  Extension Primer
  Primer
gtatatggcagagctgagatttgaa

SEQ ID NO: 22322 - DNA, 25 bp, Artificial sequence  Extension Primer
  Primer
gtaaggatatggatgaggactctgc

SEQ ID NO: 22323 - DNA, 25 bp, Artificial sequence  Extension Primer
  Primer
taccagatagtgaaatcattacttg

SEQ ID NO: 22324 - DNA, 25 bp, Artificial sequence  Extension Primer
  Primer
ataattcaatggggacttggagttg

SEQ ID NO: 22325 - DNA, 25 bp, Artificial sequence  Extension Primer
  Primer
aatattgtaagttgattatacttca

SEQ ID NO: 22326 - DNA, 25 bp, Artificial sequence  Extension Primer
  Primer
aaaacctggctcacaattcccagtc

SEQ ID NO: 22327 - DNA, 25 bp, Artificial sequence  Extension Primer
  Primer
cctagatatcacttatgtagtaata

SEQ ID NO: 22328 - DNA, 25 bp, Artificial sequence  Extension Primer
  Primer
agcccacrcagattttagcttcccc

SEQ ID NO: 22329 - DNA, 25 bp, Artificial sequence  Extension Primer
  Primer
caatacaaagataaatcagacaaga

SEQ ID NO: 22330 - DNA, 25 bp, Artificial sequence  Extension Primer
  Primer
aaagataaatcagacaagaycccta

SEQ ID NO: 22331 - DNA, 25 bp, Artificial sequence  Extension Primer
  Primer
gagacgccgaaacagaccccgaagt

SEQ ID NO: 22332 - DNA, 25 bp, Artificial sequence  Extension Primer
  Primer
tatgcatcgctctttgtgttctggg

SEQ ID NO: 22333 - DNA, 25 bp, Artificial sequence  Extension Primer
  Primer
atcacctgcagttgatttaacaagg

SEQ ID NO: 22334 - DNA, 25 bp, Artificial sequence  Extension Primer
  Primer
ttgacattcaccatttccttggctc

SEQ ID NO: 22335 - DNA, 25 bp, Artificial sequence  Extension Primer
  Primer
tttttctagatttcatattcatgcc

SEQ ID NO: 22336 - DNA, 25 bp, Artificial sequence  Extension Primer
  Primer
ttaaggaaatgcttaaacatttcat

SEQ ID NO: 22337 - DNA, 25 bp, Artificial sequence  Extension Primer
  Primer
gcaaagtggatggggtggggaaata

SEQ ID NO: 22338 - DNA, 25 bp, Artificial sequence  Extension Primer
  Primer
ggtgatgacatcactggtcatggtg

SEQ ID NO: 22339 - DNA, 25 bp, Artificial sequence  Extension Primer
  Primer
atgatggtgacaccattggctctag

SEQ ID NO: 22340 - DNA, 25 bp, Artificial sequence  Extension Primer
  Primer
ggcagtctttttatcctgctcacct

SEQ ID NO: 22341 - DNA, 25 bp, Artificial sequence  Extension Primer
  Primer
ttattacagcccttcatctccctgc

SEQ ID NO: 22342 - DNA, 25 bp, Artificial sequence  Extension Primer
  Primer
ctgcgtcttcaaatacaaaatgtgt

SEQ ID NO: 22343 - DNA, 25 bp, Artificial sequence  Extension Primer
  Primer
tctgaaaacaaaattaactgggttt

SEQ ID NO: 22344 - DNA, 25 bp, Artificial sequence  Extension Primer
  Primer
catgtactctttttgagagcagcaa

SEQ ID NO: 22345 - DNA, 25 bp, Artificial sequence  Extension Primer
  Primer
ctaatatgcctaagtgactaccata

SEQ ID NO: 22346 - DNA, 25 bp, Artificial sequence  Extension Primer
  Primer
acctctctccctgtgtccctattca

SEQ ID NO: 22347 - DNA, 25 bp, Artificial sequence  Extension Primer
  Primer
tagagcatgcccattctgagaacac

SEQ ID NO: 22348 - DNA, 25 bp, Artificial sequence  Extension Primer
  Primer
aggtgtttctttttgatgattattc

SEQ ID NO: 22349 - DNA, 25 bp, Artificial sequence  Extension Primer
  Primer
aggagccactcagctgctagaaatc

SEQ ID NO: 22350 - DNA, 25 bp, Artificial sequence  Extension Primer
  Primer
aactcataatcatatgtagaactgg

SEQ ID NO: 22351 - DNA, 25 bp, Artificial sequence  Extension Primer
  Primer
agagtgacaaacaagacatagatgg

SEQ ID NO: 22352 - DNA, 25 bp, Artificial sequence  Extension Primer
  Primer
tcagaagactgaaagcaccaccaag

SEQ ID NO: 22353 - DNA, 25 bp, Artificial sequence  Extension Primer
  Primer
ctgactaggagaccttggattgtat

SEQ ID NO: 22354 - DNA, 25 bp, Artificial sequence  Extension Primer
  Primer
cactagattttcaaatgaacctatc

SEQ ID NO: 22355 - DNA, 25 bp, Artificial sequence  Extension Primer
  Primer
ttccctagtaaggcagargggcagg

SEQ ID NO: 22356 - DNA, 25 bp, Artificial sequence  Extension Primer
  Primer
atacaataaaccaaaccagtaaaag

SEQ ID NO: 22357 - DNA, 25 bp, Artificial sequence  Extension Primer
  Primer
tttctagcatggaatggcgactcct

SEQ ID NO: 22358 - DNA, 25 bp, Artificial sequence  Extension Primer
  Primer
tcaaaccagaaaaaaatcccctata

SEQ ID NO: 22359 - DNA, 25 bp, Artificial sequence  Extension Primer
  Primer
tgttctcagtccatgagattccagg

SEQ ID NO: 22360 - DNA, 25 bp, Artificial sequence  Extension Primer
  Primer
ggaggtagaggccagtggaagcctt

SEQ ID NO: 22361 - DNA, 25 bp, Artificial sequence  Extension Primer
  Primer
atgccctttctgcttggacagcacc

SEQ ID NO: 22362 - DNA, 25 bp, Artificial sequence  Extension Primer
  Primer
tatcacagtttattctaattgtcta

SEQ ID NO: 22363 - DNA, 25 bp, Artificial sequence  Extension Primer
  Primer
tttcaaacactatcgtttatgtgct

SEQ ID NO: 22364 - DNA, 25 bp, Artificial sequence  Extension Primer
  Primer
ggggcttctctctagctgtggtgct

SEQ ID NO: 22365 - DNA, 25 bp, Artificial sequence  Extension Primer
  Primer
cggaatacaattcaccaagactctt

SEQ ID NO: 22366 - DNA, 25 bp, Artificial sequence  Extension Primer
  Primer
tccaggggatcttcccgacccagaa

SEQ ID NO: 22367 - DNA, 25 bp, Artificial sequence  Extension Primer
  Primer
atgtgaaaatcaatggaattttccc

SEQ ID NO: 22368 - DNA, 25 bp, Artificial sequence  Extension Primer
  Primer
catttcctcctgtctccaygaccta

SEQ ID NO: 22369 - DNA, 22 bp, Artificial sequence  Extension Primer
  Primer
tgaattatcaatctttcaagaa

SEQ ID NO: 22370 - DNA, 25 bp, Artificial sequence  Extension Primer
  Primer
agtaacagctgagaacagtcttata

SEQ ID NO: 22371 - DNA, 25 bp, Artificial sequence  Extension Primer
  Primer
gtccaactctgtgcgaccccataga

SEQ ID NO: 22372 - DNA, 25 bp, Artificial sequence  Extension Primer
  Primer
actcagagtccttcctggtggagca

SEQ ID NO: 22373 - DNA, 25 bp, Artificial sequence  Extension Primer
  Primer
ggtccccaaggacaatatacacata

SEQ ID NO: 22374 - DNA, 25 bp, Artificial sequence  Extension Primer
  Primer
ttctggttttgcttaactttagaac

SEQ ID NO: 22375 - DNA, 25 bp, Artificial sequence  Extension Primer
  Primer
agaggatatggtttcaaaatgaaga

SEQ ID NO: 22376 - DNA, 25 bp, Artificial sequence  Extension Primer
  Primer
ctctaatctccagtgaggtgccctg

SEQ ID NO: 22377 - DNA, 25 bp, Artificial sequence  Extension Primer
  Primer
aatgatacaaaatccaagtataaga

SEQ ID NO: 22378 - DNA, 25 bp, Artificial sequence  Extension Primer
  Primer
tctgtctctttctcctaaagcataa

SEQ ID NO: 22379 - DNA, 25 bp, Artificial sequence  Extension Primer
  Primer
agatcagttttgtggaaatccacct

SEQ ID NO: 22380 - DNA, 25 bp, Artificial sequence  Extension Primer
  Primer
gtcagctctatagtcagagaaaaga

SEQ ID NO: 22381 - DNA, 25 bp, Artificial sequence  Extension Primer
  Primer
aacccaatgtctggcttgaaagtcc

SEQ ID NO: 22382 - DNA, 25 bp, Artificial sequence  Extension Primer
  Primer
cacaactgagccactaaagtgaata

SEQ ID NO: 22383 - DNA, 25 bp, Artificial sequence  Extension Primer
  Primer
gccctcaagatgggatctgagagtc

SEQ ID NO: 22384 - DNA, 25 bp, Artificial sequence  Extension Primer
  Primer
aggaaggagattttgagagcaaata

SEQ ID NO: 22385 - DNA, 25 bp, Artificial sequence  Extension Primer
  Primer
cctggttatttgtctctacctctgc

SEQ ID NO: 22386 - DNA, 25 bp, Artificial sequence  Extension Primer
  Primer
cccttcaaataccctgtccaccaga

SEQ ID NO: 22387 - DNA, 25 bp, Artificial sequence  Extension Primer
  Primer
tctggcagggtaatcatttgacaac

SEQ ID NO: 22388 - DNA, 25 bp, Artificial sequence  Extension Primer
  Primer
agctgtttcctgtgccaagcacttt

SEQ ID NO: 22389 - DNA, 25 bp, Artificial sequence  Extension Primer
  Primer
cacatacacagtatttattcaagca

SEQ ID NO: 22390 - DNA, 25 bp, Artificial sequence  Extension Primer
  Primer
tggagaaggagaattgactatgcct

SEQ ID NO: 22391 - DNA, 25 bp, Artificial sequence  Extension Primer
  Primer
ccaactcttgttttactttcacggc

SEQ ID NO: 22392 - DNA, 25 bp, Artificial sequence  Extension Primer
  Primer
cttctgctcaacttgtttataattc

SEQ ID NO: 22393 - DNA, 25 bp, Artificial sequence  Extension Primer
  Primer
ttagggataattaatcattctcgcc

SEQ ID NO: 22394 - DNA, 25 bp, Artificial sequence  Extension Primer
  Primer
attataaattatgtacacttttaaa

SEQ ID NO: 22395 - DNA, 25 bp, Artificial sequence  Extension Primer
  Primer
acacatgcctagtcctgtccaccta

SEQ ID NO: 22396 - DNA, 25 bp, Artificial sequence  Extension Primer
  Primer
acaggagggcaacaggaggactcac

SEQ ID NO: 22397 - DNA, 25 bp, Artificial sequence  Extension Primer
  Primer
tgttttacttaatgcccttctctac

SEQ ID NO: 22398 - DNA, 25 bp, Artificial sequence  Extension Primer
  Primer
ttcaagctcagaatgaatcactttt

SEQ ID NO: 22399 - DNA, 25 bp, Artificial sequence  Extension Primer
  Primer
ttaagctgaatgcattatatggaag

SEQ ID NO: 22400 - DNA, 25 bp, Artificial sequence  Extension Primer
  Primer
aagttgtgaaacacctccagtagcc

SEQ ID NO: 22401 - DNA, 25 bp, Artificial sequence  Extension Primer
  Primer
ctcacgctgcccgtggtctacttgc

SEQ ID NO: 22402 - DNA, 25 bp, Artificial sequence  Extension Primer
  Primer
attaattttattggacagtttcata

SEQ ID NO: 22403 - DNA, 25 bp, Artificial sequence  Extension Primer
  Primer
cggcagacctggtttcaaagtctca

SEQ ID NO: 22404 - DNA, 25 bp, Artificial sequence  Extension Primer
  Primer
attcctaaaatacacatctaaaacc

SEQ ID NO: 22405 - DNA, 25 bp, Artificial sequence  Extension Primer
  Primer
aggagcactcaggttccactggtta

SEQ ID NO: 22406 - DNA, 25 bp, Artificial sequence  Extension Primer
  Primer
acctggaagctgcataacacaacat

SEQ ID NO: 22407 - DNA, 25 bp, Artificial sequence  Extension Primer
  Primer
tgtaccctgggagcagacgaagtca

SEQ ID NO: 22408 - DNA, 25 bp, Artificial sequence  Extension Primer
  Primer
atgagtctggaaagaaagcaaaagc

SEQ ID NO: 22409 - DNA, 25 bp, Artificial sequence  Extension Primer
  Primer
gtctgcagagtataaatcaattcaa

SEQ ID NO: 22410 - DNA, 25 bp, Artificial sequence  Extension Primer
  Primer
tggaaccgtggatgagaagacccta

SEQ ID NO: 22411 - DNA, 25 bp, Artificial sequence  Extension Primer
  Primer
ggatttttatctttactgtgaactt

SEQ ID NO: 22412 - DNA, 25 bp, Artificial sequence  Extension Primer
  Primer
agctatcattactaaattttgtatg

SEQ ID NO: 22413 - DNA, 25 bp, Artificial sequence  Extension Primer
  Primer
tatgatggcttgagatccctggacc

SEQ ID NO: 22414 - DNA, 25 bp, Artificial sequence  Extension Primer
  Primer
gaaataggtgagcttaatcactttg

SEQ ID NO: 22415 - DNA, 25 bp, Artificial sequence  Extension Primer
  Primer
agctcggtgccatagtcccatgaag

SEQ ID NO: 22416 - DNA, 25 bp, Artificial sequence  Extension Primer
  Primer
gggagtgtgcgtggagtcttagccg

SEQ ID NO: 22417 - DNA, 25 bp, Artificial sequence  Extension Primer
  Primer
aaaaatttcattaacatcacaccaa

SEQ ID NO: 22418 - DNA, 25 bp, Artificial sequence  Extension Primer
  Primer
tccaaggtcctcctaccagcatccc

SEQ ID NO: 22419 - DNA, 25 bp, Artificial sequence  Extension Primer
  Primer
aggtcttgtaagactcaggaattta

SEQ ID NO: 22420 - DNA, 25 bp, Artificial sequence  Extension Primer
  Primer
ctcatcatttactgaacagttasaa

SEQ ID NO: 22421 - DNA, 25 bp, Artificial sequence  Extension Primer
  Primer
catcactttgctttcagatttctgg

SEQ ID NO: 22422 - DNA, 25 bp, Artificial sequence  Extension Primer
  Primer
cttgtatttttttaatgagaaagta

SEQ ID NO: 22423 - DNA, 25 bp, Artificial sequence  Extension Primer
  Primer
ctcagagttgtctgtggcacctgac

SEQ ID NO: 22424 - DNA, 25 bp, Artificial sequence  Extension Primer
  Primer
ttttttttttttttctttctttttc

SEQ ID NO: 22425 - DNA, 25 bp, Artificial sequence  Extension Primer
  Primer
attagtagaatgagacacagtagga

SEQ ID NO: 22426 - DNA, 25 bp, Artificial sequence  Extension Primer
  Primer
aaagaaggctgcttttggaataggg

SEQ ID NO: 22427 - DNA, 25 bp, Artificial sequence  Extension Primer
  Primer
atccaggtgacatctgggctccttc

SEQ ID NO: 22428 - DNA, 25 bp, Artificial sequence  Extension Primer
  Primer
acagcttctccagagttttatgtgc

SEQ ID NO: 22429 - DNA, 25 bp, Artificial sequence  Extension Primer
  Primer
ggaggaaggggccagagcctattac

SEQ ID NO: 22430 - DNA, 25 bp, Artificial sequence  Extension Primer
  Primer
aagattaaaatagtttcacataaca

SEQ ID NO: 22431 - DNA, 25 bp, Artificial sequence  Extension Primer
  Primer
gtagaaaaatgcctgcaaaaatatg

SEQ ID NO: 22432 - DNA, 25 bp, Artificial sequence  Extension Primer
  Primer
gagagctcagtacttcccacagatg

SEQ ID NO: 22433 - DNA, 25 bp, Artificial sequence  Extension Primer
  Primer
ggggaaagcacagaaatgcagaggc

SEQ ID NO: 22434 - DNA, 25 bp, Artificial sequence  Extension Primer
  Primer
tagattgactgcttgaatcctgtct

SEQ ID NO: 22435 - DNA, 25 bp, Artificial sequence  Extension Primer
  Primer
aaagatatgagtggattcagattac

SEQ ID NO: 22436 - DNA, 25 bp, Artificial sequence  Extension Primer
  Primer
tcatatctattgaataaatgtccta

SEQ ID NO: 22437 - DNA, 25 bp, Artificial sequence  Extension Primer
  Primer
ttaaagtttgtagggtaagttccat

SEQ ID NO: 22438 - DNA, 25 bp, Artificial sequence  Extension Primer
  Primer
ctatggaaatgctgcgctggcactc

SEQ ID NO: 22439 - DNA, 25 bp, Artificial sequence  Extension Primer
  Primer
gcccccagagcatttgccttgatga

SEQ ID NO: 22440 - DNA, 25 bp, Artificial sequence  Extension Primer
  Primer
atttcaattcttttggacaaaaacc

SEQ ID NO: 22441 - DNA, 25 bp, Artificial sequence  Extension Primer
  Primer
cactaagacttaagagagtccacac

SEQ ID NO: 22442 - DNA, 25 bp, Artificial sequence  Extension Primer
  Primer
cttcaaagggaatcagagtcttgtt

SEQ ID NO: 22443 - DNA, 25 bp, Artificial sequence  Extension Primer
  Primer
ctacaaaaggaaagagtgaacaaat

SEQ ID NO: 22444 - DNA, 25 bp, Artificial sequence  Extension Primer
  Primer
cctgctgctggccacctcctttctc

SEQ ID NO: 22445 - DNA, 25 bp, Artificial sequence  Extension Primer
  Primer
acaggtgagcaatactaagcaggtt

SEQ ID NO: 22446 - DNA, 25 bp, Artificial sequence  Extension Primer
  Primer
attagtatattttgaagatcaatcc

SEQ ID NO: 22447 - DNA, 25 bp, Artificial sequence  Extension Primer
  Primer
aataatttttaattaaggttaagac

SEQ ID NO: 22448 - DNA, 25 bp, Artificial sequence  Extension Primer
  Primer
ttaattcattatagagctactgttt

SEQ ID NO: 22449 - DNA, 25 bp, Artificial sequence  Extension Primer
  Primer
tggacctatgtttctgcaaagaatc

SEQ ID NO: 22450 - DNA, 25 bp, Artificial sequence  Extension Primer
  Primer
gctccttccactcctgctcattgag

SEQ ID NO: 22451 - DNA, 25 bp, Artificial sequence  Extension Primer
  Primer
tcgccatcgcttgctgcagctacag

SEQ ID NO: 22452 - DNA, 25 bp, Artificial sequence  Extension Primer
  Primer
atgtttaaactcatacacaatgtca

SEQ ID NO: 22453 - DNA, 25 bp, Artificial sequence  Extension Primer
  Primer
agttcgcttttctccttcgtgttgc

SEQ ID NO: 22454 - DNA, 25 bp, Artificial sequence  Extension Primer
  Primer
gtgtacttgatgtgcagtgcttcct

SEQ ID NO: 22455 - DNA, 25 bp, Artificial sequence  Extension Primer
  Primer
tataaatgtggagaaagagagagaa

SEQ ID NO: 22456 - DNA, 25 bp, Artificial sequence  Extension Primer
  Primer
ctttgaaacatcatgtgaacataag

SEQ ID NO: 22457 - DNA, 25 bp, Artificial sequence  Extension Primer
  Primer
acctcttccataagcacaccgaaat

SEQ ID NO: 22458 - DNA, 25 bp, Artificial sequence  Extension Primer
  Primer
cttgttgattaagactgcttgtttc

SEQ ID NO: 22459 - DNA, 25 bp, Artificial sequence  Extension Primer
  Primer
tgtgttccacaaaagaaggaaaaag

SEQ ID NO: 22460 - DNA, 25 bp, Artificial sequence  Extension Primer
  Primer
caaaccccagcccacaaaaaactca

SEQ ID NO: 22461 - DNA, 25 bp, Artificial sequence  Extension Primer
  Primer
cttttccactgggcgttagctctca

SEQ ID NO: 22462 - DNA, 25 bp, Artificial sequence  Extension Primer
  Primer
atagaaacttttaaggacaggaaaa

SEQ ID NO: 22463 - DNA, 25 bp, Artificial sequence  Extension Primer
  Primer
tcaggtgagcttgaaggcactcagy

SEQ ID NO: 22464 - DNA, 25 bp, Artificial sequence  Extension Primer
  Primer
tgataaaacaaaggtttgcataaga

SEQ ID NO: 22465 - DNA, 25 bp, Artificial sequence  Extension Primer
  Primer
gcagcagccatcacaagtgtgtcac

SEQ ID NO: 22466 - DNA, 25 bp, Artificial sequence  Extension Primer
  Primer
attgagcgtgatggtaagattctca

SEQ ID NO: 22467 - DNA, 25 bp, Artificial sequence  Extension Primer
  Primer
gctaggatgggaagagagaattgga

SEQ ID NO: 22468 - DNA, 25 bp, Artificial sequence  Extension Primer
  Primer
atttaaacttcaggatttkttcttt

SEQ ID NO: 22469 - DNA, 25 bp, Artificial sequence  Extension Primer
  Primer
ctgcaaagcactccacaaatgaaag

SEQ ID NO: 22470 - DNA, 25 bp, Artificial sequence  Extension Primer
  Primer
ataaatagggcagggtggagacaca

SEQ ID NO: 22471 - DNA, 25 bp, Artificial sequence  Extension Primer
  Primer
acttgttcaggaaaggtgtgtatgg

SEQ ID NO: 22472 - DNA, 25 bp, Artificial sequence  Extension Primer
  Primer
catctcgggcgtctgtcccgttttc

SEQ ID NO: 22473 - DNA, 25 bp, Artificial sequence  Extension Primer
  Primer
aaaatgtatgcagtttttttcctat

SEQ ID NO: 22474 - DNA, 25 bp, Artificial sequence  Extension Primer
  Primer
tgatttgcatgcatatcaaagtctg

SEQ ID NO: 22475 - DNA, 25 bp, Artificial sequence  Extension Primer
  Primer
tgaaacamcacctttgatgaaactg

SEQ ID NO: 22476 - DNA, 25 bp, Artificial sequence  Extension Primer
  Primer
gtctgccccagggggctaacccagt

SEQ ID NO: 22477 - DNA, 25 bp, Artificial sequence  Extension Primer
  Primer
tcccatgttatcacttagaatcaaa

SEQ ID NO: 22478 - DNA, 25 bp, Artificial sequence  Extension Primer
  Primer
gttgtaattacagcttttttttttt

SEQ ID NO: 22479 - DNA, 25 bp, Artificial sequence  Extension Primer
  Primer
tgaaatcctctctgatttggtaaca

SEQ ID NO: 22480 - DNA, 25 bp, Artificial sequence  Extension Primer
  Primer
atgcatgcaggaggacacgctcata

SEQ ID NO: 22481 - DNA, 25 bp, Artificial sequence  Extension Primer
  Primer
gaataaaggacacaaagacctggtg

SEQ ID NO: 22482 - DNA, 25 bp, Artificial sequence  Extension Primer
  Primer
ttttgaatgtgcctataaagaaaag

SEQ ID NO: 22483 - DNA, 25 bp, Artificial sequence  Extension Primer
  Primer
ttattgaggactactgtacaagtct

SEQ ID NO: 22484 - DNA, 25 bp, Artificial sequence  Extension Primer
  Primer
taaactgcagagaaaaatcaatcac

SEQ ID NO: 22485 - DNA, 25 bp, Artificial sequence  Extension Primer
  Primer
attatttcatgttttaaattcaatc

SEQ ID NO: 22486 - DNA, 25 bp, Artificial sequence  Extension Primer
  Primer
gaagtgaaagtgcaagtattagtca

SEQ ID NO: 22487 - DNA, 25 bp, Artificial sequence  Extension Primer
  Primer
cctcccacatgggacagaactatta

SEQ ID NO: 22488 - DNA, 25 bp, Artificial sequence  Extension Primer
  Primer
tcatattccagaggtcttctgtagg

SEQ ID NO: 22489 - DNA, 25 bp, Artificial sequence  Extension Primer
  Primer
caagacatggccatcacaaaccaac

SEQ ID NO: 22490 - DNA, 25 bp, Artificial sequence  Extension Primer
  Primer
taacaatgatggttgagcttaaaat

SEQ ID NO: 22491 - DNA, 25 bp, Artificial sequence  Extension Primer
  Primer
actcttgattcctgctgaatatcca

SEQ ID NO: 22492 - DNA, 25 bp, Artificial sequence  Extension Primer
  Primer
atcatgttttcctctttgacttggt

SEQ ID NO: 22493 - DNA, 25 bp, Artificial sequence  Extension Primer
  Primer
gattgaacctgcatctcctgcattg

SEQ ID NO: 22494 - DNA, 25 bp, Artificial sequence  Extension Primer
  Primer
tgtgatgctggctgcaggcgaggaa

SEQ ID NO: 22495 - DNA, 25 bp, Artificial sequence  Extension Primer
  Primer
cggcttgtcttgaaaacagagtttg

SEQ ID NO: 22496 - DNA, 25 bp, Artificial sequence  Extension Primer
  Primer
aatagcctcccatgtttatatagat

SEQ ID NO: 22497 - DNA, 25 bp, Artificial sequence  Extension Primer
  Primer
gagctagtcatggtctatctttacc

SEQ ID NO: 22498 - DNA, 25 bp, Artificial sequence  Extension Primer
  Primer
ataaatatacctcaagtgagggttt

SEQ ID NO: 22499 - DNA, 25 bp, Artificial sequence  Extension Primer
  Primer
gttcatttctataataaaatagttc

SEQ ID NO: 22500 - DNA, 25 bp, Artificial sequence  Extension Primer
  Primer
catcaatcaattaccaggtctgggc

SEQ ID NO: 22501 - DNA, 25 bp, Artificial sequence  Extension Primer
  Primer
taccttttattcagttatcacctct

SEQ ID NO: 22502 - DNA, 25 bp, Artificial sequence  Extension Primer
  Primer
cttcaaggtacagaatcaataagca

SEQ ID NO: 22503 - DNA, 25 bp, Artificial sequence  Extension Primer
  Primer
ctataactatgatatctatggacaa

SEQ ID NO: 22504 - DNA, 25 bp, Artificial sequence  Extension Primer
  Primer
actgatgctgctgctgctgctaagt

SEQ ID NO: 22505 - DNA, 25 bp, Artificial sequence  Extension Primer
  Primer
acaaatgattctataatgagtccac

SEQ ID NO: 22506 - DNA, 25 bp, Artificial sequence  Extension Primer
  Primer
gggcctctcaactatggccaattag

SEQ ID NO: 22507 - DNA, 25 bp, Artificial sequence  Extension Primer
  Primer
tctaaatcttcaccctgcttggagc

SEQ ID NO: 22508 - DNA, 25 bp, Artificial sequence  Extension Primer
  Primer
ctctcactaacatgctttgccccca

SEQ ID NO: 22509 - DNA, 25 bp, Artificial sequence  Extension Primer
  Primer
ttaccatagtgattattattgtaaa

SEQ ID NO: 22510 - DNA, 25 bp, Artificial sequence  Extension Primer
  Primer
ggagaaattctaaaatggctttccc

SEQ ID NO: 22511 - DNA, 25 bp, Artificial sequence  Extension Primer
  Primer
aattcaaggaatatttgacagtatc

SEQ ID NO: 22512 - DNA, 25 bp, Artificial sequence  Extension Primer
  Primer
gaatctgcctcccaatgaaggagac

SEQ ID NO: 22513 - DNA, 25 bp, Artificial sequence  Extension Primer
  Primer
tctcaatctctgcatctatctcttt

SEQ ID NO: 22514 - DNA, 25 bp, Artificial sequence  Extension Primer
  Primer
aaaataatgtactttctccttttta

SEQ ID NO: 22515 - DNA, 25 bp, Artificial sequence  Extension Primer
  Primer
tcaattcaaagccatctgcttccca

SEQ ID NO: 22516 - DNA, 25 bp, Artificial sequence  Extension Primer
  Primer
aatcacggatgtgggkatttgagga

SEQ ID NO: 22517 - DNA, 25 bp, Artificial sequence  Extension Primer
  Primer
ctctgctgactctcagaacaaatgc

SEQ ID NO: 22518 - DNA, 25 bp, Artificial sequence  Extension Primer
  Primer
catacagaggcttcccacctatggc

SEQ ID NO: 22519 - DNA, 25 bp, Artificial sequence  Extension Primer
  Primer
gcagctagaacttagcttctgagtc

SEQ ID NO: 22520 - DNA, 25 bp, Artificial sequence  Extension Primer
  Primer
tttgcctttttcagtgaaacatctc

SEQ ID NO: 22521 - DNA, 25 bp, Artificial sequence  Extension Primer
  Primer
tagtacaataaatattttaaaattc

SEQ ID NO: 22522 - DNA, 25 bp, Artificial sequence  Extension Primer
  Primer
gcaattgtttgcaagaaatgagccc

SEQ ID NO: 22523 - DNA, 25 bp, Artificial sequence  Extension Primer
  Primer
gtgtgtgtgtgtgtgtgtgtgtgyg

SEQ ID NO: 22524 - DNA, 25 bp, Artificial sequence  Extension Primer
  Primer
tttcctcactccagtatctctgttt

SEQ ID NO: 22525 - DNA, 25 bp, Artificial sequence  Extension Primer
  Primer
gaaatacctcctgaaacacaacgtg

SEQ ID NO: 22526 - DNA, 25 bp, Artificial sequence  Extension Primer
  Primer
ctgatagccagggccaggttgttta

SEQ ID NO: 22527 - DNA, 25 bp, Artificial sequence  Extension Primer
  Primer
tctctcccaggggccttcgccgtgg

SEQ ID NO: 22528 - DNA, 25 bp, Artificial sequence  Extension Primer
  Primer
atgggagtcagatgatcaaattttt

SEQ ID NO: 22529 - DNA, 25 bp, Artificial sequence  Extension Primer
  Primer
ttgatgcacttcatgcctggataaa

SEQ ID NO: 22530 - DNA, 25 bp, Artificial sequence  Extension Primer
  Primer
ccgaaaaatattcatatcccaagta

SEQ ID NO: 22531 - DNA, 25 bp, Artificial sequence  Extension Primer
  Primer
gctgttctaatccctctcaccagcc

SEQ ID NO: 22532 - DNA, 25 bp, Artificial sequence  Extension Primer
  Primer
gcccagggtctgcacagcctgccca

SEQ ID NO: 22533 - DNA, 25 bp, Artificial sequence  Extension Primer
  Primer
ggaactaagaatcagaagggaagga

SEQ ID NO: 22534 - DNA, 25 bp, Artificial sequence  Extension Primer
  Primer
tacacctcaagagcatcttacattc

SEQ ID NO: 22535 - DNA, 25 bp, Artificial sequence  Extension Primer
  Primer
tttggcacaacatcactttaaactc

SEQ ID NO: 22536 - DNA, 25 bp, Artificial sequence  Extension Primer
  Primer
acaataactattttgtcttagctgg

SEQ ID NO: 22537 - DNA, 25 bp, Artificial sequence  Extension Primer
  Primer
ggcaaagtgtatgggaaattgtgta

SEQ ID NO: 22538 - DNA, 25 bp, Artificial sequence  Extension Primer
  Primer
tagtaacaaaatgtaaattggataa

SEQ ID NO: 22539 - DNA, 25 bp, Artificial sequence  Extension Primer
  Primer
gtaagaaataatatacacattgaga

SEQ ID NO: 22540 - DNA, 25 bp, Artificial sequence  Extension Primer
  Primer
agcatattttagtgttcttaataat

SEQ ID NO: 22541 - DNA, 25 bp, Artificial sequence  Extension Primer
  Primer
gtgctttcttcatttgttgtcatgg

SEQ ID NO: 22542 - DNA, 25 bp, Artificial sequence  Extension Primer
  Primer
gtaccacagcactggcattatctgg

SEQ ID NO: 22543 - DNA, 22 bp, Artificial sequence  Extension Primer
  Primer
ggtttcatgtcactcaattcct

SEQ ID NO: 22544 - DNA, 25 bp, Artificial sequence  Extension Primer
  Primer
accagctatcagggacaccccctca

SEQ ID NO: 22545 - DNA, 25 bp, Artificial sequence  Extension Primer
  Primer
gaggaccggggcccccgagcctgtg

SEQ ID NO: 22546 - DNA, 25 bp, Artificial sequence  Extension Primer
  Primer
catataaacagcatacacttaaata

SEQ ID NO: 22547 - DNA, 25 bp, Artificial sequence  Extension Primer
  Primer
gacaagctatgatggttagcctcca

SEQ ID NO: 22548 - DNA, 25 bp, Artificial sequence  Extension Primer
  Primer
atccttatataaagatacatgtttt

SEQ ID NO: 22549 - DNA, 25 bp, Artificial sequence  Extension Primer
  Primer
tatctaccccagcccagtgaaacac

SEQ ID NO: 22550 - DNA, 25 bp, Artificial sequence  Extension Primer
  Primer
aacaagtggctgacatcatgaaaaa

SEQ ID NO: 22551 - DNA, 25 bp, Artificial sequence  Extension Primer
  Primer
aatggaaggggaggaaagaggaaga

SEQ ID NO: 22552 - DNA, 25 bp, Artificial sequence  Extension Primer
  Primer
gatttttttaagcagtagagcaata

SEQ ID NO: 22553 - DNA, 25 bp, Artificial sequence  Extension Primer
  Primer
cgttgtgagcttgtgtagcccgata

SEQ ID NO: 22554 - DNA, 25 bp, Artificial sequence  Extension Primer
  Primer
acttaagttgcttgcccaaggtcac

SEQ ID NO: 22555 - DNA, 25 bp, Artificial sequence  Extension Primer
  Primer
attagtttcctcacctgcaaagtgg

SEQ ID NO: 22556 - DNA, 25 bp, Artificial sequence  Extension Primer
  Primer
tccttaggttttggtccattcattt

SEQ ID NO: 22557 - DNA, 25 bp, Artificial sequence  Extension Primer
  Primer
gtcgacctaaatcctgagatatttt

SEQ ID NO: 22558 - DNA, 25 bp, Artificial sequence  Extension Primer
  Primer
atatatgatcatgaaaataccsaat

SEQ ID NO: 22559 - DNA, 25 bp, Artificial sequence  Extension Primer
  Primer
aggcagaagctaaaatttaatcatg

SEQ ID NO: 22560 - DNA, 25 bp, Artificial sequence  Extension Primer
  Primer
ctgaaacatctcagaccactaactg

SEQ ID NO: 22561 - DNA, 25 bp, Artificial sequence  Extension Primer
  Primer
ctcaccacaaaccctagcagtacat

SEQ ID NO: 22562 - DNA, 25 bp, Artificial sequence  Extension Primer
  Primer
ggccaatacaataagagaagatgtg

SEQ ID NO: 22563 - DNA, 25 bp, Artificial sequence  Extension Primer
  Primer
atggaaagctaaatccttatcagaa

SEQ ID NO: 22564 - DNA, 25 bp, Artificial sequence  Extension Primer
  Primer
gtgccttcagctcctaattaaatca

SEQ ID NO: 22565 - DNA, 25 bp, Artificial sequence  Extension Primer
  Primer
ttgcatagatttgatgttgttcagt

SEQ ID NO: 22566 - DNA, 25 bp, Artificial sequence  Extension Primer
  Primer
gtaccarctaagtggaacacagcca

SEQ ID NO: 22567 - DNA, 25 bp, Artificial sequence  Extension Primer
  Primer
tgcagctcacaaatgagatcttccc

SEQ ID NO: 22568 - DNA, 25 bp, Artificial sequence  Extension Primer
  Primer
gatccgcagataaggttccatttac

SEQ ID NO: 22569 - DNA, 25 bp, Artificial sequence  Extension Primer
  Primer
taaatgactgtttacaggctcttac

SEQ ID NO: 22570 - DNA, 25 bp, Artificial sequence  Extension Primer
  Primer
atggattcaatgggcattcatcttc

SEQ ID NO: 22571 - DNA, 25 bp, Artificial sequence  Extension Primer
  Primer
agggctgtgacgagacgttcaccaa

SEQ ID NO: 22572 - DNA, 25 bp, Artificial sequence  Extension Primer
  Primer
cagaagctctccagattaattgaat

SEQ ID NO: 22573 - DNA, 25 bp, Artificial sequence  Extension Primer
  Primer
actctgtgagcaacatttaccaaga

SEQ ID NO: 22574 - DNA, 25 bp, Artificial sequence  Extension Primer
  Primer
atgttcaagccctgagctgtctgcc

SEQ ID NO: 22575 - DNA, 25 bp, Artificial sequence  Extension Primer
  Primer
cttatttccctactctgatcatact

SEQ ID NO: 22576 - DNA, 25 bp, Artificial sequence  Extension Primer
  Primer
ccaaaattctgtttggttctctatc

SEQ ID NO: 22577 - DNA, 25 bp, Artificial sequence  Extension Primer
  Primer
gcctagccagctgcttctttcctct

SEQ ID NO: 22578 - DNA, 25 bp, Artificial sequence  Extension Primer
  Primer
tttacctcaccacaytggtctcctg

SEQ ID NO: 22579 - DNA, 25 bp, Artificial sequence  Extension Primer
  Primer
attctttctgaatatcaaccatcat

SEQ ID NO: 22580 - DNA, 25 bp, Artificial sequence  Extension Primer
  Primer
tctggagtcttctccttcactatca

SEQ ID NO: 22581 - DNA, 25 bp, Artificial sequence  Extension Primer
  Primer
attctcactggtgatttaaggagtt

SEQ ID NO: 22582 - DNA, 25 bp, Artificial sequence  Extension Primer
  Primer
cattatcgggcagtagtagtggcaa

SEQ ID NO: 22583 - DNA, 25 bp, Artificial sequence  Extension Primer
  Primer
cacgactgaaagactaacaygcaca

SEQ ID NO: 22584 - DNA, 25 bp, Artificial sequence  Extension Primer
  Primer
attgaaatacagttgattggcaatg

SEQ ID NO: 22585 - DNA, 25 bp, Artificial sequence  Extension Primer
  Primer
tagctttggctagcaactgacggat

SEQ ID NO: 22586 - DNA, 25 bp, Artificial sequence  Extension Primer
  Primer
ctttttttctgtggaccctacagtt

SEQ ID NO: 22587 - DNA, 25 bp, Artificial sequence  Extension Primer
  Primer
ctcgatgggcactgcattcctgtcc

SEQ ID NO: 22588 - DNA, 25 bp, Artificial sequence  Extension Primer
  Primer
aatgaaaactgaatagatttgaaaa

SEQ ID NO: 22589 - DNA, 25 bp, Artificial sequence  Extension Primer
  Primer
taggtgcttaatgaaatattctatg

SEQ ID NO: 22590 - DNA, 25 bp, Artificial sequence  Extension Primer
  Primer
ttttggcagcttctcttcctcagta

SEQ ID NO: 22591 - DNA, 25 bp, Artificial sequence  Extension Primer
  Primer
ttgtcgacacaacagggaaggcaac

SEQ ID NO: 22592 - DNA, 25 bp, Artificial sequence  Extension Primer
  Primer
cttatgtctccaaaactgcgttagg

SEQ ID NO: 22593 - DNA, 25 bp, Artificial sequence  Extension Primer
  Primer
tggtttgtcaaggagtttagatgac

SEQ ID NO: 22594 - DNA, 25 bp, Artificial sequence  Extension Primer
  Primer
aaaagccactcttgaagaatttgtt

SEQ ID NO: 22595 - DNA, 25 bp, Artificial sequence  Extension Primer
  Primer
ggttcaactttataaagtctgatag

SEQ ID NO: 22596 - DNA, 25 bp, Artificial sequence  Extension Primer
  Primer
cctaaamtagcctggctttcacagt

SEQ ID NO: 22597 - DNA, 25 bp, Artificial sequence  Extension Primer
  Primer
catttcctgaagctgtcagaagaga

SEQ ID NO: 22598 - DNA, 25 bp, Artificial sequence  Extension Primer
  Primer
cataatgttatatatttatactttt

SEQ ID NO: 22599 - DNA, 25 bp, Artificial sequence  Extension Primer
  Primer
tttttccctctactttgtcaattca

SEQ ID NO: 22600 - DNA, 25 bp, Artificial sequence  Extension Primer
  Primer
gatgataaacagaaaaaattattct

SEQ ID NO: 22601 - DNA, 25 bp, Artificial sequence  Extension Primer
  Primer
atttaatggcttatgagactttgaa

SEQ ID NO: 22602 - DNA, 25 bp, Artificial sequence  Extension Primer
  Primer
gatattggaaaagtctcaagggtcc

SEQ ID NO: 22603 - DNA, 25 bp, Artificial sequence  Extension Primer
  Primer
gaagcagcaagattgaggcgttttc

SEQ ID NO: 22604 - DNA, 25 bp, Artificial sequence  Extension Primer
  Primer
cctcatctggttagggattgctgaa

SEQ ID NO: 22605 - DNA, 25 bp, Artificial sequence  Extension Primer
  Primer
ttgtgatttttagcccattgagaag

SEQ ID NO: 22606 - DNA, 25 bp, Artificial sequence  Extension Primer
  Primer
ttacctcccttagcccaaaccatac

SEQ ID NO: 22607 - DNA, 25 bp, Artificial sequence  Extension Primer
  Primer
caacggctacggcctcatccagagc

SEQ ID NO: 22608 - DNA, 25 bp, Artificial sequence  Extension Primer
  Primer
cactttcataaagttggagggtaaa

SEQ ID NO: 22609 - DNA, 25 bp, Artificial sequence  Extension Primer
  Primer
ggaagaatgatgtaagctgagagag

SEQ ID NO: 22610 - DNA, 25 bp, Artificial sequence  Extension Primer
  Primer
tgagtttgctacaggaatggcaggc

SEQ ID NO: 22611 - DNA, 22 bp, Artificial sequence  Extension Primer
  Primer
cacttggagctggaaaggagcc

SEQ ID NO: 22612 - DNA, 25 bp, Artificial sequence  Extension Primer
  Primer
gctcacatctctctgcacatctcca

SEQ ID NO: 22613 - DNA, 25 bp, Artificial sequence  Extension Primer
  Primer
taagaattaaggtgtcatagtttta

SEQ ID NO: 22614 - DNA, 25 bp, Artificial sequence  Extension Primer
  Primer
aggtttagtttctcttcaagagtat

SEQ ID NO: 22615 - DNA, 25 bp, Artificial sequence  Extension Primer
  Primer
atcatatgataagtggataataatc

SEQ ID NO: 22616 - DNA, 25 bp, Artificial sequence  Extension Primer
  Primer
gtgtctccacagttggctgccttgt

SEQ ID NO: 22617 - DNA, 25 bp, Artificial sequence  Extension Primer
  Primer
aatttatgtttccaaacatctcatt

SEQ ID NO: 22618 - DNA, 22 bp, Artificial sequence  Extension Primer
  Primer
gccaaattgcttttgaatatgc

SEQ ID NO: 22619 - DNA, 25 bp, Artificial sequence  Extension Primer
  Primer
ctcaagaagaaaagaaaaaacacct

SEQ ID NO: 22620 - DNA, 25 bp, Artificial sequence  Extension Primer
  Primer
tcaaggtaccacttcaacaggttaa

SEQ ID NO: 22621 - DNA, 25 bp, Artificial sequence  Extension Primer
  Primer
ctggaggagaggccatggctccaag

SEQ ID NO: 22622 - DNA, 25 bp, Artificial sequence  Extension Primer
  Primer
ccatgagcacatgtgcacagactca

SEQ ID NO: 22623 - DNA, 25 bp, Artificial sequence  Extension Primer
  Primer
ccaccacaaaactccaaaaccaaag

SEQ ID NO: 22624 - DNA, 25 bp, Artificial sequence  Extension Primer
  Primer
ttgaggtaagaaacacggaaaggaa

SEQ ID NO: 22625 - DNA, 25 bp, Artificial sequence  Extension Primer
  Primer
agaaaacctattatctttcatattt

SEQ ID NO: 22626 - DNA, 25 bp, Artificial sequence  Extension Primer
  Primer
taggtgccacagtttggcttttatc

SEQ ID NO: 22627 - DNA, 25 bp, Artificial sequence  Extension Primer
  Primer
aaaaactgtagggcagttaatcctg

SEQ ID NO: 22628 - DNA, 25 bp, Artificial sequence  Extension Primer
  Primer
tcagaaaactcctaaacagaacaca

SEQ ID NO: 22629 - DNA, 25 bp, Artificial sequence  Extension Primer
  Primer
aatgagggatccggacaagagcgtg

SEQ ID NO: 22630 - DNA, 25 bp, Artificial sequence  Extension Primer
  Primer
agaggtcaggattctgtttgatatt

SEQ ID NO: 22631 - DNA, 25 bp, Artificial sequence  Extension Primer
  Primer
cacttgtgtgtcctgcagtgaagac

SEQ ID NO: 22632 - DNA, 25 bp, Artificial sequence  Extension Primer
  Primer
cagtaataaaaaacgctgactggta

SEQ ID NO: 22633 - DNA, 25 bp, Artificial sequence  Extension Primer
  Primer
attctctgtatactagagatggtgt

SEQ ID NO: 22634 - DNA, 25 bp, Artificial sequence  Extension Primer
  Primer
caaaaatgccttgtgtgtgctacca

SEQ ID NO: 22635 - DNA, 25 bp, Artificial sequence  Extension Primer
  Primer
accactggccctgtgtcaacatgat

SEQ ID NO: 22636 - DNA, 25 bp, Artificial sequence  Extension Primer
  Primer
tctgagaaaaaaaaataatatgaaa

SEQ ID NO: 22637 - DNA, 25 bp, Artificial sequence  Extension Primer
  Primer
gatagtagccaatccctttttatat

SEQ ID NO: 22638 - DNA, 25 bp, Artificial sequence  Extension Primer
  Primer
acaaagagcagaagtaattatgatt

SEQ ID NO: 22639 - DNA, 25 bp, Artificial sequence  Extension Primer
  Primer
ttaacttaaaacagagcaaaggcat

SEQ ID NO: 22640 - DNA, 25 bp, Artificial sequence  Extension Primer
  Primer
tcaatccctgggtttgggccactca

SEQ ID NO: 22641 - DNA, 25 bp, Artificial sequence  Extension Primer
  Primer
ctttgttgatctcctaaaaagcgaa

SEQ ID NO: 22642 - DNA, 25 bp, Artificial sequence  Extension Primer
  Primer
actatttgctttcactgtcacattt

SEQ ID NO: 22643 - DNA, 25 bp, Artificial sequence  Extension Primer
  Primer
attatccactgcctcttttccactt

SEQ ID NO: 22644 - DNA, 25 bp, Artificial sequence  Extension Primer
  Primer
agtattcctccagaaagagatacac

SEQ ID NO: 22645 - DNA, 25 bp, Artificial sequence  Extension Primer
  Primer
agttcaaatgcctgttcagtacaaa

SEQ ID NO: 22646 - DNA, 25 bp, Artificial sequence  Extension Primer
  Primer
gattgcacctgatcaaacagatgct

SEQ ID NO: 22647 - DNA, 25 bp, Artificial sequence  Extension Primer
  Primer
ttacccacgtgactcttttggagtg

SEQ ID NO: 22648 - DNA, 25 bp, Artificial sequence  Extension Primer
  Primer
aaaggttctcttctttcaaagaccc

SEQ ID NO: 22649 - DNA, 25 bp, Artificial sequence  Extension Primer
  Primer
atgattagacgcagtggggagtgag

SEQ ID NO: 22650 - DNA, 25 bp, Artificial sequence  Extension Primer
  Primer
aataggaactttaaaatgtcaaaga

SEQ ID NO: 22651 - DNA, 25 bp, Artificial sequence  Extension Primer
  Primer
aagactgagaaaccagcttttgtgg

SEQ ID NO: 22652 - DNA, 25 bp, Artificial sequence  Extension Primer
  Primer
actggtaccaggggcctggctgcta

SEQ ID NO: 22653 - DNA, 25 bp, Artificial sequence  Extension Primer
  Primer
tgarcatttttacaacaagaaaaga

SEQ ID NO: 22654 - DNA, 25 bp, Artificial sequence  Extension Primer
  Primer
tgaggctctgtggtcctcaggattt

SEQ ID NO: 22655 - DNA, 25 bp, Artificial sequence  Extension Primer
  Primer
atctataatcgagagtaggcagaga

SEQ ID NO: 22656 - DNA, 25 bp, Artificial sequence  Extension Primer
  Primer
cagcttcttacactacagcatccac

SEQ ID NO: 22657 - DNA, 22 bp, Artificial sequence  Extension Primer
  Primer
atgttcagacattacttaatac

SEQ ID NO: 22658 - DNA, 25 bp, Artificial sequence  Extension Primer
  Primer
tgagtggcctccaaaacttcttgtt

SEQ ID NO: 22659 - DNA, 25 bp, Artificial sequence  Extension Primer
  Primer
aggaaaccatctaccttttctacaa

SEQ ID NO: 22660 - DNA, 25 bp, Artificial sequence  Extension Primer
  Primer
atatatcagtgtcccatggatgcag

SEQ ID NO: 22661 - DNA, 25 bp, Artificial sequence  Extension Primer
  Primer
tgttttaaggcactgtgtttatggg

SEQ ID NO: 22662 - DNA, 25 bp, Artificial sequence  Extension Primer
  Primer
gagggaatactcagagtaggatgga

SEQ ID NO: 22663 - DNA, 25 bp, Artificial sequence  Extension Primer
  Primer
agcccacccctccccctgaaattct

SEQ ID NO: 22664 - DNA, 25 bp, Artificial sequence  Extension Primer
  Primer
gtctgtgtgtgcccatgttcatcct

SEQ ID NO: 22665 - DNA, 22 bp, Artificial sequence  Extension Primer
  Primer
cccaacccagaaaggagagagg

SEQ ID NO: 22666 - DNA, 25 bp, Artificial sequence  Extension Primer
  Primer
gccttaatcagtgtcccaggtctag

SEQ ID NO: 22667 - DNA, 25 bp, Artificial sequence  Extension Primer
  Primer
tttgatcacaggacgttttcagaaa

SEQ ID NO: 22668 - DNA, 25 bp, Artificial sequence  Extension Primer
  Primer
caaataaacacatgtttacctttgc

SEQ ID NO: 22669 - DNA, 25 bp, Artificial sequence  Extension Primer
  Primer
ctcaaccttacttctatgagaaaga

SEQ ID NO: 22670 - DNA, 25 bp, Artificial sequence  Extension Primer
  Primer
tayttcagcataatctgaaaggccc

SEQ ID NO: 22671 - DNA, 25 bp, Artificial sequence  Extension Primer
  Primer
tggcctcaggaacagtttcatacaa

SEQ ID NO: 22672 - DNA, 25 bp, Artificial sequence  Extension Primer
  Primer
aagcaaagaatgtctctagagtgac

SEQ ID NO: 22673 - DNA, 25 bp, Artificial sequence  Extension Primer
  Primer
taaggaccaaagcacccagtacaaa

SEQ ID NO: 22674 - DNA, 25 bp, Artificial sequence  Extension Primer
  Primer
ctgtcctccgtagtggctgtatcaa

SEQ ID NO: 22675 - DNA, 25 bp, Artificial sequence  Extension Primer
  Primer
cattttgtgtcacctttaagatttg

SEQ ID NO: 22676 - DNA, 25 bp, Artificial sequence  Extension Primer
  Primer
tggaacatataaacttttctgcctt

SEQ ID NO: 22677 - DNA, 25 bp, Artificial sequence  Extension Primer
  Primer
tgctctaaacttttccaaatactta

SEQ ID NO: 22678 - DNA, 25 bp, Artificial sequence  Extension Primer
  Primer
ggaaaacagtttggcattttgtcct

SEQ ID NO: 22679 - DNA, 25 bp, Artificial sequence  Extension Primer
  Primer
tcatttttttctttgtttttgaagt

SEQ ID NO: 22680 - DNA, 25 bp, Artificial sequence  Extension Primer
  Primer
gaatgggatgttgagtatgaatagg

SEQ ID NO: 22681 - DNA, 25 bp, Artificial sequence  Extension Primer
  Primer
tgctcaaggtcatttgaattccaay

SEQ ID NO: 22682 - DNA, 25 bp, Artificial sequence  Extension Primer
  Primer
ttctccagtgtgcaatcattaaata

SEQ ID NO: 22683 - DNA, 25 bp, Artificial sequence  Extension Primer
  Primer
gaacgcgggccctcagcagtgaaag

SEQ ID NO: 22684 - DNA, 25 bp, Artificial sequence  Extension Primer
  Primer
acctgaacgtttaacgaggctgggc

SEQ ID NO: 22685 - DNA, 25 bp, Artificial sequence  Extension Primer
  Primer
gtgtgtgtgtggaggaggggtgtgg

SEQ ID NO: 22686 - DNA, 25 bp, Artificial sequence  Extension Primer
  Primer
gttaatctcactacctaaaggcctc

SEQ ID NO: 22687 - DNA, 25 bp, Artificial sequence  Extension Primer
  Primer
atgtagattgaaaaataataggttt

SEQ ID NO: 22688 - DNA, 25 bp, Artificial sequence  Extension Primer
  Primer
ggaggattgcatctctgattaatga

SEQ ID NO: 22689 - DNA, 25 bp, Artificial sequence  Extension Primer
  Primer
atgaatagatgtgtgtggatcttta

SEQ ID NO: 22690 - DNA, 25 bp, Artificial sequence  Extension Primer
  Primer
tcctgggcttcatggaggtggcaga

SEQ ID NO: 22691 - DNA, 25 bp, Artificial sequence  Extension Primer
  Primer
tgttttccttacctgtcaatcgggg

SEQ ID NO: 22692 - DNA, 25 bp, Artificial sequence  Extension Primer
  Primer
tacccacttagccaaataaatgctg

SEQ ID NO: 22693 - DNA, 25 bp, Artificial sequence  Extension Primer
  Primer
gcttctttggcacctcttgatctcc

SEQ ID NO: 22694 - DNA, 25 bp, Artificial sequence  Extension Primer
  Primer
ttctgggattctccgacctcagggc

SEQ ID NO: 22695 - DNA, 25 bp, Artificial sequence  Extension Primer
  Primer
accctacrcattgtagcccacctgg

SEQ ID NO: 22696 - DNA, 25 bp, Artificial sequence  Extension Primer
  Primer
ctattaaagacaataatgaggactg

SEQ ID NO: 22697 - DNA, 22 bp, Artificial sequence  Extension Primer
  Primer
tttacctaatttgacaggaaac

SEQ ID NO: 22698 - DNA, 25 bp, Artificial sequence  Extension Primer
  Primer
aagcaaaatgcccatgtgcctcctc

SEQ ID NO: 22699 - DNA, 25 bp, Artificial sequence  Extension Primer
  Primer
aaatattaatagcatgagatttagg

SEQ ID NO: 22700 - DNA, 25 bp, Artificial sequence  Extension Primer
  Primer
gggcaccaggtattaggaccatgac

SEQ ID NO: 22701 - DNA, 25 bp, Artificial sequence  Extension Primer
  Primer
cactccctgcagaccccaggtccca

SEQ ID NO: 22702 - DNA, 25 bp, Artificial sequence  Extension Primer
  Primer
tgggatgagcctctastatytgatc

SEQ ID NO: 22703 - DNA, 22 bp, Artificial sequence  Extension Primer
  Primer
agacaggttccagataggctta

SEQ ID NO: 22704 - DNA, 25 bp, Artificial sequence  Extension Primer
  Primer
gaaccaggacagcacctgccagtgg

SEQ ID NO: 22705 - DNA, 25 bp, Artificial sequence  Extension Primer
  Primer
ttatattctccatgttttggagatg

SEQ ID NO: 22706 - DNA, 25 bp, Artificial sequence  Extension Primer
  Primer
accaaattggtcgttcaatttcaag

SEQ ID NO: 22707 - DNA, 25 bp, Artificial sequence  Extension Primer
  Primer
tgtaaatttattcaaaacatggaag

SEQ ID NO: 22708 - DNA, 25 bp, Artificial sequence  Extension Primer
  Primer
gaattcaaccgtacagagggaaggg

SEQ ID NO: 22709 - DNA, 25 bp, Artificial sequence  Extension Primer
  Primer
aaaccaattttcagcatggtaaaac

SEQ ID NO: 22710 - DNA, 25 bp, Artificial sequence  Extension Primer
  Primer
cttagtatgatggttccacagacaa

SEQ ID NO: 22711 - DNA, 25 bp, Artificial sequence  Extension Primer
  Primer
ttttttgttgttgttagtgttggaa

SEQ ID NO: 22712 - DNA, 25 bp, Artificial sequence  Extension Primer
  Primer
tttcacaaacaaattctgtgaaata

SEQ ID NO: 22713 - DNA, 25 bp, Artificial sequence  Extension Primer
  Primer
tattataatatttatacaatgttac

SEQ ID NO: 22714 - DNA, 25 bp, Artificial sequence  Extension Primer
  Primer
tatccctcaaaatccaattcaaatt

SEQ ID NO: 22715 - DNA, 25 bp, Artificial sequence  Extension Primer
  Primer
gtttggaaaagatgaagcctttgct

SEQ ID NO: 22716 - DNA, 25 bp, Artificial sequence  Extension Primer
  Primer
atgaaaacttgacccaaagtggagt

SEQ ID NO: 22717 - DNA, 25 bp, Artificial sequence  Extension Primer
  Primer
taattatcttgctcaccttttgttc

SEQ ID NO: 22718 - DNA, 25 bp, Artificial sequence  Extension Primer
  Primer
tgacagccatcaaaactacaagggc

SEQ ID NO: 22719 - DNA, 25 bp, Artificial sequence  Extension Primer
  Primer
aaaatgagaagtcagagttaataaa

SEQ ID NO: 22720 - DNA, 25 bp, Artificial sequence  Extension Primer
  Primer
cttttagctagggtggggcgaggat

SEQ ID NO: 22721 - DNA, 25 bp, Artificial sequence  Extension Primer
  Primer
caccgtggcggaggtttagcctctc

SEQ ID NO: 22722 - DNA, 25 bp, Artificial sequence  Extension Primer
  Primer
acggagccattgaggtcgaacggag

SEQ ID NO: 22723 - DNA, 25 bp, Artificial sequence  Extension Primer
  Primer
ttttctagtttaagtaaagaaaata

SEQ ID NO: 22724 - DNA, 22 bp, Artificial sequence  Extension Primer
  Primer
cagrctgatgctgggagagtgg

SEQ ID NO: 22725 - DNA, 25 bp, Artificial sequence  Extension Primer
  Primer
ctttgttctattcattgaatttatt

SEQ ID NO: 22726 - DNA, 25 bp, Artificial sequence  Extension Primer
  Primer
ggctagctgggcggcaactggggtg

SEQ ID NO: 22727 - DNA, 25 bp, Artificial sequence  Extension Primer
  Primer
acaacaagccattctagagatcaaa

SEQ ID NO: 22728 - DNA, 25 bp, Artificial sequence  Extension Primer
  Primer
gaaaaatagtcatatagctacagtc

SEQ ID NO: 22729 - DNA, 25 bp, Artificial sequence  Extension Primer
  Primer
atcacacgtgagggtgttagactgg

SEQ ID NO: 22730 - DNA, 25 bp, Artificial sequence  Extension Primer
  Primer
gtatctcacaattgtcatctgtgag

SEQ ID NO: 22731 - DNA, 25 bp, Artificial sequence  Extension Primer
  Primer
gagaaatctactagagatcctgggt

SEQ ID NO: 22732 - DNA, 25 bp, Artificial sequence  Extension Primer
  Primer
agatacatttctttgtgctctagtc

SEQ ID NO: 22733 - DNA, 25 bp, Artificial sequence  Extension Primer
  Primer
taagtgacagtgagatcctaacagt

SEQ ID NO: 22734 - DNA, 25 bp, Artificial sequence  Extension Primer
  Primer
ccacgttccccataattggaatgac

SEQ ID NO: 22735 - DNA, 25 bp, Artificial sequence  Extension Primer
  Primer
atgactgctaactgacacaactttg

SEQ ID NO: 22736 - DNA, 25 bp, Artificial sequence  Extension Primer
  Primer
tacaggcaaaatattcatttgttcc

SEQ ID NO: 22737 - DNA, 25 bp, Artificial sequence  Extension Primer
  Primer
tcaaccctgcccctgctgactgcct

SEQ ID NO: 22738 - DNA, 25 bp, Artificial sequence  Extension Primer
  Primer
aggtgcttgatcaatgatgaaggaa

SEQ ID NO: 22739 - DNA, 25 bp, Artificial sequence  Extension Primer
  Primer
tggcggaatgagattttcttaaaaa

SEQ ID NO: 22740 - DNA, 25 bp, Artificial sequence  Extension Primer
  Primer
gtcctaccatttttaaaacacagag

SEQ ID NO: 22741 - DNA, 25 bp, Artificial sequence  Extension Primer
  Primer
gctggctttgctgtgaaacgagtgg

SEQ ID NO: 22742 - DNA, 25 bp, Artificial sequence  Extension Primer
  Primer
tcactcggtttcttgcctcctggat

SEQ ID NO: 22743 - DNA, 25 bp, Artificial sequence  Extension Primer
  Primer
agtgcagaatgagccttacaataaa

SEQ ID NO: 22744 - DNA, 25 bp, Artificial sequence  Extension Primer
  Primer
attttaaaggtgatccaagtggggt

SEQ ID NO: 22745 - DNA, 25 bp, Artificial sequence  Extension Primer
  Primer
gtaatcatttatatgcsttcctctt

SEQ ID NO: 22746 - DNA, 25 bp, Artificial sequence  Extension Primer
  Primer
aataataatgtgctagaatgaaagc

SEQ ID NO: 22747 - DNA, 25 bp, Artificial sequence  Extension Primer
  Primer
aatacagaaaaaatatcctgaatcc

SEQ ID NO: 22748 - DNA, 25 bp, Artificial sequence  Extension Primer
  Primer
gcaggatttttcagagtccttaata

SEQ ID NO: 22749 - DNA, 25 bp, Artificial sequence  Extension Primer
  Primer
gccacgtggctctcaattcggccct

SEQ ID NO: 22750 - DNA, 25 bp, Artificial sequence  Extension Primer
  Primer
ctggtttcaaggagtttgctatatt

SEQ ID NO: 22751 - DNA, 25 bp, Artificial sequence  Extension Primer
  Primer
ggactgtcctttattcattttccta

SEQ ID NO: 22752 - DNA, 25 bp, Artificial sequence  Extension Primer
  Primer
ggaagttgtttcactctgtctttgt

SEQ ID NO: 22753 - DNA, 25 bp, Artificial sequence  Extension Primer
  Primer
tgtctagtcagcctgtcttaatcgc

SEQ ID NO: 22754 - DNA, 25 bp, Artificial sequence  Extension Primer
  Primer
ctgggaaagaaaaggttatggatat

SEQ ID NO: 22755 - DNA, 25 bp, Artificial sequence  Extension Primer
  Primer
cctgtgctttgtgcaacagagggtc

SEQ ID NO: 22756 - DNA, 25 bp, Artificial sequence  Extension Primer
  Primer
gtctaagccaagccctgtgaaagta

SEQ ID NO: 22757 - DNA, 25 bp, Artificial sequence  Extension Primer
  Primer
gttttgagcttttgaaaattactac

SEQ ID NO: 22758 - DNA, 25 bp, Artificial sequence  Extension Primer
  Primer
taagacaggatgtttttctttcatt

SEQ ID NO: 22759 - DNA, 25 bp, Artificial sequence  Extension Primer
  Primer
gaataaatgtaggttgatgaaaggt

SEQ ID NO: 22760 - DNA, 25 bp, Artificial sequence  Extension Primer
  Primer
tcttgcatataaggtggagactcac

SEQ ID NO: 22761 - DNA, 25 bp, Artificial sequence  Extension Primer
  Primer
tgtcgaagtcaagacaggaacatag

SEQ ID NO: 22762 - DNA, 25 bp, Artificial sequence  Extension Primer
  Primer
atgtgtaatttgttttcctttgggc

SEQ ID NO: 22763 - DNA, 25 bp, Artificial sequence  Extension Primer
  Primer
aggaaggaaactttttctagacatg

SEQ ID NO: 22764 - DNA, 25 bp, Artificial sequence  Extension Primer
  Primer
ttgagctttatgacactttttattg

SEQ ID NO: 22765 - DNA, 25 bp, Artificial sequence  Extension Primer
  Primer
ccactcacatccccatatggctaag

SEQ ID NO: 22766 - DNA, 25 bp, Artificial sequence  Extension Primer
  Primer
atctttgcatcatattttatgttcc

SEQ ID NO: 22767 - DNA, 25 bp, Artificial sequence  Extension Primer
  Primer
tctataatttttgctggggaaggta

SEQ ID NO: 22768 - DNA, 25 bp, Artificial sequence  Extension Primer
  Primer
tattcactttgaaaatggtttaatt

SEQ ID NO: 22769 - DNA, 25 bp, Artificial sequence  Extension Primer
  Primer
gttcactcatcagagtgctttgccc

SEQ ID NO: 22770 - DNA, 25 bp, Artificial sequence  Extension Primer
  Primer
cggcctctgtgcaccatggatgggg

SEQ ID NO: 22771 - DNA, 25 bp, Artificial sequence  Extension Primer
  Primer
ggttagcttttgaaaaataaggata

SEQ ID NO: 22772 - DNA, 25 bp, Artificial sequence  Extension Primer
  Primer
ccagaggcctctgagagcagaagaa

SEQ ID NO: 22773 - DNA, 25 bp, Artificial sequence  Extension Primer
  Primer
aaagagcctgatgctggtgagcgtc

SEQ ID NO: 22774 - DNA, 25 bp, Artificial sequence  Extension Primer
  Primer
tctcaacaactgctcctgagaaata

SEQ ID NO: 22775 - DNA, 25 bp, Artificial sequence  Extension Primer
  Primer
gaggcaaattaccagacacatamtg

SEQ ID NO: 22776 - DNA, 25 bp, Artificial sequence  Extension Primer
  Primer
atactgaacttcgactatagaggga

SEQ ID NO: 22777 - DNA, 25 bp, Artificial sequence  Extension Primer
  Primer
gccttctgaggccctgcaaggaatc

SEQ ID NO: 22778 - DNA, 25 bp, Artificial sequence  Extension Primer
  Primer
caggtagggtaatggtaatagtgcc

SEQ ID NO: 22779 - DNA, 25 bp, Artificial sequence  Extension Primer
  Primer
cctgagtgctctgctcatgctcaaa

SEQ ID NO: 22780 - DNA, 25 bp, Artificial sequence  Extension Primer
  Primer
tcaaatttaataacaacttgtttta

SEQ ID NO: 22781 - DNA, 25 bp, Artificial sequence  Extension Primer
  Primer
aggtaaaagaagtactttcctttta

SEQ ID NO: 22782 - DNA, 25 bp, Artificial sequence  Extension Primer
  Primer
gtcctctccaagcttgctgctgctc

SEQ ID NO: 22783 - DNA, 25 bp, Artificial sequence  Extension Primer
  Primer
gggggatgatggcagggtggctggg

SEQ ID NO: 22784 - DNA, 25 bp, Artificial sequence  Extension Primer
  Primer
ataaggcaaaagtcaagaaaatggc

SEQ ID NO: 22785 - DNA, 25 bp, Artificial sequence  Extension Primer
  Primer
ctcattcagccaacattttacaaca

SEQ ID NO: 22786 - DNA, 25 bp, Artificial sequence  Extension Primer
  Primer
ttttcttttctcttccagcatctaa

SEQ ID NO: 22787 - DNA, 25 bp, Artificial sequence  Extension Primer
  Primer
ggacctgctttgcagcggaggatac

SEQ ID NO: 22788 - DNA, 25 bp, Artificial sequence  Extension Primer
  Primer
gcaaacacaaaagatcaacaggtaa

SEQ ID NO: 22789 - DNA, 25 bp, Artificial sequence  Extension Primer
  Primer
gcaagttttgacacaaattataact

SEQ ID NO: 22790 - DNA, 25 bp, Artificial sequence  Extension Primer
  Primer
agagttcagccagcctcaactacag

SEQ ID NO: 22791 - DNA, 25 bp, Artificial sequence  Extension Primer
  Primer
ctttggttagctggcaagtgaacat

SEQ ID NO: 22792 - DNA, 25 bp, Artificial sequence  Extension Primer
  Primer
agaatagcatrtagtaatcacccaa

SEQ ID NO: 22793 - DNA, 25 bp, Artificial sequence  Extension Primer
  Primer
tcaaacgtttrttgggtgattacta

SEQ ID NO: 22794 - DNA, 25 bp, Artificial sequence  Extension Primer
  Primer
tacgttagcatcatcacatctctca

SEQ ID NO: 22795 - DNA, 25 bp, Artificial sequence  Extension Primer
  Primer
ataatagattttgctataaaagtgg

SEQ ID NO: 22796 - DNA, 25 bp, Artificial sequence  Extension Primer
  Primer
accaaaaggcagaagagatcataag

SEQ ID NO: 22797 - DNA, 25 bp, Artificial sequence  Extension Primer
  Primer
ccgtattttatatgtccttttatct

SEQ ID NO: 22798 - DNA, 25 bp, Artificial sequence  Extension Primer
  Primer
gaaccagaaacgaagccaagagtgc

SEQ ID NO: 22799 - DNA, 25 bp, Artificial sequence  Extension Primer
  Primer
gtatgaggccacttggggttgtttg

SEQ ID NO: 22800 - DNA, 25 bp, Artificial sequence  Extension Primer
  Primer
ggaattatggcactaggaaatttgc

SEQ ID NO: 22801 - DNA, 25 bp, Artificial sequence  Extension Primer
  Primer
tgacggtgctgggtcttagttgcag

SEQ ID NO: 22802 - DNA, 25 bp, Artificial sequence  Extension Primer
  Primer
tgtcttgatggagctttgggagttt

SEQ ID NO: 22803 - DNA, 25 bp, Artificial sequence  Extension Primer
  Primer
tctacttacctgagtgcccctgtgt

SEQ ID NO: 22804 - DNA, 25 bp, Artificial sequence  Extension Primer
  Primer
tttctgctattgaataagaaaacat

SEQ ID NO: 22805 - DNA, 25 bp, Artificial sequence  Extension Primer
  Primer
gagtcagtccacagataggaaggtt

SEQ ID NO: 22806 - DNA, 25 bp, Artificial sequence  Extension Primer
  Primer
ctactcagttcagttcagttcagtc

SEQ ID NO: 22807 - DNA, 25 bp, Artificial sequence  Extension Primer
  Primer
tagtcccaggtgctggcgcagtgga

SEQ ID NO: 22808 - DNA, 25 bp, Artificial sequence  Extension Primer
  Primer
actgtgtcttcccatgcaggggatg

SEQ ID NO: 22809 - DNA, 25 bp, Artificial sequence  Extension Primer
  Primer
cctatgaggactagaagagtgatgt

SEQ ID NO: 22810 - DNA, 25 bp, Artificial sequence  Extension Primer
  Primer
acacactttattttgatgagaacat

SEQ ID NO: 22811 - DNA, 25 bp, Artificial sequence  Extension Primer
  Primer
agtctatgtatgacctgcatagaac

SEQ ID NO: 22812 - DNA, 25 bp, Artificial sequence  Extension Primer
  Primer
agtaacccaagttattatgaaacag

SEQ ID NO: 22813 - DNA, 25 bp, Artificial sequence  Extension Primer
  Primer
ggagtggggcgaaaaggggttcaga

SEQ ID NO: 22814 - DNA, 25 bp, Artificial sequence  Extension Primer
  Primer
agatgaagagtcaaggacaaaccar

SEQ ID NO: 22815 - DNA, 25 bp, Artificial sequence  Extension Primer
  Primer
aaactgacactaaggtggatgtcag

SEQ ID NO: 22816 - DNA, 25 bp, Artificial sequence  Extension Primer
  Primer
ctgttctccagttktcctctctgct

SEQ ID NO: 22817 - DNA, 25 bp, Artificial sequence  Extension Primer
  Primer
agggagatttgaaggatgagactca

SEQ ID NO: 22818 - DNA, 25 bp, Artificial sequence  Extension Primer
  Primer
ttagcgacagggatccaggtgctgc

SEQ ID NO: 22819 - DNA, 25 bp, Artificial sequence  Extension Primer
  Primer
cctttccaacataaagtgaattata

SEQ ID NO: 22820 - DNA, 25 bp, Artificial sequence  Extension Primer
  Primer
tcagaatgtaggaaggctatgatgg

SEQ ID NO: 22821 - DNA, 25 bp, Artificial sequence  Extension Primer
  Primer
actctatggactcacacaagtacaa

SEQ ID NO: 22822 - DNA, 25 bp, Artificial sequence  Extension Primer
  Primer
cttcagccaagaaattgatgggaac

SEQ ID NO: 22823 - DNA, 25 bp, Artificial sequence  Extension Primer
  Primer
agggattgtatctttaacacttgga

SEQ ID NO: 22824 - DNA, 25 bp, Artificial sequence  Extension Primer
  Primer
ctctactacacatcagaccccagac

SEQ ID NO: 22825 - DNA, 25 bp, Artificial sequence  Extension Primer
  Primer
tcttcccagaccttgtggttaaatc

SEQ ID NO: 22826 - DNA, 25 bp, Artificial sequence  Extension Primer
  Primer
cggctgctgaactgtccattcattc

SEQ ID NO: 22827 - DNA, 25 bp, Artificial sequence  Extension Primer
  Primer
gccccaggccaagttcagccaagaa

SEQ ID NO: 22828 - DNA, 22 bp, Artificial sequence  Extension Primer
  Primer
ctggctgtaaagcagtgggtca

SEQ ID NO: 22829 - DNA, 25 bp, Artificial sequence  Extension Primer
  Primer
tttagatcccttagttctgtcatca

SEQ ID NO: 22830 - DNA, 25 bp, Artificial sequence  Extension Primer
  Primer
gggaagtggaggttgaataaaagas

SEQ ID NO: 22831 - DNA, 25 bp, Artificial sequence  Extension Primer
  Primer
taaagcatccataattgaagcctcc

SEQ ID NO: 22832 - DNA, 25 bp, Artificial sequence  Extension Primer
  Primer
aatgatatcccattaggaaaacctg

SEQ ID NO: 22833 - DNA, 25 bp, Artificial sequence  Extension Primer
  Primer
aaattttaactggagaattgaaata

SEQ ID NO: 22834 - DNA, 25 bp, Artificial sequence  Extension Primer
  Primer
aatcaaacaaccaagaattatatca

SEQ ID NO: 22835 - DNA, 25 bp, Artificial sequence  Extension Primer
  Primer
aaggtgaacttgaagacactttgag

SEQ ID NO: 22836 - DNA, 25 bp, Artificial sequence  Extension Primer
  Primer
ttagttttaaattctgcacaaaaat

SEQ ID NO: 22837 - DNA, 25 bp, Artificial sequence  Extension Primer
  Primer
atctgaagtgaccgagatgctaatt

SEQ ID NO: 22838 - DNA, 25 bp, Artificial sequence  Extension Primer
  Primer
aacaacctgggaataaaccctttgg

SEQ ID NO: 22839 - DNA, 25 bp, Artificial sequence  Extension Primer
  Primer
ggaggraccaagaaacagacaaagg

SEQ ID NO: 22840 - DNA, 25 bp, Artificial sequence  Extension Primer
  Primer
ctgaggcccttccctctccaagaag

SEQ ID NO: 22841 - DNA, 25 bp, Artificial sequence  Extension Primer
  Primer
caactatctcaagtgttaggtatta

SEQ ID NO: 22842 - DNA, 25 bp, Artificial sequence  Extension Primer
  Primer
ttgaggggatagaatagaggaaata

SEQ ID NO: 22843 - DNA, 25 bp, Artificial sequence  Extension Primer
  Primer
ccctctcctggtgctgtgacaaagc

SEQ ID NO: 22844 - DNA, 22 bp, Artificial sequence  Extension Primer
  Primer
gaaccrgcataccccatcacaa

SEQ ID NO: 22845 - DNA, 25 bp, Artificial sequence  Extension Primer
  Primer
attaaatgaatgtggtcattgcctc

SEQ ID NO: 22846 - DNA, 25 bp, Artificial sequence  Extension Primer
  Primer
gccacagacgggaacagagagggga

SEQ ID NO: 22847 - DNA, 25 bp, Artificial sequence  Extension Primer
  Primer
aaaaaaaaaaaagaggtgcatctgt

SEQ ID NO: 22848 - DNA, 25 bp, Artificial sequence  Extension Primer
  Primer
aagaagyctgaaacacagcacacag

SEQ ID NO: 22849 - DNA, 25 bp, Artificial sequence  Extension Primer
  Primer
tctgcttatattttcccacctaact

SEQ ID NO: 22850 - DNA, 25 bp, Artificial sequence  Extension Primer
  Primer
taagattctattaaaacaaaaaccc

SEQ ID NO: 22851 - DNA, 25 bp, Artificial sequence  Extension Primer
  Primer
tgctgtacaaaaattttttagatgt

SEQ ID NO: 22852 - DNA, 25 bp, Artificial sequence  Extension Primer
  Primer
gcattgctctgaatgggccatactt

SEQ ID NO: 22853 - DNA, 25 bp, Artificial sequence  Extension Primer
  Primer
ttcatcctactctgtcccctgtcta

SEQ ID NO: 22854 - DNA, 25 bp, Artificial sequence  Extension Primer
  Primer
ttctgaacgcctcctcccatcaccg

SEQ ID NO: 22855 - DNA, 25 bp, Artificial sequence  Extension Primer
  Primer
gcagagaaaggcgcaaacaagtaca

SEQ ID NO: 22856 - DNA, 25 bp, Artificial sequence  Extension Primer
  Primer
gacttgaagattcaggaacctagta

SEQ ID NO: 22857 - DNA, 25 bp, Artificial sequence  Extension Primer
  Primer
aactttttaaaaatcagtggagaaa

SEQ ID NO: 22858 - DNA, 25 bp, Artificial sequence  Extension Primer
  Primer
gattgtcccctgaaatgttactctt

SEQ ID NO: 22859 - DNA, 25 bp, Artificial sequence  Extension Primer
  Primer
aaaaaatactcatttgtaaatatgt

SEQ ID NO: 22860 - DNA, 25 bp, Artificial sequence  Extension Primer
  Primer
ctcttcagggtttcattggatgcct

SEQ ID NO: 22861 - DNA, 25 bp, Artificial sequence  Extension Primer
  Primer
ggtctaccagtatgccagtcccaag

SEQ ID NO: 22862 - DNA, 25 bp, Artificial sequence  Extension Primer
  Primer
ttcagagttctctcccgccctcttt

SEQ ID NO: 22863 - DNA, 25 bp, Artificial sequence  Extension Primer
  Primer
gtgccaccgtacctctcccaccccc

SEQ ID NO: 22864 - DNA, 25 bp, Artificial sequence  Extension Primer
  Primer
gtttcctgctactggaatggaccag

SEQ ID NO: 22865 - DNA, 25 bp, Artificial sequence  Extension Primer
  Primer
catgtctctgagtttcagatagatc

SEQ ID NO: 22866 - DNA, 22 bp, Artificial sequence  Extension Primer
  Primer
gctgctgtgaacattggggcac

SEQ ID NO: 22867 - DNA, 25 bp, Artificial sequence  Extension Primer
  Primer
ccatggagaaacagcactcaacccg

SEQ ID NO: 22868 - DNA, 25 bp, Artificial sequence  Extension Primer
  Primer
gtggctgtgacctcggaaatttctt

SEQ ID NO: 22869 - DNA, 25 bp, Artificial sequence  Extension Primer
  Primer
atgctcttccatgtgcttatatttt

SEQ ID NO: 22870 - DNA, 25 bp, Artificial sequence  Extension Primer
  Primer
tgagaactcttaggatttactctct

SEQ ID NO: 22871 - DNA, 25 bp, Artificial sequence  Extension Primer
  Primer
gcacataattatataccattcacta

SEQ ID NO: 22872 - DNA, 25 bp, Artificial sequence  Extension Primer
  Primer
ccttctactctcttccttcctgtaa

SEQ ID NO: 22873 - DNA, 25 bp, Artificial sequence  Extension Primer
  Primer
caaccaatagtaaaagaaccatgat

SEQ ID NO: 22874 - DNA, 25 bp, Artificial sequence  Extension Primer
  Primer
aggtgggtgcgtccatccctcaggc

SEQ ID NO: 22875 - DNA, 25 bp, Artificial sequence  Extension Primer
  Primer
agcaagaactgagttcagcgaggac

SEQ ID NO: 22876 - DNA, 25 bp, Artificial sequence  Extension Primer
  Primer
catgagaaaggagaggaaattagat

SEQ ID NO: 22877 - DNA, 25 bp, Artificial sequence  Extension Primer
  Primer
ttactaaatcgtatctcatgtagag

SEQ ID NO: 22878 - DNA, 25 bp, Artificial sequence  Extension Primer
  Primer
cctgactgttctagatcattttcat

SEQ ID NO: 22879 - DNA, 25 bp, Artificial sequence  Extension Primer
  Primer
ccacacccaccgaaccgctcagtgc

SEQ ID NO: 22880 - DNA, 25 bp, Artificial sequence  Extension Primer
  Primer
cggagacagcatcagcaaaaagaaa

SEQ ID NO: 22881 - DNA, 25 bp, Artificial sequence  Extension Primer
  Primer
gaaacgtaagacaatctctgctgtc

SEQ ID NO: 22882 - DNA, 25 bp, Artificial sequence  Extension Primer
  Primer
acttcgacctagcaaacagacataa

SEQ ID NO: 22883 - DNA, 25 bp, Artificial sequence  Extension Primer
  Primer
aggacatggctctcatgatgtatct

SEQ ID NO: 22884 - DNA, 25 bp, Artificial sequence  Extension Primer
  Primer
cacttctgtggtcatcaattgctta

SEQ ID NO: 22885 - DNA, 25 bp, Artificial sequence  Extension Primer
  Primer
aagaaaaggtacaattccttagatt

SEQ ID NO: 22886 - DNA, 25 bp, Artificial sequence  Extension Primer
  Primer
tgtgtgacttcttcggtgctgttca

SEQ ID NO: 22887 - DNA, 25 bp, Artificial sequence  Extension Primer
  Primer
ggaagccagcagcggtgcgtggacc

SEQ ID NO: 22888 - DNA, 25 bp, Artificial sequence  Extension Primer
  Primer
gtccaaggaatcgaaaactacagga

SEQ ID NO: 22889 - DNA, 25 bp, Artificial sequence  Extension Primer
  Primer
tcttctctctccctccgctttcagg

SEQ ID NO: 22890 - DNA, 25 bp, Artificial sequence  Extension Primer
  Primer
cctggtaggctacagtccatggggt

SEQ ID NO: 22891 - DNA, 25 bp, Artificial sequence  Extension Primer
  Primer
caagaaaatgtttatgatataatgc

SEQ ID NO: 22892 - DNA, 25 bp, Artificial sequence  Extension Primer
  Primer
tktgtgcaagaagatgcctgcctca

SEQ ID NO: 22893 - DNA, 25 bp, Artificial sequence  Extension Primer
  Primer
tttacagaaagaggaaccctaattg

SEQ ID NO: 22894 - DNA, 25 bp, Artificial sequence  Extension Primer
  Primer
gcttcttccctaagctacagtctga

SEQ ID NO: 22895 - DNA, 25 bp, Artificial sequence  Extension Primer
  Primer
ttgatctctttggatctgaggagga

SEQ ID NO: 22896 - DNA, 25 bp, Artificial sequence  Extension Primer
  Primer
gccttagtttcatttatggatcctg

SEQ ID NO: 22897 - DNA, 25 bp, Artificial sequence  Extension Primer
  Primer
ctgggaataaaaacccaaactgaaa

SEQ ID NO: 22898 - DNA, 25 bp, Artificial sequence  Extension Primer
  Primer
aattagaactatttatagcactgaa

SEQ ID NO: 22899 - DNA, 25 bp, Artificial sequence  Extension Primer
  Primer
caaatagagttgttgacagataaat

SEQ ID NO: 22900 - DNA, 25 bp, Artificial sequence  Extension Primer
  Primer
gctgttataatattccaactgaaat

SEQ ID NO: 22901 - DNA, 25 bp, Artificial sequence  Extension Primer
  Primer
ggtcaaattatagctttggacctct

SEQ ID NO: 22902 - DNA, 25 bp, Artificial sequence  Extension Primer
  Primer
ttgtccaggtaaatggacatcagac

SEQ ID NO: 22903 - DNA, 25 bp, Artificial sequence  Extension Primer
  Primer
gtctaccaaaacatccagtaacagc

SEQ ID NO: 22904 - DNA, 25 bp, Artificial sequence  Extension Primer
  Primer
ccagtgcagcctgatctgaattgcc

SEQ ID NO: 22905 - DNA, 25 bp, Artificial sequence  Extension Primer
  Primer
ctctccctttctcaccttcctctta

SEQ ID NO: 22906 - DNA, 25 bp, Artificial sequence  Extension Primer
  Primer
tcatcatcattattataacagtgct

SEQ ID NO: 22907 - DNA, 25 bp, Artificial sequence  Extension Primer
  Primer
gacatwtcaaactttctttrggagt

SEQ ID NO: 22908 - DNA, 25 bp, Artificial sequence  Extension Primer
  Primer
ttttctgacagatattcttttgaat

SEQ ID NO: 22909 - DNA, 25 bp, Artificial sequence  Extension Primer
  Primer
ttcagctcccatagtgaaagcagtt

SEQ ID NO: 22910 - DNA, 25 bp, Artificial sequence  Extension Primer
  Primer
ataattgtgtaacctgaggtgtccc

SEQ ID NO: 22911 - DNA, 25 bp, Artificial sequence  Extension Primer
  Primer
agacagacctggctctccagttctt

SEQ ID NO: 22912 - DNA, 25 bp, Artificial sequence  Extension Primer
  Primer
aaccttctgctctcttcytgcacca

SEQ ID NO: 22913 - DNA, 25 bp, Artificial sequence  Extension Primer
  Primer
gtggtcagaaccttctgctctcttc

SEQ ID NO: 22914 - DNA, 25 bp, Artificial sequence  Extension Primer
  Primer
acagttctcacgtaatggcatggga

SEQ ID NO: 22915 - DNA, 25 bp, Artificial sequence  Extension Primer
  Primer
attttactttaaaaggtaaaaagga

SEQ ID NO: 22916 - DNA, 25 bp, Artificial sequence  Extension Primer
  Primer
tcctgattaaacttccctaaaactc

SEQ ID NO: 22917 - DNA, 25 bp, Artificial sequence  Extension Primer
  Primer
ctaatttagaatgattgttgactac

SEQ ID NO: 22918 - DNA, 25 bp, Artificial sequence  Extension Primer
  Primer
gaaatacagatgaaaagtagaaggt

SEQ ID NO: 22919 - DNA, 25 bp, Artificial sequence  Extension Primer
  Primer
actaccgacagggagacaattttac

SEQ ID NO: 22920 - DNA, 25 bp, Artificial sequence  Extension Primer
  Primer
tcttttaaccaagcaggatggtcta

SEQ ID NO: 22921 - DNA, 25 bp, Artificial sequence  Extension Primer
  Primer
tttaagcagcattttcatttacttg

SEQ ID NO: 22922 - DNA, 25 bp, Artificial sequence  Extension Primer
  Primer
aaaatgactggaagtacaccaaatc

SEQ ID NO: 22923 - DNA, 25 bp, Artificial sequence  Extension Primer
  Primer
tgggaccaggggtggccccagctta

SEQ ID NO: 22924 - DNA, 25 bp, Artificial sequence  Extension Primer
  Primer
gaggccaagggctggcaggccaggg

SEQ ID NO: 22925 - DNA, 25 bp, Artificial sequence  Extension Primer
  Primer
atrcttgcctctgtctggacttgct

SEQ ID NO: 22926 - DNA, 25 bp, Artificial sequence  Extension Primer
  Primer
gccagacagtaacttaggctttgtg

SEQ ID NO: 22927 - DNA, 25 bp, Artificial sequence  Extension Primer
  Primer
tgtgccctatgtatcttcttcttcc

SEQ ID NO: 22928 - DNA, 25 bp, Artificial sequence  Extension Primer
  Primer
aatgtattttcttattacttcaatt

SEQ ID NO: 22929 - DNA, 25 bp, Artificial sequence  Extension Primer
  Primer
ctgccgaaacccactttagtgtctg

SEQ ID NO: 22930 - DNA, 25 bp, Artificial sequence  Extension Primer
  Primer
ctattttaaaaagagaggtacctgc

SEQ ID NO: 22931 - DNA, 25 bp, Artificial sequence  Extension Primer
  Primer
tagatatatctctttattcttctgg

SEQ ID NO: 22932 - DNA, 25 bp, Artificial sequence  Extension Primer
  Primer
gtctgtctaaactgtggactccaaa

SEQ ID NO: 22933 - DNA, 25 bp, Artificial sequence  Extension Primer
  Primer
attctgtgcatctcaaggccacttc

SEQ ID NO: 22934 - DNA, 25 bp, Artificial sequence  Extension Primer
  Primer
tttaatcatccttggaactctcatt

SEQ ID NO: 22935 - DNA, 25 bp, Artificial sequence  Extension Primer
  Primer
ttaatggaaagctagagaaatcaga

SEQ ID NO: 22936 - DNA, 25 bp, Artificial sequence  Extension Primer
  Primer
gttttagggatttccctggtggtgc

SEQ ID NO: 22937 - DNA, 25 bp, Artificial sequence  Extension Primer
  Primer
cagttatttctctaaaatacctttc

SEQ ID NO: 22938 - DNA, 25 bp, Artificial sequence  Extension Primer
  Primer
atacctttcrcttgaaattattagc

SEQ ID NO: 22939 - DNA, 25 bp, Artificial sequence  Extension Primer
  Primer
gcaccagctagagaatttatctgag

SEQ ID NO: 22940 - DNA, 25 bp, Artificial sequence  Extension Primer
  Primer
ccaaaacctttaytttatcaaacaa

SEQ ID NO: 22941 - DNA, 25 bp, Artificial sequence  Extension Primer
  Primer
tgataattctccyttgtttgataaa

SEQ ID NO: 22942 - DNA, 25 bp, Artificial sequence  Extension Primer
  Primer
ggcagaccttaaaacggcaggaagg

SEQ ID NO: 22943 - DNA, 25 bp, Artificial sequence  Extension Primer
  Primer
agaaataagataatagctcctttgc

SEQ ID NO: 22944 - DNA, 25 bp, Artificial sequence  Extension Primer
  Primer
gactttcattggttcatttaatgct

SEQ ID NO: 22945 - DNA, 25 bp, Artificial sequence  Extension Primer
  Primer
cccactcctccacgggcacgcactc

SEQ ID NO: 22946 - DNA, 25 bp, Artificial sequence  Extension Primer
  Primer
gcatccgttatccggtgatggtaca

SEQ ID NO: 22947 - DNA, 25 bp, Artificial sequence  Extension Primer
  Primer
ctggatagtattccctgagtgaaca

SEQ ID NO: 22948 - DNA, 25 bp, Artificial sequence  Extension Primer
  Primer
tggcgctgtgcccaggccactgagg

SEQ ID NO: 22949 - DNA, 25 bp, Artificial sequence  Extension Primer
  Primer
ttttctgttcttggcagggaggtta

SEQ ID NO: 22950 - DNA, 25 bp, Artificial sequence  Extension Primer
  Primer
ctaattgatacagctggaacactga

SEQ ID NO: 22951 - DNA, 25 bp, Artificial sequence  Extension Primer
  Primer
tcctatgtctccgtccagcttatag

SEQ ID NO: 22952 - DNA, 25 bp, Artificial sequence  Extension Primer
  Primer
ctgcaggggactactaagtctgaaa

SEQ ID NO: 22953 - DNA, 25 bp, Artificial sequence  Extension Primer
  Primer
atgtcaggctagaattaaaagacag

SEQ ID NO: 22954 - DNA, 25 bp, Artificial sequence  Extension Primer
  Primer
agagatgatgtaaagcctcttcctc

SEQ ID NO: 22955 - DNA, 25 bp, Artificial sequence  Extension Primer
  Primer
tcatgacaggacaggaatattgatc

SEQ ID NO: 22956 - DNA, 25 bp, Artificial sequence  Extension Primer
  Primer
accttgattgactttgcttttccta

SEQ ID NO: 22957 - DNA, 25 bp, Artificial sequence  Extension Primer
  Primer
ctcatacacaacacacatactcctt

SEQ ID NO: 22958 - DNA, 25 bp, Artificial sequence  Extension Primer
  Primer
taataaaagggagagaaaagactca

SEQ ID NO: 22959 - DNA, 25 bp, Artificial sequence  Extension Primer
  Primer
agattttgttttaagagatggaaag

SEQ ID NO: 22960 - DNA, 25 bp, Artificial sequence  Extension Primer
  Primer
ttttgttttaagagatggaaagrtg

SEQ ID NO: 22961 - DNA, 25 bp, Artificial sequence  Extension Primer
  Primer
tgctaattgtacagttagtctaagg

SEQ ID NO: 22962 - DNA, 25 bp, Artificial sequence  Extension Primer
  Primer
tttccttttctttcacatctttctt

SEQ ID NO: 22963 - DNA, 25 bp, Artificial sequence  Extension Primer
  Primer
atgtaatgatggccttggaagagag

SEQ ID NO: 22964 - DNA, 25 bp, Artificial sequence  Extension Primer
  Primer
gcctatcacagggcaaagagaagat

SEQ ID NO: 22965 - DNA, 25 bp, Artificial sequence  Extension Primer
  Primer
aattaacacttcactatttagttca

SEQ ID NO: 22966 - DNA, 25 bp, Artificial sequence  Extension Primer
  Primer
gggaatttctggtcttagtttcttt

SEQ ID NO: 22967 - DNA, 25 bp, Artificial sequence  Extension Primer
  Primer
tccccaagaaaacctggtaaatcct

SEQ ID NO: 22968 - DNA, 25 bp, Artificial sequence  Extension Primer
  Primer
actaattggaaacacacaagcaaat

SEQ ID NO: 22969 - DNA, 25 bp, Artificial sequence  Extension Primer
  Primer
aatgcacccccctccccgccatgtt

SEQ ID NO: 22970 - DNA, 25 bp, Artificial sequence  Extension Primer
  Primer
gcgatagtcctgtgaaagacctaca

SEQ ID NO: 22971 - DNA, 25 bp, Artificial sequence  Extension Primer
  Primer
aagtattgcctcattcagttcccat

SEQ ID NO: 22972 - DNA, 25 bp, Artificial sequence  Extension Primer
  Primer
aaaggaccatggagatctagacaga

SEQ ID NO: 22973 - DNA, 25 bp, Artificial sequence  Extension Primer
  Primer
agaaaaaaaaagccgtacaaataca

SEQ ID NO: 22974 - DNA, 25 bp, Artificial sequence  Extension Primer
  Primer
tactcttcaagttgatatcaaagtc

SEQ ID NO: 22975 - DNA, 25 bp, Artificial sequence  Extension Primer
  Primer
tggcaggggctgggggctagctatt

SEQ ID NO: 22976 - DNA, 25 bp, Artificial sequence  Extension Primer
  Primer
ctgttctgaaactattgctaaggag

SEQ ID NO: 22977 - DNA, 25 bp, Artificial sequence  Extension Primer
  Primer
acaccctgggtgggttaataagata

SEQ ID NO: 22978 - DNA, 25 bp, Artificial sequence  Extension Primer
  Primer
ccatcttaggaagtctctgctagag

SEQ ID NO: 22979 - DNA, 25 bp, Artificial sequence  Extension Primer
  Primer
tggaaagaggagattttcacagatt

SEQ ID NO: 22980 - DNA, 25 bp, Artificial sequence  Extension Primer
  Primer
ttacctatgtcaaaagatatgtccc

SEQ ID NO: 22981 - DNA, 25 bp, Artificial sequence  Extension Primer
  Primer
ttggaggccactggtaggtagaact

SEQ ID NO: 22982 - DNA, 25 bp, Artificial sequence  Extension Primer
  Primer
cracagctgttaccaagttgtctaa

SEQ ID NO: 22983 - DNA, 25 bp, Artificial sequence  Extension Primer
  Primer
ataattgttccaaataagcccacca

SEQ ID NO: 22984 - DNA, 22 bp, Artificial sequence  Extension Primer
  Primer
agtggagagtgtttaaaacttt

SEQ ID NO: 22985 - DNA, 25 bp, Artificial sequence  Extension Primer
  Primer
tgtcttctgttcatyggactcctca

SEQ ID NO: 22986 - DNA, 25 bp, Artificial sequence  Extension Primer
  Primer
tgactgggtgactgaacaaccacaa

SEQ ID NO: 22987 - DNA, 25 bp, Artificial sequence  Extension Primer
  Primer
tttttaagtgtcctttgcatgtaag

SEQ ID NO: 22988 - DNA, 25 bp, Artificial sequence  Extension Primer
  Primer
tcttgtttgagaggttttgctgctt

SEQ ID NO: 22989 - DNA, 25 bp, Artificial sequence  Extension Primer
  Primer
tagatgtagacccaggttcctgtcc

SEQ ID NO: 22990 - DNA, 25 bp, Artificial sequence  Extension Primer
  Primer
ctggttctccccctcaaatctcttt

SEQ ID NO: 22991 - DNA, 25 bp, Artificial sequence  Extension Primer
  Primer
gaatgatttctacaagtgttatgaa

SEQ ID NO: 22992 - DNA, 25 bp, Artificial sequence  Extension Primer
  Primer
gtccccaggatctctttaatggttc

SEQ ID NO: 22993 - DNA, 25 bp, Artificial sequence  Extension Primer
  Primer
cttccttgcagaccacaagcatcac

SEQ ID NO: 22994 - DNA, 25 bp, Artificial sequence  Extension Primer
  Primer
tgtgtgttatttgaaaattaatcct

SEQ ID NO: 22995 - DNA, 25 bp, Artificial sequence  Extension Primer
  Primer
ctggaagggtggaagaaaatgtgac

SEQ ID NO: 22996 - DNA, 25 bp, Artificial sequence  Extension Primer
  Primer
attctcctcccacaatctgtgcttc

SEQ ID NO: 22997 - DNA, 25 bp, Artificial sequence  Extension Primer
  Primer
agcatactctgatattatagtcaaa

SEQ ID NO: 22998 - DNA, 25 bp, Artificial sequence  Extension Primer
  Primer
ctaagtgggagtgaggaacaatggg

SEQ ID NO: 22999 - DNA, 25 bp, Artificial sequence  Extension Primer
  Primer
aaacactgcagatattcttccctct

SEQ ID NO: 23000 - DNA, 25 bp, Artificial sequence  Extension Primer
  Primer
gctgcaaatgagcttctcaaccatc

SEQ ID NO: 23001 - DNA, 25 bp, Artificial sequence  Extension Primer
  Primer
agactttaattcataaaagaacccc

SEQ ID NO: 23002 - DNA, 25 bp, Artificial sequence  Extension Primer
  Primer
agttgctcggttgtttctgactctt

SEQ ID NO: 23003 - DNA, 25 bp, Artificial sequence  Extension Primer
  Primer
aggagaagggagcaagccttgtaga

SEQ ID NO: 23004 - DNA, 25 bp, Artificial sequence  Extension Primer
  Primer
cttctaatatygccctgctctattg

SEQ ID NO: 23005 - DNA, 25 bp, Artificial sequence  Extension Primer
  Primer
ctccctgcttctcacttgcttctcc

SEQ ID NO: 23006 - DNA, 25 bp, Artificial sequence  Extension Primer
  Primer
tagaaatgatttgaatctaaacagt

SEQ ID NO: 23007 - DNA, 25 bp, Artificial sequence  Extension Primer
  Primer
ctatagaaactaaagaaggaaataa

SEQ ID NO: 23008 - DNA, 25 bp, Artificial sequence  Extension Primer
  Primer
gacttgtagagattgttttggatca

SEQ ID NO: 23009 - DNA, 25 bp, Artificial sequence  Extension Primer
  Primer
ttcagctctctcactccccttcgga

SEQ ID NO: 23010 - DNA, 25 bp, Artificial sequence  Extension Primer
  Primer
ggctgcctaaggtgaggtccacaag

SEQ ID NO: 23011 - DNA, 25 bp, Artificial sequence  Extension Primer
  Primer
ctcctttcaaaaggcttacaacata

SEQ ID NO: 23012 - DNA, 25 bp, Artificial sequence  Extension Primer
  Primer
ttgatcttcttctctcctcctgact

SEQ ID NO: 23013 - DNA, 25 bp, Artificial sequence  Extension Primer
  Primer
agaatctcttaatttctgggagtat

SEQ ID NO: 23014 - DNA, 25 bp, Artificial sequence  Extension Primer
  Primer
gggatgaaaggatatgayggacgca

SEQ ID NO: 23015 - DNA, 25 bp, Artificial sequence  Extension Primer
  Primer
tgtaactgctggctgctatcagggg

SEQ ID NO: 23016 - DNA, 25 bp, Artificial sequence  Extension Primer
  Primer
catcttatcaatcccttcttgcctc

SEQ ID NO: 23017 - DNA, 25 bp, Artificial sequence  Extension Primer
  Primer
atgccacttagtaaattagaaaaaa

SEQ ID NO: 23018 - DNA, 25 bp, Artificial sequence  Extension Primer
  Primer
gtccatataattgcttacaatgctc

SEQ ID NO: 23019 - DNA, 25 bp, Artificial sequence  Extension Primer
  Primer
ttggtatctagattttaactatttt

SEQ ID NO: 23020 - DNA, 25 bp, Artificial sequence  Extension Primer
  Primer
ggacgtttttccaaggaagcagtga

SEQ ID NO: 23021 - DNA, 25 bp, Artificial sequence  Extension Primer
  Primer
ttctttacaaactaaccttgttcat

SEQ ID NO: 23022 - DNA, 25 bp, Artificial sequence  Extension Primer
  Primer
ggatgattgcttctgagtcatttgc

SEQ ID NO: 23023 - DNA, 25 bp, Artificial sequence  Extension Primer
  Primer
attctttattttgatgtatctctta

SEQ ID NO: 23024 - DNA, 25 bp, Artificial sequence  Extension Primer
  Primer
caaatgtatacatcgtggcatctca

SEQ ID NO: 23025 - DNA, 25 bp, Artificial sequence  Extension Primer
  Primer
aataaaaccacaggcaaatgctccc

SEQ ID NO: 23026 - DNA, 25 bp, Artificial sequence  Extension Primer
  Primer
aaccaacgtatgctcctcttcatag

SEQ ID NO: 23027 - DNA, 25 bp, Artificial sequence  Extension Primer
  Primer
ttagtaaatctctcccttagctctg

SEQ ID NO: 23028 - DNA, 25 bp, Artificial sequence  Extension Primer
  Primer
accctggtcccccagatctctagca

SEQ ID NO: 23029 - DNA, 25 bp, Artificial sequence  Extension Primer
  Primer
ccctaaaatcaaacaacccaatcta

SEQ ID NO: 23030 - DNA, 25 bp, Artificial sequence  Extension Primer
  Primer
catattttgctttttttgacatttt

SEQ ID NO: 23031 - DNA, 25 bp, Artificial sequence  Extension Primer
  Primer
aacgtatagagtttaatgatgaagc

SEQ ID NO: 23032 - DNA, 25 bp, Artificial sequence  Extension Primer
  Primer
gacaccatccccactccacctctaa

SEQ ID NO: 23033 - DNA, 25 bp, Artificial sequence  Extension Primer
  Primer
caaacaaaaaatagagccccattaa

SEQ ID NO: 23034 - DNA, 25 bp, Artificial sequence  Extension Primer
  Primer
gtgcactcccaccctttgaccctgc

SEQ ID NO: 23035 - DNA, 25 bp, Artificial sequence  Extension Primer
  Primer
aaaaacaagagggaaagagtaactc

SEQ ID NO: 23036 - DNA, 25 bp, Artificial sequence  Extension Primer
  Primer
acttaaattacaacaaattttagac

SEQ ID NO: 23037 - DNA, 25 bp, Artificial sequence  Extension Primer
  Primer
ccctgtcacaytgtacagttaaatc

SEQ ID NO: 23038 - DNA, 25 bp, Artificial sequence  Extension Primer
  Primer
cagaactcggagagaagggagaggc

SEQ ID NO: 23039 - DNA, 25 bp, Artificial sequence  Extension Primer
  Primer
gaatccatacgcagtttctctttca

SEQ ID NO: 23040 - DNA, 25 bp, Artificial sequence  Extension Primer
  Primer
ttgtgaggatgcagcaaatgacttg

SEQ ID NO: 23041 - DNA, 25 bp, Artificial sequence  Extension Primer
  Primer
aaggagcatacacctttcagttgac

SEQ ID NO: 23042 - DNA, 25 bp, Artificial sequence  Extension Primer
  Primer
gatatgaagaagatgagcctggaag

SEQ ID NO: 23043 - DNA, 25 bp, Artificial sequence  Extension Primer
  Primer
caggaggccagactcttggatctcg

SEQ ID NO: 23044 - DNA, 25 bp, Artificial sequence  Extension Primer
  Primer
tggaatttttgaggaggcgaagcaa

SEQ ID NO: 23045 - DNA, 25 bp, Artificial sequence  Extension Primer
  Primer
gtattcacaagtatcagattctcat

SEQ ID NO: 23046 - DNA, 25 bp, Artificial sequence  Extension Primer
  Primer
tcaggatactccagtgtccagcata

SEQ ID NO: 23047 - DNA, 25 bp, Artificial sequence  Extension Primer
  Primer
caacatacaataacctggcctgaat

SEQ ID NO: 23048 - DNA, 25 bp, Artificial sequence  Extension Primer
  Primer
gaagctttacagaaacgaaaaagtt

SEQ ID NO: 23049 - DNA, 25 bp, Artificial sequence  Extension Primer
  Primer
gcaaatgtgttagtggagatcctga

SEQ ID NO: 23050 - DNA, 25 bp, Artificial sequence  Extension Primer
  Primer
ccacaactaaaggatcctgcatgct

SEQ ID NO: 23051 - DNA, 25 bp, Artificial sequence  Extension Primer
  Primer
tggcaatgcagggcgggcatggaaa

SEQ ID NO: 23052 - DNA, 25 bp, Artificial sequence  Extension Primer
  Primer
caaagggaagagatgattacttgat

SEQ ID NO: 23053 - DNA, 25 bp, Artificial sequence  Extension Primer
  Primer
ctcctctccrtaaaattatttccct

SEQ ID NO: 23054 - DNA, 25 bp, Artificial sequence  Extension Primer
  Primer
taagccagtyagggaaataatttta

SEQ ID NO: 23055 - DNA, 25 bp, Artificial sequence  Extension Primer
  Primer
ggggaccagagacagaacagtgatc

SEQ ID NO: 23056 - DNA, 25 bp, Artificial sequence  Extension Primer
  Primer
gaagatctactgaaaacttccagaa

SEQ ID NO: 23057 - DNA, 25 bp, Artificial sequence  Extension Primer
  Primer
gactgttgctgtaattgaaagctga

SEQ ID NO: 23058 - DNA, 25 bp, Artificial sequence  Extension Primer
  Primer
acagtccaggatcagggctgcatct

SEQ ID NO: 23059 - DNA, 25 bp, Artificial sequence  Extension Primer
  Primer
aaggactaaacaaattcccaatgac

SEQ ID NO: 23060 - DNA, 25 bp, Artificial sequence  Extension Primer
  Primer
tacttaactgaaatatcttacaatc

SEQ ID NO: 23061 - DNA, 25 bp, Artificial sequence  Extension Primer
  Primer
agacaartattcctgctcctcttcc

SEQ ID NO: 23062 - DNA, 25 bp, Artificial sequence  Extension Primer
  Primer
gtttgaacttctgactttttcmaag

SEQ ID NO: 23063 - DNA, 25 bp, Artificial sequence  Extension Primer
  Primer
tacctcctctcttaaatggagggga

SEQ ID NO: 23064 - DNA, 25 bp, Artificial sequence  Extension Primer
  Primer
ctttcaccagcttccttctctcctt

SEQ ID NO: 23065 - DNA, 25 bp, Artificial sequence  Extension Primer
  Primer
taggaataatggacaaggcaaagtg

SEQ ID NO: 23066 - DNA, 25 bp, Artificial sequence  Extension Primer
  Primer
taggttgmgttcctcrtctgtaaat

SEQ ID NO: 23067 - DNA, 25 bp, Artificial sequence  Extension Primer
  Primer
tcctggaaggtagttactgatttca

SEQ ID NO: 23068 - DNA, 25 bp, Artificial sequence  Extension Primer
  Primer
tctggaaaggctgaaaccatgggca

SEQ ID NO: 23069 - DNA, 25 bp, Artificial sequence  Extension Primer
  Primer
tatttaatctccctgggcctccctc

SEQ ID NO: 23070 - DNA, 25 bp, Artificial sequence  Extension Primer
  Primer
tttgccttgtcaaggaagtcagttt

SEQ ID NO: 23071 - DNA, 25 bp, Artificial sequence  Extension Primer
  Primer
aggaaaggaacagatgtgagagaag

SEQ ID NO: 23072 - DNA, 25 bp, Artificial sequence  Extension Primer
  Primer
attatggccaatatccattaacctc

SEQ ID NO: 23073 - DNA, 25 bp, Artificial sequence  Extension Primer
  Primer
tatataaacactaatttgcattcag

SEQ ID NO: 23074 - DNA, 25 bp, Artificial sequence  Extension Primer
  Primer
aaacgcagcttttggagttgaagaa

SEQ ID NO: 23075 - DNA, 25 bp, Artificial sequence  Extension Primer
  Primer
cacactaatattctacagccttctg

SEQ ID NO: 23076 - DNA, 25 bp, Artificial sequence  Extension Primer
  Primer
aatttgtataattctagacatgttt

SEQ ID NO: 23077 - DNA, 25 bp, Artificial sequence  Extension Primer
  Primer
gacaaagcactccatccccatgata

SEQ ID NO: 23078 - DNA, 25 bp, Artificial sequence  Extension Primer
  Primer
aaataacacacagtatttaacactc

SEQ ID NO: 23079 - DNA, 25 bp, Artificial sequence  Extension Primer
  Primer
atgctgtcactacaaagtgcacata

SEQ ID NO: 23080 - DNA, 25 bp, Artificial sequence  Extension Primer
  Primer
ttccactggaaagaatacaatgata

SEQ ID NO: 23081 - DNA, 25 bp, Artificial sequence  Extension Primer
  Primer
tgtgtccctaaatactgggaaaaaa

SEQ ID NO: 23082 - DNA, 25 bp, Artificial sequence  Extension Primer
  Primer
tgacttcagtgcccgaagagactag

SEQ ID NO: 23083 - DNA, 25 bp, Artificial sequence  Extension Primer
  Primer
gtggatggtgagagaagcgcaagcc

SEQ ID NO: 23084 - DNA, 25 bp, Artificial sequence  Extension Primer
  Primer
tgtgtgatttaacttttagcaatga

SEQ ID NO: 23085 - DNA, 25 bp, Artificial sequence  Extension Primer
  Primer
gaggcctgaagatatatctttgtta

SEQ ID NO: 23086 - DNA, 25 bp, Artificial sequence  Extension Primer
  Primer
tttagccaatatcaaatgttaagca

SEQ ID NO: 23087 - DNA, 25 bp, Artificial sequence  Extension Primer
  Primer
attcagagggtgtctcttgggaggt

SEQ ID NO: 23088 - DNA, 25 bp, Artificial sequence  Extension Primer
  Primer
aatgggcagttatcttttggattat

SEQ ID NO: 23089 - DNA, 25 bp, Artificial sequence  Extension Primer
  Primer
tcatatacatttcaaacacaatccc

SEQ ID NO: 23090 - DNA, 25 bp, Artificial sequence  Extension Primer
  Primer
tggtttgactccaccacctttcctg

SEQ ID NO: 23091 - DNA, 25 bp, Artificial sequence  Extension Primer
  Primer
gttgctcctgttcaggggcatggag

SEQ ID NO: 23092 - DNA, 25 bp, Artificial sequence  Extension Primer
  Primer
cattttaaaaagaatcaaagttaca

SEQ ID NO: 23093 - DNA, 25 bp, Artificial sequence  Extension Primer
  Primer
ggatttttgttaataatggctttaa

SEQ ID NO: 23094 - DNA, 22 bp, Artificial sequence  Extension Primer
  Primer
gcagttgtaaatgcctgagcct

SEQ ID NO: 23095 - DNA, 25 bp, Artificial sequence  Extension Primer
  Primer
ctcttcagagatggttttcccatgt

SEQ ID NO: 23096 - DNA, 25 bp, Artificial sequence  Extension Primer
  Primer
tatcaaataaactagccaatgtatc

SEQ ID NO: 23097 - DNA, 25 bp, Artificial sequence  Extension Primer
  Primer
tgatcttagacaagttcatcacctg

SEQ ID NO: 23098 - DNA, 25 bp, Artificial sequence  Extension Primer
  Primer
ttagctgggtgaccttgggctagat

SEQ ID NO: 23099 - DNA, 25 bp, Artificial sequence  Extension Primer
  Primer
ttatcaaatccaccctgtgtaaata

SEQ ID NO: 23100 - DNA, 25 bp, Artificial sequence  Extension Primer
  Primer
tgagtatccaaagcgagtggtacag

SEQ ID NO: 23101 - DNA, 25 bp, Artificial sequence  Extension Primer
  Primer
acccaccgtcatgcgattcctccag

SEQ ID NO: 23102 - DNA, 25 bp, Artificial sequence  Extension Primer
  Primer
cagagttattagaagcatatctttc

SEQ ID NO: 23103 - DNA, 25 bp, Artificial sequence  Extension Primer
  Primer
tagacaaacaaaaagacagtaagta

SEQ ID NO: 23104 - DNA, 25 bp, Artificial sequence  Extension Primer
  Primer
agtacatcagatatgtacgtctaca

SEQ ID NO: 23105 - DNA, 25 bp, Artificial sequence  Extension Primer
  Primer
ggataccaatcaaactgtaacacag

SEQ ID NO: 23106 - DNA, 25 bp, Artificial sequence  Extension Primer
  Primer
gtggcttctttgcagtcttccattt

SEQ ID NO: 23107 - DNA, 25 bp, Artificial sequence  Extension Primer
  Primer
cagaaggtcatgatgcatcttaaat

SEQ ID NO: 23108 - DNA, 25 bp, Artificial sequence  Extension Primer
  Primer
cttaagctttataaatacttacatg

SEQ ID NO: 23109 - DNA, 25 bp, Artificial sequence  Extension Primer
  Primer
ggagaatccggggcacgtggtgggc

SEQ ID NO: 23110 - DNA, 25 bp, Artificial sequence  Extension Primer
  Primer
tctagtttccttcttcttcactgac

SEQ ID NO: 23111 - DNA, 25 bp, Artificial sequence  Extension Primer
  Primer
gtcaagaccgaaatgacagcagaga

SEQ ID NO: 23112 - DNA, 25 bp, Artificial sequence  Extension Primer
  Primer
aaggtgatccttgaaaacttgtttc

SEQ ID NO: 23113 - DNA, 25 bp, Artificial sequence  Extension Primer
  Primer
cccaccttcctgcctatgcagccac

SEQ ID NO: 23114 - DNA, 25 bp, Artificial sequence  Extension Primer
  Primer
cacaggactagagtggttaaaaggc

SEQ ID NO: 23115 - DNA, 25 bp, Artificial sequence  Extension Primer
  Primer
aacattactacaagttcacagaggg

SEQ ID NO: 23116 - DNA, 25 bp, Artificial sequence  Extension Primer
  Primer
tagggtgtgaccttcttcctgacat

SEQ ID NO: 23117 - DNA, 25 bp, Artificial sequence  Extension Primer
  Primer
agacctagagcagagatccctccaa

SEQ ID NO: 23118 - DNA, 25 bp, Artificial sequence  Extension Primer
  Primer
aagttttctcaaagatgagtcttca

SEQ ID NO: 23119 - DNA, 25 bp, Artificial sequence  Extension Primer
  Primer
ttcatgggtggctcaaccgtcttcc

SEQ ID NO: 23120 - DNA, 25 bp, Artificial sequence  Extension Primer
  Primer
aagtatgaatccttcctctttgaac

SEQ ID NO: 23121 - DNA, 25 bp, Artificial sequence  Extension Primer
  Primer
gaatctataaaaattaatacaacag

SEQ ID NO: 23122 - DNA, 25 bp, Artificial sequence  Extension Primer
  Primer
atgaatttcttagatgaagaccgag

SEQ ID NO: 23123 - DNA, 25 bp, Artificial sequence  Extension Primer
  Primer
atgtttttgaatcatggtagcaggg

SEQ ID NO: 23124 - DNA, 25 bp, Artificial sequence  Extension Primer
  Primer
ctgagcacacccacccaccttcctc

SEQ ID NO: 23125 - DNA, 25 bp, Artificial sequence  Extension Primer
  Primer
gcaataattcttgccctgtctatct

SEQ ID NO: 23126 - DNA, 25 bp, Artificial sequence  Extension Primer
  Primer
gtggaagcattaacaagtacaaaaa

SEQ ID NO: 23127 - DNA, 25 bp, Artificial sequence  Extension Primer
  Primer
tgacaagatgtgaggatggtctcca

SEQ ID NO: 23128 - DNA, 25 bp, Artificial sequence  Extension Primer
  Primer
aggaagtcaaatgctgctgctgctg

SEQ ID NO: 23129 - DNA, 25 bp, Artificial sequence  Extension Primer
  Primer
atttttgtggccaaatmctgytcca

SEQ ID NO: 23130 - DNA, 25 bp, Artificial sequence  Extension Primer
  Primer
ttccctctgtctccttcacaagaat

SEQ ID NO: 23131 - DNA, 25 bp, Artificial sequence  Extension Primer
  Primer
agagacagagaagaggaatgcagat

SEQ ID NO: 23132 - DNA, 25 bp, Artificial sequence  Extension Primer
  Primer
tttcaacatacagaaacagagccca

SEQ ID NO: 23133 - DNA, 25 bp, Artificial sequence  Extension Primer
  Primer
gaacatccacatcacaatcaacaac

SEQ ID NO: 23134 - DNA, 25 bp, Artificial sequence  Extension Primer
  Primer
ctggagtgaatttaatattggcaat

SEQ ID NO: 23135 - DNA, 25 bp, Artificial sequence  Extension Primer
  Primer
taggagtacagtactatgaatgtag

SEQ ID NO: 23136 - DNA, 25 bp, Artificial sequence  Extension Primer
  Primer
cacccttattctactgaacaaccct

SEQ ID NO: 23137 - DNA, 25 bp, Artificial sequence  Extension Primer
  Primer
caggcttctctgtccttggaattct

SEQ ID NO: 23138 - DNA, 25 bp, Artificial sequence  Extension Primer
  Primer
ttaacttaattatcctagtaaagac

SEQ ID NO: 23139 - DNA, 25 bp, Artificial sequence  Extension Primer
  Primer
gataaagaaaatgttaggatgaatt

SEQ ID NO: 23140 - DNA, 25 bp, Artificial sequence  Extension Primer
  Primer
ttgaatatagcttggaaaaaaatag

SEQ ID NO: 23141 - DNA, 25 bp, Artificial sequence  Extension Primer
  Primer
aagtcaaaatcaactctctgggtgc

SEQ ID NO: 23142 - DNA, 25 bp, Artificial sequence  Extension Primer
  Primer
attttaattatgtctacaggagtac

SEQ ID NO: 23143 - DNA, 25 bp, Artificial sequence  Extension Primer
  Primer
gaaagataggaagatctatggaaag

SEQ ID NO: 23144 - DNA, 25 bp, Artificial sequence  Extension Primer
  Primer
aagagcctgggtatcattgaaccta

SEQ ID NO: 23145 - DNA, 25 bp, Artificial sequence  Extension Primer
  Primer
gtctctgtctcttcttgcccacccc

SEQ ID NO: 23146 - DNA, 22 bp, Artificial sequence  Extension Primer
  Primer
cactaaaacaaaaaagcaagca

SEQ ID NO: 23147 - DNA, 25 bp, Artificial sequence  Extension Primer
  Primer
acactaattattagcatacgaaaaa

SEQ ID NO: 23148 - DNA, 25 bp, Artificial sequence  Extension Primer
  Primer
caaggccacaagggtgtcagttgat

SEQ ID NO: 23149 - DNA, 25 bp, Artificial sequence  Extension Primer
  Primer
ctcccggtgcagaggcacgacttca

SEQ ID NO: 23150 - DNA, 25 bp, Artificial sequence  Extension Primer
  Primer
cctaacctttatgtaacgttcatca

SEQ ID NO: 23151 - DNA, 25 bp, Artificial sequence  Extension Primer
  Primer
agctagacatctttatgttcagaaa

SEQ ID NO: 23152 - DNA, 25 bp, Artificial sequence  Extension Primer
  Primer
agtttgaagaagacgactggagtga

SEQ ID NO: 23153 - DNA, 25 bp, Artificial sequence  Extension Primer
  Primer
tctgtttcactgaccaattcccctc

SEQ ID NO: 23154 - DNA, 25 bp, Artificial sequence  Extension Primer
  Primer
gaccatccygtttcagagttagtta

SEQ ID NO: 23155 - DNA, 25 bp, Artificial sequence  Extension Primer
  Primer
tgcatgtgtactgctttgagaagga

SEQ ID NO: 23156 - DNA, 25 bp, Artificial sequence  Extension Primer
  Primer
catgattacacctttgtggcacccc

SEQ ID NO: 23157 - DNA, 25 bp, Artificial sequence  Extension Primer
  Primer
tcctgcggctttagagcaattatca

SEQ ID NO: 23158 - DNA, 25 bp, Artificial sequence  Extension Primer
  Primer
ccccagctattgtgcatccggaagt

SEQ ID NO: 23159 - DNA, 25 bp, Artificial sequence  Extension Primer
  Primer
gtcagaaggttctcctgaaacattc

SEQ ID NO: 23160 - DNA, 25 bp, Artificial sequence  Extension Primer
  Primer
attgccttcttctacaatatcctac

SEQ ID NO: 23161 - DNA, 25 bp, Artificial sequence  Extension Primer
  Primer
gtgctttgttgcaggccccccactt

SEQ ID NO: 23162 - DNA, 25 bp, Artificial sequence  Extension Primer
  Primer
ttaataattacacctataaacagga

SEQ ID NO: 23163 - DNA, 25 bp, Artificial sequence  Extension Primer
  Primer
atctgtggtagtatgtatcctagtt

SEQ ID NO: 23164 - DNA, 25 bp, Artificial sequence  Extension Primer
  Primer
tcccttctttctggctttccaggca

SEQ ID NO: 23165 - DNA, 25 bp, Artificial sequence  Extension Primer
  Primer
atagatcaaagaagttcaagtgtgc

SEQ ID NO: 23166 - DNA, 25 bp, Artificial sequence  Extension Primer
  Primer
gggaatcctagcagagactggcagt

SEQ ID NO: 23167 - DNA, 25 bp, Artificial sequence  Extension Primer
  Primer
gatgtatcatctgcctagttctgct

SEQ ID NO: 23168 - DNA, 25 bp, Artificial sequence  Extension Primer
  Primer
gtcccccagccccaccctctccacg

SEQ ID NO: 23169 - DNA, 25 bp, Artificial sequence  Extension Primer
  Primer
atcgttaagataacatttatcccct

SEQ ID NO: 23170 - DNA, 25 bp, Artificial sequence  Extension Primer
  Primer
aatgcttgtaggaattatgagcttg

SEQ ID NO: 23171 - DNA, 25 bp, Artificial sequence  Extension Primer
  Primer
atatctccttatttgagatttctgt

SEQ ID NO: 23172 - DNA, 25 bp, Artificial sequence  Extension Primer
  Primer
cttaatttgatgcacttacttattt

SEQ ID NO: 23173 - DNA, 25 bp, Artificial sequence  Extension Primer
  Primer
gaacggagttgaattatagaacaga

SEQ ID NO: 23174 - DNA, 25 bp, Artificial sequence  Extension Primer
  Primer
aaaatgtattttaaactgtatatta

SEQ ID NO: 23175 - DNA, 25 bp, Artificial sequence  Extension Primer
  Primer
tagtgccacctgggaagccacattt

SEQ ID NO: 23176 - DNA, 25 bp, Artificial sequence  Extension Primer
  Primer
agaccctcagagatctcttgcctcc

SEQ ID NO: 23177 - DNA, 25 bp, Artificial sequence  Extension Primer
  Primer
ggcaaactaaagagacacaactaaa

SEQ ID NO: 23178 - DNA, 25 bp, Artificial sequence  Extension Primer
  Primer
ccaactccctcctgctgtattttct

SEQ ID NO: 23179 - DNA, 25 bp, Artificial sequence  Extension Primer
  Primer
ccgtggaataatttacatcaaagaa

SEQ ID NO: 23180 - DNA, 25 bp, Artificial sequence  Extension Primer
  Primer
gggaattttgtaaccttatcaactc

SEQ ID NO: 23181 - DNA, 25 bp, Artificial sequence  Extension Primer
  Primer
caaagtttatcatggataacgagag

SEQ ID NO: 23182 - DNA, 25 bp, Artificial sequence  Extension Primer
  Primer
ttttttttagtttttccaagcttct

SEQ ID NO: 23183 - DNA, 25 bp, Artificial sequence  Extension Primer
  Primer
atgttagcatatgcatactctacta

SEQ ID NO: 23184 - DNA, 25 bp, Artificial sequence  Extension Primer
  Primer
gaaatttgatctctccttacagttc

SEQ ID NO: 23185 - DNA, 25 bp, Artificial sequence  Extension Primer
  Primer
atgcttaggagattgtgcagtgtaa

SEQ ID NO: 23186 - DNA, 25 bp, Artificial sequence  Extension Primer
  Primer
ttaaccccaactaggaccacaattt

SEQ ID NO: 23187 - DNA, 25 bp, Artificial sequence  Extension Primer
  Primer
aatatgcataaaacaccattttaac

SEQ ID NO: 23188 - DNA, 25 bp, Artificial sequence  Extension Primer
  Primer
cgttcaaatttggcttactcttgtg

SEQ ID NO: 23189 - DNA, 25 bp, Artificial sequence  Extension Primer
  Primer
tcattctgtagctgccaattttcag

SEQ ID NO: 23190 - DNA, 25 bp, Artificial sequence  Extension Primer
  Primer
tgcgttactcatatttgttatctca

SEQ ID NO: 23191 - DNA, 25 bp, Artificial sequence  Extension Primer
  Primer
gtggagggggaagaggagtggtgac

SEQ ID NO: 23192 - DNA, 25 bp, Artificial sequence  Extension Primer
  Primer
cgctctaaaatgagaaaagaataga

SEQ ID NO: 23193 - DNA, 25 bp, Artificial sequence  Extension Primer
  Primer
aactgtagttcaatgttttgaataa

SEQ ID NO: 23194 - DNA, 25 bp, Artificial sequence  Extension Primer
  Primer
aaacaataacaaaaatgttcatgta

SEQ ID NO: 23195 - DNA, 25 bp, Artificial sequence  Extension Primer
  Primer
aaatgttttgatattcgagatacaa

SEQ ID NO: 23196 - DNA, 25 bp, Artificial sequence  Extension Primer
  Primer
tatgggagttgtatccayagagcaa

SEQ ID NO: 23197 - DNA, 25 bp, Artificial sequence  Extension Primer
  Primer
ttattttgcattttaatcaattaca

SEQ ID NO: 23198 - DNA, 25 bp, Artificial sequence  Extension Primer
  Primer
aatatgcatcaaaatgataaaggat

SEQ ID NO: 23199 - DNA, 25 bp, Artificial sequence  Extension Primer
  Primer
ttaaagggtcacataaagctacata

SEQ ID NO: 23200 - DNA, 25 bp, Artificial sequence  Extension Primer
  Primer
atattatacaaattaatagttctct

SEQ ID NO: 23201 - DNA, 25 bp, Artificial sequence  Extension Primer
  Primer
agatgaagagaatacatgtgagatt

SEQ ID NO: 23202 - DNA, 25 bp, Artificial sequence  Extension Primer
  Primer
ttcctctgtctacaactctaaatcc

SEQ ID NO: 23203 - DNA, 25 bp, Artificial sequence  Extension Primer
  Primer
ggacattgaaatgactggttaactc

SEQ ID NO: 23204 - DNA, 25 bp, Artificial sequence  Extension Primer
  Primer
tagtcctgttagaggcaccactgtc

SEQ ID NO: 23205 - DNA, 25 bp, Artificial sequence  Extension Primer
  Primer
tattttgtagcattggtttgcattt

SEQ ID NO: 23206 - DNA, 25 bp, Artificial sequence  Extension Primer
  Primer
tgatgtaaagccatcttcttttcgt

SEQ ID NO: 23207 - DNA, 25 bp, Artificial sequence  Extension Primer
  Primer
atcaccactgcacacttgagtggyt

SEQ ID NO: 23208 - DNA, 25 bp, Artificial sequence  Extension Primer
  Primer
acttcagtcagaagcttcagcccag

SEQ ID NO: 23209 - DNA, 25 bp, Artificial sequence  Extension Primer
  Primer
gatacgcctctgtctgcctcagttt

SEQ ID NO: 23210 - DNA, 25 bp, Artificial sequence  Extension Primer
  Primer
gtgggtgtttttgagatggtaagaa

SEQ ID NO: 23211 - DNA, 25 bp, Artificial sequence  Extension Primer
  Primer
aaattacatgtttcttaagtgttat

SEQ ID NO: 23212 - DNA, 25 bp, Artificial sequence  Extension Primer
  Primer
tattataggatttgtgttttggctg

SEQ ID NO: 23213 - DNA, 25 bp, Artificial sequence  Extension Primer
  Primer
ctactggcttagccaccaactttga

SEQ ID NO: 23214 - DNA, 25 bp, Artificial sequence  Extension Primer
  Primer
gactctggcaactgtttccttctct

SEQ ID NO: 23215 - DNA, 25 bp, Artificial sequence  Extension Primer
  Primer
tagtagtataaactcctgctacatt

SEQ ID NO: 23216 - DNA, 25 bp, Artificial sequence  Extension Primer
  Primer
cattgtggcagcccagggagggtgg

SEQ ID NO: 23217 - DNA, 25 bp, Artificial sequence  Extension Primer
  Primer
tcaattcccaagtgcaaagagtttt

SEQ ID NO: 23218 - DNA, 25 bp, Artificial sequence  Extension Primer
  Primer
tgagccatattacacttggaactga

SEQ ID NO: 23219 - DNA, 25 bp, Artificial sequence  Extension Primer
  Primer
aatgataagggttttgagatcttaa

SEQ ID NO: 23220 - DNA, 25 bp, Artificial sequence  Extension Primer
  Primer
tagtttaaaatggattcgaagtttt

SEQ ID NO: 23221 - DNA, 25 bp, Artificial sequence  Extension Primer
  Primer
ttacttgtagaatgaaaaagactct

SEQ ID NO: 23222 - DNA, 25 bp, Artificial sequence  Extension Primer
  Primer
gctcagatggcatataattaaaaga

SEQ ID NO: 23223 - DNA, 25 bp, Artificial sequence  Extension Primer
  Primer
aactaaaatgccttagcgtaccatt

SEQ ID NO: 23224 - DNA, 25 bp, Artificial sequence  Extension Primer
  Primer
aaagttgatcaagatcactccttcc

SEQ ID NO: 23225 - DNA, 25 bp, Artificial sequence  Extension Primer
  Primer
caccctgccctggaaggtcccacac

SEQ ID NO: 23226 - DNA, 25 bp, Artificial sequence  Extension Primer
  Primer
aacaaattaaaaataggcttacatc

SEQ ID NO: 23227 - DNA, 25 bp, Artificial sequence  Extension Primer
  Primer
tgagccaacactggtttgcccgtcc

SEQ ID NO: 23228 - DNA, 22 bp, Artificial sequence  Extension Primer
  Primer
atacactattccagggtcttct

SEQ ID NO: 23229 - DNA, 25 bp, Artificial sequence  Extension Primer
  Primer
gctctgtagtgaggtggttctgaag

SEQ ID NO: 23230 - DNA, 25 bp, Artificial sequence  Extension Primer
  Primer
cttagcactgaagaaactgggctgt

SEQ ID NO: 23231 - DNA, 25 bp, Artificial sequence  Extension Primer
  Primer
aatcgtcaactggaagaggaagacc

SEQ ID NO: 23232 - DNA, 25 bp, Artificial sequence  Extension Primer
  Primer
aggaaaggagatgttgtttctcttc

SEQ ID NO: 23233 - DNA, 25 bp, Artificial sequence  Extension Primer
  Primer
gtctgatatttgacttaatgttaac

SEQ ID NO: 23234 - DNA, 25 bp, Artificial sequence  Extension Primer
  Primer
tctctcaggtaagcatatttagacc

SEQ ID NO: 23235 - DNA, 25 bp, Artificial sequence  Extension Primer
  Primer
cctggggaagggcaggttggtgggc

SEQ ID NO: 23236 - DNA, 25 bp, Artificial sequence  Extension Primer
  Primer
ctacccactgttttccctactcaac

SEQ ID NO: 23237 - DNA, 25 bp, Artificial sequence  Extension Primer
  Primer
gaagatgtgaaacaacaggaagagg

SEQ ID NO: 23238 - DNA, 25 bp, Artificial sequence  Extension Primer
  Primer
aagtttgaagaccaagttggctttc

SEQ ID NO: 23239 - DNA, 25 bp, Artificial sequence  Extension Primer
  Primer
taagtctcacaaattatttcagttg

SEQ ID NO: 23240 - DNA, 25 bp, Artificial sequence  Extension Primer
  Primer
tcagacgtgtcygacttttgcaacc

SEQ ID NO: 23241 - DNA, 25 bp, Artificial sequence  Extension Primer
  Primer
cacagggctaattcaggcatcttcc

SEQ ID NO: 23242 - DNA, 25 bp, Artificial sequence  Extension Primer
  Primer
agagcagggaactgaaagaacgtcc

SEQ ID NO: 23243 - DNA, 25 bp, Artificial sequence  Extension Primer
  Primer
gaaaacaaatacttgggcagaattt

SEQ ID NO: 23244 - DNA, 25 bp, Artificial sequence  Extension Primer
  Primer
atggaaaccatcttaaatctacaga

SEQ ID NO: 23245 - DNA, 25 bp, Artificial sequence  Extension Primer
  Primer
gacagccctacaatatttccctcac

SEQ ID NO: 23246 - DNA, 25 bp, Artificial sequence  Extension Primer
  Primer
cacagataaattctgggcagcacac

SEQ ID NO: 23247 - DNA, 25 bp, Artificial sequence  Extension Primer
  Primer
gctggaagagctgagaaaagctgct

SEQ ID NO: 23248 - DNA, 25 bp, Artificial sequence  Extension Primer
  Primer
gtcaagtttgtaagcaggagctttc

SEQ ID NO: 23249 - DNA, 25 bp, Artificial sequence  Extension Primer
  Primer
atggttagatggctgcatrttgaat

SEQ ID NO: 23250 - DNA, 25 bp, Artificial sequence  Extension Primer
  Primer
ctgaggcctagcagacaggccatga

SEQ ID NO: 23251 - DNA, 25 bp, Artificial sequence  Extension Primer
  Primer
aatcgcctatagcattttcctaaca

SEQ ID NO: 23252 - DNA, 25 bp, Artificial sequence  Extension Primer
  Primer
ttcatgtgaaagataaactgagaga

SEQ ID NO: 23253 - DNA, 25 bp, Artificial sequence  Extension Primer
  Primer
cgaagacaacactgaagtcttcaca

SEQ ID NO: 23254 - DNA, 25 bp, Artificial sequence  Extension Primer
  Primer
cagacattcgcttcaatagcatcta

SEQ ID NO: 23255 - DNA, 25 bp, Artificial sequence  Extension Primer
  Primer
aaaaatatcttatccattaatcctt

SEQ ID NO: 23256 - DNA, 22 bp, Artificial sequence  Extension Primer
  Primer
gtaattatatgaaaatgacatt

SEQ ID NO: 23257 - DNA, 25 bp, Artificial sequence  Extension Primer
  Primer
taatctgataatgttgaaatgcaaa

SEQ ID NO: 23258 - DNA, 25 bp, Artificial sequence  Extension Primer
  Primer
caccagagatggagagggcccccag

SEQ ID NO: 23259 - DNA, 25 bp, Artificial sequence  Extension Primer
  Primer
agacatcagggcaatgatgtcatcc

SEQ ID NO: 23260 - DNA, 25 bp, Artificial sequence  Extension Primer
  Primer
tacaattaccccttactgagcataa

SEQ ID NO: 23261 - DNA, 25 bp, Artificial sequence  Extension Primer
  Primer
gtgtcagtggagcccagcagtgtgc

SEQ ID NO: 23262 - DNA, 25 bp, Artificial sequence  Extension Primer
  Primer
tcaccttctaaaggaagaatatttt

SEQ ID NO: 23263 - DNA, 25 bp, Artificial sequence  Extension Primer
  Primer
taataacaaagttatgatcagcctt

SEQ ID NO: 23264 - DNA, 25 bp, Artificial sequence  Extension Primer
  Primer
aacaggtttcccaacttttcaagcc

SEQ ID NO: 23265 - DNA, 25 bp, Artificial sequence  Extension Primer
  Primer
gggtggggaggcgtctctccaggaa

SEQ ID NO: 23266 - DNA, 25 bp, Artificial sequence  Extension Primer
  Primer
agggtgagtcaaagcttttgtttct

SEQ ID NO: 23267 - DNA, 25 bp, Artificial sequence  Extension Primer
  Primer
tcaggcacctagaatgtgaattgtt

SEQ ID NO: 23268 - DNA, 25 bp, Artificial sequence  Extension Primer
  Primer
atccttctgcctcatgacgtggaca

SEQ ID NO: 23269 - DNA, 25 bp, Artificial sequence  Extension Primer
  Primer
aagggaggaaaattgagggaacatg

SEQ ID NO: 23270 - DNA, 25 bp, Artificial sequence  Extension Primer
  Primer
taatttagatagtgtatgttaagga

SEQ ID NO: 23271 - DNA, 25 bp, Artificial sequence  Extension Primer
  Primer
tattttacagatgagaaaactaagg

SEQ ID NO: 23272 - DNA, 25 bp, Artificial sequence  Extension Primer
  Primer
ctcttagtgatgagtgatttatgtt

SEQ ID NO: 23273 - DNA, 25 bp, Artificial sequence  Extension Primer
  Primer
ttaattatctgaggggtttatatcc

SEQ ID NO: 23274 - DNA, 25 bp, Artificial sequence  Extension Primer
  Primer
atgttgaccttgaaatgcagaaaga

SEQ ID NO: 23275 - DNA, 25 bp, Artificial sequence  Extension Primer
  Primer
taagactatacacaggagtgaattt

SEQ ID NO: 23276 - DNA, 25 bp, Artificial sequence  Extension Primer
  Primer
cctgccaaagtgtcttccatctcaa

SEQ ID NO: 23277 - DNA, 25 bp, Artificial sequence  Extension Primer
  Primer
ttcagagatatagtaaaagaccaca

SEQ ID NO: 23278 - DNA, 25 bp, Artificial sequence  Extension Primer
  Primer
aaaaaaagcaactatgcatataatc

SEQ ID NO: 23279 - DNA, 25 bp, Artificial sequence  Extension Primer
  Primer
ctctgcctcagtgaccctcattgcc

SEQ ID NO: 23280 - DNA, 25 bp, Artificial sequence  Extension Primer
  Primer
aggggtttaatttcagaactacaca

SEQ ID NO: 23281 - DNA, 25 bp, Artificial sequence  Extension Primer
  Primer
gagctaagggacacgtattaacgcc

SEQ ID NO: 23282 - DNA, 25 bp, Artificial sequence  Extension Primer
  Primer
ctatgacgcagttccagtggaccat

SEQ ID NO: 23283 - DNA, 25 bp, Artificial sequence  Extension Primer
  Primer
gtatctcttataagaacactaagcc

SEQ ID NO: 23284 - DNA, 25 bp, Artificial sequence  Extension Primer
  Primer
tgtgagtccctgtaaggtgggagcc

SEQ ID NO: 23285 - DNA, 25 bp, Artificial sequence  Extension Primer
  Primer
acctggcgatctgtctgytcctctc

SEQ ID NO: 23286 - DNA, 25 bp, Artificial sequence  Extension Primer
  Primer
aaatgcagattgtgagcagtactac

SEQ ID NO: 23287 - DNA, 25 bp, Artificial sequence  Extension Primer
  Primer
agtctccatctctactccacccaat

SEQ ID NO: 23288 - DNA, 25 bp, Artificial sequence  Extension Primer
  Primer
ggagcagagattgaggacacaccag

SEQ ID NO: 23289 - DNA, 25 bp, Artificial sequence  Extension Primer
  Primer
cttgtggccccatggcatgtgagaa

SEQ ID NO: 23290 - DNA, 25 bp, Artificial sequence  Extension Primer
  Primer
ccgagacgcatgtgcagtcactgta

SEQ ID NO: 23291 - DNA, 25 bp, Artificial sequence  Extension Primer
  Primer
tcttgttgaattttggtgcctatta

SEQ ID NO: 23292 - DNA, 25 bp, Artificial sequence  Extension Primer
  Primer
ggagtgtatgcaagggtactacgct

SEQ ID NO: 23293 - DNA, 25 bp, Artificial sequence  Extension Primer
  Primer
ttggatgtgcaatctaagagagaag

SEQ ID NO: 23294 - DNA, 25 bp, Artificial sequence  Extension Primer
  Primer
acaccgtgtcagggcaggcaagtct

SEQ ID NO: 23295 - DNA, 25 bp, Artificial sequence  Extension Primer
  Primer
attgrggtgtctggattgattcaac

SEQ ID NO: 23296 - DNA, 25 bp, Artificial sequence  Extension Primer
  Primer
aaaccagcggcctcagcaccactta

SEQ ID NO: 23297 - DNA, 25 bp, Artificial sequence  Extension Primer
  Primer
ctccaatgctgaacttttctcaata

SEQ ID NO: 23298 - DNA, 25 bp, Artificial sequence  Extension Primer
  Primer
actgaaacctcagccggaaccaagc

SEQ ID NO: 23299 - DNA, 25 bp, Artificial sequence  Extension Primer
  Primer
gcaaataatctactgtggtagagaa

SEQ ID NO: 23300 - DNA, 25 bp, Artificial sequence  Extension Primer
  Primer
gggtgtagatgtagttaaacattaa

SEQ ID NO: 23301 - DNA, 25 bp, Artificial sequence  Extension Primer
  Primer
gaaggcaacaatcccatcattaagt

SEQ ID NO: 23302 - DNA, 25 bp, Artificial sequence  Extension Primer
  Primer
taaatgtaaaattcactggtgttcg

SEQ ID NO: 23303 - DNA, 25 bp, Artificial sequence  Extension Primer
  Primer
ctcccagctgttcgtggaggtccct

SEQ ID NO: 23304 - DNA, 25 bp, Artificial sequence  Extension Primer
  Primer
gggtacaggttgtctagaggagagc

SEQ ID NO: 23305 - DNA, 25 bp, Artificial sequence  Extension Primer
  Primer
atctaaattatctctstaatatgtt

SEQ ID NO: 23306 - DNA, 25 bp, Artificial sequence  Extension Primer
  Primer
cagaacccgtgatgatgtcacctga

SEQ ID NO: 23307 - DNA, 25 bp, Artificial sequence  Extension Primer
  Primer
atgggcacttgaaaaggcacaaatc

SEQ ID NO: 23308 - DNA, 25 bp, Artificial sequence  Extension Primer
  Primer
aagctataaaagattaagtggctac

SEQ ID NO: 23309 - DNA, 25 bp, Artificial sequence  Extension Primer
  Primer
gaaatctagtctaacttcctcactt

SEQ ID NO: 23310 - DNA, 25 bp, Artificial sequence  Extension Primer
  Primer
aatttttgcttaacccagaaaataa

SEQ ID NO: 23311 - DNA, 25 bp, Artificial sequence  Extension Primer
  Primer
cagtccttggacagaatctagttca

SEQ ID NO: 23312 - DNA, 25 bp, Artificial sequence  Extension Primer
  Primer
atgacagaaactagaggaaaagaga

SEQ ID NO: 23313 - DNA, 25 bp, Artificial sequence  Extension Primer
  Primer
agacttgaaccacggtacacagtaa

SEQ ID NO: 23314 - DNA, 25 bp, Artificial sequence  Extension Primer
  Primer
cacaaacaactagctctttaataaa

SEQ ID NO: 23315 - DNA, 25 bp, Artificial sequence  Extension Primer
  Primer
ttaaatgtcatcctaagaacagtta

SEQ ID NO: 23316 - DNA, 25 bp, Artificial sequence  Extension Primer
  Primer
ctaatccaactcaaaaaagttgtac

SEQ ID NO: 23317 - DNA, 25 bp, Artificial sequence  Extension Primer
  Primer
ttacaagtcaaaaaaaaaaattctg

SEQ ID NO: 23318 - DNA, 25 bp, Artificial sequence  Extension Primer
  Primer
ggcttsttctggaggctttagcaca

SEQ ID NO: 23319 - DNA, 25 bp, Artificial sequence  Extension Primer
  Primer
acagacattctcttgggcaccaaga

SEQ ID NO: 23320 - DNA, 25 bp, Artificial sequence  Extension Primer
  Primer
cgtacagcaaagtgattcagttata

SEQ ID NO: 23321 - DNA, 25 bp, Artificial sequence  Extension Primer
  Primer
tactctgagccccagggaggaggag

SEQ ID NO: 23322 - DNA, 25 bp, Artificial sequence  Extension Primer
  Primer
atactctaattttttttttcaaacc

SEQ ID NO: 23323 - DNA, 25 bp, Artificial sequence  Extension Primer
  Primer
ctctgacccactcccaaaatgccac

SEQ ID NO: 23324 - DNA, 25 bp, Artificial sequence  Extension Primer
  Primer
agctcctgcgtctgggaaacagttc

SEQ ID NO: 23325 - DNA, 25 bp, Artificial sequence  Extension Primer
  Primer
caagttttgtttaaaatgttcagca

SEQ ID NO: 23326 - DNA, 25 bp, Artificial sequence  Extension Primer
  Primer
aaacatccacattctgcccacacag

SEQ ID NO: 23327 - DNA, 25 bp, Artificial sequence  Extension Primer
  Primer
catagacttttggtgaatggggtgg

SEQ ID NO: 23328 - DNA, 25 bp, Artificial sequence  Extension Primer
  Primer
ctcttcactgtgatttacctttgat

SEQ ID NO: 23329 - DNA, 25 bp, Artificial sequence  Extension Primer
  Primer
agggtaccctaaccactctcccatt

SEQ ID NO: 23330 - DNA, 25 bp, Artificial sequence  Extension Primer
  Primer
ataaatgtgactacccatctatctc

SEQ ID NO: 23331 - DNA, 25 bp, Artificial sequence  Extension Primer
  Primer
gactcggaactcctaatgctggggg

SEQ ID NO: 23332 - DNA, 25 bp, Artificial sequence  Extension Primer
  Primer
tttataataagaaattggaggtaca

SEQ ID NO: 23333 - DNA, 25 bp, Artificial sequence  Extension Primer
  Primer
gcctgggggaatggtctaggaaggg

SEQ ID NO: 23334 - DNA, 25 bp, Artificial sequence  Extension Primer
  Primer
tggttttcaaagttctggttgcatc

SEQ ID NO: 23335 - DNA, 25 bp, Artificial sequence  Extension Primer
  Primer
cacatgatattctcacagtgtccag

SEQ ID NO: 23336 - DNA, 25 bp, Artificial sequence  Extension Primer
  Primer
tggcttgggatctaaaaacctgtaa

SEQ ID NO: 23337 - DNA, 25 bp, Artificial sequence  Extension Primer
  Primer
ataatgtactaataatgtgatgtat

SEQ ID NO: 23338 - DNA, 25 bp, Artificial sequence  Extension Primer
  Primer
caaaacttttcttaaattggcactc

SEQ ID NO: 23339 - DNA, 25 bp, Artificial sequence  Extension Primer
  Primer
ctcttagcatccatcttgcacatcc

SEQ ID NO: 23340 - DNA, 25 bp, Artificial sequence  Extension Primer
  Primer
aactataaatgacttaaacacttgc

SEQ ID NO: 23341 - DNA, 25 bp, Artificial sequence  Extension Primer
  Primer
tgggaattccctattagagaggctg

SEQ ID NO: 23342 - DNA, 25 bp, Artificial sequence  Extension Primer
  Primer
actgctgattgccattatctactaa

SEQ ID NO: 23343 - DNA, 25 bp, Artificial sequence  Extension Primer
  Primer
gatagaacattcctctcagaatggt

SEQ ID NO: 23344 - DNA, 25 bp, Artificial sequence  Extension Primer
  Primer
aaattaaaaacaacacamacctaag

SEQ ID NO: 23345 - DNA, 25 bp, Artificial sequence  Extension Primer
  Primer
acagatagaacacacagaaccagag

SEQ ID NO: 23346 - DNA, 25 bp, Artificial sequence  Extension Primer
  Primer
gctgggaggtgcagtttgtacaagg

SEQ ID NO: 23347 - DNA, 25 bp, Artificial sequence  Extension Primer
  Primer
gagcagagagaccagagtttagatt

SEQ ID NO: 23348 - DNA, 25 bp, Artificial sequence  Extension Primer
  Primer
ccttgtatattcccctttccaacct

SEQ ID NO: 23349 - DNA, 25 bp, Artificial sequence  Extension Primer
  Primer
atttctttgggaattctgcatactg

SEQ ID NO: 23350 - DNA, 25 bp, Artificial sequence  Extension Primer
  Primer
aatcaccaagggccaagtacatcat

SEQ ID NO: 23351 - DNA, 25 bp, Artificial sequence  Extension Primer
  Primer
ctctgtccccaaacagctcttgaca

SEQ ID NO: 23352 - DNA, 25 bp, Artificial sequence  Extension Primer
  Primer
atcccatgaactgtagcccaccagg

SEQ ID NO: 23353 - DNA, 25 bp, Artificial sequence  Extension Primer
  Primer
ttcagactatccatatcccttagta

SEQ ID NO: 23354 - DNA, 25 bp, Artificial sequence  Extension Primer
  Primer
tatttttaacctaakgacaaagtga

SEQ ID NO: 23355 - DNA, 25 bp, Artificial sequence  Extension Primer
  Primer
atctgagctgccaacagaaacacac

SEQ ID NO: 23356 - DNA, 25 bp, Artificial sequence  Extension Primer
  Primer
cagggcctgtctcttaataggagtg

SEQ ID NO: 23357 - DNA, 25 bp, Artificial sequence  Extension Primer
  Primer
cacatcagttcctaccctccctggc

SEQ ID NO: 23358 - DNA, 25 bp, Artificial sequence  Extension Primer
  Primer
atttgatcatcaccatctcccagga

SEQ ID NO: 23359 - DNA, 25 bp, Artificial sequence  Extension Primer
  Primer
aatacacatacttcattttgtttta

SEQ ID NO: 23360 - DNA, 25 bp, Artificial sequence  Extension Primer
  Primer
tataaatgttcacgctcatcttcat

SEQ ID NO: 23361 - DNA, 25 bp, Artificial sequence  Extension Primer
  Primer
agcttgtgccattgcaaaaatttaa

SEQ ID NO: 23362 - DNA, 22 bp, Artificial sequence  Extension Primer
  Primer
tctgtactgagcacagtggagg

SEQ ID NO: 23363 - DNA, 25 bp, Artificial sequence  Extension Primer
  Primer
ttgttccttccaagtgttttacata

SEQ ID NO: 23364 - DNA, 25 bp, Artificial sequence  Extension Primer
  Primer
ggcaaccacaaagtctagggaaatc

SEQ ID NO: 23365 - DNA, 25 bp, Artificial sequence  Extension Primer
  Primer
ttacctaacaagattgagcttggtt

SEQ ID NO: 23366 - DNA, 25 bp, Artificial sequence  Extension Primer
  Primer
catattgctgtacttctgaacatag

SEQ ID NO: 23367 - DNA, 25 bp, Artificial sequence  Extension Primer
  Primer
ggtaggttcgaagaacctctacagg

SEQ ID NO: 23368 - DNA, 25 bp, Artificial sequence  Extension Primer
  Primer
agaatgcctattgagaatacaatga

SEQ ID NO: 23369 - DNA, 25 bp, Artificial sequence  Extension Primer
  Primer
cttttgcttgtggtgtttttagtcc

SEQ ID NO: 23370 - DNA, 25 bp, Artificial sequence  Extension Primer
  Primer
acctacttaatattcagaggtgtca

SEQ ID NO: 23371 - DNA, 25 bp, Artificial sequence  Extension Primer
  Primer
agatgatgaagaggctggaaagatg

SEQ ID NO: 23372 - DNA, 25 bp, Artificial sequence  Extension Primer
  Primer
ctatccaggtgtaataatcttcctc

SEQ ID NO: 23373 - DNA, 25 bp, Artificial sequence  Extension Primer
  Primer
ggtgcattgcctgacgtggagagtg

SEQ ID NO: 23374 - DNA, 25 bp, Artificial sequence  Extension Primer
  Primer
atatttaataacctaacacattcct

SEQ ID NO: 23375 - DNA, 25 bp, Artificial sequence  Extension Primer
  Primer
gatttgtactaaaattttgagtaaa

SEQ ID NO: 23376 - DNA, 25 bp, Artificial sequence  Extension Primer
  Primer
ggttaagtttccataagtacttaca

SEQ ID NO: 23377 - DNA, 25 bp, Artificial sequence  Extension Primer
  Primer
tcctgaacagtcacagtcccacagt

SEQ ID NO: 23378 - DNA, 25 bp, Artificial sequence  Extension Primer
  Primer
ctctgtgcctgagacatctgaagca

SEQ ID NO: 23379 - DNA, 25 bp, Artificial sequence  Extension Primer
  Primer
taggaaagtatagaagtgaatttac

SEQ ID NO: 23380 - DNA, 25 bp, Artificial sequence  Extension Primer
  Primer
caggcaggttctttactgctcgcac

SEQ ID NO: 23381 - DNA, 25 bp, Artificial sequence  Extension Primer
  Primer
tctgcaaataattttcttaacttac

SEQ ID NO: 23382 - DNA, 25 bp, Artificial sequence  Extension Primer
  Primer
ggatttctgctttgtcattttagtt

SEQ ID NO: 23383 - DNA, 25 bp, Artificial sequence  Extension Primer
  Primer
gttttaattttgtgcaatctctttt

SEQ ID NO: 23384 - DNA, 25 bp, Artificial sequence  Extension Primer
  Primer
accccttgggtactttaaataattg

SEQ ID NO: 23385 - DNA, 25 bp, Artificial sequence  Extension Primer
  Primer
tacattcatggcctaatgtctattt

SEQ ID NO: 23386 - DNA, 25 bp, Artificial sequence  Extension Primer
  Primer
atcaaatactaagccaaacagattg

SEQ ID NO: 23387 - DNA, 25 bp, Artificial sequence  Extension Primer
  Primer
acttctgccggttccttgctccaag

SEQ ID NO: 23388 - DNA, 25 bp, Artificial sequence  Extension Primer
  Primer
agaatgaactgtgtgygacaaatta

SEQ ID NO: 23389 - DNA, 25 bp, Artificial sequence  Extension Primer
  Primer
attccaggagacttccttggtgata

SEQ ID NO: 23390 - DNA, 25 bp, Artificial sequence  Extension Primer
  Primer
gaactcatcattgagaacttagaaa

SEQ ID NO: 23391 - DNA, 25 bp, Artificial sequence  Extension Primer
  Primer
gagggactggcccaggctgtcaaca

SEQ ID NO: 23392 - DNA, 25 bp, Artificial sequence  Extension Primer
  Primer
tgccctcctggtcgcttcaattaaa

SEQ ID NO: 23393 - DNA, 25 bp, Artificial sequence  Extension Primer
  Primer
acactggaccatttctgaccaactg

SEQ ID NO: 23394 - DNA, 25 bp, Artificial sequence  Extension Primer
  Primer
actaaaatattataaatgcaacata

SEQ ID NO: 23395 - DNA, 25 bp, Artificial sequence  Extension Primer
  Primer
tttttatattctttgcataaactgt

SEQ ID NO: 23396 - DNA, 25 bp, Artificial sequence  Extension Primer
  Primer
ctgtgggaaaatcaataatacattt

SEQ ID NO: 23397 - DNA, 25 bp, Artificial sequence  Extension Primer
  Primer
ctacttcacctacctcgcctaccct

SEQ ID NO: 23398 - DNA, 25 bp, Artificial sequence  Extension Primer
  Primer
tctgattttattattccartgtctc

SEQ ID NO: 23399 - DNA, 25 bp, Artificial sequence  Extension Primer
  Primer
atataaagtgcttagaatgatgccc

SEQ ID NO: 23400 - DNA, 25 bp, Artificial sequence  Extension Primer
  Primer
tctggaccttgtcctgtgtacctct

SEQ ID NO: 23401 - DNA, 25 bp, Artificial sequence  Extension Primer
  Primer
ggtcgggtaactaagatcccacaca

SEQ ID NO: 23402 - DNA, 25 bp, Artificial sequence  Extension Primer
  Primer
gaggggctgctttgtggctgctaat

SEQ ID NO: 23403 - DNA, 25 bp, Artificial sequence  Extension Primer
  Primer
ctgttatcacaactttatgggctcc

SEQ ID NO: 23404 - DNA, 25 bp, Artificial sequence  Extension Primer
  Primer
acgaagtcggggagctctgcgtgtg

SEQ ID NO: 23405 - DNA, 25 bp, Artificial sequence  Extension Primer
  Primer
acgagcttcttgggtcttcagtgcc

SEQ ID NO: 23406 - DNA, 25 bp, Artificial sequence  Extension Primer
  Primer
ggactgaagaggttaatagtggtta

SEQ ID NO: 23407 - DNA, 25 bp, Artificial sequence  Extension Primer
  Primer
tttcatctcctttctagctttggtg

SEQ ID NO: 23408 - DNA, 25 bp, Artificial sequence  Extension Primer
  Primer
ctggtgggaaatcttcactttagga

SEQ ID NO: 23409 - DNA, 25 bp, Artificial sequence  Extension Primer
  Primer
taacaacggtgatcacataaccttt

SEQ ID NO: 23410 - DNA, 25 bp, Artificial sequence  Extension Primer
  Primer
aactatttaggtggttgtgtagtga

SEQ ID NO: 23411 - DNA, 25 bp, Artificial sequence  Extension Primer
  Primer
ccaaagtgccactcattctacctgc

SEQ ID NO: 23412 - DNA, 25 bp, Artificial sequence  Extension Primer
  Primer
caacaagacatgttttatggagact

SEQ ID NO: 23413 - DNA, 25 bp, Artificial sequence  Extension Primer
  Primer
aaaaaagactagaagatgcaggtag

SEQ ID NO: 23414 - DNA, 25 bp, Artificial sequence  Extension Primer
  Primer
gaagtcatcctggccccttaagttt

SEQ ID NO: 23415 - DNA, 25 bp, Artificial sequence  Extension Primer
  Primer
tagcccacacttccccagagcgagc

SEQ ID NO: 23416 - DNA, 25 bp, Artificial sequence  Extension Primer
  Primer
ttccaaaggtccaggccagaagtga

SEQ ID NO: 23417 - DNA, 25 bp, Artificial sequence  Extension Primer
  Primer
ccttgaggatctctcttttggtcct

SEQ ID NO: 23418 - DNA, 25 bp, Artificial sequence  Extension Primer
  Primer
gatgggattttcttttttttcacca

SEQ ID NO: 23419 - DNA, 25 bp, Artificial sequence  Extension Primer
  Primer
aagatttgaattctgagggagatgg

SEQ ID NO: 23420 - DNA, 25 bp, Artificial sequence  Extension Primer
  Primer
ggactaacagagatgtgataaatga

SEQ ID NO: 23421 - DNA, 25 bp, Artificial sequence  Extension Primer
  Primer
attctacctgcataatgtaaactgg

SEQ ID NO: 23422 - DNA, 25 bp, Artificial sequence  Extension Primer
  Primer
aagaaagaaggttaacagtccgttt

SEQ ID NO: 23423 - DNA, 25 bp, Artificial sequence  Extension Primer
  Primer
agggtcatttcataggtagaagttg

SEQ ID NO: 23424 - DNA, 25 bp, Artificial sequence  Extension Primer
  Primer
tcttaattatcttgactttccattt

SEQ ID NO: 23425 - DNA, 25 bp, Artificial sequence  Extension Primer
  Primer
ttgcaacccagatccctgattggtg

SEQ ID NO: 23426 - DNA, 25 bp, Artificial sequence  Extension Primer
  Primer
agatgttttgaatgaagaactgttt

SEQ ID NO: 23427 - DNA, 25 bp, Artificial sequence  Extension Primer
  Primer
ggataaaaatgataaaagactatgg

SEQ ID NO: 23428 - DNA, 25 bp, Artificial sequence  Extension Primer
  Primer
cgctgccagagctctaagtgccttc

SEQ ID NO: 23429 - DNA, 25 bp, Artificial sequence  Extension Primer
  Primer
aactgaggtcagttgggctgaggct

SEQ ID NO: 23430 - DNA, 25 bp, Artificial sequence  Extension Primer
  Primer
ggattttggagacctctgttctggc

SEQ ID NO: 23431 - DNA, 25 bp, Artificial sequence  Extension Primer
  Primer
atgaaaatgctttctgaagatcaac

SEQ ID NO: 23432 - DNA, 25 bp, Artificial sequence  Extension Primer
  Primer
tgtcagcctgtccttgccgatcaca

SEQ ID NO: 23433 - DNA, 25 bp, Artificial sequence  Extension Primer
  Primer
aagctgaaaatgctcttgtgtcaca

SEQ ID NO: 23434 - DNA, 25 bp, Artificial sequence  Extension Primer
  Primer
tttttcctaacattttttgaaaaca

SEQ ID NO: 23435 - DNA, 25 bp, Artificial sequence  Extension Primer
  Primer
attaatttctcaatatttttgtgta

SEQ ID NO: 23436 - DNA, 25 bp, Artificial sequence  Extension Primer
  Primer
tcataaaagggtgtctgccagattg

SEQ ID NO: 23437 - DNA, 25 bp, Artificial sequence  Extension Primer
  Primer
ttatcattatatatatttcagtgtt

SEQ ID NO: 23438 - DNA, 25 bp, Artificial sequence  Extension Primer
  Primer
ccttagcccaggcgtcgaaacctag

SEQ ID NO: 23439 - DNA, 25 bp, Artificial sequence  Extension Primer
  Primer
taagaatattcaaggaattaaaaaa

SEQ ID NO: 23440 - DNA, 25 bp, Artificial sequence  Extension Primer
  Primer
aaatgtacataaagtgactattatt

SEQ ID NO: 23441 - DNA, 25 bp, Artificial sequence  Extension Primer
  Primer
tttattctgtctgtaaccatcttta

SEQ ID NO: 23442 - DNA, 25 bp, Artificial sequence  Extension Primer
  Primer
tatactcaacataaaacacaaagcc

SEQ ID NO: 23443 - DNA, 25 bp, Artificial sequence  Extension Primer
  Primer
atctcaaatttatgatgaggttact

SEQ ID NO: 23444 - DNA, 25 bp, Artificial sequence  Extension Primer
  Primer
caagattccctctaagattttgctc

SEQ ID NO: 23445 - DNA, 25 bp, Artificial sequence  Extension Primer
  Primer
gtaaaaggagtttatactaccttca

SEQ ID NO: 23446 - DNA, 25 bp, Artificial sequence  Extension Primer
  Primer
gaaagagcacgagagacaaagcgga

SEQ ID NO: 23447 - DNA, 25 bp, Artificial sequence  Extension Primer
  Primer
ttttagtgggtaaatgggttaaatc

SEQ ID NO: 23448 - DNA, 25 bp, Artificial sequence  Extension Primer
  Primer
ccattttcaggatcaagacccaaga

SEQ ID NO: 23449 - DNA, 25 bp, Artificial sequence  Extension Primer
  Primer
gatccaaattcagtcttcaacaaca

SEQ ID NO: 23450 - DNA, 25 bp, Artificial sequence  Extension Primer
  Primer
gtgttgacttattcccagccatagc

SEQ ID NO: 23451 - DNA, 25 bp, Artificial sequence  Extension Primer
  Primer
atcttcagggaatttttttaagcca

SEQ ID NO: 23452 - DNA, 25 bp, Artificial sequence  Extension Primer
  Primer
acagaagcattacctcaagatcgtt

SEQ ID NO: 23453 - DNA, 25 bp, Artificial sequence  Extension Primer
  Primer
agcccacctcgcacctcaaaaatac

SEQ ID NO: 23454 - DNA, 25 bp, Artificial sequence  Extension Primer
  Primer
gtgagaccaacctgatgcagatatt

SEQ ID NO: 23455 - DNA, 25 bp, Artificial sequence  Extension Primer
  Primer
gagagtccagagaattctcataaac

SEQ ID NO: 23456 - DNA, 25 bp, Artificial sequence  Extension Primer
  Primer
tggtgattagaaatacaaaatacat

SEQ ID NO: 23457 - DNA, 25 bp, Artificial sequence  Extension Primer
  Primer
aggatcacagaattctccagtacaa

SEQ ID NO: 23458 - DNA, 25 bp, Artificial sequence  Extension Primer
  Primer
aaaacaggatatcacagaatgccaa

SEQ ID NO: 23459 - DNA, 25 bp, Artificial sequence  Extension Primer
  Primer
acaacatcgagatgaaataaaagac

SEQ ID NO: 23460 - DNA, 25 bp, Artificial sequence  Extension Primer
  Primer
tgagaggagagttgtaacaggccaa

SEQ ID NO: 23461 - DNA, 22 bp, Artificial sequence  Extension Primer
  Primer
aactgacttcttatttctttct

SEQ ID NO: 23462 - DNA, 25 bp, Artificial sequence  Extension Primer
  Primer
cccccttcccacacgcggctcgcag

SEQ ID NO: 23463 - DNA, 25 bp, Artificial sequence  Extension Primer
  Primer
atgatgatagctacaatgacccttc

SEQ ID NO: 23464 - DNA, 25 bp, Artificial sequence  Extension Primer
  Primer
cactgtatttcaccaccatataccc

SEQ ID NO: 23465 - DNA, 25 bp, Artificial sequence  Extension Primer
  Primer
ttatatagatttttgaaagcttacc

SEQ ID NO: 23466 - DNA, 25 bp, Artificial sequence  Extension Primer
  Primer
cagatagctccattactyaccgaga

SEQ ID NO: 23467 - DNA, 25 bp, Artificial sequence  Extension Primer
  Primer
tgttttcttctttgtgacaagggag

SEQ ID NO: 23468 - DNA, 25 bp, Artificial sequence  Extension Primer
  Primer
ttgtatgctcatatcctgagtggta

SEQ ID NO: 23469 - DNA, 25 bp, Artificial sequence  Extension Primer
  Primer
ccttctgctgacaagaaatggtaat

SEQ ID NO: 23470 - DNA, 25 bp, Artificial sequence  Extension Primer
  Primer
tcaaagacccgacagggaagcgagg

SEQ ID NO: 23471 - DNA, 25 bp, Artificial sequence  Extension Primer
  Primer
tgaactcacatttcttaatatgtaa

SEQ ID NO: 23472 - DNA, 25 bp, Artificial sequence  Extension Primer
  Primer
attcatctgcattctttttttagat

SEQ ID NO: 23473 - DNA, 25 bp, Artificial sequence  Extension Primer
  Primer
ctaaaaattcattagcactctcttt

SEQ ID NO: 23474 - DNA, 25 bp, Artificial sequence  Extension Primer
  Primer
ccactttatgtaagtggaaaatatg

SEQ ID NO: 23475 - DNA, 25 bp, Artificial sequence  Extension Primer
  Primer
atggagaaacatttttttcaaagat

SEQ ID NO: 23476 - DNA, 25 bp, Artificial sequence  Extension Primer
  Primer
tgccctccctcccacacctgcagcc

SEQ ID NO: 23477 - DNA, 25 bp, Artificial sequence  Extension Primer
  Primer
tattagctgctttccccaactagaa

SEQ ID NO: 23478 - DNA, 25 bp, Artificial sequence  Extension Primer
  Primer
tttgtttttttttwwattttttttg

SEQ ID NO: 23479 - DNA, 25 bp, Artificial sequence  Extension Primer
  Primer
gacatttagttccaccagaatgaga

SEQ ID NO: 23480 - DNA, 25 bp, Artificial sequence  Extension Primer
  Primer
gcacttacccgcaggcatcggcaca

SEQ ID NO: 23481 - DNA, 25 bp, Artificial sequence  Extension Primer
  Primer
aaatccaaatggtaaaatatatccc

SEQ ID NO: 23482 - DNA, 25 bp, Artificial sequence  Extension Primer
  Primer
taatgccaaagaagatgaagcttaa

SEQ ID NO: 23483 - DNA, 25 bp, Artificial sequence  Extension Primer
  Primer
aggttggtacacaggcatgcatgct

SEQ ID NO: 23484 - DNA, 25 bp, Artificial sequence  Extension Primer
  Primer
tgggccaagagaactggtaacattt

SEQ ID NO: 23485 - DNA, 25 bp, Artificial sequence  Extension Primer
  Primer
cacaacattttaaaatatgcagagc

SEQ ID NO: 23486 - DNA, 25 bp, Artificial sequence  Extension Primer
  Primer
tcagcaagcgctggcgggaaattga

SEQ ID NO: 23487 - DNA, 25 bp, Artificial sequence  Extension Primer
  Primer
tctaaaacataggggtggacaaaaa

SEQ ID NO: 23488 - DNA, 25 bp, Artificial sequence  Extension Primer
  Primer
ggatggagctgagaggaagcctgtc

SEQ ID NO: 23489 - DNA, 25 bp, Artificial sequence  Extension Primer
  Primer
aagtcgttaagagcatatattctgg

SEQ ID NO: 23490 - DNA, 25 bp, Artificial sequence  Extension Primer
  Primer
taagattgtttataaaccatgagaa

SEQ ID NO: 23491 - DNA, 25 bp, Artificial sequence  Extension Primer
  Primer
aggtggattctttaccactgagcca

SEQ ID NO: 23492 - DNA, 25 bp, Artificial sequence  Extension Primer
  Primer
tttgatttgtttgctggaagattag

SEQ ID NO: 23493 - DNA, 25 bp, Artificial sequence  Extension Primer
  Primer
tgggaggggagagaagtggaaggaa

SEQ ID NO: 23494 - DNA, 25 bp, Artificial sequence  Extension Primer
  Primer
ctataaaacggaggtgaccactgta

SEQ ID NO: 23495 - DNA, 25 bp, Artificial sequence  Extension Primer
  Primer
ttcaagccatcacgaggcactcaca

SEQ ID NO: 23496 - DNA, 25 bp, Artificial sequence  Extension Primer
  Primer
ctgcctacctttactcgatatcggg

SEQ ID NO: 23497 - DNA, 25 bp, Artificial sequence  Extension Primer
  Primer
tatgatagaaatgagtgagcaaaaa

SEQ ID NO: 23498 - DNA, 25 bp, Artificial sequence  Extension Primer
  Primer
caaagctacagaagccagggctcag

SEQ ID NO: 23499 - DNA, 25 bp, Artificial sequence  Extension Primer
  Primer
attaacacaggtcatgtgtacaaga

SEQ ID NO: 23500 - DNA, 25 bp, Artificial sequence  Extension Primer
  Primer
tgcatccctcttttgtgacatttac

SEQ ID NO: 23501 - DNA, 25 bp, Artificial sequence  Extension Primer
  Primer
cattatgacactaacctcttctagc

SEQ ID NO: 23502 - DNA, 25 bp, Artificial sequence  Extension Primer
  Primer
tggggtgtatacatcaattcagagg

SEQ ID NO: 23503 - DNA, 25 bp, Artificial sequence  Extension Primer
  Primer
gccaggatccccggcccattggaca

SEQ ID NO: 23504 - DNA, 25 bp, Artificial sequence  Extension Primer
  Primer
gattcaacagccacatgctggacta

SEQ ID NO: 23505 - DNA, 25 bp, Artificial sequence  Extension Primer
  Primer
cagatsataaaatagttttagatcc

SEQ ID NO: 23506 - DNA, 25 bp, Artificial sequence  Extension Primer
  Primer
acaaagtgatgccatttcacgcacc

SEQ ID NO: 23507 - DNA, 25 bp, Artificial sequence  Extension Primer
  Primer
cttataattagtggggcactgagta

SEQ ID NO: 23508 - DNA, 25 bp, Artificial sequence  Extension Primer
  Primer
cagagttgcctactggaccttgagg

SEQ ID NO: 23509 - DNA, 25 bp, Artificial sequence  Extension Primer
  Primer
tctcttttgatacaaattattgaaa

SEQ ID NO: 23510 - DNA, 25 bp, Artificial sequence  Extension Primer
  Primer
tgcgattcccacggtaaaccccagc

SEQ ID NO: 23511 - DNA, 25 bp, Artificial sequence  Extension Primer
  Primer
gggtgatctgataaactcacacact

SEQ ID NO: 23512 - DNA, 25 bp, Artificial sequence  Extension Primer
  Primer
tttgtggataactgacttcctaaga

SEQ ID NO: 23513 - DNA, 25 bp, Artificial sequence  Extension Primer
  Primer
acctcatctctcatcaggacactgg

SEQ ID NO: 23514 - DNA, 25 bp, Artificial sequence  Extension Primer
  Primer
gccaccacaggccagatcccaccag

SEQ ID NO: 23515 - DNA, 25 bp, Artificial sequence  Extension Primer
  Primer
tgtagtaaggtaggtaatgtgatag

SEQ ID NO: 23516 - DNA, 25 bp, Artificial sequence  Extension Primer
  Primer
agaaagaatggtaaaaagaacaatt

SEQ ID NO: 23517 - DNA, 25 bp, Artificial sequence  Extension Primer
  Primer
aaatccttacaatttctggacctac

SEQ ID NO: 23518 - DNA, 25 bp, Artificial sequence  Extension Primer
  Primer
mtcttcctgatggcaaattttgcca

SEQ ID NO: 23519 - DNA, 25 bp, Artificial sequence  Extension Primer
  Primer
ktggcaaaatttgccatcaggaaga

SEQ ID NO: 23520 - DNA, 25 bp, Artificial sequence  Extension Primer
  Primer
ccctttagctattgtagccactcta

SEQ ID NO: 23521 - DNA, 25 bp, Artificial sequence  Extension Primer
  Primer
tcactgtaaatgcttctaaataact

SEQ ID NO: 23522 - DNA, 25 bp, Artificial sequence  Extension Primer
  Primer
tctcccttctgtttaatccaacctg

SEQ ID NO: 23523 - DNA, 25 bp, Artificial sequence  Extension Primer
  Primer
actccaggagatagtgaagaacggg

SEQ ID NO: 23524 - DNA, 25 bp, Artificial sequence  Extension Primer
  Primer
caaaaagtgttgggagactctgaat

SEQ ID NO: 23525 - DNA, 25 bp, Artificial sequence  Extension Primer
  Primer
gaccatgaagctgactggaagctgc

SEQ ID NO: 23526 - DNA, 25 bp, Artificial sequence  Extension Primer
  Primer
aaaagcagttgagtgaattacttaa

SEQ ID NO: 23527 - DNA, 25 bp, Artificial sequence  Extension Primer
  Primer
aagaattacttatttggtacataaa

SEQ ID NO: 23528 - DNA, 25 bp, Artificial sequence  Extension Primer
  Primer
gcaactttagttctacttgccatta

SEQ ID NO: 23529 - DNA, 25 bp, Artificial sequence  Extension Primer
  Primer
catcaccgtcctatttatgcttggg

SEQ ID NO: 23530 - DNA, 25 bp, Artificial sequence  Extension Primer
  Primer
ggaaatcatgattgatttgacaact

SEQ ID NO: 23531 - DNA, 25 bp, Artificial sequence  Extension Primer
  Primer
tttccttgagatcactctgatgtca

SEQ ID NO: 23532 - DNA, 25 bp, Artificial sequence  Extension Primer
  Primer
aaatgaccaccaggccagacattac

SEQ ID NO: 23533 - DNA, 25 bp, Artificial sequence  Extension Primer
  Primer
accagctattcaatggcagcactat

SEQ ID NO: 23534 - DNA, 25 bp, Artificial sequence  Extension Primer
  Primer
aaacaacatgcttagaattattgct

SEQ ID NO: 23535 - DNA, 25 bp, Artificial sequence  Extension Primer
  Primer
tcactagagtaaaaggaaatgacaa

SEQ ID NO: 23536 - DNA, 25 bp, Artificial sequence  Extension Primer
  Primer
tctagagtctattaccttcgtagga

SEQ ID NO: 23537 - DNA, 25 bp, Artificial sequence  Extension Primer
  Primer
acatcattaatacctcacatttata

SEQ ID NO: 23538 - DNA, 25 bp, Artificial sequence  Extension Primer
  Primer
tgtgccccttgtctggccatgacca

SEQ ID NO: 23539 - DNA, 25 bp, Artificial sequence  Extension Primer
  Primer
gacttttcatagtttccctggtgct

SEQ ID NO: 23540 - DNA, 25 bp, Artificial sequence  Extension Primer
  Primer
cctgcgtggtgattatgagtggagc

SEQ ID NO: 23541 - DNA, 25 bp, Artificial sequence  Extension Primer
  Primer
tctttgaaagcattaaaaatcagtc

SEQ ID NO: 23542 - DNA, 25 bp, Artificial sequence  Extension Primer
  Primer
tctaatcatgattctaggtttccat

SEQ ID NO: 23543 - DNA, 25 bp, Artificial sequence  Extension Primer
  Primer
actttcaacaatgagcaaggaaaac

SEQ ID NO: 23544 - DNA, 25 bp, Artificial sequence  Extension Primer
  Primer
actctgctcacaaaatatttagccc

SEQ ID NO: 23545 - DNA, 25 bp, Artificial sequence  Extension Primer
  Primer
aatccatctaaagtgtacaaacaca

SEQ ID NO: 23546 - DNA, 25 bp, Artificial sequence  Extension Primer
  Primer
aaggcagagacaatattgtgctgac

SEQ ID NO: 23547 - DNA, 25 bp, Artificial sequence  Extension Primer
  Primer
tacactgtaaaaaatgaaacctgaa

SEQ ID NO: 23548 - DNA, 25 bp, Artificial sequence  Extension Primer
  Primer
agccgagagtgcttccgaaccttgc

SEQ ID NO: 23549 - DNA, 25 bp, Artificial sequence  Extension Primer
  Primer
aagcaatatttctaaagaatccacc

SEQ ID NO: 23550 - DNA, 25 bp, Artificial sequence  Extension Primer
  Primer
cactcagacacaaaaactgaccaag

SEQ ID NO: 23551 - DNA, 25 bp, Artificial sequence  Extension Primer
  Primer
ccagggtactttttatgttattgat

SEQ ID NO: 23552 - DNA, 25 bp, Artificial sequence  Extension Primer
  Primer
cagttgttcaaggaggaagaggaga

SEQ ID NO: 23553 - DNA, 22 bp, Artificial sequence  Extension Primer
  Primer
acctggctggatggtgaggtgt

SEQ ID NO: 23554 - DNA, 22 bp, Artificial sequence  Extension Primer
  Primer
tttcataagcatttatgtttca

SEQ ID NO: 23555 - DNA, 25 bp, Artificial sequence  Extension Primer
  Primer
acccagacatttctccttctcagtt

SEQ ID NO: 23556 - DNA, 25 bp, Artificial sequence  Extension Primer
  Primer
attcaacatgggggactaaagcaaa

SEQ ID NO: 23557 - DNA, 25 bp, Artificial sequence  Extension Primer
  Primer
tctagaattgctgacgacctactgg

SEQ ID NO: 23558 - DNA, 25 bp, Artificial sequence  Extension Primer
  Primer
taccttgccctttggcctcattact

SEQ ID NO: 23559 - DNA, 25 bp, Artificial sequence  Extension Primer
  Primer
actgttccccaaccatgcgtctggt

SEQ ID NO: 23560 - DNA, 25 bp, Artificial sequence  Extension Primer
  Primer
ttagcttcctttaaaataatgcaca

SEQ ID NO: 23561 - DNA, 25 bp, Artificial sequence  Extension Primer
  Primer
acaaaaagaggtacatgaacagtca

SEQ ID NO: 23562 - DNA, 25 bp, Artificial sequence  Extension Primer
  Primer
agacactgctgggatgcccatgttc

SEQ ID NO: 23563 - DNA, 25 bp, Artificial sequence  Extension Primer
  Primer
cctccggagtttctctacttatttt

SEQ ID NO: 23564 - DNA, 25 bp, Artificial sequence  Extension Primer
  Primer
tctcagcagctgaaccgtcctcaga

SEQ ID NO: 23565 - DNA, 25 bp, Artificial sequence  Extension Primer
  Primer
agtgcgcttactgactgccagacag

SEQ ID NO: 23566 - DNA, 25 bp, Artificial sequence  Extension Primer
  Primer
gacttgtacgttacaacataagaaa

SEQ ID NO: 23567 - DNA, 25 bp, Artificial sequence  Extension Primer
  Primer
gtaaattctcttctgtagtctccat

SEQ ID NO: 23568 - DNA, 25 bp, Artificial sequence  Extension Primer
  Primer
caaaggaaggaaagagtgggatgtg

SEQ ID NO: 23569 - DNA, 25 bp, Artificial sequence  Extension Primer
  Primer
cagctcccattacaattatctgaag

SEQ ID NO: 23570 - DNA, 25 bp, Artificial sequence  Extension Primer
  Primer
agccatttagaaggaattaaataca

SEQ ID NO: 23571 - DNA, 25 bp, Artificial sequence  Extension Primer
  Primer
gcattgtttctaatgccattttcta

SEQ ID NO: 23572 - DNA, 25 bp, Artificial sequence  Extension Primer
  Primer
cttaaaaataaatgtttacactgta

SEQ ID NO: 23573 - DNA, 25 bp, Artificial sequence  Extension Primer
  Primer
aactattcagcttcagtttttcatt

SEQ ID NO: 23574 - DNA, 25 bp, Artificial sequence  Extension Primer
  Primer
atcagatttttctggagttcaaaat

SEQ ID NO: 23575 - DNA, 25 bp, Artificial sequence  Extension Primer
  Primer
cttccgcagctactgtcattaagga

SEQ ID NO: 23576 - DNA, 25 bp, Artificial sequence  Extension Primer
  Primer
cctactgctctccctaaaactgatc

SEQ ID NO: 23577 - DNA, 25 bp, Artificial sequence  Extension Primer
  Primer
ccacgcgataccagaggggatgcct

SEQ ID NO: 23578 - DNA, 25 bp, Artificial sequence  Extension Primer
  Primer
attctgtgtcaccagaactcattaa

SEQ ID NO: 23579 - DNA, 25 bp, Artificial sequence  Extension Primer
  Primer
aaaagtcagtaattcttcttggatc

SEQ ID NO: 23580 - DNA, 25 bp, Artificial sequence  Extension Primer
  Primer
cacttgtttcggtgtggcttctagc

SEQ ID NO: 23581 - DNA, 25 bp, Artificial sequence  Extension Primer
  Primer
ctagatgaactttggttgggtacaa

SEQ ID NO: 23582 - DNA, 25 bp, Artificial sequence  Extension Primer
  Primer
gggaattagtgtaagactgatttct

SEQ ID NO: 23583 - DNA, 25 bp, Artificial sequence  Extension Primer
  Primer
ggactgtaatccgccaggttcctct

SEQ ID NO: 23584 - DNA, 25 bp, Artificial sequence  Extension Primer
  Primer
cgacacacctgttgctagaggtgcc

SEQ ID NO: 23585 - DNA, 25 bp, Artificial sequence  Extension Primer
  Primer
attattagttttrtaagtaaggata

SEQ ID NO: 23586 - DNA, 25 bp, Artificial sequence  Extension Primer
  Primer
tcgtatttactcttagtacctatgt

SEQ ID NO: 23587 - DNA, 25 bp, Artificial sequence  Extension Primer
  Primer
cattcatagatctttactcattaag

SEQ ID NO: 23588 - DNA, 25 bp, Artificial sequence  Extension Primer
  Primer
tgagaggatgtaaatcaactgcact

SEQ ID NO: 23589 - DNA, 25 bp, Artificial sequence  Extension Primer
  Primer
tcagccactaatgcaataatcaaaa

SEQ ID NO: 23590 - DNA, 22 bp, Artificial sequence  Extension Primer
  Primer
gtgttgtagaggaggtaagaaa

SEQ ID NO: 23591 - DNA, 25 bp, Artificial sequence  Extension Primer
  Primer
tcttgaagagtcttgatccacataa

SEQ ID NO: 23592 - DNA, 25 bp, Artificial sequence  Extension Primer
  Primer
caaaaaatgaccatgagccgtcaak

SEQ ID NO: 23593 - DNA, 25 bp, Artificial sequence  Extension Primer
  Primer
aaagatctccattcatttttttctc

SEQ ID NO: 23594 - DNA, 25 bp, Artificial sequence  Extension Primer
  Primer
ttcaacttcatagtatttactggat

SEQ ID NO: 23595 - DNA, 25 bp, Artificial sequence  Extension Primer
  Primer
caggggtacagataagcaggtacac

SEQ ID NO: 23596 - DNA, 25 bp, Artificial sequence  Extension Primer
  Primer
aggtcaggcacttgagacacagatt

SEQ ID NO: 23597 - DNA, 25 bp, Artificial sequence  Extension Primer
  Primer
aagcaaaatttcacaggatattttc

SEQ ID NO: 23598 - DNA, 25 bp, Artificial sequence  Extension Primer
  Primer
gctctactcascatctkaagtctta

SEQ ID NO: 23599 - DNA, 25 bp, Artificial sequence  Extension Primer
  Primer
aattgatggcagatgaagccacaga

SEQ ID NO: 23600 - DNA, 25 bp, Artificial sequence  Extension Primer
  Primer
ggtacattaactcttcccaaccctg

SEQ ID NO: 23601 - DNA, 25 bp, Artificial sequence  Extension Primer
  Primer
cttactacctggggccctacaccac

SEQ ID NO: 23602 - DNA, 25 bp, Artificial sequence  Extension Primer
  Primer
tttcttgtccgtttctgccatctac

SEQ ID NO: 23603 - DNA, 25 bp, Artificial sequence  Extension Primer
  Primer
tttgttttttttcaaaaaaggttct

SEQ ID NO: 23604 - DNA, 25 bp, Artificial sequence  Extension Primer
  Primer
gcctgtactttgtttacataatgac

SEQ ID NO: 23605 - DNA, 25 bp, Artificial sequence  Extension Primer
  Primer
aattaaattcttaaaatcaccatca

SEQ ID NO: 23606 - DNA, 22 bp, Artificial sequence  Extension Primer
  Primer
tttggtctgtcctgtatgtgat

SEQ ID NO: 23607 - DNA, 22 bp, Artificial sequence  Extension Primer
  Primer
ccatcttggagaattgctttgc

SEQ ID NO: 23608 - DNA, 25 bp, Artificial sequence  Extension Primer
  Primer
gattcacatccatttccttcaatsc

SEQ ID NO: 23609 - DNA, 25 bp, Artificial sequence  Extension Primer
  Primer
gaataatggctgggaaatagggagc

SEQ ID NO: 23610 - DNA, 25 bp, Artificial sequence  Extension Primer
  Primer
aaagtgagaaacagatggcaatgaa

SEQ ID NO: 23611 - DNA, 25 bp, Artificial sequence  Extension Primer
  Primer
cctcaacatctgtaactcaggaata

SEQ ID NO: 23612 - DNA, 25 bp, Artificial sequence  Extension Primer
  Primer
cccctggtctaatttgaggcatcta

SEQ ID NO: 23613 - DNA, 25 bp, Artificial sequence  Extension Primer
  Primer
attgttagtctaattttccctgcct

SEQ ID NO: 23614 - DNA, 25 bp, Artificial sequence  Extension Primer
  Primer
gctgctgctcttgcaattctctgaa

SEQ ID NO: 23615 - DNA, 25 bp, Artificial sequence  Extension Primer
  Primer
aaaatgctagtcaggacccacaaaa

SEQ ID NO: 23616 - DNA, 25 bp, Artificial sequence  Extension Primer
  Primer
tcaacttctgtccccaagcagatta

SEQ ID NO: 23617 - DNA, 25 bp, Artificial sequence  Extension Primer
  Primer
tcttctaggacccttacagttggag

SEQ ID NO: 23618 - DNA, 25 bp, Artificial sequence  Extension Primer
  Primer
gcaagatgatagagattaagaccct

SEQ ID NO: 23619 - DNA, 25 bp, Artificial sequence  Extension Primer
  Primer
gatagagattaagaccctmttttca

SEQ ID NO: 23620 - DNA, 25 bp, Artificial sequence  Extension Primer
  Primer
agattcaatagttttgacgcatgga

SEQ ID NO: 23621 - DNA, 25 bp, Artificial sequence  Extension Primer
  Primer
tctctattgtgaagyaagacagccg

SEQ ID NO: 23622 - DNA, 25 bp, Artificial sequence  Extension Primer
  Primer
ggccatatctcttcaaataaggcta

SEQ ID NO: 23623 - DNA, 25 bp, Artificial sequence  Extension Primer
  Primer
ctcatcttaaattattatatcctaa

SEQ ID NO: 23624 - DNA, 25 bp, Artificial sequence  Extension Primer
  Primer
atcagaataagaggaagaggctaaa

SEQ ID NO: 23625 - DNA, 25 bp, Artificial sequence  Extension Primer
  Primer
gtttgaatggatttgtcaaggccca

SEQ ID NO: 23626 - DNA, 25 bp, Artificial sequence  Extension Primer
  Primer
agataagtgtattgagagggatatt

SEQ ID NO: 23627 - DNA, 25 bp, Artificial sequence  Extension Primer
  Primer
gagagacgattccaggattttgaga

SEQ ID NO: 23628 - DNA, 25 bp, Artificial sequence  Extension Primer
  Primer
tttaataattgtgggtgttacttgg

SEQ ID NO: 23629 - DNA, 25 bp, Artificial sequence  Extension Primer
  Primer
atcaagcaaatagggcagaaccagg

SEQ ID NO: 23630 - DNA, 25 bp, Artificial sequence  Extension Primer
  Primer
tatgttctgtcattaccttttcttt

SEQ ID NO: 23631 - DNA, 25 bp, Artificial sequence  Extension Primer
  Primer
gttattaaatttgctgtcagttctt

SEQ ID NO: 23632 - DNA, 25 bp, Artificial sequence  Extension Primer
  Primer
tgacttgaactttcacaagaaacct

SEQ ID NO: 23633 - DNA, 25 bp, Artificial sequence  Extension Primer
  Primer
acagtcaggataattaaagtgagca

SEQ ID NO: 23634 - DNA, 25 bp, Artificial sequence  Extension Primer
  Primer
tgaagagaaatacaaagaaaatatc

SEQ ID NO: 23635 - DNA, 25 bp, Artificial sequence  Extension Primer
  Primer
aggacgcagatgacgaaactgaggc

SEQ ID NO: 23636 - DNA, 25 bp, Artificial sequence  Extension Primer
  Primer
ttatcagttctgtatttaccagttt

SEQ ID NO: 23637 - DNA, 25 bp, Artificial sequence  Extension Primer
  Primer
tcagtttttattgactagtatgaca

SEQ ID NO: 23638 - DNA, 25 bp, Artificial sequence  Extension Primer
  Primer
acaacaattaaaaaaaaagctatta

SEQ ID NO: 23639 - DNA, 25 bp, Artificial sequence  Extension Primer
  Primer
acaatactttaagtgtcttggaaaa

SEQ ID NO: 23640 - DNA, 25 bp, Artificial sequence  Extension Primer
  Primer
tatttccactttttaaaacgttcct

SEQ ID NO: 23641 - DNA, 25 bp, Artificial sequence  Extension Primer
  Primer
ttacttacatgctcaaaaggcatac

SEQ ID NO: 23642 - DNA, 25 bp, Artificial sequence  Extension Primer
  Primer
gcttgattaattttacctggctgaa

SEQ ID NO: 23643 - DNA, 25 bp, Artificial sequence  Extension Primer
  Primer
ccctgggaggagaaaatgacaagcc

SEQ ID NO: 23644 - DNA, 25 bp, Artificial sequence  Extension Primer
  Primer
ttcacaaggcaggtttagatggtgg

SEQ ID NO: 23645 - DNA, 25 bp, Artificial sequence  Extension Primer
  Primer
ataagattttcaaaaccttatacct

SEQ ID NO: 23646 - DNA, 25 bp, Artificial sequence  Extension Primer
  Primer
catgggaccgaagaactgagttttc

SEQ ID NO: 23647 - DNA, 25 bp, Artificial sequence  Extension Primer
  Primer
agtcaaaatctggcagaaaggaaaa

SEQ ID NO: 23648 - DNA, 25 bp, Artificial sequence  Extension Primer
  Primer
atggaaaggtagaatgacaaagaga

SEQ ID NO: 23649 - DNA, 25 bp, Artificial sequence  Extension Primer
  Primer
tgtagtcacttctaaaaatacaaac

SEQ ID NO: 23650 - DNA, 25 bp, Artificial sequence  Extension Primer
  Primer
gccctccggtgcggctccatcctcc

SEQ ID NO: 23651 - DNA, 25 bp, Artificial sequence  Extension Primer
  Primer
ccaagaataatgtgctttggagcaa

SEQ ID NO: 23652 - DNA, 25 bp, Artificial sequence  Extension Primer
  Primer
ccttaccctggagatgatattgctg

SEQ ID NO: 23653 - DNA, 25 bp, Artificial sequence  Extension Primer
  Primer
tcaccatcagtttgataggtcctct

SEQ ID NO: 23654 - DNA, 25 bp, Artificial sequence  Extension Primer
  Primer
tgtcctgccattcattgtttctctg

SEQ ID NO: 23655 - DNA, 25 bp, Artificial sequence  Extension Primer
  Primer
aatccagtgtgattggggttgggaa

SEQ ID NO: 23656 - DNA, 25 bp, Artificial sequence  Extension Primer
  Primer
tccaggagctgcctgttgctgaggg

SEQ ID NO: 23657 - DNA, 22 bp, Artificial sequence  Extension Primer
  Primer
ttttctgaagagaccactactg

SEQ ID NO: 23658 - DNA, 25 bp, Artificial sequence  Extension Primer
  Primer
tctttgtttccagatttcccacttt

SEQ ID NO: 23659 - DNA, 25 bp, Artificial sequence  Extension Primer
  Primer
ctggccatactgaattaaggcccat

SEQ ID NO: 23660 - DNA, 25 bp, Artificial sequence  Extension Primer
  Primer
ttgttgactgggctgggtgatttag

SEQ ID NO: 23661 - DNA, 25 bp, Artificial sequence  Extension Primer
  Primer
tatttgatgaaataattttctataa

SEQ ID NO: 23662 - DNA, 25 bp, Artificial sequence  Extension Primer
  Primer
aaaataacaccagtaggataaagac

SEQ ID NO: 23663 - DNA, 25 bp, Artificial sequence  Extension Primer
  Primer
agcaaagactcaaaacagtgcctcc

SEQ ID NO: 23664 - DNA, 25 bp, Artificial sequence  Extension Primer
  Primer
tatgctctgctttcccttttttggc

SEQ ID NO: 23665 - DNA, 25 bp, Artificial sequence  Extension Primer
  Primer
aagcattttcacttctttgtgccag

SEQ ID NO: 23666 - DNA, 25 bp, Artificial sequence  Extension Primer
  Primer
taaaattcataccacatagggtctc

SEQ ID NO: 23667 - DNA, 25 bp, Artificial sequence  Extension Primer
  Primer
gattgactgaaatggctgtctttta

SEQ ID NO: 23668 - DNA, 25 bp, Artificial sequence  Extension Primer
  Primer
tcccatcattttcagattgtaaatg

SEQ ID NO: 23669 - DNA, 25 bp, Artificial sequence  Extension Primer
  Primer
attataataaaagttgagcaatcaa

SEQ ID NO: 23670 - DNA, 25 bp, Artificial sequence  Extension Primer
  Primer
acagattctatcctctttcacttgc

SEQ ID NO: 23671 - DNA, 25 bp, Artificial sequence  Extension Primer
  Primer
gtgagttgtaagaagcctgtcaccc

SEQ ID NO: 23672 - DNA, 25 bp, Artificial sequence  Extension Primer
  Primer
tgtcactttattttgttagtctagg

SEQ ID NO: 23673 - DNA, 25 bp, Artificial sequence  Extension Primer
  Primer
tctaaaggcactgtactttattttc

SEQ ID NO: 23674 - DNA, 25 bp, Artificial sequence  Extension Primer
  Primer
aaagtttatggggtctgcatttaat

SEQ ID NO: 23675 - DNA, 25 bp, Artificial sequence  Extension Primer
  Primer
gaaattacagtactttgttttgtcc

SEQ ID NO: 23676 - DNA, 25 bp, Artificial sequence  Extension Primer
  Primer
ctgagctccaagggaagccctgcta

SEQ ID NO: 23677 - DNA, 25 bp, Artificial sequence  Extension Primer
  Primer
actgaagctcaaaatttcccrtcta

SEQ ID NO: 23678 - DNA, 25 bp, Artificial sequence  Extension Primer
  Primer
tgccatttcaggtttttgtctgtta

SEQ ID NO: 23679 - DNA, 25 bp, Artificial sequence  Extension Primer
  Primer
gcatgccacttcctttattttttac

SEQ ID NO: 23680 - DNA, 25 bp, Artificial sequence  Extension Primer
  Primer
gtgcagacttacaatggtttgactc

SEQ ID NO: 23681 - DNA, 25 bp, Artificial sequence  Extension Primer
  Primer
agcctggataaataacaactctaaa

SEQ ID NO: 23682 - DNA, 25 bp, Artificial sequence  Extension Primer
  Primer
caatatcactttttgaaaccatcac

SEQ ID NO: 23683 - DNA, 25 bp, Artificial sequence  Extension Primer
  Primer
acacttcataccagacatggggaaa

SEQ ID NO: 23684 - DNA, 25 bp, Artificial sequence  Extension Primer
  Primer
aggctttgttcagaaaggcagtctc

SEQ ID NO: 23685 - DNA, 25 bp, Artificial sequence  Extension Primer
  Primer
cataacttcccctctccctgcttaa

SEQ ID NO: 23686 - DNA, 25 bp, Artificial sequence  Extension Primer
  Primer
attgaggtttcattgcataggcatg

SEQ ID NO: 23687 - DNA, 25 bp, Artificial sequence  Extension Primer
  Primer
gggcagggtggccatcagcctcctc

SEQ ID NO: 23688 - DNA, 25 bp, Artificial sequence  Extension Primer
  Primer
tcacttctcattttgtggagctatt

SEQ ID NO: 23689 - DNA, 25 bp, Artificial sequence  Extension Primer
  Primer
tggtktgtacaagagagtcatttat

SEQ ID NO: 23690 - DNA, 25 bp, Artificial sequence  Extension Primer
  Primer
tgcattacccagcatgcactatggc

SEQ ID NO: 23691 - DNA, 25 bp, Artificial sequence  Extension Primer
  Primer
taactatcttaaccctatcagtcta

SEQ ID NO: 23692 - DNA, 25 bp, Artificial sequence  Extension Primer
  Primer
atcattgcagttgttgtttatttca

SEQ ID NO: 23693 - DNA, 25 bp, Artificial sequence  Extension Primer
  Primer
ttttttaggcaaattcactgtctct

SEQ ID NO: 23694 - DNA, 25 bp, Artificial sequence  Extension Primer
  Primer
agtgatgcgcctggaaaatcagacc

SEQ ID NO: 23695 - DNA, 25 bp, Artificial sequence  Extension Primer
  Primer
cacaatagttaagtcctgcttgccc

SEQ ID NO: 23696 - DNA, 25 bp, Artificial sequence  Extension Primer
  Primer
tttggcacttactgactgtgagact

SEQ ID NO: 23697 - DNA, 25 bp, Artificial sequence  Extension Primer
  Primer
caccagatgtcaccacccacacccc

SEQ ID NO: 23698 - DNA, 25 bp, Artificial sequence  Extension Primer
  Primer
ttacacattaggatatggattgtga

SEQ ID NO: 23699 - DNA, 25 bp, Artificial sequence  Extension Primer
  Primer
tcatgttgcagaaacaaccaagagt

SEQ ID NO: 23700 - DNA, 25 bp, Artificial sequence  Extension Primer
  Primer
ggttaacaatcatggacttcggtaa

SEQ ID NO: 23701 - DNA, 25 bp, Artificial sequence  Extension Primer
  Primer
gagatccattaccttttaaccaact

SEQ ID NO: 23702 - DNA, 25 bp, Artificial sequence  Extension Primer
  Primer
aatgttcgtagtcctctgggtgtgg

SEQ ID NO: 23703 - DNA, 25 bp, Artificial sequence  Extension Primer
  Primer
cccgaacacagggaaacactatata

SEQ ID NO: 23704 - DNA, 25 bp, Artificial sequence  Extension Primer
  Primer
gtataatatacaaaattaattctgg

SEQ ID NO: 23705 - DNA, 25 bp, Artificial sequence  Extension Primer
  Primer
atcctataacatttaaaatgtctct

SEQ ID NO: 23706 - DNA, 25 bp, Artificial sequence  Extension Primer
  Primer
atgagtgggatcaaatatttgggta

SEQ ID NO: 23707 - DNA, 25 bp, Artificial sequence  Extension Primer
  Primer
gtcagtataaaggacactctgatta

SEQ ID NO: 23708 - DNA, 25 bp, Artificial sequence  Extension Primer
  Primer
arcagagaaaacagagayacaagat

SEQ ID NO: 23709 - DNA, 25 bp, Artificial sequence  Extension Primer
  Primer
tggactcacacatctttccagaaca

SEQ ID NO: 23710 - DNA, 25 bp, Artificial sequence  Extension Primer
  Primer
catcaccagaggccatggagctttc

SEQ ID NO: 23711 - DNA, 25 bp, Artificial sequence  Extension Primer
  Primer
cagaaatacaaaggattataagaga

SEQ ID NO: 23712 - DNA, 25 bp, Artificial sequence  Extension Primer
  Primer
tctgggaatttatttcttataaatt

SEQ ID NO: 23713 - DNA, 25 bp, Artificial sequence  Extension Primer
  Primer
tgggatttattccagrgatgtaaga

SEQ ID NO: 23714 - DNA, 25 bp, Artificial sequence  Extension Primer
  Primer
ggcaactggtccaaagttattcagg

SEQ ID NO: 23715 - DNA, 25 bp, Artificial sequence  Extension Primer
  Primer
tagtataaggtacgaatgtgaatat

SEQ ID NO: 23716 - DNA, 25 bp, Artificial sequence  Extension Primer
  Primer
agtacagtatctaatagccttagta

SEQ ID NO: 23717 - DNA, 25 bp, Artificial sequence  Extension Primer
  Primer
ggcactggagtagtgggattacagc

SEQ ID NO: 23718 - DNA, 25 bp, Artificial sequence  Extension Primer
  Primer
tgtttgtagtctgctcttttccaaa

SEQ ID NO: 23719 - DNA, 25 bp, Artificial sequence  Extension Primer
  Primer
ttacaatccagcaaacctgagaggc

SEQ ID NO: 23720 - DNA, 25 bp, Artificial sequence  Extension Primer
  Primer
tatcgagcctgggagatgcaactac

SEQ ID NO: 23721 - DNA, 25 bp, Artificial sequence  Extension Primer
  Primer
aatcaaaatcaggtcaagaaaacac

SEQ ID NO: 23722 - DNA, 25 bp, Artificial sequence  Extension Primer
  Primer
tccctgaggccttgggggtatagac

SEQ ID NO: 23723 - DNA, 25 bp, Artificial sequence  Extension Primer
  Primer
tcaagtacaaaagctaaacattttt

SEQ ID NO: 23724 - DNA, 25 bp, Artificial sequence  Extension Primer
  Primer
tctggcctggccagctccccaacac

SEQ ID NO: 23725 - DNA, 25 bp, Artificial sequence  Extension Primer
  Primer
cataaaattaaagacttatacttga

SEQ ID NO: 23726 - DNA, 25 bp, Artificial sequence  Extension Primer
  Primer
catctttttgtggatctctcaatat

SEQ ID NO: 23727 - DNA, 25 bp, Artificial sequence  Extension Primer
  Primer
tatcgggaactacatttccaggcaa

SEQ ID NO: 23728 - DNA, 25 bp, Artificial sequence  Extension Primer
  Primer
aaattactaccctttccattagacg

SEQ ID NO: 23729 - DNA, 25 bp, Artificial sequence  Extension Primer
  Primer
ctcaaaatatttagattatttagga

SEQ ID NO: 23730 - DNA, 25 bp, Artificial sequence  Extension Primer
  Primer
tgctaatggattctttatactgatt

SEQ ID NO: 23731 - DNA, 25 bp, Artificial sequence  Extension Primer
  Primer
tttatttttaattgraggataattg

SEQ ID NO: 23732 - DNA, 25 bp, Artificial sequence  Extension Primer
  Primer
tattgcagacccctgtttcatctga

SEQ ID NO: 23733 - DNA, 25 bp, Artificial sequence  Extension Primer
  Primer
ttgaaatatttgtagagatggagca

SEQ ID NO: 23734 - DNA, 25 bp, Artificial sequence  Extension Primer
  Primer
taggtgactcatcaggttccagtga

SEQ ID NO: 23735 - DNA, 25 bp, Artificial sequence  Extension Primer
  Primer
tggtcatctgtggcaaagatcaaat

SEQ ID NO: 23736 - DNA, 25 bp, Artificial sequence  Extension Primer
  Primer
tactgaaggtgaaaagggggttgga

SEQ ID NO: 23737 - DNA, 25 bp, Artificial sequence  Extension Primer
  Primer
ataaatgttcactgcttcagtagtt

SEQ ID NO: 23738 - DNA, 25 bp, Artificial sequence  Extension Primer
  Primer
gaacagagagaagataagaggcccc

SEQ ID NO: 23739 - DNA, 25 bp, Artificial sequence  Extension Primer
  Primer
aagggctgcctctgtcctctccaaa

SEQ ID NO: 23740 - DNA, 25 bp, Artificial sequence  Extension Primer
  Primer
ttaaaaagtagatgactgagtaagc

SEQ ID NO: 23741 - DNA, 25 bp, Artificial sequence  Extension Primer
  Primer
gtaccatgtttagaaatattgaact

SEQ ID NO: 23742 - DNA, 25 bp, Artificial sequence  Extension Primer
  Primer
ttgactctgcaaagagatgggcaca

SEQ ID NO: 23743 - DNA, 25 bp, Artificial sequence  Extension Primer
  Primer
ttttccttattagatactcacatca

SEQ ID NO: 23744 - DNA, 25 bp, Artificial sequence  Extension Primer
  Primer
ttgcaatattcaattacctgatttc

SEQ ID NO: 23745 - DNA, 25 bp, Artificial sequence  Extension Primer
  Primer
tctgctgatgtggagaaaaataggc

SEQ ID NO: 23746 - DNA, 22 bp, Artificial sequence  Extension Primer
  Primer
aaatttcttaactctttaatgg

SEQ ID NO: 23747 - DNA, 25 bp, Artificial sequence  Extension Primer
  Primer
atagacattgatcactcatcaccgt

SEQ ID NO: 23748 - DNA, 25 bp, Artificial sequence  Extension Primer
  Primer
cactcggtatccacgcgaacttggc

SEQ ID NO: 23749 - DNA, 25 bp, Artificial sequence  Extension Primer
  Primer
aacctacactggcatatttggacac

SEQ ID NO: 23750 - DNA, 25 bp, Artificial sequence  Extension Primer
  Primer
tggtgctcagaagacatcatttgat

SEQ ID NO: 23751 - DNA, 25 bp, Artificial sequence  Extension Primer
  Primer
ctcatggcgcctacagaccccaagg

SEQ ID NO: 23752 - DNA, 25 bp, Artificial sequence  Extension Primer
  Primer
ttccctctgaaacttttattccctc

SEQ ID NO: 23753 - DNA, 25 bp, Artificial sequence  Extension Primer
  Primer
ttgatgtattaaaagtaaaaacaac

SEQ ID NO: 23754 - DNA, 25 bp, Artificial sequence  Extension Primer
  Primer
taaaaccacactccttctcctgtca

SEQ ID NO: 23755 - DNA, 25 bp, Artificial sequence  Extension Primer
  Primer
tcagaagttctgctcattaggtggg

SEQ ID NO: 23756 - DNA, 25 bp, Artificial sequence  Extension Primer
  Primer
attttaccaattttaattgtagccy

SEQ ID NO: 23757 - DNA, 25 bp, Artificial sequence  Extension Primer
  Primer
aaaataatgccttttttattatgaa

SEQ ID NO: 23758 - DNA, 25 bp, Artificial sequence  Extension Primer
  Primer
gcacatatactctcccgggggcttg

SEQ ID NO: 23759 - DNA, 25 bp, Artificial sequence  Extension Primer
  Primer
gtaagattctctgctgggagcttta

SEQ ID NO: 23760 - DNA, 25 bp, Artificial sequence  Extension Primer
  Primer
catcccctgtgattttattttttta

SEQ ID NO: 23761 - DNA, 25 bp, Artificial sequence  Extension Primer
  Primer
tagcagagacagttctctcatgatg

SEQ ID NO: 23762 - DNA, 25 bp, Artificial sequence  Extension Primer
  Primer
tcttgtcatttggggctccctccca

SEQ ID NO: 23763 - DNA, 25 bp, Artificial sequence  Extension Primer
  Primer
aaccaaacctcaggcctcaaaacaa

SEQ ID NO: 23764 - DNA, 25 bp, Artificial sequence  Extension Primer
  Primer
taacaagagaggaggcatgcataag

SEQ ID NO: 23765 - DNA, 25 bp, Artificial sequence  Extension Primer
  Primer
agacctcaactcagaccacaatgtg

SEQ ID NO: 23766 - DNA, 25 bp, Artificial sequence  Extension Primer
  Primer
caggacgtctgccctaagcctcagc

SEQ ID NO: 23767 - DNA, 25 bp, Artificial sequence  Extension Primer
  Primer
agaaaccatctgcagtgatgtgaag

SEQ ID NO: 23768 - DNA, 25 bp, Artificial sequence  Extension Primer
  Primer
gatagaagtaatcggttttcctaac

SEQ ID NO: 23769 - DNA, 25 bp, Artificial sequence  Extension Primer
  Primer
atgtaaatggttgattccaaatagc

SEQ ID NO: 23770 - DNA, 25 bp, Artificial sequence  Extension Primer
  Primer
gggagagtggtggaagaggaagagt

SEQ ID NO: 23771 - DNA, 25 bp, Artificial sequence  Extension Primer
  Primer
aagtacatgatgaaatatttcagaa

SEQ ID NO: 23772 - DNA, 25 bp, Artificial sequence  Extension Primer
  Primer
gaacaattacccagtgactctttat

SEQ ID NO: 23773 - DNA, 25 bp, Artificial sequence  Extension Primer
  Primer
tgagccctctgccacactctgggat

SEQ ID NO: 23774 - DNA, 22 bp, Artificial sequence  Extension Primer
  Primer
agtgacttgctgttaactttgg

SEQ ID NO: 23775 - DNA, 25 bp, Artificial sequence  Extension Primer
  Primer
tcatacatgttagccagtggtctct

SEQ ID NO: 23776 - DNA, 25 bp, Artificial sequence  Extension Primer
  Primer
aaggaatgaacttctaaccaagact

SEQ ID NO: 23777 - DNA, 25 bp, Artificial sequence  Extension Primer
  Primer
acctagttttcaaccttttctttta

SEQ ID NO: 23778 - DNA, 25 bp, Artificial sequence  Extension Primer
  Primer
cacacacaaaaggtaaatattttgt

SEQ ID NO: 23779 - DNA, 25 bp, Artificial sequence  Extension Primer
  Primer
catcatgaacattgtaagtgcctcc

SEQ ID NO: 23780 - DNA, 25 bp, Artificial sequence  Extension Primer
  Primer
aggcgaggtggctaggacacacagc

SEQ ID NO: 23781 - DNA, 25 bp, Artificial sequence  Extension Primer
  Primer
ctttctgcctcccgtgcctatcctt

SEQ ID NO: 23782 - DNA, 25 bp, Artificial sequence  Extension Primer
  Primer
cctgttatcaaagaaccttcttcca

SEQ ID NO: 23783 - DNA, 25 bp, Artificial sequence  Extension Primer
  Primer
ggaaacaacaaggagcatgatcccc

SEQ ID NO: 23784 - DNA, 25 bp, Artificial sequence  Extension Primer
  Primer
awttttttgacgaagcttatcttaa

SEQ ID NO: 23785 - DNA, 25 bp, Artificial sequence  Extension Primer
  Primer
ctttctctctggaagctttaagttg

SEQ ID NO: 23786 - DNA, 25 bp, Artificial sequence  Extension Primer
  Primer
aactgtttttcactgatgggaacct

SEQ ID NO: 23787 - DNA, 25 bp, Artificial sequence  Extension Primer
  Primer
ayatgcagggacycatgactttact

SEQ ID NO: 23788 - DNA, 25 bp, Artificial sequence  Extension Primer
  Primer
tcccatgtagatccctttagaaacc

SEQ ID NO: 23789 - DNA, 25 bp, Artificial sequence  Extension Primer
  Primer
gttaccatactacatacaagaagat

SEQ ID NO: 23790 - DNA, 25 bp, Artificial sequence  Extension Primer
  Primer
aagcctgccgcacacaatcagcacg

SEQ ID NO: 23791 - DNA, 25 bp, Artificial sequence  Extension Primer
  Primer
ttccaaatgatcataaagttcaggc

SEQ ID NO: 23792 - DNA, 25 bp, Artificial sequence  Extension Primer
  Primer
gacctccctgtccacattcttcacc

SEQ ID NO: 23793 - DNA, 25 bp, Artificial sequence  Extension Primer
  Primer
gttaaacatgtttgtacaggaacca

SEQ ID NO: 23794 - DNA, 25 bp, Artificial sequence  Extension Primer
  Primer
tgagctgtgtgtcttggctgaagag

SEQ ID NO: 23795 - DNA, 25 bp, Artificial sequence  Extension Primer
  Primer
aaggagacacaaactctgtgtttca

SEQ ID NO: 23796 - DNA, 25 bp, Artificial sequence  Extension Primer
  Primer
aggagacacaaactctgtgtttcay

SEQ ID NO: 23797 - DNA, 25 bp, Artificial sequence  Extension Primer
  Primer
tcagtaacttgaatgcactcaggga

SEQ ID NO: 23798 - DNA, 25 bp, Artificial sequence  Extension Primer
  Primer
cttggggaatggtaagaattcagca

SEQ ID NO: 23799 - DNA, 25 bp, Artificial sequence  Extension Primer
  Primer
aggtagagggactagctggagccat

SEQ ID NO: 23800 - DNA, 25 bp, Artificial sequence  Extension Primer
  Primer
actcggagctgagcgctggtctgtc

SEQ ID NO: 23801 - DNA, 25 bp, Artificial sequence  Extension Primer
  Primer
taactcagtacatatttgtcaaaca

SEQ ID NO: 23802 - DNA, 25 bp, Artificial sequence  Extension Primer
  Primer
attaatctctgcactggaattttag

SEQ ID NO: 23803 - DNA, 25 bp, Artificial sequence  Extension Primer
  Primer
cttctccctgaagggatgaaatgtc

SEQ ID NO: 23804 - DNA, 25 bp, Artificial sequence  Extension Primer
  Primer
ctgttgccatggagatgatcacata

SEQ ID NO: 23805 - DNA, 25 bp, Artificial sequence  Extension Primer
  Primer
agcgcgcccttccgtgtctcacccc

SEQ ID NO: 23806 - DNA, 25 bp, Artificial sequence  Extension Primer
  Primer
tggttgtgcttttgtatactgtact

SEQ ID NO: 23807 - DNA, 25 bp, Artificial sequence  Extension Primer
  Primer
tgaaatctgcctgtgaccacacctt

SEQ ID NO: 23808 - DNA, 25 bp, Artificial sequence  Extension Primer
  Primer
attagratgccctttttttattctc

SEQ ID NO: 23809 - DNA, 25 bp, Artificial sequence  Extension Primer
  Primer
gctaaggaaactggagagcagaagg

SEQ ID NO: 23810 - DNA, 25 bp, Artificial sequence  Extension Primer
  Primer
ttatcctattagttgatgttgattt

SEQ ID NO: 23811 - DNA, 25 bp, Artificial sequence  Extension Primer
  Primer
tcagttatttattttaaaaaagaat

SEQ ID NO: 23812 - DNA, 25 bp, Artificial sequence  Extension Primer
  Primer
ccgtgaaaaatgtatcacccggcat

SEQ ID NO: 23813 - DNA, 25 bp, Artificial sequence  Extension Primer
  Primer
tgtaagtactggctgggatatactc

SEQ ID NO: 23814 - DNA, 25 bp, Artificial sequence  Extension Primer
  Primer
gaatggttgggcagtgagacactct

SEQ ID NO: 23815 - DNA, 25 bp, Artificial sequence  Extension Primer
  Primer
gaaggttcaggcctcaggagattag

SEQ ID NO: 23816 - DNA, 25 bp, Artificial sequence  Extension Primer
  Primer
aatctactcaaccrcccataagcag

SEQ ID NO: 23817 - DNA, 25 bp, Artificial sequence  Extension Primer
  Primer
tttgtgagcatcacacatgatctcc

SEQ ID NO: 23818 - DNA, 25 bp, Artificial sequence  Extension Primer
  Primer
tctgtttctttattttctccaaatt

SEQ ID NO: 23819 - DNA, 25 bp, Artificial sequence  Extension Primer
  Primer
ttcatcagtacagtaattttaagca

SEQ ID NO: 23820 - DNA, 25 bp, Artificial sequence  Extension Primer
  Primer
tttacttattccttttgcacaataa

SEQ ID NO: 23821 - DNA, 25 bp, Artificial sequence  Extension Primer
  Primer
cactcaggaactttaagttccaagc

SEQ ID NO: 23822 - DNA, 25 bp, Artificial sequence  Extension Primer
  Primer
cctcagcaccattaaagagaaatat

SEQ ID NO: 23823 - DNA, 25 bp, Artificial sequence  Extension Primer
  Primer
aaccttttaataaaattggttatac

SEQ ID NO: 23824 - DNA, 25 bp, Artificial sequence  Extension Primer
  Primer
tagtattaaagcagatcttgtactt

SEQ ID NO: 23825 - DNA, 25 bp, Artificial sequence  Extension Primer
  Primer
caaactaaagtgagacctgctctac

SEQ ID NO: 23826 - DNA, 25 bp, Artificial sequence  Extension Primer
  Primer
agcactttccggggctcctttgaca

SEQ ID NO: 23827 - DNA, 25 bp, Artificial sequence  Extension Primer
  Primer
tgggttctagtctcggctctgctgt

SEQ ID NO: 23828 - DNA, 25 bp, Artificial sequence  Extension Primer
  Primer
tataatttgctgaaaaatattaacc

SEQ ID NO: 23829 - DNA, 25 bp, Artificial sequence  Extension Primer
  Primer
aaaatctcgcctctgtgaaggtaag

SEQ ID NO: 23830 - DNA, 25 bp, Artificial sequence  Extension Primer
  Primer
cgtccagtcacggaagtgagttcac

SEQ ID NO: 23831 - DNA, 25 bp, Artificial sequence  Extension Primer
  Primer
acaagcccttttaaaaaataccttc

SEQ ID NO: 23832 - DNA, 25 bp, Artificial sequence  Extension Primer
  Primer
ggttactattttatttaaaggtgaa

SEQ ID NO: 23833 - DNA, 25 bp, Artificial sequence  Extension Primer
  Primer
agacagacgttgaacgagcaaggag

SEQ ID NO: 23834 - DNA, 25 bp, Artificial sequence  Extension Primer
  Primer
agggggacttactgcgacgggaact

SEQ ID NO: 23835 - DNA, 25 bp, Artificial sequence  Extension Primer
  Primer
cgggccactgcccacccatgagact

SEQ ID NO: 23836 - DNA, 25 bp, Artificial sequence  Extension Primer
  Primer
tagaaataactacaaagattactcg

SEQ ID NO: 23837 - DNA, 25 bp, Artificial sequence  Extension Primer
  Primer
aactttcatttttttctgatcaatt

SEQ ID NO: 23838 - DNA, 25 bp, Artificial sequence  Extension Primer
  Primer
tttttatgactatttcattacatta

SEQ ID NO: 23839 - DNA, 25 bp, Artificial sequence  Extension Primer
  Primer
ctcagcttttagagccatcaacatc

SEQ ID NO: 23840 - DNA, 25 bp, Artificial sequence  Extension Primer
  Primer
cccggcacagacaagcgccctgtta

SEQ ID NO: 23841 - DNA, 25 bp, Artificial sequence  Extension Primer
  Primer
ccattggatattcaatgtgaaacaa

SEQ ID NO: 23842 - DNA, 25 bp, Artificial sequence  Extension Primer
  Primer
attctggctcatggagcaggcttcc

SEQ ID NO: 23843 - DNA, 25 bp, Artificial sequence  Extension Primer
  Primer
agacctgctaaatcagaatcttcca

SEQ ID NO: 23844 - DNA, 25 bp, Artificial sequence  Extension Primer
  Primer
gttgtctcttactctgaacctcacc

SEQ ID NO: 23845 - DNA, 25 bp, Artificial sequence  Extension Primer
  Primer
ccagggaaggtaaagtttcatctaa

SEQ ID NO: 23846 - DNA, 25 bp, Artificial sequence  Extension Primer
  Primer
caacttttatttctagtcggatttc

SEQ ID NO: 23847 - DNA, 25 bp, Artificial sequence  Extension Primer
  Primer
tctccctggttgacctgttgttcag

SEQ ID NO: 23848 - DNA, 25 bp, Artificial sequence  Extension Primer
  Primer
gatacctctgtgggtgagaaagata

SEQ ID NO: 23849 - DNA, 25 bp, Artificial sequence  Extension Primer
  Primer
aaattatagatgagggagctctttg

SEQ ID NO: 23850 - DNA, 25 bp, Artificial sequence  Extension Primer
  Primer
ttaaagtttataagagatttcattt

SEQ ID NO: 23851 - DNA, 25 bp, Artificial sequence  Extension Primer
  Primer
tacttttcacattgtgtcccaaacc

SEQ ID NO: 23852 - DNA, 25 bp, Artificial sequence  Extension Primer
  Primer
acagatacttgggaagagtctatta

SEQ ID NO: 23853 - DNA, 25 bp, Artificial sequence  Extension Primer
  Primer
ttgacattccttccctgacctgccc

SEQ ID NO: 23854 - DNA, 25 bp, Artificial sequence  Extension Primer
  Primer
agtaacctgaacgctaccccaagtc

SEQ ID NO: 23855 - DNA, 25 bp, Artificial sequence  Extension Primer
  Primer
acaggcatgaaaactaaaggaaaaa

SEQ ID NO: 23856 - DNA, 25 bp, Artificial sequence  Extension Primer
  Primer
caataatggaaaggaaaaagtttta

SEQ ID NO: 23857 - DNA, 25 bp, Artificial sequence  Extension Primer
  Primer
agtcactcagttacatggattatat

SEQ ID NO: 23858 - DNA, 25 bp, Artificial sequence  Extension Primer
  Primer
acaagtggcaacaccaacaatgggc

SEQ ID NO: 23859 - DNA, 25 bp, Artificial sequence  Extension Primer
  Primer
ctctgctctggagggagatatgtct

SEQ ID NO: 23860 - DNA, 25 bp, Artificial sequence  Extension Primer
  Primer
gaggtatctgaatggccgttaattc

SEQ ID NO: 23861 - DNA, 25 bp, Artificial sequence  Extension Primer
  Primer
ttaccagggcccctgcactggactc

SEQ ID NO: 23862 - DNA, 25 bp, Artificial sequence  Extension Primer
  Primer
tgaatcagaaagccgtggaaagcaa

SEQ ID NO: 23863 - DNA, 25 bp, Artificial sequence  Extension Primer
  Primer
ctgctctaataatggataagcttcg

SEQ ID NO: 23864 - DNA, 25 bp, Artificial sequence  Extension Primer
  Primer
taaaatgtatattttctcagagtca

SEQ ID NO: 23865 - DNA, 25 bp, Artificial sequence  Extension Primer
  Primer
tgaggggaatgcatatttccggaag

SEQ ID NO: 23866 - DNA, 25 bp, Artificial sequence  Extension Primer
  Primer
ttaacttgtatagaatcacactaag

SEQ ID NO: 23867 - DNA, 25 bp, Artificial sequence  Extension Primer
  Primer
aggagtcagttaagaagaatcatgt

SEQ ID NO: 23868 - DNA, 25 bp, Artificial sequence  Extension Primer
  Primer
gtgtccctttgagcagcaagtatta

SEQ ID NO: 23869 - DNA, 22 bp, Artificial sequence  Extension Primer
  Primer
aacacggttccccccacattcc

SEQ ID NO: 23870 - DNA, 25 bp, Artificial sequence  Extension Primer
  Primer
tattggctcagttagtaaagaatct

SEQ ID NO: 23871 - DNA, 25 bp, Artificial sequence  Extension Primer
  Primer
cattaaactttggtcatttttctta

SEQ ID NO: 23872 - DNA, 25 bp, Artificial sequence  Extension Primer
  Primer
gaatagtctgatatgtccttaagag

SEQ ID NO: 23873 - DNA, 25 bp, Artificial sequence  Extension Primer
  Primer
ctgaatgaactgtagtatgtgtctc

SEQ ID NO: 23874 - DNA, 25 bp, Artificial sequence  Extension Primer
  Primer
atggagatcttacatttatagtgga

SEQ ID NO: 23875 - DNA, 25 bp, Artificial sequence  Extension Primer
  Primer
cccatccctggagcattgctggccc

SEQ ID NO: 23876 - DNA, 25 bp, Artificial sequence  Extension Primer
  Primer
ttttgacttttagagccaatgaagc

SEQ ID NO: 23877 - DNA, 25 bp, Artificial sequence  Extension Primer
  Primer
taattcttcataaccattctcctca

SEQ ID NO: 23878 - DNA, 25 bp, Artificial sequence  Extension Primer
  Primer
catatcacactcccaggctgatttt

SEQ ID NO: 23879 - DNA, 25 bp, Artificial sequence  Extension Primer
  Primer
tttcatctcatttctmaacttttca

SEQ ID NO: 23880 - DNA, 25 bp, Artificial sequence  Extension Primer
  Primer
tttatatagagaaatttgccatttg

SEQ ID NO: 23881 - DNA, 25 bp, Artificial sequence  Extension Primer
  Primer
atctggaggactgtagttgaaaact

SEQ ID NO: 23882 - DNA, 25 bp, Artificial sequence  Extension Primer
  Primer
aggacacaygccaaaggccaggacc

SEQ ID NO: 23883 - DNA, 25 bp, Artificial sequence  Extension Primer
  Primer
aataacttaaaaatagtctaaaccc

SEQ ID NO: 23884 - DNA, 25 bp, Artificial sequence  Extension Primer
  Primer
ctgttcagataaggaaggctaaaga

SEQ ID NO: 23885 - DNA, 25 bp, Artificial sequence  Extension Primer
  Primer
agtattaagtttttgggrggaacac

SEQ ID NO: 23886 - DNA, 25 bp, Artificial sequence  Extension Primer
  Primer
aagaatataacaagagtatggaaac

SEQ ID NO: 23887 - DNA, 25 bp, Artificial sequence  Extension Primer
  Primer
cagttgttacctcagaggttcctac

SEQ ID NO: 23888 - DNA, 25 bp, Artificial sequence  Extension Primer
  Primer
tacgtagtgacttgttttttcaagg

SEQ ID NO: 23889 - DNA, 22 bp, Artificial sequence  Extension Primer
  Primer
caacatattcagatttgctcca

SEQ ID NO: 23890 - DNA, 25 bp, Artificial sequence  Extension Primer
  Primer
agagtgtctcttcatctggaaggaa

SEQ ID NO: 23891 - DNA, 25 bp, Artificial sequence  Extension Primer
  Primer
tgaggagcctctgatgtgatctaag

SEQ ID NO: 23892 - DNA, 25 bp, Artificial sequence  Extension Primer
  Primer
ggaaaattccagtacaactggcaca

SEQ ID NO: 23893 - DNA, 25 bp, Artificial sequence  Extension Primer
  Primer
ccactatactttattctcagtgcca

SEQ ID NO: 23894 - DNA, 25 bp, Artificial sequence  Extension Primer
  Primer
aaggtttggcttgactctaccatac

SEQ ID NO: 23895 - DNA, 25 bp, Artificial sequence  Extension Primer
  Primer
cacactgcctgggcagtagtcagta

SEQ ID NO: 23896 - DNA, 25 bp, Artificial sequence  Extension Primer
  Primer
aaatgattgattgatgaagcagggg

SEQ ID NO: 23897 - DNA, 25 bp, Artificial sequence  Extension Primer
  Primer
cttgcaatttaagtgtttccaaggt

SEQ ID NO: 23898 - DNA, 25 bp, Artificial sequence  Extension Primer
  Primer
aaagagttactaggagatgagtgcc

SEQ ID NO: 23899 - DNA, 25 bp, Artificial sequence  Extension Primer
  Primer
agggacagggaggcctagtgtgctg

SEQ ID NO: 23900 - DNA, 25 bp, Artificial sequence  Extension Primer
  Primer
ctggatgtatgggtttaagagagac

SEQ ID NO: 23901 - DNA, 25 bp, Artificial sequence  Extension Primer
  Primer
aaagtaattatccctcaaggaaaca

SEQ ID NO: 23902 - DNA, 25 bp, Artificial sequence  Extension Primer
  Primer
tccaagcaaggtaaaggccactgcc

SEQ ID NO: 23903 - DNA, 25 bp, Artificial sequence  Extension Primer
  Primer
tgtaatacacatttcattttttatt

SEQ ID NO: 23904 - DNA, 25 bp, Artificial sequence  Extension Primer
  Primer
taaaatgtcttattttcttttgtcg

SEQ ID NO: 23905 - DNA, 25 bp, Artificial sequence  Extension Primer
  Primer
tgcctttatttagcataagataaca

SEQ ID NO: 23906 - DNA, 25 bp, Artificial sequence  Extension Primer
  Primer
ccctgggtcccatgctgcccacatg

SEQ ID NO: 23907 - DNA, 25 bp, Artificial sequence  Extension Primer
  Primer
aatcataaattaacttagtgcagtg

SEQ ID NO: 23908 - DNA, 25 bp, Artificial sequence  Extension Primer
  Primer
gatacccatcccagctgataaccag

SEQ ID NO: 23909 - DNA, 25 bp, Artificial sequence  Extension Primer
  Primer
aacccaatgacatgggttctactct

SEQ ID NO: 23910 - DNA, 25 bp, Artificial sequence  Extension Primer
  Primer
acaagtctgattccagtaaacagta

SEQ ID NO: 23911 - DNA, 25 bp, Artificial sequence  Extension Primer
  Primer
tgcactgtggtttgacgttcctaag

SEQ ID NO: 23912 - DNA, 25 bp, Artificial sequence  Extension Primer
  Primer
tacaaacctgattctgtataaacca

SEQ ID NO: 23913 - DNA, 25 bp, Artificial sequence  Extension Primer
  Primer
gtaggtctagctcacagagttgact

SEQ ID NO: 23914 - DNA, 25 bp, Artificial sequence  Extension Primer
  Primer
tgaatacgtaatagagttgagacta

SEQ ID NO: 23915 - DNA, 25 bp, Artificial sequence  Extension Primer
  Primer
agtctataattctcctacatgaggg

SEQ ID NO: 23916 - DNA, 25 bp, Artificial sequence  Extension Primer
  Primer
tgtgtggcagtctgttgccatggaa

SEQ ID NO: 23917 - DNA, 25 bp, Artificial sequence  Extension Primer
  Primer
tggatgtgtgaggggattagaaaca

SEQ ID NO: 23918 - DNA, 25 bp, Artificial sequence  Extension Primer
  Primer
agagaaaataaatatcagtgattga

SEQ ID NO: 23919 - DNA, 25 bp, Artificial sequence  Extension Primer
  Primer
ttaatttatcctaccttaattattt

SEQ ID NO: 23920 - DNA, 25 bp, Artificial sequence  Extension Primer
  Primer
aacttctgctgcagattgtgggaca

SEQ ID NO: 23921 - DNA, 25 bp, Artificial sequence  Extension Primer
  Primer
tctggtgaaagaatcaaatgaatgc

SEQ ID NO: 23922 - DNA, 25 bp, Artificial sequence  Extension Primer
  Primer
aaagattgtgttttttaaaaactat

SEQ ID NO: 23923 - DNA, 25 bp, Artificial sequence  Extension Primer
  Primer
acttttcatttgttaggtatttctg

SEQ ID NO: 23924 - DNA, 25 bp, Artificial sequence  Extension Primer
  Primer
ctgctatagctaattttgttgctgt

SEQ ID NO: 23925 - DNA, 25 bp, Artificial sequence  Extension Primer
  Primer
cctgtggctaagagacacttgacca

SEQ ID NO: 23926 - DNA, 25 bp, Artificial sequence  Extension Primer
  Primer
agcgttgtgcaaccaccacctctat

SEQ ID NO: 23927 - DNA, 25 bp, Artificial sequence  Extension Primer
  Primer
gtagctagtgggggaggagagaatc

SEQ ID NO: 23928 - DNA, 25 bp, Artificial sequence  Extension Primer
  Primer
acacccaatcgggtataagtgtagg

SEQ ID NO: 23929 - DNA, 25 bp, Artificial sequence  Extension Primer
  Primer
gcctgggtcttatctccttccctcc

SEQ ID NO: 23930 - DNA, 25 bp, Artificial sequence  Extension Primer
  Primer
agggccctttgaaagtagcagcaat

SEQ ID NO: 23931 - DNA, 25 bp, Artificial sequence  Extension Primer
  Primer
aacaatatgaaaaattaatagatgg

SEQ ID NO: 23932 - DNA, 25 bp, Artificial sequence  Extension Primer
  Primer
ttttaagctcgtacagtttttgcac

SEQ ID NO: 23933 - DNA, 25 bp, Artificial sequence  Extension Primer
  Primer
ttgtttcaaaattggaatagaggga

SEQ ID NO: 23934 - DNA, 22 bp, Artificial sequence  Extension Primer
  Primer
ttgaagatagtcacctccaaaa

SEQ ID NO: 23935 - DNA, 25 bp, Artificial sequence  Extension Primer
  Primer
atgtctacaggtaataaatctgtgt

SEQ ID NO: 23936 - DNA, 25 bp, Artificial sequence  Extension Primer
  Primer
tgttagactttgtgtttcttgccca

SEQ ID NO: 23937 - DNA, 25 bp, Artificial sequence  Extension Primer
  Primer
ctaaggttgcaaatacttggccact

SEQ ID NO: 23938 - DNA, 25 bp, Artificial sequence  Extension Primer
  Primer
cattagtgaaagagggactggaggc

SEQ ID NO: 23939 - DNA, 25 bp, Artificial sequence  Extension Primer
  Primer
ttagcctgcaaaattgattccaaca

SEQ ID NO: 23940 - DNA, 25 bp, Artificial sequence  Extension Primer
  Primer
gctggaaatcagctatctgctctaa

SEQ ID NO: 23941 - DNA, 25 bp, Artificial sequence  Extension Primer
  Primer
ggatctttgtgtgtgtgcatcccta

SEQ ID NO: 23942 - DNA, 25 bp, Artificial sequence  Extension Primer
  Primer
acagaagccgaaagcctgattatgg

SEQ ID NO: 23943 - DNA, 25 bp, Artificial sequence  Extension Primer
  Primer
aattaaacaacatacttttcaacaa

SEQ ID NO: 23944 - DNA, 25 bp, Artificial sequence  Extension Primer
  Primer
aaaggtggaggattatgctgtttta

SEQ ID NO: 23945 - DNA, 25 bp, Artificial sequence  Extension Primer
  Primer
aaacattatccctgttttaggcatc

SEQ ID NO: 23946 - DNA, 25 bp, Artificial sequence  Extension Primer
  Primer
aatacagacttagtatgataaggtc

SEQ ID NO: 23947 - DNA, 25 bp, Artificial sequence  Extension Primer
  Primer
agatcttatgggaaccatgaaaaat

SEQ ID NO: 23948 - DNA, 25 bp, Artificial sequence  Extension Primer
  Primer
atagtgttaaatagatttaaaaaaa

SEQ ID NO: 23949 - DNA, 25 bp, Artificial sequence  Extension Primer
  Primer
cgcctcgtccccaaatcacccctgc

SEQ ID NO: 23950 - DNA, 25 bp, Artificial sequence  Extension Primer
  Primer
gtgagtggggtttggggaagggggt

SEQ ID NO: 23951 - DNA, 25 bp, Artificial sequence  Extension Primer
  Primer
gaatccagatagtctcagacatgaa

SEQ ID NO: 23952 - DNA, 25 bp, Artificial sequence  Extension Primer
  Primer
acttcaacaaggtcatgagtgaatg

SEQ ID NO: 23953 - DNA, 22 bp, Artificial sequence  Extension Primer
  Primer
acagagccatgttggatttatt

SEQ ID NO: 23954 - DNA, 25 bp, Artificial sequence  Extension Primer
  Primer
tcatactggtaccccctagggtata

SEQ ID NO: 23955 - DNA, 25 bp, Artificial sequence  Extension Primer
  Primer
aaaagtgtaattaatgctagtagga

SEQ ID NO: 23956 - DNA, 25 bp, Artificial sequence  Extension Primer
  Primer
gttatacctccaaaacacaccctga

SEQ ID NO: 23957 - DNA, 25 bp, Artificial sequence  Extension Primer
  Primer
aaagaaactgtggtacatatgtatg

SEQ ID NO: 23958 - DNA, 25 bp, Artificial sequence  Extension Primer
  Primer
agactttcttttcagagtcaggcag

SEQ ID NO: 23959 - DNA, 25 bp, Artificial sequence  Extension Primer
  Primer
aaggacaaatgtatcaaatttcata

SEQ ID NO: 23960 - DNA, 25 bp, Artificial sequence  Extension Primer
  Primer
tataaacaccaaatatttgctctta

SEQ ID NO: 23961 - DNA, 25 bp, Artificial sequence  Extension Primer
  Primer
accttactgtcaatcatcccagagc

SEQ ID NO: 23962 - DNA, 25 bp, Artificial sequence  Extension Primer
  Primer
taaaatctcagacagttgggaagaa

SEQ ID NO: 23963 - DNA, 25 bp, Artificial sequence  Extension Primer
  Primer
atattcaacttttaattcctgctct

SEQ ID NO: 23964 - DNA, 25 bp, Artificial sequence  Extension Primer
  Primer
cccttgcgttctgtctcttcaaatt

SEQ ID NO: 23965 - DNA, 25 bp, Artificial sequence  Extension Primer
  Primer
tggtgacaaggtaatgacccgattt

SEQ ID NO: 23966 - DNA, 25 bp, Artificial sequence  Extension Primer
  Primer
tatatgagtaataagagcacttaaa

SEQ ID NO: 23967 - DNA, 25 bp, Artificial sequence  Extension Primer
  Primer
ccagttgttattacaaatgatgcta

SEQ ID NO: 23968 - DNA, 25 bp, Artificial sequence  Extension Primer
  Primer
gcttgctagatggtggatccaaatc

SEQ ID NO: 23969 - DNA, 25 bp, Artificial sequence  Extension Primer
  Primer
tcatgataaattttctggttaatct

SEQ ID NO: 23970 - DNA, 25 bp, Artificial sequence  Extension Primer
  Primer
cagtcttagcctcagtgatggacag

SEQ ID NO: 23971 - DNA, 25 bp, Artificial sequence  Extension Primer
  Primer
tcactcagcacctatggtgactacc

SEQ ID NO: 23972 - DNA, 25 bp, Artificial sequence  Extension Primer
  Primer
aacccaagctagctatttcctatcc

SEQ ID NO: 23973 - DNA, 25 bp, Artificial sequence  Extension Primer
  Primer
cccgtctaccctgggaagcccaggt

SEQ ID NO: 23974 - DNA, 25 bp, Artificial sequence  Extension Primer
  Primer
agagttttattcttaatttcctagc

SEQ ID NO: 23975 - DNA, 25 bp, Artificial sequence  Extension Primer
  Primer
tagcatattattggaaattttccct

SEQ ID NO: 23976 - DNA, 25 bp, Artificial sequence  Extension Primer
  Primer
agagatgactgagcatgtacccaaa

SEQ ID NO: 23977 - DNA, 25 bp, Artificial sequence  Extension Primer
  Primer
gcaggcataataatatttctggtaa

SEQ ID NO: 23978 - DNA, 25 bp, Artificial sequence  Extension Primer
  Primer
tacttctttggaaagcccatgtttt

SEQ ID NO: 23979 - DNA, 25 bp, Artificial sequence  Extension Primer
  Primer
agaggacacggctttaaggaaaaca

SEQ ID NO: 23980 - DNA, 25 bp, Artificial sequence  Extension Primer
  Primer
atatataacccgggcgactcctctg

SEQ ID NO: 23981 - DNA, 25 bp, Artificial sequence  Extension Primer
  Primer
tttccttctttttttaaggttgaat

SEQ ID NO: 23982 - DNA, 25 bp, Artificial sequence  Extension Primer
  Primer
ataaagagagaacacccatacaatc

SEQ ID NO: 23983 - DNA, 25 bp, Artificial sequence  Extension Primer
  Primer
aagaaaccatggtgattgtcctaaa

SEQ ID NO: 23984 - DNA, 25 bp, Artificial sequence  Extension Primer
  Primer
gtgaaagaaaggtttgtaccttctc

SEQ ID NO: 23985 - DNA, 25 bp, Artificial sequence  Extension Primer
  Primer
tacagagaactgtttgactctgggc

SEQ ID NO: 23986 - DNA, 25 bp, Artificial sequence  Extension Primer
  Primer
tgaaggaaaagaaaaagcatcacca

SEQ ID NO: 23987 - DNA, 25 bp, Artificial sequence  Extension Primer
  Primer
tttaagcactattaatagagcacta

SEQ ID NO: 23988 - DNA, 25 bp, Artificial sequence  Extension Primer
  Primer
tatagtctgttatgtctgagaaata

SEQ ID NO: 23989 - DNA, 25 bp, Artificial sequence  Extension Primer
  Primer
cttggccttgttgacaaagtgcccc

SEQ ID NO: 23990 - DNA, 25 bp, Artificial sequence  Extension Primer
  Primer
gcctgcccagattgggggagaggaa

SEQ ID NO: 23991 - DNA, 25 bp, Artificial sequence  Extension Primer
  Primer
gaagctaatcaagagttttcctaag

SEQ ID NO: 23992 - DNA, 25 bp, Artificial sequence  Extension Primer
  Primer
tagtcctcaagcctctgtttacagg

SEQ ID NO: 23993 - DNA, 25 bp, Artificial sequence  Extension Primer
  Primer
atgctatttggtactttttgattca

SEQ ID NO: 23994 - DNA, 22 bp, Artificial sequence  Extension Primer
  Primer
tgctcttttaccaggcctccca

SEQ ID NO: 23995 - DNA, 25 bp, Artificial sequence  Extension Primer
  Primer
aagaaggtggtggagaagctgtgag

SEQ ID NO: 23996 - DNA, 25 bp, Artificial sequence  Extension Primer
  Primer
tgatgtgcaaaaggcaaataaatgc

SEQ ID NO: 23997 - DNA, 25 bp, Artificial sequence  Extension Primer
  Primer
gaatctgaggtacctgagagacact

SEQ ID NO: 23998 - DNA, 25 bp, Artificial sequence  Extension Primer
  Primer
ccatccccctcaacaccctacctac

SEQ ID NO: 23999 - DNA, 25 bp, Artificial sequence  Extension Primer
  Primer
aggatgctgcaggcagagggaacag

SEQ ID NO: 24000 - DNA, 25 bp, Artificial sequence  Extension Primer
  Primer
acctgcaacctgcgctgcggtgatg

SEQ ID NO: 24001 - DNA, 25 bp, Artificial sequence  Extension Primer
  Primer
catgattctagaaacaaataatatc

SEQ ID NO: 24002 - DNA, 25 bp, Artificial sequence  Extension Primer
  Primer
caaatattataactattgggaaaat

SEQ ID NO: 24003 - DNA, 25 bp, Artificial sequence  Extension Primer
  Primer
tatagaaatttgttttgagtggcta

SEQ ID NO: 24004 - DNA, 25 bp, Artificial sequence  Extension Primer
  Primer
agaaactgaggcttccctgggactt

SEQ ID NO: 24005 - DNA, 25 bp, Artificial sequence  Extension Primer
  Primer
ccagctgagaactattccgatatta

SEQ ID NO: 24006 - DNA, 25 bp, Artificial sequence  Extension Primer
  Primer
aatattctgtctgtcagacaccatg

SEQ ID NO: 24007 - DNA, 25 bp, Artificial sequence  Extension Primer
  Primer
acaatgaaccacagctgtaacttca

SEQ ID NO: 24008 - DNA, 25 bp, Artificial sequence  Extension Primer
  Primer
agtacagtattacctatgtaagttg

SEQ ID NO: 24009 - DNA, 25 bp, Artificial sequence  Extension Primer
  Primer
atgcttagaatcaggaggaatttag

SEQ ID NO: 24010 - DNA, 25 bp, Artificial sequence  Extension Primer
  Primer
attttatcaatccccactgtgctta

SEQ ID NO: 24011 - DNA, 25 bp, Artificial sequence  Extension Primer
  Primer
caaaataggtgattttgtcatagtt

SEQ ID NO: 24012 - DNA, 25 bp, Artificial sequence  Extension Primer
  Primer
tgccctgaacaggatcccgggatag

SEQ ID NO: 24013 - DNA, 25 bp, Artificial sequence  Extension Primer
  Primer
cggctgcctttctccagccctgctc

SEQ ID NO: 24014 - DNA, 25 bp, Artificial sequence  Extension Primer
  Primer
gatttttaatacaaaaaaatatccc

SEQ ID NO: 24015 - DNA, 25 bp, Artificial sequence  Extension Primer
  Primer
cttttttctgcatatgaatcctcca

SEQ ID NO: 24016 - DNA, 25 bp, Artificial sequence  Extension Primer
  Primer
gaccaacaattaaggagaaaagtag

SEQ ID NO: 24017 - DNA, 25 bp, Artificial sequence  Extension Primer
  Primer
tttgtaactgctaagtcacttcagt

SEQ ID NO: 24018 - DNA, 25 bp, Artificial sequence  Extension Primer
  Primer
atattaaaaattaaaaatggtaaaa

SEQ ID NO: 24019 - DNA, 25 bp, Artificial sequence  Extension Primer
  Primer
cttggagatataaaatatggagaaa

SEQ ID NO: 24020 - DNA, 25 bp, Artificial sequence  Extension Primer
  Primer
atggccatttatatatggttacact

SEQ ID NO: 24021 - DNA, 25 bp, Artificial sequence  Extension Primer
  Primer
aatcaagttgggaattgtatggaaa

SEQ ID NO: 24022 - DNA, 25 bp, Artificial sequence  Extension Primer
  Primer
gcctgagacaatggagaaatacctg

SEQ ID NO: 24023 - DNA, 25 bp, Artificial sequence  Extension Primer
  Primer
atttgctttatatcctagtcattct

SEQ ID NO: 24024 - DNA, 25 bp, Artificial sequence  Extension Primer
  Primer
aaatccatattttcccctgctcctc

SEQ ID NO: 24025 - DNA, 25 bp, Artificial sequence  Extension Primer
  Primer
taaatactctggtcattaaaatgct

SEQ ID NO: 24026 - DNA, 25 bp, Artificial sequence  Extension Primer
  Primer
cagtgagattctgtggtatttaagt

SEQ ID NO: 24027 - DNA, 25 bp, Artificial sequence  Extension Primer
  Primer
aatctatagcaacctctttcattgt

SEQ ID NO: 24028 - DNA, 25 bp, Artificial sequence  Extension Primer
  Primer
gtggagatggttcccatatcaggat

SEQ ID NO: 24029 - DNA, 25 bp, Artificial sequence  Extension Primer
  Primer
aagggccattaatccatttactgct

SEQ ID NO: 24030 - DNA, 25 bp, Artificial sequence  Extension Primer
  Primer
gacaattagatgaaatttggaaaaa

SEQ ID NO: 24031 - DNA, 25 bp, Artificial sequence  Extension Primer
  Primer
gtgcaacttggatgtaagatgtgga

SEQ ID NO: 24032 - DNA, 25 bp, Artificial sequence  Extension Primer
  Primer
atcagatggaattcaggtgcaggat

SEQ ID NO: 24033 - DNA, 25 bp, Artificial sequence  Extension Primer
  Primer
agtgtaaggctgggcagaggttttt

SEQ ID NO: 24034 - DNA, 25 bp, Artificial sequence  Extension Primer
  Primer
cacatagacacacacaactttacat

SEQ ID NO: 24035 - DNA, 25 bp, Artificial sequence  Extension Primer
  Primer
atgcartgtgtccattcctattggt

SEQ ID NO: 24036 - DNA, 25 bp, Artificial sequence  Extension Primer
  Primer
ggtcactttcaatgtttgcttcctt

SEQ ID NO: 24037 - DNA, 25 bp, Artificial sequence  Extension Primer
  Primer
taacaaccacagtcatactgctcac

SEQ ID NO: 24038 - DNA, 25 bp, Artificial sequence  Extension Primer
  Primer
tctccctcattctttgcccatactc

SEQ ID NO: 24039 - DNA, 25 bp, Artificial sequence  Extension Primer
  Primer
aaagtggtgagagtattagaacaat

SEQ ID NO: 24040 - DNA, 25 bp, Artificial sequence  Extension Primer
  Primer
ttcaaatcctttccttacctaagat

SEQ ID NO: 24041 - DNA, 25 bp, Artificial sequence  Extension Primer
  Primer
tattttacccatctaacaaaatctc

SEQ ID NO: 24042 - DNA, 25 bp, Artificial sequence  Extension Primer
  Primer
ttttatataatgaatgaaagaaacc

SEQ ID NO: 24043 - DNA, 25 bp, Artificial sequence  Extension Primer
  Primer
tctaagcagactgtttctgggtgcc

SEQ ID NO: 24044 - DNA, 25 bp, Artificial sequence  Extension Primer
  Primer
attagtgttactcatgtgaagactt

SEQ ID NO: 24045 - DNA, 25 bp, Artificial sequence  Extension Primer
  Primer
crtctcaaaagctccagttgaaaac

SEQ ID NO: 24046 - DNA, 25 bp, Artificial sequence  Extension Primer
  Primer
catgttattccatttattgggtcta

SEQ ID NO: 24047 - DNA, 25 bp, Artificial sequence  Extension Primer
  Primer
cagatctgccagcccctcttttacc

SEQ ID NO: 24048 - DNA, 25 bp, Artificial sequence  Extension Primer
  Primer
ttaggtaatttcatattaagtgaat

SEQ ID NO: 24049 - DNA, 25 bp, Artificial sequence  Extension Primer
  Primer
acccaaacctaactttccacaatca

SEQ ID NO: 24050 - DNA, 25 bp, Artificial sequence  Extension Primer
  Primer
attgtctaaggacagtcatttgctc

SEQ ID NO: 24051 - DNA, 25 bp, Artificial sequence  Extension Primer
  Primer
gtggtgggctgccgtctatggggtc

SEQ ID NO: 24052 - DNA, 25 bp, Artificial sequence  Extension Primer
  Primer
ggcctccccaagacttgcatggtga

SEQ ID NO: 24053 - DNA, 25 bp, Artificial sequence  Extension Primer
  Primer
cccatttctgccccacctgccttgc

SEQ ID NO: 24054 - DNA, 25 bp, Artificial sequence  Extension Primer
  Primer
acgtcttgagacactgttaaaagca

SEQ ID NO: 24055 - DNA, 25 bp, Artificial sequence  Extension Primer
  Primer
aaagacaccatacaagtttatagaa

SEQ ID NO: 24056 - DNA, 25 bp, Artificial sequence  Extension Primer
  Primer
attcgtgctgaagttatgaggggtg

SEQ ID NO: 24057 - DNA, 25 bp, Artificial sequence  Extension Primer
  Primer
gttttcagatggattaaaaataaca

SEQ ID NO: 24058 - DNA, 25 bp, Artificial sequence  Extension Primer
  Primer
ggagggttacaggtgaggatgtatt

SEQ ID NO: 24059 - DNA, 25 bp, Artificial sequence  Extension Primer
  Primer
gttgccttctacctaaatggataca

SEQ ID NO: 24060 - DNA, 25 bp, Artificial sequence  Extension Primer
  Primer
aagacttactaaaaaatatatacaa

SEQ ID NO: 24061 - DNA, 25 bp, Artificial sequence  Extension Primer
  Primer
ttacttaataaaagcctagggaagt

SEQ ID NO: 24062 - DNA, 25 bp, Artificial sequence  Extension Primer
  Primer
ctcacgaccctgtgggagctgaaac

SEQ ID NO: 24063 - DNA, 25 bp, Artificial sequence  Extension Primer
  Primer
aagctattggtgcaatgaacactac

SEQ ID NO: 24064 - DNA, 25 bp, Artificial sequence  Extension Primer
  Primer
atcaagttcatagcatgttgaaatg

SEQ ID NO: 24065 - DNA, 25 bp, Artificial sequence  Extension Primer
  Primer
gtgcatactaggatttaagagtgtc

SEQ ID NO: 24066 - DNA, 25 bp, Artificial sequence  Extension Primer
  Primer
taggaagagggctgcattgattaca

SEQ ID NO: 24067 - DNA, 25 bp, Artificial sequence  Extension Primer
  Primer
gtgaaaggtcacatcgtctgcctaa

SEQ ID NO: 24068 - DNA, 25 bp, Artificial sequence  Extension Primer
  Primer
ttcataaacatataaattaggcaaa

SEQ ID NO: 24069 - DNA, 25 bp, Artificial sequence  Extension Primer
  Primer
tctaaaaaataaattcatgacacag

SEQ ID NO: 24070 - DNA, 25 bp, Artificial sequence  Extension Primer
  Primer
gttttctttatatagtatgttatga

SEQ ID NO: 24071 - DNA, 25 bp, Artificial sequence  Extension Primer
  Primer
ctggtaggtcagagtactgactaca

SEQ ID NO: 24072 - DNA, 25 bp, Artificial sequence  Extension Primer
  Primer
tatagtatattgtaaacatttcacc

SEQ ID NO: 24073 - DNA, 25 bp, Artificial sequence  Extension Primer
  Primer
gttaatccccatcaataataaaaaa

SEQ ID NO: 24074 - DNA, 25 bp, Artificial sequence  Extension Primer
  Primer
agctggccgtgaccacaatgaggtt

SEQ ID NO: 24075 - DNA, 25 bp, Artificial sequence  Extension Primer
  Primer
agaagtttaagagtgcataaaacat

SEQ ID NO: 24076 - DNA, 25 bp, Artificial sequence  Extension Primer
  Primer
ggggcaaagttctcagcccacggaa

SEQ ID NO: 24077 - DNA, 25 bp, Artificial sequence  Extension Primer
  Primer
aaagagcaattttgataagaagtga

SEQ ID NO: 24078 - DNA, 25 bp, Artificial sequence  Extension Primer
  Primer
gttaatttaaaaagttggtatgtca

SEQ ID NO: 24079 - DNA, 25 bp, Artificial sequence  Extension Primer
  Primer
aaaaattagaatttgcggcttgaaa

SEQ ID NO: 24080 - DNA, 25 bp, Artificial sequence  Extension Primer
  Primer
atgtcatatttcaacaggatagctc

SEQ ID NO: 24081 - DNA, 25 bp, Artificial sequence  Extension Primer
  Primer
ttctagcactggctattgtatttgt

SEQ ID NO: 24082 - DNA, 25 bp, Artificial sequence  Extension Primer
  Primer
cctggggaaggaaggaaggatgtga

SEQ ID NO: 24083 - DNA, 25 bp, Artificial sequence  Extension Primer
  Primer
atctacatctcaacttcttgaatca

SEQ ID NO: 24084 - DNA, 25 bp, Artificial sequence  Extension Primer
  Primer
taggttatttagagacgatttcctt

SEQ ID NO: 24085 - DNA, 25 bp, Artificial sequence  Extension Primer
  Primer
tcaaattctatgtagtcaatataat

SEQ ID NO: 24086 - DNA, 25 bp, Artificial sequence  Extension Primer
  Primer
agtttaagtttgaatgttaagtaaa

SEQ ID NO: 24087 - DNA, 25 bp, Artificial sequence  Extension Primer
  Primer
aaatactgagactgttaggttccca

SEQ ID NO: 24088 - DNA, 25 bp, Artificial sequence  Extension Primer
  Primer
tctgaattctacttgctttccaggg

SEQ ID NO: 24089 - DNA, 25 bp, Artificial sequence  Extension Primer
  Primer
attcaagtaaacagcagcaacacac

SEQ ID NO: 24090 - DNA, 25 bp, Artificial sequence  Extension Primer
  Primer
gtgtttcacttttcagtgaatgtca

SEQ ID NO: 24091 - DNA, 25 bp, Artificial sequence  Extension Primer
  Primer
ataaaagtacgcattttggcccata

SEQ ID NO: 24092 - DNA, 25 bp, Artificial sequence  Extension Primer
  Primer
gcatttaatcctcagaacaacctac

SEQ ID NO: 24093 - DNA, 25 bp, Artificial sequence  Extension Primer
  Primer
cagttgcctctctgctgtgtgtgca

SEQ ID NO: 24094 - DNA, 25 bp, Artificial sequence  Extension Primer
  Primer
ggactgaggtctaaaagatgaggtc

SEQ ID NO: 24095 - DNA, 25 bp, Artificial sequence  Extension Primer
  Primer
atgttgggggcttttgtgcaattat

SEQ ID NO: 24096 - DNA, 25 bp, Artificial sequence  Extension Primer
  Primer
acaggcacagcaacacatcagacac

SEQ ID NO: 24097 - DNA, 25 bp, Artificial sequence  Extension Primer
  Primer
gctggaggaaaatcataaagcagag

SEQ ID NO: 24098 - DNA, 25 bp, Artificial sequence  Extension Primer
  Primer
gtcaggacttgagcaggcttgtctg

SEQ ID NO: 24099 - DNA, 25 bp, Artificial sequence  Extension Primer
  Primer
cgtcattaaccctgactcagccatc

SEQ ID NO: 24100 - DNA, 25 bp, Artificial sequence  Extension Primer
  Primer
ctttctacaactatcctatttatac

SEQ ID NO: 24101 - DNA, 25 bp, Artificial sequence  Extension Primer
  Primer
aatttatttctaacaacaaagggtg

SEQ ID NO: 24102 - DNA, 25 bp, Artificial sequence  Extension Primer
  Primer
cttctaacaagaagcagaatctgaa

SEQ ID NO: 24103 - DNA, 25 bp, Artificial sequence  Extension Primer
  Primer
ggacctggttgtttgagcaagtaca

SEQ ID NO: 24104 - DNA, 25 bp, Artificial sequence  Extension Primer
  Primer
cctttcatgagagatagttttcctc

SEQ ID NO: 24105 - DNA, 25 bp, Artificial sequence  Extension Primer
  Primer
gtggtcatttaagaatagacaaagg

SEQ ID NO: 24106 - DNA, 25 bp, Artificial sequence  Extension Primer
  Primer
gggaacatcaccaaatgtgttgtca

SEQ ID NO: 24107 - DNA, 25 bp, Artificial sequence  Extension Primer
  Primer
tttttgtagccaacagttccgagat

SEQ ID NO: 24108 - DNA, 25 bp, Artificial sequence  Extension Primer
  Primer
attcagaaaggaggaacctgaagca

SEQ ID NO: 24109 - DNA, 25 bp, Artificial sequence  Extension Primer
  Primer
ctatggcttcatttgctttcaggat

SEQ ID NO: 24110 - DNA, 25 bp, Artificial sequence  Extension Primer
  Primer
catgagtttaattgaatgggctatt

SEQ ID NO: 24111 - DNA, 25 bp, Artificial sequence  Extension Primer
  Primer
agatagtraggaaaaatttctacac

SEQ ID NO: 24112 - DNA, 25 bp, Artificial sequence  Extension Primer
  Primer
cccaggactacacacaggtaactcc

SEQ ID NO: 24113 - DNA, 25 bp, Artificial sequence  Extension Primer
  Primer
tgaaacaattaccaagtaaaactta

SEQ ID NO: 24114 - DNA, 25 bp, Artificial sequence  Extension Primer
  Primer
tgagcacaaagcatgattttgggga

SEQ ID NO: 24115 - DNA, 25 bp, Artificial sequence  Extension Primer
  Primer
aatagagtgaacagatgcagctctg

SEQ ID NO: 24116 - DNA, 25 bp, Artificial sequence  Extension Primer
  Primer
ccaaggcaatgtaacatattttagg

SEQ ID NO: 24117 - DNA, 25 bp, Artificial sequence  Extension Primer
  Primer
acttctagttagcatattcagtgtc

SEQ ID NO: 24118 - DNA, 25 bp, Artificial sequence  Extension Primer
  Primer
atatggtgagaaacactggggattt

SEQ ID NO: 24119 - DNA, 25 bp, Artificial sequence  Extension Primer
  Primer
aatcttgaggctttatttcagagtt

SEQ ID NO: 24120 - DNA, 25 bp, Artificial sequence  Extension Primer
  Primer
aacattgtttccttcactcctcact

SEQ ID NO: 24121 - DNA, 25 bp, Artificial sequence  Extension Primer
  Primer
tccatgtgtttatcaaagatcatcc

SEQ ID NO: 24122 - DNA, 25 bp, Artificial sequence  Extension Primer
  Primer
tcaggacctgtttgctgggcaggaa

SEQ ID NO: 24123 - DNA, 22 bp, Artificial sequence  Extension Primer
  Primer
aattcagcagggcattttttca

SEQ ID NO: 24124 - DNA, 25 bp, Artificial sequence  Extension Primer
  Primer
ccccaacgagctcctcggtgccccc

SEQ ID NO: 24125 - DNA, 25 bp, Artificial sequence  Extension Primer
  Primer
atgaatatagggttcccaaatgaag

SEQ ID NO: 24126 - DNA, 25 bp, Artificial sequence  Extension Primer
  Primer
attgtaccccagtgtgggaaggata

SEQ ID NO: 24127 - DNA, 22 bp, Artificial sequence  Extension Primer
  Primer
agacactattaagatatcattt

SEQ ID NO: 24128 - DNA, 25 bp, Artificial sequence  Extension Primer
  Primer
aagctccaggtttcagtcccaatcc

SEQ ID NO: 24129 - DNA, 25 bp, Artificial sequence  Extension Primer
  Primer
ctgtgttttcctatagtaagcaagc

SEQ ID NO: 24130 - DNA, 25 bp, Artificial sequence  Extension Primer
  Primer
tcccatctctcttctccattttcta

SEQ ID NO: 24131 - DNA, 25 bp, Artificial sequence  Extension Primer
  Primer
tgtttctcactggtaagtaaaagaa

SEQ ID NO: 24132 - DNA, 25 bp, Artificial sequence  Extension Primer
  Primer
cctggaccatctccagcacacttta

SEQ ID NO: 24133 - DNA, 25 bp, Artificial sequence  Extension Primer
  Primer
ttttgaattctacctttcccatctg

SEQ ID NO: 24134 - DNA, 25 bp, Artificial sequence  Extension Primer
  Primer
ttgttacagtaagagtgaagccaac

SEQ ID NO: 24135 - DNA, 25 bp, Artificial sequence  Extension Primer
  Primer
cctgcaccttatcccaattaaccac

SEQ ID NO: 24136 - DNA, 25 bp, Artificial sequence  Extension Primer
  Primer
tttatagaaagagcccagggctcct

SEQ ID NO: 24137 - DNA, 25 bp, Artificial sequence  Extension Primer
  Primer
gcatgaagctcttcttgaaaaggta

SEQ ID NO: 24138 - DNA, 25 bp, Artificial sequence  Extension Primer
  Primer
ctgctctgaataactgagaagttgc

SEQ ID NO: 24139 - DNA, 25 bp, Artificial sequence  Extension Primer
  Primer
tcttttccaagaagcacaacagagc

SEQ ID NO: 24140 - DNA, 25 bp, Artificial sequence  Extension Primer
  Primer
tggaggacgatcctgaagatctgac

SEQ ID NO: 24141 - DNA, 25 bp, Artificial sequence  Extension Primer
  Primer
gagattcagctctagctactaatcc

SEQ ID NO: 24142 - DNA, 25 bp, Artificial sequence  Extension Primer
  Primer
aatactggggagaagatgaaggttt

SEQ ID NO: 24143 - DNA, 25 bp, Artificial sequence  Extension Primer
  Primer
aaattgtgggggatatcaggaatgc

SEQ ID NO: 24144 - DNA, 25 bp, Artificial sequence  Extension Primer
  Primer
gaagacttaggcttaaaggctattc

SEQ ID NO: 24145 - DNA, 25 bp, Artificial sequence  Extension Primer
  Primer
caacacagtaggaacgtcatctctt

SEQ ID NO: 24146 - DNA, 25 bp, Artificial sequence  Extension Primer
  Primer
tagattcatataatatacgtttctt

SEQ ID NO: 24147 - DNA, 25 bp, Artificial sequence  Extension Primer
  Primer
ccctgaagacagcaaggactatatt

SEQ ID NO: 24148 - DNA, 25 bp, Artificial sequence  Extension Primer
  Primer
tctcccgacttgtccctgccatcat

SEQ ID NO: 24149 - DNA, 25 bp, Artificial sequence  Extension Primer
  Primer
cagaatttacaagtttaggaaaaat

SEQ ID NO: 24150 - DNA, 25 bp, Artificial sequence  Extension Primer
  Primer
catgtgaatcagaagtttcaaaatg

SEQ ID NO: 24151 - DNA, 25 bp, Artificial sequence  Extension Primer
  Primer
ggtttttttgatgcgtttacacagt

SEQ ID NO: 24152 - DNA, 25 bp, Artificial sequence  Extension Primer
  Primer
ttacggaacatccgttcagtcacta

SEQ ID NO: 24153 - DNA, 25 bp, Artificial sequence  Extension Primer
  Primer
gaacacagaactattttcttacata

SEQ ID NO: 24154 - DNA, 25 bp, Artificial sequence  Extension Primer
  Primer
cagtgggggaatctctgctgggatg

SEQ ID NO: 24155 - DNA, 25 bp, Artificial sequence  Extension Primer
  Primer
gtcccctggagaggagtgctgactt

SEQ ID NO: 24156 - DNA, 25 bp, Artificial sequence  Extension Primer
  Primer
ttatgtttttagtcctgttataaag

SEQ ID NO: 24157 - DNA, 25 bp, Artificial sequence  Extension Primer
  Primer
ttaacactgcagaaattcacatccc

SEQ ID NO: 24158 - DNA, 25 bp, Artificial sequence  Extension Primer
  Primer
atgtgctttaaatttagtttgatta

SEQ ID NO: 24159 - DNA, 25 bp, Artificial sequence  Extension Primer
  Primer
atgactcacactggatcaataatcc

SEQ ID NO: 24160 - DNA, 25 bp, Artificial sequence  Extension Primer
  Primer
gccattgtgtgcatatcccgagact

SEQ ID NO: 24161 - DNA, 25 bp, Artificial sequence  Extension Primer
  Primer
accctgccgcatgtcctgcccctcc

SEQ ID NO: 24162 - DNA, 25 bp, Artificial sequence  Extension Primer
  Primer
tataacacattaaaattattattta

SEQ ID NO: 24163 - DNA, 25 bp, Artificial sequence  Extension Primer
  Primer
gaaagttctagtttctctacaacct

SEQ ID NO: 24164 - DNA, 22 bp, Artificial sequence  Extension Primer
  Primer
aagaaggctggaattcatttgg

SEQ ID NO: 24165 - DNA, 25 bp, Artificial sequence  Extension Primer
  Primer
catttgaataaaccccttgttatct

SEQ ID NO: 24166 - DNA, 25 bp, Artificial sequence  Extension Primer
  Primer
gctgtggctacccactaacttctgc

SEQ ID NO: 24167 - DNA, 25 bp, Artificial sequence  Extension Primer
  Primer
cataaataaactccagtagaatcta

SEQ ID NO: 24168 - DNA, 25 bp, Artificial sequence  Extension Primer
  Primer
ctcatcctcatgttcaacattaaag

SEQ ID NO: 24169 - DNA, 25 bp, Artificial sequence  Extension Primer
  Primer
ccccggccaatgctggttctggtag

SEQ ID NO: 24170 - DNA, 25 bp, Artificial sequence  Extension Primer
  Primer
atttagataatgtttagattttctc

SEQ ID NO: 24171 - DNA, 25 bp, Artificial sequence  Extension Primer
  Primer
gctgctcaagggccctcagtcatgt

SEQ ID NO: 24172 - DNA, 25 bp, Artificial sequence  Extension Primer
  Primer
aggtaaaaccaatgtataggaacaa

SEQ ID NO: 24173 - DNA, 25 bp, Artificial sequence  Extension Primer
  Primer
ttaggtaagccctaaaagctaactt

SEQ ID NO: 24174 - DNA, 25 bp, Artificial sequence  Extension Primer
  Primer
ggatcatcagtccttccatgtttta

SEQ ID NO: 24175 - DNA, 25 bp, Artificial sequence  Extension Primer
  Primer
gaggggaggtaagcagaggccgatc

SEQ ID NO: 24176 - DNA, 25 bp, Artificial sequence  Extension Primer
  Primer
tgttgaggtcaataagctcttgcca

SEQ ID NO: 24177 - DNA, 25 bp, Artificial sequence  Extension Primer
  Primer
gtctaacagtacttagattatacaa

SEQ ID NO: 24178 - DNA, 25 bp, Artificial sequence  Extension Primer
  Primer
attacctaatgtaattaaaggcata

SEQ ID NO: 24179 - DNA, 25 bp, Artificial sequence  Extension Primer
  Primer
tttttaaggtaagtatgtggtgtta

SEQ ID NO: 24180 - DNA, 25 bp, Artificial sequence  Extension Primer
  Primer
tagttagatcttcagtggtctccaa

SEQ ID NO: 24181 - DNA, 25 bp, Artificial sequence  Extension Primer
  Primer
cctccctttcaaaatagtgtgtgaa

SEQ ID NO: 24182 - DNA, 25 bp, Artificial sequence  Extension Primer
  Primer
cgtcgaagcgcttgcgggtgtggtc

SEQ ID NO: 24183 - DNA, 25 bp, Artificial sequence  Extension Primer
  Primer
tttgatgctgtggcttgaacccagg

SEQ ID NO: 24184 - DNA, 22 bp, Artificial sequence  Extension Primer
  Primer
ccctatacatatgtcaggtggc

SEQ ID NO: 24185 - DNA, 25 bp, Artificial sequence  Extension Primer
  Primer
gccctaaataaactaaggttttcca

SEQ ID NO: 24186 - DNA, 25 bp, Artificial sequence  Extension Primer
  Primer
cccgctctgagtgatgcgaagcccc

SEQ ID NO: 24187 - DNA, 25 bp, Artificial sequence  Extension Primer
  Primer
gaaatgacacccatcagtatgaacc

SEQ ID NO: 24188 - DNA, 25 bp, Artificial sequence  Extension Primer
  Primer
gccccagctccagcctacccagtcc

SEQ ID NO: 24189 - DNA, 25 bp, Artificial sequence  Extension Primer
  Primer
gaaacgaatgagaaatgactgagaa

SEQ ID NO: 24190 - DNA, 25 bp, Artificial sequence  Extension Primer
  Primer
agctggtagtccttctagggagcgt

SEQ ID NO: 24191 - DNA, 25 bp, Artificial sequence  Extension Primer
  Primer
aggggagaacccgggcgttggtctc

SEQ ID NO: 24192 - DNA, 25 bp, Artificial sequence  Extension Primer
  Primer
cttgcccaactccaggagtgaggga

SEQ ID NO: 24193 - DNA, 25 bp, Artificial sequence  Extension Primer
  Primer
cttgagaagagtgatatcttgagac

SEQ ID NO: 24194 - DNA, 25 bp, Artificial sequence  Extension Primer
  Primer
ctttcatttgattatatttacatag

SEQ ID NO: 24195 - DNA, 25 bp, Artificial sequence  Extension Primer
  Primer
ggctccagccaatctgaatccacac

SEQ ID NO: 24196 - DNA, 25 bp, Artificial sequence  Extension Primer
  Primer
tctgtatcactgcactacaatgaag

SEQ ID NO: 24197 - DNA, 25 bp, Artificial sequence  Extension Primer
  Primer
ataacacagtcacataaaataagta

SEQ ID NO: 24198 - DNA, 25 bp, Artificial sequence  Extension Primer
  Primer
ttaaaatatcccaagggggtactaa

SEQ ID NO: 24199 - DNA, 25 bp, Artificial sequence  Extension Primer
  Primer
gttttaaaagtcagaaatcacatat

SEQ ID NO: 24200 - DNA, 25 bp, Artificial sequence  Extension Primer
  Primer
cctttgttcatcatagtcctcaatt

SEQ ID NO: 24201 - DNA, 25 bp, Artificial sequence  Extension Primer
  Primer
gctgtcaaatattcaaatgatgccc

SEQ ID NO: 24202 - DNA, 25 bp, Artificial sequence  Extension Primer
  Primer
ttagatttccttcccacttaggtca

SEQ ID NO: 24203 - DNA, 25 bp, Artificial sequence  Extension Primer
  Primer
ttcctgatctcggaggacatgtagt

SEQ ID NO: 24204 - DNA, 25 bp, Artificial sequence  Extension Primer
  Primer
aatacctagaccagtacaggcaacc

SEQ ID NO: 24205 - DNA, 25 bp, Artificial sequence  Extension Primer
  Primer
gtcctgtgcagggatttctgtgccc

SEQ ID NO: 24206 - DNA, 25 bp, Artificial sequence  Extension Primer
  Primer
aatcaactttggagtcctgagtaaa

SEQ ID NO: 24207 - DNA, 25 bp, Artificial sequence  Extension Primer
  Primer
tctagtctgtaggacaggatgctga

SEQ ID NO: 24208 - DNA, 25 bp, Artificial sequence  Extension Primer
  Primer
aaataattggttttggtttagggaa

SEQ ID NO: 24209 - DNA, 25 bp, Artificial sequence  Extension Primer
  Primer
cagaggcaggggatctggtttcaag

SEQ ID NO: 24210 - DNA, 25 bp, Artificial sequence  Extension Primer
  Primer
gtttttcctctaaaacattgttgta

SEQ ID NO: 24211 - DNA, 25 bp, Artificial sequence  Extension Primer
  Primer
tcctactttcattcattcagggttg

SEQ ID NO: 24212 - DNA, 25 bp, Artificial sequence  Extension Primer
  Primer
atggacacatcctttaaaaagggga

SEQ ID NO: 24213 - DNA, 25 bp, Artificial sequence  Extension Primer
  Primer
gatgaagccatcctagagatgacct

SEQ ID NO: 24214 - DNA, 25 bp, Artificial sequence  Extension Primer
  Primer
tttaaagaaagtggtaagtataata

SEQ ID NO: 24215 - DNA, 25 bp, Artificial sequence  Extension Primer
  Primer
ttttgttcacctattatagcaactt

SEQ ID NO: 24216 - DNA, 25 bp, Artificial sequence  Extension Primer
  Primer
cccagtctgtttatgtttgtggtat

SEQ ID NO: 24217 - DNA, 25 bp, Artificial sequence  Extension Primer
  Primer
aaggccagttcagtggtgttcaaca

SEQ ID NO: 24218 - DNA, 25 bp, Artificial sequence  Extension Primer
  Primer
caagagttggcgttaattaacagtt

SEQ ID NO: 24219 - DNA, 25 bp, Artificial sequence  Extension Primer
  Primer
gcatgacctgaaagttgtcaaattc

SEQ ID NO: 24220 - DNA, 25 bp, Artificial sequence  Extension Primer
  Primer
acagtcctcattggaatatactttc

SEQ ID NO: 24221 - DNA, 25 bp, Artificial sequence  Extension Primer
  Primer
tgtgtagccatgagtaagctcttcc

SEQ ID NO: 24222 - DNA, 25 bp, Artificial sequence  Extension Primer
  Primer
tgaatatacctacagtctttgttct

SEQ ID NO: 24223 - DNA, 25 bp, Artificial sequence  Extension Primer
  Primer
aacaccataacaaaaatatggatgc

SEQ ID NO: 24224 - DNA, 25 bp, Artificial sequence  Extension Primer
  Primer
cttcctcagcagccatacagcccaa

SEQ ID NO: 24225 - DNA, 25 bp, Artificial sequence  Extension Primer
  Primer
ataagacacgatctctgtcgttacg

SEQ ID NO: 24226 - DNA, 25 bp, Artificial sequence  Extension Primer
  Primer
catgatcactagcgcagaatatgag

SEQ ID NO: 24227 - DNA, 25 bp, Artificial sequence  Extension Primer
  Primer
agtgatgcttaatcttaatttttaa

SEQ ID NO: 24228 - DNA, 25 bp, Artificial sequence  Extension Primer
  Primer
actccgaggctctgtatgtgtgtac

SEQ ID NO: 24229 - DNA, 25 bp, Artificial sequence  Extension Primer
  Primer
ctctggctatggagacgtgtgctga

SEQ ID NO: 24230 - DNA, 25 bp, Artificial sequence  Extension Primer
  Primer
ttcaatatagtgcatacttaataac

SEQ ID NO: 24231 - DNA, 25 bp, Artificial sequence  Extension Primer
  Primer
gtttgtgcttgctttatttgtagtg

SEQ ID NO: 24232 - DNA, 25 bp, Artificial sequence  Extension Primer
  Primer
ctagcaatgtatccttgtgccaaca

SEQ ID NO: 24233 - DNA, 25 bp, Artificial sequence  Extension Primer
  Primer
cctttcttaactggagctcctcata

SEQ ID NO: 24234 - DNA, 25 bp, Artificial sequence  Extension Primer
  Primer
acgaaggtacagaggagctacagga

SEQ ID NO: 24235 - DNA, 25 bp, Artificial sequence  Extension Primer
  Primer
aaaactaaaactccaacatttgtaa

SEQ ID NO: 24236 - DNA, 25 bp, Artificial sequence  Extension Primer
  Primer
agttttaatgagaattaaaaaaaaa

SEQ ID NO: 24237 - DNA, 25 bp, Artificial sequence  Extension Primer
  Primer
tccagatctaacagctgcactttgt

SEQ ID NO: 24238 - DNA, 25 bp, Artificial sequence  Extension Primer
  Primer
tgrtttgtttaatgtctgccccctt

SEQ ID NO: 24239 - DNA, 25 bp, Artificial sequence  Extension Primer
  Primer
tctgacttctttgaaaagagctccc

SEQ ID NO: 24240 - DNA, 25 bp, Artificial sequence  Extension Primer
  Primer
gtgtgcagttttggctgcatgtcct

SEQ ID NO: 24241 - DNA, 25 bp, Artificial sequence  Extension Primer
  Primer
tttgctgtgatacccccaaactcac

SEQ ID NO: 24242 - DNA, 25 bp, Artificial sequence  Extension Primer
  Primer
tccaggaagtcaagagtaaagatac

SEQ ID NO: 24243 - DNA, 25 bp, Artificial sequence  Extension Primer
  Primer
atctaactatcattctgtcactttt

SEQ ID NO: 24244 - DNA, 25 bp, Artificial sequence  Extension Primer
  Primer
tggaaacattgatcttggtttgtcg

SEQ ID NO: 24245 - DNA, 25 bp, Artificial sequence  Extension Primer
  Primer
tctacgaattttggattaactgcca

SEQ ID NO: 24246 - DNA, 25 bp, Artificial sequence  Extension Primer
  Primer
aatattcatttgttctgaaaattat

SEQ ID NO: 24247 - DNA, 25 bp, Artificial sequence  Extension Primer
  Primer
cctgacacgtggaatgtgctcagaa

SEQ ID NO: 24248 - DNA, 25 bp, Artificial sequence  Extension Primer
  Primer
cttgaacccttgagtggagcagtaa

SEQ ID NO: 24249 - DNA, 25 bp, Artificial sequence  Extension Primer
  Primer
atcagagtaaaggaagaaatataga

SEQ ID NO: 24250 - DNA, 25 bp, Artificial sequence  Extension Primer
  Primer
gctaatggcaagatccacagcagca

SEQ ID NO: 24251 - DNA, 25 bp, Artificial sequence  Extension Primer
  Primer
ggaatctgtagattactttggctgg

SEQ ID NO: 24252 - DNA, 25 bp, Artificial sequence  Extension Primer
  Primer
tttcttgcttttcacaactttgcat

SEQ ID NO: 24253 - DNA, 25 bp, Artificial sequence  Extension Primer
  Primer
tgctacttttaaaaattcaacgaaa

SEQ ID NO: 24254 - DNA, 25 bp, Artificial sequence  Extension Primer
  Primer
gccggtggcctgagccgagtatgtc

SEQ ID NO: 24255 - DNA, 25 bp, Artificial sequence  Extension Primer
  Primer
ccctgagctctgttttcttacttgt

SEQ ID NO: 24256 - DNA, 25 bp, Artificial sequence  Extension Primer
  Primer
tacccagaagtgaaattgctggatc

SEQ ID NO: 24257 - DNA, 25 bp, Artificial sequence  Extension Primer
  Primer
tttactgtgaggmaacaacctataa

SEQ ID NO: 24258 - DNA, 25 bp, Artificial sequence  Extension Primer
  Primer
aagagttccagtgagaagcttagca

SEQ ID NO: 24259 - DNA, 25 bp, Artificial sequence  Extension Primer
  Primer
ggataagccatggaggctggcactg

SEQ ID NO: 24260 - DNA, 25 bp, Artificial sequence  Extension Primer
  Primer
ggtgagygcggagttcctggtctgg

SEQ ID NO: 24261 - DNA, 25 bp, Artificial sequence  Extension Primer
  Primer
ttcatctcgcacgcatgctgggggg

SEQ ID NO: 24262 - DNA, 25 bp, Artificial sequence  Extension Primer
  Primer
gagttcgtgcgtcctctgctgggtc

SEQ ID NO: 24263 - DNA, 25 bp, Artificial sequence  Extension Primer
  Primer
cattaactgaaacattgaagaagcc

SEQ ID NO: 24264 - DNA, 25 bp, Artificial sequence  Extension Primer
  Primer
agtctctttcacatggttccttcct

SEQ ID NO: 24265 - DNA, 25 bp, Artificial sequence  Extension Primer
  Primer
tacaagtcctttctggaagtgatta

SEQ ID NO: 24266 - DNA, 25 bp, Artificial sequence  Extension Primer
  Primer
attggggctacaaaaatgaatttac

SEQ ID NO: 24267 - DNA, 25 bp, Artificial sequence  Extension Primer
  Primer
tgacagccttaatgagtcatttaga

SEQ ID NO: 24268 - DNA, 25 bp, Artificial sequence  Extension Primer
  Primer
tgtttagaatgcctctaagttaaaa

SEQ ID NO: 24269 - DNA, 25 bp, Artificial sequence  Extension Primer
  Primer
atgtgtggatacatgtgcatttctt

SEQ ID NO: 24270 - DNA, 25 bp, Artificial sequence  Extension Primer
  Primer
acattagtgaggaatagaataaaat

SEQ ID NO: 24271 - DNA, 25 bp, Artificial sequence  Extension Primer
  Primer
ctaaactgcaagatttgaaatctgg

SEQ ID NO: 24272 - DNA, 25 bp, Artificial sequence  Extension Primer
  Primer
tgtccttaaatcacagtttcttcat

SEQ ID NO: 24273 - DNA, 25 bp, Artificial sequence  Extension Primer
  Primer
agaggctaagagtatttaagaaaga

SEQ ID NO: 24274 - DNA, 25 bp, Artificial sequence  Extension Primer
  Primer
gtgatttaatgaacaaagaatatgc

SEQ ID NO: 24275 - DNA, 25 bp, Artificial sequence  Extension Primer
  Primer
ttttacctggatctatttttccgta

SEQ ID NO: 24276 - DNA, 25 bp, Artificial sequence  Extension Primer
  Primer
ggctgtatcaggaagcagaaagtga

SEQ ID NO: 24277 - DNA, 25 bp, Artificial sequence  Extension Primer
  Primer
tttgctaagtaaataagtgtcaaga

SEQ ID NO: 24278 - DNA, 25 bp, Artificial sequence  Extension Primer
  Primer
catcttacctaatcactgattctgg

SEQ ID NO: 24279 - DNA, 25 bp, Artificial sequence  Extension Primer
  Primer
catttgttcaatgcatcaagctttc

SEQ ID NO: 24280 - DNA, 25 bp, Artificial sequence  Extension Primer
  Primer
aatggcctgccagctgttcacagaa

SEQ ID NO: 24281 - DNA, 25 bp, Artificial sequence  Extension Primer
  Primer
gatcacatccctttgaagtgggatc

SEQ ID NO: 24282 - DNA, 25 bp, Artificial sequence  Extension Primer
  Primer
acagggggtggtctcaccgtagtag

SEQ ID NO: 24283 - DNA, 25 bp, Artificial sequence  Extension Primer
  Primer
aatgacttggacagttaattaaaac

SEQ ID NO: 24284 - DNA, 25 bp, Artificial sequence  Extension Primer
  Primer
ccttcacacggagtatgtcctttcg

SEQ ID NO: 24285 - DNA, 25 bp, Artificial sequence  Extension Primer
  Primer
ggcactgtcacagttgcttggtttt

SEQ ID NO: 24286 - DNA, 25 bp, Artificial sequence  Extension Primer
  Primer
atttgtatagtttttttctcacttt

SEQ ID NO: 24287 - DNA, 25 bp, Artificial sequence  Extension Primer
  Primer
gggaaccactaaagtccatttttgg

SEQ ID NO: 24288 - DNA, 25 bp, Artificial sequence  Extension Primer
  Primer
actgtcaattgtatcccctccagta

SEQ ID NO: 24289 - DNA, 25 bp, Artificial sequence  Extension Primer
  Primer
atcctcttgtgaaatggaggcaggt

SEQ ID NO: 24290 - DNA, 25 bp, Artificial sequence  Extension Primer
  Primer
aatctgagggtggaaacaggcacaa

SEQ ID NO: 24291 - DNA, 25 bp, Artificial sequence  Extension Primer
  Primer
attgtctagaaactcctagatgctc

SEQ ID NO: 24292 - DNA, 25 bp, Artificial sequence  Extension Primer
  Primer
gtgtgtggtgaggtgtgtgttattc

SEQ ID NO: 24293 - DNA, 25 bp, Artificial sequence  Extension Primer
  Primer
aaaacatgacatgagtgatgtatat

SEQ ID NO: 24294 - DNA, 25 bp, Artificial sequence  Extension Primer
  Primer
ttccccggtggtccagtggctaaga

SEQ ID NO: 24295 - DNA, 25 bp, Artificial sequence  Extension Primer
  Primer
tgtggtgacatcattatctagtgtt

SEQ ID NO: 24296 - DNA, 25 bp, Artificial sequence  Extension Primer
  Primer
attgtgttttctgcatggaatggac

SEQ ID NO: 24297 - DNA, 25 bp, Artificial sequence  Extension Primer
  Primer
tgcctagtaaacccccatgtaccaa

SEQ ID NO: 24298 - DNA, 25 bp, Artificial sequence  Extension Primer
  Primer
aaaagctgcctcagttcccagtatg

SEQ ID NO: 24299 - DNA, 25 bp, Artificial sequence  Extension Primer
  Primer
acaaaaggctttgaaggagattcta

SEQ ID NO: 24300 - DNA, 25 bp, Artificial sequence  Extension Primer
  Primer
ttcccatgtcttggctatttgaata

SEQ ID NO: 24301 - DNA, 25 bp, Artificial sequence  Extension Primer
  Primer
aatctttttgcaatttatactaaga

SEQ ID NO: 24302 - DNA, 25 bp, Artificial sequence  Extension Primer
  Primer
tgctaagctctggttttaaagactg

SEQ ID NO: 24303 - DNA, 25 bp, Artificial sequence  Extension Primer
  Primer
gaaagtttaaaatcaaggtctggca

SEQ ID NO: 24304 - DNA, 25 bp, Artificial sequence  Extension Primer
  Primer
amgtttctccacttctctgcgtttt

SEQ ID NO: 24305 - DNA, 25 bp, Artificial sequence  Extension Primer
  Primer
atgatcatctatataataataaata

SEQ ID NO: 24306 - DNA, 25 bp, Artificial sequence  Extension Primer
  Primer
aataatctctgatgtggggcaggag

SEQ ID NO: 24307 - DNA, 25 bp, Artificial sequence  Extension Primer
  Primer
ctctgatgtggggcaggagrggcca

SEQ ID NO: 24308 - DNA, 25 bp, Artificial sequence  Extension Primer
  Primer
aaggaatacctgcctcctcccactc

SEQ ID NO: 24309 - DNA, 25 bp, Artificial sequence  Extension Primer
  Primer
ttcccagtgagttggttccctcttt

SEQ ID NO: 24310 - DNA, 25 bp, Artificial sequence  Extension Primer
  Primer
attgtagagatactttcatttttgc

SEQ ID NO: 24311 - DNA, 25 bp, Artificial sequence  Extension Primer
  Primer
ggaaacaacaatgaatctgcttcag

SEQ ID NO: 24312 - DNA, 25 bp, Artificial sequence  Extension Primer
  Primer
ttacattgttggatcataaattata

SEQ ID NO: 24313 - DNA, 25 bp, Artificial sequence  Extension Primer
  Primer
atattattgcagtcttagccctttt

SEQ ID NO: 24314 - DNA, 25 bp, Artificial sequence  Extension Primer
  Primer
ctttttttaaaaaagtactacagta

SEQ ID NO: 24315 - DNA, 25 bp, Artificial sequence  Extension Primer
  Primer
gattcagggctcagggatctctgtt

SEQ ID NO: 24316 - DNA, 25 bp, Artificial sequence  Extension Primer
  Primer
ctgtccattgtctgatcctcggctt

SEQ ID NO: 24317 - DNA, 25 bp, Artificial sequence  Extension Primer
  Primer
gatcatttgtaatgatgtagaataa

SEQ ID NO: 24318 - DNA, 25 bp, Artificial sequence  Extension Primer
  Primer
tgaatttgcttatgactatgatgtt

SEQ ID NO: 24319 - DNA, 25 bp, Artificial sequence  Extension Primer
  Primer
tctctggaatttgcaaaataaccaa

SEQ ID NO: 24320 - DNA, 25 bp, Artificial sequence  Extension Primer
  Primer
tatgtttatagcagtgacatcctac

SEQ ID NO: 24321 - DNA, 25 bp, Artificial sequence  Extension Primer
  Primer
aaaaatctggcacccagtagtccaa

SEQ ID NO: 24322 - DNA, 25 bp, Artificial sequence  Extension Primer
  Primer
tctagcccaaggacagtacataagt

SEQ ID NO: 24323 - DNA, 25 bp, Artificial sequence  Extension Primer
  Primer
agaggggagtgcacaagcagacaaa

SEQ ID NO: 24324 - DNA, 25 bp, Artificial sequence  Extension Primer
  Primer
ccagacctcttctttaacacacctt

SEQ ID NO: 24325 - DNA, 25 bp, Artificial sequence  Extension Primer
  Primer
gttctgaagtggagagatgaccttt

SEQ ID NO: 24326 - DNA, 25 bp, Artificial sequence  Extension Primer
  Primer
ttgatcagttcaatgaatacagtta

SEQ ID NO: 24327 - DNA, 25 bp, Artificial sequence  Extension Primer
  Primer
ggagctgagtgtgccaggagaaaga

SEQ ID NO: 24328 - DNA, 25 bp, Artificial sequence  Extension Primer
  Primer
gaacaatgttcatcttcctattgat

SEQ ID NO: 24329 - DNA, 25 bp, Artificial sequence  Extension Primer
  Primer
tttataacaaagcaagtgtggggaa

SEQ ID NO: 24330 - DNA, 25 bp, Artificial sequence  Extension Primer
  Primer
aaaacaaaattcacaagatagagac

SEQ ID NO: 24331 - DNA, 25 bp, Artificial sequence  Extension Primer
  Primer
acttaaaaattaaggttaaagaaaa

SEQ ID NO: 24332 - DNA, 25 bp, Artificial sequence  Extension Primer
  Primer
aaagtctcttcattgctgtgctttg

SEQ ID NO: 24333 - DNA, 25 bp, Artificial sequence  Extension Primer
  Primer
acttcttgatctttgtccttccact

SEQ ID NO: 24334 - DNA, 25 bp, Artificial sequence  Extension Primer
  Primer
ctacaaatgtcccagaagaagcaga

SEQ ID NO: 24335 - DNA, 25 bp, Artificial sequence  Extension Primer
  Primer
atatgaaacatgacaactgaatttt

SEQ ID NO: 24336 - DNA, 25 bp, Artificial sequence  Extension Primer
  Primer
cttagctacggatcccccaaaactt

SEQ ID NO: 24337 - DNA, 25 bp, Artificial sequence  Extension Primer
  Primer
aatgacatatttggagttagttact

SEQ ID NO: 24338 - DNA, 25 bp, Artificial sequence  Extension Primer
  Primer
tccagcttctcctttctataatatc

SEQ ID NO: 24339 - DNA, 25 bp, Artificial sequence  Extension Primer
  Primer
cacttgctacattaagttcattagg

SEQ ID NO: 24340 - DNA, 25 bp, Artificial sequence  Extension Primer
  Primer
tcaggggacctgctgataagcctct

SEQ ID NO: 24341 - DNA, 25 bp, Artificial sequence  Extension Primer
  Primer
aactgaaaacgcccaccttctccat

SEQ ID NO: 24342 - DNA, 25 bp, Artificial sequence  Extension Primer
  Primer
aatagctttcaaatgaaatccaaac

SEQ ID NO: 24343 - DNA, 25 bp, Artificial sequence  Extension Primer
  Primer
tatcaggccggtccctgtcctccta

SEQ ID NO: 24344 - DNA, 25 bp, Artificial sequence  Extension Primer
  Primer
tccttgctgagtaaggcaaaggagt

SEQ ID NO: 24345 - DNA, 25 bp, Artificial sequence  Extension Primer
  Primer
agctgatgaacttctctgtgattaa

SEQ ID NO: 24346 - DNA, 25 bp, Artificial sequence  Extension Primer
  Primer
gaaatgtggctcttgggaagctatt

SEQ ID NO: 24347 - DNA, 25 bp, Artificial sequence  Extension Primer
  Primer
tcatatggtttgcaaatattttctt

SEQ ID NO: 24348 - DNA, 25 bp, Artificial sequence  Extension Primer
  Primer
tttatccatccattttcccgagttc

SEQ ID NO: 24349 - DNA, 25 bp, Artificial sequence  Extension Primer
  Primer
cttagctgtgaatggtaaatgagtt

SEQ ID NO: 24350 - DNA, 25 bp, Artificial sequence  Extension Primer
  Primer
gactcaggttcactttctttctcaa

SEQ ID NO: 24351 - DNA, 25 bp, Artificial sequence  Extension Primer
  Primer
cctgtagttagttgagaagctgatg

SEQ ID NO: 24352 - DNA, 25 bp, Artificial sequence  Extension Primer
  Primer
tgatacacatctgggttgttcctac

SEQ ID NO: 24353 - DNA, 25 bp, Artificial sequence  Extension Primer
  Primer
aaacaatttaaactctttacaatat

SEQ ID NO: 24354 - DNA, 25 bp, Artificial sequence  Extension Primer
  Primer
ttctattagcatgtccaccatgaat

SEQ ID NO: 24355 - DNA, 25 bp, Artificial sequence  Extension Primer
  Primer
ggcccgtctaggtttaataacaagt

SEQ ID NO: 24356 - DNA, 25 bp, Artificial sequence  Extension Primer
  Primer
tgagagcactgggagaaaagaatgc

SEQ ID NO: 24357 - DNA, 22 bp, Artificial sequence  Extension Primer
  Primer
cagccctaatgtccttagttcc

SEQ ID NO: 24358 - DNA, 25 bp, Artificial sequence  Extension Primer
  Primer
acatctcggtccaatgtctacagta

SEQ ID NO: 24359 - DNA, 25 bp, Artificial sequence  Extension Primer
  Primer
gtgaaagtcttctacagtgttgtat

SEQ ID NO: 24360 - DNA, 25 bp, Artificial sequence  Extension Primer
  Primer
acctccttactagattgccrgaaag

SEQ ID NO: 24361 - DNA, 25 bp, Artificial sequence  Extension Primer
  Primer
aaccttagaagtctgagagaaagac

SEQ ID NO: 24362 - DNA, 25 bp, Artificial sequence  Extension Primer
  Primer
gcaagaactaacctgcttcccagtg

SEQ ID NO: 24363 - DNA, 25 bp, Artificial sequence  Extension Primer
  Primer
atcagaacatcttgcttgaagttcc

SEQ ID NO: 24364 - DNA, 25 bp, Artificial sequence  Extension Primer
  Primer
tgtctccacaggcaatgtgaaatgg

SEQ ID NO: 24365 - DNA, 25 bp, Artificial sequence  Extension Primer
  Primer
cagatgaatatggaatgccttcaac

SEQ ID NO: 24366 - DNA, 25 bp, Artificial sequence  Extension Primer
  Primer
aaatgcctttataataatagaaata

SEQ ID NO: 24367 - DNA, 25 bp, Artificial sequence  Extension Primer
  Primer
ccccaggctcctgaactccatccac

SEQ ID NO: 24368 - DNA, 25 bp, Artificial sequence  Extension Primer
  Primer
ggttaaaaagcaataaaagtgttag

SEQ ID NO: 24369 - DNA, 25 bp, Artificial sequence  Extension Primer
  Primer
gttaatttcagctgaacgctgttag

SEQ ID NO: 24370 - DNA, 25 bp, Artificial sequence  Extension Primer
  Primer
tcttgcatatttcttctgtccactc

SEQ ID NO: 24371 - DNA, 25 bp, Artificial sequence  Extension Primer
  Primer
atgttccctttgtcatgcctgtctc

SEQ ID NO: 24372 - DNA, 25 bp, Artificial sequence  Extension Primer
  Primer
agaaaacaagttagagacggaaaac

SEQ ID NO: 24373 - DNA, 25 bp, Artificial sequence  Extension Primer
  Primer
actaacttctcygagatctttccca

SEQ ID NO: 24374 - DNA, 25 bp, Artificial sequence  Extension Primer
  Primer
taccaactcttcttctaaactatac

SEQ ID NO: 24375 - DNA, 25 bp, Artificial sequence  Extension Primer
  Primer
agggaggagagaacgctgcatcaga

SEQ ID NO: 24376 - DNA, 25 bp, Artificial sequence  Extension Primer
  Primer
attgacaattactgtggttcaacct

SEQ ID NO: 24377 - DNA, 25 bp, Artificial sequence  Extension Primer
  Primer
tttccaaggtgtgagttcttgatac

SEQ ID NO: 24378 - DNA, 25 bp, Artificial sequence  Extension Primer
  Primer
caggaggagagatgattgggtattt

SEQ ID NO: 24379 - DNA, 25 bp, Artificial sequence  Extension Primer
  Primer
cttcatctcctgcatcttgtgcatt

SEQ ID NO: 24380 - DNA, 25 bp, Artificial sequence  Extension Primer
  Primer
gtccgtcatgggtaatgacttttag

SEQ ID NO: 24381 - DNA, 25 bp, Artificial sequence  Extension Primer
  Primer
aaagtgatagtgatggaggttcaaa

SEQ ID NO: 24382 - DNA, 25 bp, Artificial sequence  Extension Primer
  Primer
tgtcagtatggtacaatttatatct

SEQ ID NO: 24383 - DNA, 25 bp, Artificial sequence  Extension Primer
  Primer
gtaggagatggctgcattttaacct

SEQ ID NO: 24384 - DNA, 25 bp, Artificial sequence  Extension Primer
  Primer
gtattgtaacttagagaccaaggca

SEQ ID NO: 24385 - DNA, 25 bp, Artificial sequence  Extension Primer
  Primer
ccccatcaatattaaattgaaatgt

SEQ ID NO: 24386 - DNA, 25 bp, Artificial sequence  Extension Primer
  Primer
aacatgagggttttgcagtgtgctt

SEQ ID NO: 24387 - DNA, 25 bp, Artificial sequence  Extension Primer
  Primer
tttcactggaaaagttggttaggag

SEQ ID NO: 24388 - DNA, 25 bp, Artificial sequence  Extension Primer
  Primer
aggcgtgatcaccacatcgtcatct

SEQ ID NO: 24389 - DNA, 25 bp, Artificial sequence  Extension Primer
  Primer
ccaccgtaaatcaagttctacccag

SEQ ID NO: 24390 - DNA, 25 bp, Artificial sequence  Extension Primer
  Primer
caattgctgaagagtcctctagaag

SEQ ID NO: 24391 - DNA, 25 bp, Artificial sequence  Extension Primer
  Primer
gttacatgttattaaggatcacaac

SEQ ID NO: 24392 - DNA, 25 bp, Artificial sequence  Extension Primer
  Primer
aagatctctaccaagcctcctagaa

SEQ ID NO: 24393 - DNA, 25 bp, Artificial sequence  Extension Primer
  Primer
tactaagaaaattcgatttcgttga

SEQ ID NO: 24394 - DNA, 25 bp, Artificial sequence  Extension Primer
  Primer
ccctctgccccctacagtatctctt

SEQ ID NO: 24395 - DNA, 25 bp, Artificial sequence  Extension Primer
  Primer
ctaactttgtattctgggggaaaag

SEQ ID NO: 24396 - DNA, 25 bp, Artificial sequence  Extension Primer
  Primer
tcagaaaaacaagttggaagctaca

SEQ ID NO: 24397 - DNA, 25 bp, Artificial sequence  Extension Primer
  Primer
ttgtcaatcctaatgacccattgct

SEQ ID NO: 24398 - DNA, 25 bp, Artificial sequence  Extension Primer
  Primer
ggtgatgtttgttcttagcactggc

SEQ ID NO: 24399 - DNA, 25 bp, Artificial sequence  Extension Primer
  Primer
caggggcctttagatgccaactgaa

SEQ ID NO: 24400 - DNA, 25 bp, Artificial sequence  Extension Primer
  Primer
caatgtaaacacaagcccacaccca

SEQ ID NO: 24401 - DNA, 25 bp, Artificial sequence  Extension Primer
  Primer
aatttaccttgtgcctgctaaagaa

SEQ ID NO: 24402 - DNA, 25 bp, Artificial sequence  Extension Primer
  Primer
cctggtggctcagtagtaaaaaaaa

SEQ ID NO: 24403 - DNA, 25 bp, Artificial sequence  Extension Primer
  Primer
ctcaaaaggaaatgactgcccgaca

SEQ ID NO: 24404 - DNA, 25 bp, Artificial sequence  Extension Primer
  Primer
ttttactgtgggaagctttcctctc

SEQ ID NO: 24405 - DNA, 25 bp, Artificial sequence  Extension Primer
  Primer
gaaattgatgagggctccctgccta

SEQ ID NO: 24406 - DNA, 25 bp, Artificial sequence  Extension Primer
  Primer
aacactcctgctgatctaaattttt

SEQ ID NO: 24407 - DNA, 25 bp, Artificial sequence  Extension Primer
  Primer
gagggaatgaacaaaaaatctccaa

SEQ ID NO: 24408 - DNA, 25 bp, Artificial sequence  Extension Primer
  Primer
cactcaggtaacaggaatcctttgg

SEQ ID NO: 24409 - DNA, 25 bp, Artificial sequence  Extension Primer
  Primer
tcattactataaagttgagttccct

SEQ ID NO: 24410 - DNA, 25 bp, Artificial sequence  Extension Primer
  Primer
tgggattctctagacaagaatgtgg

SEQ ID NO: 24411 - DNA, 25 bp, Artificial sequence  Extension Primer
  Primer
ggcaagggtctaagtaaaagcagta

SEQ ID NO: 24412 - DNA, 25 bp, Artificial sequence  Extension Primer
  Primer
agagatctcatcaagaaaattggag

SEQ ID NO: 24413 - DNA, 25 bp, Artificial sequence  Extension Primer
  Primer
acatataaaacagctagcacagtga

SEQ ID NO: 24414 - DNA, 25 bp, Artificial sequence  Extension Primer
  Primer
gagacaggcacccagagggaacttg

SEQ ID NO: 24415 - DNA, 25 bp, Artificial sequence  Extension Primer
  Primer
gacacttgagctttcacagactttg

SEQ ID NO: 24416 - DNA, 25 bp, Artificial sequence  Extension Primer
  Primer
tgatgctcttgagaagctgtgaggc

SEQ ID NO: 24417 - DNA, 25 bp, Artificial sequence  Extension Primer
  Primer
tcaggtctggcaatctatatatctc

SEQ ID NO: 24418 - DNA, 25 bp, Artificial sequence  Extension Primer
  Primer
cttaaaaatatgtgtataacccatt

SEQ ID NO: 24419 - DNA, 25 bp, Artificial sequence  Extension Primer
  Primer
caactcacctaaatcctccaaacaa

SEQ ID NO: 24420 - DNA, 25 bp, Artificial sequence  Extension Primer
  Primer
tcattctcaatattattgtcaagat

SEQ ID NO: 24421 - DNA, 25 bp, Artificial sequence  Extension Primer
  Primer
taccacaatgcaatatgacacaagt

SEQ ID NO: 24422 - DNA, 25 bp, Artificial sequence  Extension Primer
  Primer
cttctctgacattttgtcaaattct

SEQ ID NO: 24423 - DNA, 25 bp, Artificial sequence  Extension Primer
  Primer
caaaggtgccagaggttattcccta

SEQ ID NO: 24424 - DNA, 25 bp, Artificial sequence  Extension Primer
  Primer
attttaagaaggaaaatgatcttgg

SEQ ID NO: 24425 - DNA, 25 bp, Artificial sequence  Extension Primer
  Primer
cgtggctgtgtggctttggacaagt

SEQ ID NO: 24426 - DNA, 25 bp, Artificial sequence  Extension Primer
  Primer
gtctaatgttaggagttactttgta

SEQ ID NO: 24427 - DNA, 25 bp, Artificial sequence  Extension Primer
  Primer
ggtataccacctagcaccttaggac

SEQ ID NO: 24428 - DNA, 25 bp, Artificial sequence  Extension Primer
  Primer
agataaataaaaacttttaaagtca

SEQ ID NO: 24429 - DNA, 25 bp, Artificial sequence  Extension Primer
  Primer
tatggtgtacaggactatattggac

SEQ ID NO: 24430 - DNA, 25 bp, Artificial sequence  Extension Primer
  Primer
ctcttctttctggtcacattgactg

SEQ ID NO: 24431 - DNA, 25 bp, Artificial sequence  Extension Primer
  Primer
gttcttaaaattttatttcaattaa

SEQ ID NO: 24432 - DNA, 25 bp, Artificial sequence  Extension Primer
  Primer
ttcactttcaccagcgagggaagcg

SEQ ID NO: 24433 - DNA, 25 bp, Artificial sequence  Extension Primer
  Primer
ggcttctgtctgtaaacacagcaga

SEQ ID NO: 24434 - DNA, 25 bp, Artificial sequence  Extension Primer
  Primer
cgttttatgacccctgtaaaacgct

SEQ ID NO: 24435 - DNA, 25 bp, Artificial sequence  Extension Primer
  Primer
cacctaactttagtgctttcgtttg

SEQ ID NO: 24436 - DNA, 25 bp, Artificial sequence  Extension Primer
  Primer
gttgcaaagagtcggtcggacacaa

SEQ ID NO: 24437 - DNA, 25 bp, Artificial sequence  Extension Primer
  Primer
tattttctagctgtactgcactaaa

SEQ ID NO: 24438 - DNA, 25 bp, Artificial sequence  Extension Primer
  Primer
aactagatgttaatcagtgccagag

SEQ ID NO: 24439 - DNA, 25 bp, Artificial sequence  Extension Primer
  Primer
gctctactttttcctgcttactcaa

SEQ ID NO: 24440 - DNA, 25 bp, Artificial sequence  Extension Primer
  Primer
tctctgaaatgttttataggattgg

SEQ ID NO: 24441 - DNA, 25 bp, Artificial sequence  Extension Primer
  Primer
agctgtccacaacatcctaagagac

SEQ ID NO: 24442 - DNA, 25 bp, Artificial sequence  Extension Primer
  Primer
gtatatacatgcatatgtccttgta

SEQ ID NO: 24443 - DNA, 25 bp, Artificial sequence  Extension Primer
  Primer
tgaaggaaggcttgtccatcacttg

SEQ ID NO: 24444 - DNA, 25 bp, Artificial sequence  Extension Primer
  Primer
acataagtcccaagaaagtgaaagt

SEQ ID NO: 24445 - DNA, 25 bp, Artificial sequence  Extension Primer
  Primer
tggtgttatttgagaccaggaggaa

SEQ ID NO: 24446 - DNA, 25 bp, Artificial sequence  Extension Primer
  Primer
acttctttttaagactgatcttatc

SEQ ID NO: 24447 - DNA, 25 bp, Artificial sequence  Extension Primer
  Primer
cacctgagaagcccctgggaacata

SEQ ID NO: 24448 - DNA, 25 bp, Artificial sequence  Extension Primer
  Primer
ttaggaaatgtagtgagtgactaag

SEQ ID NO: 24449 - DNA, 25 bp, Artificial sequence  Extension Primer
  Primer
cattagaaactgtgattttcaaata

SEQ ID NO: 24450 - DNA, 25 bp, Artificial sequence  Extension Primer
  Primer
aaaattctgcttctcattaataaag

SEQ ID NO: 24451 - DNA, 25 bp, Artificial sequence  Extension Primer
  Primer
ttcggctcttctgattccatcaagg

SEQ ID NO: 24452 - DNA, 25 bp, Artificial sequence  Extension Primer
  Primer
tctactgcagagagaaaaagaacat

SEQ ID NO: 24453 - DNA, 25 bp, Artificial sequence  Extension Primer
  Primer
aagctgggaagtcaggaaggagtta

SEQ ID NO: 24454 - DNA, 25 bp, Artificial sequence  Extension Primer
  Primer
tgatgcagagctgaagtttaaataa

SEQ ID NO: 24455 - DNA, 25 bp, Artificial sequence  Extension Primer
  Primer
aggaccagggcctgaggatctgggt

SEQ ID NO: 24456 - DNA, 25 bp, Artificial sequence  Extension Primer
  Primer
tcggatgattcggacaatacgttta

SEQ ID NO: 24457 - DNA, 25 bp, Artificial sequence  Extension Primer
  Primer
acattctttctttgacaatgagaac

SEQ ID NO: 24458 - DNA, 25 bp, Artificial sequence  Extension Primer
  Primer
ctctcaaacagacagtccacagata

SEQ ID NO: 24459 - DNA, 25 bp, Artificial sequence  Extension Primer
  Primer
atgttttatgcgtggtctaattata

SEQ ID NO: 24460 - DNA, 25 bp, Artificial sequence  Extension Primer
  Primer
tgggactcaaacccaggtcttctgt

SEQ ID NO: 24461 - DNA, 22 bp, Artificial sequence  Extension Primer
  Primer
tcgcgttcttacagaaaagaca

SEQ ID NO: 24462 - DNA, 25 bp, Artificial sequence  Extension Primer
  Primer
tgtccatgtgctatgagtaactgac

SEQ ID NO: 24463 - DNA, 25 bp, Artificial sequence  Extension Primer
  Primer
agggttttttgacctgagcactatt

SEQ ID NO: 24464 - DNA, 25 bp, Artificial sequence  Extension Primer
  Primer
gcaccattcagctaaggacaatttg

SEQ ID NO: 24465 - DNA, 25 bp, Artificial sequence  Extension Primer
  Primer
tcaaatcaacatgtctggaaaatta

SEQ ID NO: 24466 - DNA, 25 bp, Artificial sequence  Extension Primer
  Primer
tcttcctctatggctttatctagca

SEQ ID NO: 24467 - DNA, 25 bp, Artificial sequence  Extension Primer
  Primer
cagtgccatttccatcactttccca

SEQ ID NO: 24468 - DNA, 25 bp, Artificial sequence  Extension Primer
  Primer
tacatagcattggcttgttggcttt

SEQ ID NO: 24469 - DNA, 25 bp, Artificial sequence  Extension Primer
  Primer
gatgggtctgaaagaatgtcattac

SEQ ID NO: 24470 - DNA, 25 bp, Artificial sequence  Extension Primer
  Primer
cttcacatgggagcagggctggaga

SEQ ID NO: 24471 - DNA, 22 bp, Artificial sequence  Extension Primer
  Primer
ccaaccacagggttagaggggg

SEQ ID NO: 24472 - DNA, 25 bp, Artificial sequence  Extension Primer
  Primer
cgtcctaggtcatcaccttgacatt

SEQ ID NO: 24473 - DNA, 25 bp, Artificial sequence  Extension Primer
  Primer
cctaggtcatcaccttgacattyca

SEQ ID NO: 24474 - DNA, 25 bp, Artificial sequence  Extension Primer
  Primer
ccttcagttcttgaggaggaagcat

SEQ ID NO: 24475 - DNA, 25 bp, Artificial sequence  Extension Primer
  Primer
attattcacaaagttyaaaagaagt

SEQ ID NO: 24476 - DNA, 25 bp, Artificial sequence  Extension Primer
  Primer
gtggattttgtgctgttcatttttt

SEQ ID NO: 24477 - DNA, 25 bp, Artificial sequence  Extension Primer
  Primer
tttttaaaaatactgaaatgggaga

SEQ ID NO: 24478 - DNA, 25 bp, Artificial sequence  Extension Primer
  Primer
cttgaggctcttttataagcgtcct

SEQ ID NO: 24479 - DNA, 25 bp, Artificial sequence  Extension Primer
  Primer
atttaagtggccttttccagttact

SEQ ID NO: 24480 - DNA, 25 bp, Artificial sequence  Extension Primer
  Primer
acgtggctgtttggagcctggtcag

SEQ ID NO: 24481 - DNA, 25 bp, Artificial sequence  Extension Primer
  Primer
ttcttaagtcagagaaaatatctcc

SEQ ID NO: 24482 - DNA, 25 bp, Artificial sequence  Extension Primer
  Primer
tgggaaattacaggagacacaggtt

SEQ ID NO: 24483 - DNA, 25 bp, Artificial sequence  Extension Primer
  Primer
aggcaggactgctgttttttggacg

SEQ ID NO: 24484 - DNA, 25 bp, Artificial sequence  Extension Primer
  Primer
agagcagtgaagaaaaaatatgtga

SEQ ID NO: 24485 - DNA, 25 bp, Artificial sequence  Extension Primer
  Primer
aactgcatgctcaataaatgctggg

SEQ ID NO: 24486 - DNA, 25 bp, Artificial sequence  Extension Primer
  Primer
tacaagtttttaattcctgtattta

SEQ ID NO: 24487 - DNA, 22 bp, Artificial sequence  Extension Primer
  Primer
ctgacctgttaaaaactgagtt

SEQ ID NO: 24488 - DNA, 25 bp, Artificial sequence  Extension Primer
  Primer
ttaatattttgccaggatcccttta

SEQ ID NO: 24489 - DNA, 25 bp, Artificial sequence  Extension Primer
  Primer
caacctttcttcaagactaggacgc

SEQ ID NO: 24490 - DNA, 25 bp, Artificial sequence  Extension Primer
  Primer
catctcatttgcacaacttcttaac

SEQ ID NO: 24491 - DNA, 25 bp, Artificial sequence  Extension Primer
  Primer
acaacttcttaacrttcttgccaga

SEQ ID NO: 24492 - DNA, 25 bp, Artificial sequence  Extension Primer
  Primer
taacttaacattccttactatactc

SEQ ID NO: 24493 - DNA, 1405 bp, Bovine  19866880174425
  misc_feature (1)..(1): n is a, c, g, or t
ngattcaaatgagatgaaatgagatgtattcaaagaacaacttctcaatgctagatagatccctagaactacaatactcaatggggctgacactgaatgtatgctttctgatcttagttatgtctgctgctgctgctgctgctaagtcgcttcagtcgtgtccgactctgtgtgaccccgtagatggcagcccaccaggctcccccgtccctgggattctccaggcaagaacactggagtgggttgccatttccttctccaatgcatgaaagtgaaaagtgaaagggaagtcgctcagtcgtgtccgactcttagcgaccccatggactgcagcctaccaggctcctccatccatggaattttccaggcaagagtactggagtggggtgccattgccttctccgtagttatgtctaggattccataatattatagaaggagggaagaaaggtgaaaggaagagagagagagagataaagggagggaggtgagtagggggagaaacaggagaaggggagagggggcgaaacaggagagggagagaggaggagagagggagagagtaagggggcagggagagaaagaaagagagagacgttgattgagaatctgctgatctgtgaaaatgcaagggaaaggttccagatcttaggaatggtaagaagtccagtgtgtttgctgccaaattttgcattagtctcaactacccggctttagccataaagtaactgctgtggtctcaggagttggctacaaaagaactctgtctttttggctaatatgataagaaaatcatttacctttcaaatttccaacagttctgatcctcttacaagggggcaaaaaagagcaaaatgtgggagagggagtatgaggggaagagagattatggactgttaatttgtaaagccacatgaggatggagggggataaaacaccaactctctgacttaaaatgcaatccttttcccattcatcctccattgtaccagagaagaactgtatctatcccatcattttccttgatgattggatgacatatatatactaataatatataagaatgctctgttttggattatactctgcaattcatggatgaacctgctataaaaaataatcagaaacttcaattaaatagtttctgaaaataaggctccctggtggcttagatggtaaagcatctgcctgcagcaggagacctgggtttgatccctgggttgggaagatcccctggagaagggaatggctctaccccctccagtattcttgcctggagaatcccatggacagaggagcctggtgggctacagtctatggggtcacgaagagttggacacgactgagcgacaaaaactttcactttactttttaattaaacagaggtgggagaccagaagcggta

SEQ ID NO: 24494 - DNA, 2169 bp, Bovine  19866880359188
  misc_feature (1)..(1): n is a, c, g, or t
ntgaagaagaactaaaaaagcctcttgatgaaagtgaaagtgaagagtgataaagttggcttaaagctcaacattcagaaaacgaagatcatggcatctggtcccatcacttcatgggaaatagatggggaaccagtggaaacagtgtcagactttatttctgggggctccaaaatgactgcagatagtgattgcagccatgaaattaaaagacacttactccttggaaggagagttatgaccaatctagatagcatactcaaaagcagagacattactttgccaacaaaggtccgtctagtcaaggctatggtttttccagtggtcatgtatggatgtgagagttggactgtgaagaaagctggatgccgaagaattgatgcttttgaactgtggtattggagaagactcttgcgagtcccttggactacaaggagatccaaccagtccgttctaaaggagatcagtcctgggtgttcattggcataactgatgctaaagctgaaactccaatactctggccacctcatgcgaagagttgactcattggaaaagactctgatgctgggaggaattgggggcaggaggagaaggggccgacagaggatgagatggctggatggcatcactgacttgatggtttgagtgaactccgggagttggtgatggacagggaggcctggcatgctgtgattcatggggtcgcaaagagtcgggcacaactgagcaactgaactgaactgaactgaatcatttatttaagcacagttcttgttgaggctcatttaaattgttttcaatcttttatgcttataaatgaagctgatataaccatctggtaactaaatatttgtactcagtcactctttcattctgagggtaaattcttgctgctgctaagtcacttcagtcgtgtccaactctgtaggaccccaaagatggcagcccaccaggctcccccatccctgggattctccaggtaagaacactggagtgggttgccatccttctccaatgagtggaagtgaaaagtgaacgtgaagtcgctcagtcgtgtccaactcttagtgaccccatggattgtagcctaccaggctcctccatccatgggattttccaggcaagagtactggagtggggtgccattgccttctccggggtaaattcctagaaccagtatttttcagttaatgggtaggcagtcttagctggttgcatgttcctaaaatatatgcactatttcactatcaaaatgaaagggtttcttttcttcctttccttacctctttttgggagagatctttggaaagacagagggagtagttagaagtttttaaaatataatgatgcggacttccttagtggtccagtggctaagactccacactcccgatgtacatggttttctgaaggatattatactcatataataacaaaaaaggaggatacaagtcaggtttgagagcctttttgtaagataataataataataaatgtccatatattaaatatagaaatgttccctctggtcagggaactaaaatcccacatgccacacagcaaacaaacaaaaataagctaccaaaaaagtaaaatatattaatacattggtgtaatactgggagatttcattgatcattaaattggcatcacatcccatatattttagtaccttgaattcagctggcttttattaaatgtaaaacatcatcaagtttaaaatgcatcattattttacgtaaaattaagaaataaatttttaaaatctcttccaattaagtcactgtgcaatgccttcatcgtccttttaaataccttgattgatcacaccatcctttgaaagtcccttcatctgttcccagggatttggcaacttctttttacctcttgttgcttggcttgatgtgacaagaaaacctttagcatgtatctaagtgacagaatgcaatacagcttcatctatcatggtttcttcctttttaggggttccgtcaagatctggttgttactttgcaagaaaatatgaaactggagttgttccctcagacaagaatttgcttcatgatgatcagatctccacccctctgctgtgcttgggcatctttctatgcacacagaaacttcccattcaatgctgactcttatcatggcatcatctttctgaaaata

SEQ ID NO: 24495 - DNA, 1740 bp, Bovine  19866880364794
  misc_feature (1)..(1): n is a, c, g, or t
nttccctgggagcagagaggcaaagcacttcacttggacaagtggtgggcaaggcctcttagagggaatggtactggaatctgggagggtgactggaatttagccagatgaaaaacaagggaaatggaataccaggcagagggagcatcatgtttgaagatctggaagtaaaggagaggacagcaatgcttagaaatgccagtcgcttgatataggtaaaaggttaaggaggtgagcttagaaggaagatgaaggagagacgagatcacgttaaggaatttggactttattctgcatcagaagccactaactttaaacaagaaagtaatagaggctgcactggagtgaaattacaataaaagaggccagctgggaaagattgaaggcaggaggagaaggggacaacagtggatgagatggttggatggcatcactgactcgatgaacatgagtttgagcaagctccaggagtcaggtgatagacacggaagcctggtgtgttgcagtccatggggtcgcaaagagtcaaacacaactgagcagctgaactaaactgagagtgggcatggccatgcctgctcctgggtttctttggaaacttaaatgagacaatgcatgagaaaagcttagcttggcatctggcacagagtaggtgcttcataaatgcctgctgtaattatgatcaaaggatgtagaaaagggacttccctggtggtccagtggttgaaagtctatcttacagtgcagggtgtgtgagccaggggaactaagatcccacgtgccaagtggcaaccaagtgtgtgtgccacaattatagaagcctgtgtgccacacaaagagcccacatgccacaactaaggcccgatgcagccaaataaataaaggacatgaaaagagcgctggactaggactcaaaaggccacagagttctaacatctgtctccatgtgctccttgtttcttgggacctcagtttcctcattctgcacagagataagtggaggccgggattctcacttccctccaacattgtttgtgtctgattccccaaatagtgtataactcaaactagcactcgaggctcctaaccaggctgagtgagcactttggtggagtcacgagctttgatgggggaggcagctcaggagacttttgcagaaagttcagccctcttatcggaggctgagaatctgctggttgccatgactacggatagcctcatctaagctctaggtcgctgattagcaggaaccgagcagggaggccttgaggaattcagcactcagggctccctccctccttctgtgaagcggagtgcgccagcccttgacttcactgttttagctgtcccctgaagatctcaccttcttttaagtattttttttaatgcaacatcaaagggcaatgtagtaaaaacaaggcagctgccggtactcctcagcaacgatggaacacaggatttttcttaaagccctacaaggatgtaaagctggaagcaaggaaggaagatgggtggggccaagggggtgggcgtgccaaggctgaggtctgagtcctctgaagtgctttgtggcctcagacgggtccttctccctggacctctgcttatttatatatgaggagaagttgcatctgatctatggttctcacatgagatcggacatcagaatttatttgtaaattccttccttccttcattcaacaaacgtttcttgagcaggaaggcacgctatgccatgca

SEQ ID NO: 24496 - DNA, 1461 bp, Bovine  19866880399503
  misc_feature (1)..(1): n is a, c, g, or t
nctccctgtccatcacaaactcctggagttcactcagactcacgtccatcgagtcagtgatgccatccagccatttcatcctctgtcgtccccttctcctcctgcccccaatccctcccagcatcagagtcttttccagtgagtcaactcttcgcatgaggtggccaaagtactggagttttagctttagcatcattccttccaaagaaatcccagggctgatctccttcagaatggactggttggatctccttgcagtccaagggactctcaagagtcttctccaacaccacagttgaaaagcatcaattcttcggcactcagccttcttcacagtccaactctcacatccatacatgaccacaggaaaaaccatagccttgactaatagaggctagtaatttggatgcatacagtatcgtccagcagaagtcaggagcatcttgtagccaaacagacgtgggtccaaaccccttactagcttagtgaccttgaacaaatcacatcatctctctctgcctctgtgtccccatctacagattgggattgataacagagtctaaccctaggaagtgctgaggattaaatgggattatatacacaaaacatttagttcaaaatccggcacatagtaaaatacataataatcatataataataaacatttcctgtgtgctggctgtacacaaaatgctaagtaatttaccctaatttacttgtttaattgacaattctaattgggtaagtacttttaccattttacagatcagaaaagtggcccagagaagtgaaatcacctacccaaggtcacacagctaccaaatggccaggataggaagaactcaataaagggaagttgttgataataattattattaatcatccaaaagggagggggatttcatcctcaggtaagggcttgagttcccccacctgacctccagaaataaaaaggcctggtgaccaactgaataaaacgctagacagaagggtcaaacccggcggagctcagcaggcccctcagcggctgtctcctctcctccaggtcctcctcgcgctctcccagctattcctccaagtctggcaagagaagcccgcctagcagaagctctaggtcgcgccgcagcccaagctactcccgctacagtcccagcaggtataggccccgccgccaggcactgaccccgcccctcgagctaggctccacctccggccacgttcctttgttcaggtccagaatctgcctgcaatggaagagaccccggttcaattcctgggccgggaagatccgctggagaagggataggctacccactccagtattcttgggtttccctggtggctcagctggtaaagaatccacctgcagtgcaggagacgtgggtttgatccctgggttgggacgatcccctggagaagggaacggttacccaccccagaattgtggcctggagaatttca

SEQ ID NO: 24497 - DNA, 1683 bp, Bovine  19866880407603
  misc_feature (1)..(1): n is a, c, g, or t
ncttagcgcctcgtgctggagtagctgtctgctgagctgtagctcccactccgactccgactccggctccggctccggctgcggctccgggagcccaggctggggctgcgggagctgcagctgctgctagagagggtccttgctccggctgcggctgcggctccgggagtagcttcggctggctgagcggctgctgctgctgctgtaccaggaggaggtgctgctgaggccgctggacgaagaggggctgggccggtagtaggggatggggcgtttccgggcactgcagagatcagagggggaaagcgtcagggcaggactcctcccagctgcaatcccgggagcacaaacattgtcccaggagacatgtcccgtctccttagcagggaaaaagaattcctgttactcttcccttgcagtcctgagaacatcaaggaggtggtctcagtctaatgctgatatgctttgaaaagtgataatctcgcttttttaacatagcaaggctgggctcagagagagcatccagctggccacagaatctacatctcagctttaatcacagttttgttttgctatttttatttttactagaaccttctatttatggcaaaagaggttgatttttctatttattatagtgtatcaagtttcgttttgaaataaatgtatggacccccaaaaaaggcgtatctatttaaagaaatttaagtaagcagtacacttaatcagataaggcaaaagtggtgggtgatggaagcttgggaaacattgaatggattcactcaggtggattatttggggttgagtacagaacccagagagcctttttcttaagacttcctccaagtccactccaaggatacctctgaaagtcaaggcagtgagtgtaggactcccacaatatgtcctaggccaaggcaggctgttcagtgagacatctgagaagatgacaccattaccctgccttactgtctggggcacaagctcttttttctccttcaggtcatctctagggagaaggcatgggcagccaggattctcctttccttgtgggtctctggactgagtagctgacccttggaggaccagaaggaagacccacaaattttcaagagccatttttagggcagcattcagccattttctccatttcaaggcctgaggattctcagacttcaggattctcttctagggcttttctcatctaagactacctgttacagaaatctttacctaccaagtctgaccattcagtccatcacaatggcacacaatgtgttctagtgctctgcatttaagtgtataaattgcattcatatctctttgcctcttttcattttatccttttgacacttttaggagttatttcctccagcagttcatgggtgaaaaaacttaagattctgggaggtgaagagacttttccagctcactcggaaagtggcacagacaagattcctctccaaaatactggtcttccccttacccaatagcgcaccccactcccccacccccttctggtacctaacaatcctgttggccctctctacagttggttcagggtataattacctacggttgtattcaagccttgcatctgggcgcgtgagtctaaaggtagaggtgtgttgctactgcctggctccacccccacgcaatgtcctgggttcagttccttgcttg

SEQ ID NO: 24498 - DNA, 754 bp, Bovine  19866880408587
  misc_feature (1)..(1): n is a, c, g, or t
nttccagctttctttaaaagcacctgcagtgcagttttctttctggtcctccaacaagagggcagagccatggcccacgctctagagaccaacatgaagcctgatcagagacgcacgttggtgtgcccagcagacaccccaagagctccgcttagtcacctggcacgacccctcacctcccctgtgatcatgaacaagccctttcaccgcctgacttaggaagaaaggggcctgagagcctgcctcctttcctttgaaatccagtcccatgaaacgtgggagaatctccgtgatttctagatcctactaagcgcacacatctgcttttgttcacccacagtgtgatccagctttgctccctgagcccaaccacgtcatgttgaaccacctctatgcgctctccatcaaggtaaggacccgtttgttactctctgagccgtgtttcttgccctgaggcaaccccccccaccccagtgctggaacggcctgaagtccttacctggagggcagcttccgggcccaggcacttgtgtttatgccaccctctggattctcgtgttccctaaaatctgagcatatttccaccctcttcctcaggatggagtgatggtgctcagcgcgacccaccggtacaagaaaaaatacgtcaccaccttgttatacaaacccatatgaagaggtgggagccgccggggccccggggcagcgtgcacctccaggctccacgcatgcatgctcttcgctagacggaacg

SEQ ID NO: 24499 - DNA, 750 bp, Bovine  19866880472171
  misc_feature (1)..(1): n is a, c, g, or t
ntgaaggaggcgggggtaaagaatgaattaaaattttttaaaagctgttttttggtaaagcactgggaagtgttctgggctcctaaatttaaaggagtatttttagcacctgtaatcaaaccgacttgcataaacacatctgctggaatattggcatcaaaatgtctttgccgtcttcattttttacatttcttgcagccctcctgggacccagggagagtttcactgattttcttcctttcattatgtttttccaaatcaactgagtgagaaagtcaaatggaatattttctttttcattgaatgctgctgagtccctacctgaagagtggccacaaagtcttcaaactttagtgagtgtaagaatcacctacaaactttgtatcaaatgctgattcctggaccttaccctcagattctagagggccatgtgggcctgggattctgcattttacacacgtttcaactgattctgatgtaagcagtccggggaccacaatgattagtactgggctagggactaaagcagatttagaataagattctggttccatcatgcacaatctgttgactctgggcaagttccttgaccttttgaaatatcaatcacctcatctgtaaaatggactattaaggatacctattccataaacttgtcatgaggattaaaactgatgtattaacttggcaccctgtcgggcatgcaataaatgaccccataaaaatgctaactcttatcattattattaa

SEQ ID NO: 24500 - DNA, 2860 bp, Bovine  19866880522560
  misc_feature (1)..(1): n is a, c, g, or t
nactgggactcaggtggcttggccctccctcctggtgtgggtggcgaactccaccctgtgctgtctgcccaatctcctagatgtcccctatgtcctgaagatggagtctcaccccccaaaccacctgctggcctgggaggaccctctacttgctggctcccagctttcccgacaagcagcgctgggtcaccgccttagagtcagttgtggcaggtgggagagtgtctagggaaaaggcggaagccgacgctgtgagtatgcacgcgggccagagcttgtgtttgtagagggggctgactgggtgggggtcccttcagcctccccctctgaagggtgatgggattgtgtgcccctagagatccaggcttccaggcagggtctggcctcacaggtccccccgcccgaaccctctagaatgagggattcgccaccattagccagctcttcagggcatactaggtctcagttctggcagcacagctgcaaattacttagaaggaaatgctctctctcctttacccagatgtgtttacgtggttcaaaggcttgtgttacaagcagcacaaagggctgccgaaagccatgtctctttcaggaagctttttcataacctgctcaattgcttttacgtgatctgctcttccaaaggcaggtctgaaatcctacttctcctgaagatgttagagacgtgggtaggccttgattggcatcactcctcctggaacattccaggatacaaacagtgctcatcacgcactggcatttccaccaccaaagccccaacagctcttttcaaacacttagctcctaataaacactttaagtgttagcagtcggaagtccttagccaccagcctccctctcacgagaaagcgctgtgttgatgacccatctcccacgtgtgagcctttaactgaacgccccatccatgtgtgtacgatagggccgtgactgtacttcctacgagcctctgcccgcgtgggctcaggtaaagagactcaggagctggttgatttgccactgacactgggctttgcacttgtgctgccgcctggaggggcaggagcgtccacgtggcttattaaccctttgcagtgacacccttcagctttggcttgttttgtgtgacagaatctatgtctcctgtgctcatttagttatgcatctaaacccagttatgtccccgacgctaattaaccaccacccagagacaccagtaacattcaggtcctgccttttgaactcagatcaaagtagggggcaaatcaggagcaggtgtgtgcttctgagtgtctgcaggagtaacttgcccttctccctggcattaaactttcctctgttcttgcttttgtctctctggacagttcagtcacgaacagttcagcctcactgtggcctccttttttctctctcttctctttcacatgtgaaaagaaattgctcggaaactccctgttgaaactggaaggtgatgaccgtctggacatgaactgcacgctgcccttcagcgaccaggtgacgatgctttttttgggcaacgtctgctgggatctggccatagccgcacgcgttacaggaccatgtcaaggggtggtaatggggacatggccccgctcatgctcttcctggggacttgtgccctggcaggtggtgctggtgggcaccgaggaagggctgtatgcgctgaatgtcttgaagaactccctcacccacgtcccaggaatcggagcagtcttccagatttacatcatcaaggacctggagaagctcctcatgatcgcaggtgggaggccaaggacacagcgctttgccttcacttgtaggggaaacgatttgaaactcacatgtcatgtttgtcaaacttgggggcgggctggagcaggaggggctcttccctctgggtccctgaaggggcccgagcccctgtgctactgagagcctgcctgccctgccgtgtgcatcgcccgtgctccccagtctcagacccttcctttgcatgtagcactcagtaacagttcaacacatatttatttgtctcttcctacacacacacacacacacacacacacacacacacacacacacacacacacacacacacacacacacacattctcacttattctgaaccacgtgagaatcagttgcagctctgactccagattcttcagccagtcagctaagaacaggggcattctcttacatacccagggcagaaaggctttattctcctctctttattggtaattttttttttttaaaggaaaacaacaatgcattggcttcacgttcaaaacattcacagtcaaatcttaactcaggcttggctggctggatccatatggtcaggaactagctttgcttgatctctcggtgcttttcctctgtcagcttgttttctcgcttgctttctttttcttcacttccatcttgatattttccctgggcgcagttttaggttcacagcagaaggtagagagaattcctgtgtacctctgccatcacacacacctggcacctgagtgggacatgccacgccaaggccatagtttacattggggttcactcctatgcattctgtgggtttggacgaatgtgtgacaaacatctgccactgtgacatcatacagaatagtttcacgtggtacgttttcttcttttctttggtcacatggcatgtgggatcttagttccctgaccagggattgaacctttgtctctgcagtcatagtgcggagtcctaaccactggactgccacagaactcccatgtccactgttttatattataaaagtccctcactgactcccaacacaaacgttcttgactttggtggggaacacattgaacgttcagttca

SEQ ID NO: 24501 - DNA, 1636 bp, Bovine  19866880525139
  misc_feature (1)..(1): n is a, c, g, or t
ncacatgcatacagtcttctgacttgggttcgcagagaacatactttgaaacccttagaatttcctgacacacccacgaaacaatgcctgctcaaagtgcttgttaaaaaatagggtttcctctagggattttggttcagcgtgtctgggatgaagaccataaatctgtggttttcacaagtgccccagctgattctgatctttgggatgtttgggaaagactgttagaggatttttagaaaaggtcatcttcctaaacaatgttatgatctgaatgtttatggtactactattgcccctctacccgcccgccaaattcatatgttgaatcctaacctttcagaggatgctgttaggaggtggtggcctttgggaggtgattagatcatgatgggggagccctaatgattgaaactgatgctcttgtaaaacagaccctggagaactagcttgttctttctaccacgtgaggaggcagccgtctatgaagaagagagtccttgctggacactgaatctactggcatctggatccaggaccttccagcctccagaactgtgcaaaataaatgttgttcacaagctcctcagtttacggtattttttgttatatcagtctgaacacacgaagacatgggaccaaagggcagtctggcccttgaggctcggggctggaaaggcaggctttcaggggtttctaataagcccagaactctatgtctgtcttgatgggagcagatttggtgtctaaagtgaaacaggaatccacatttttaaagtgaatcaggcaaaagaaaacctgcagctttccctaactgtctctgtgcagctctgcagagaagcctccaatatttgctctttgtgacagattaaggagacttttctcctagaggaatggaagcagatgggaaatttcaacaggttcttgcactgtaaccatggttattttatcattaaagtgaatgcaggggccaggtgaagagttttgtgagaaccaggttctcgtgtggtttagtctttgagtgcctgaagcgagtcatccttctccatctatgagatgggacaaaggaattgggcactggttaatctatctgtctcagcaaagtgctgcaaaggttccccaggacactgcacatgaaatcaaagcagccaccacctccactgtcaccaatctttacatgcttacaatatgccaggcacaggctaatatgttaaatgcatcatctcactaaatgcttaatgtgacttggtggcgtagacattatttccataataatgaaaacactttaccaggaaattatcatttaattctcattgcagccctttgggataggttattaaggagcctcatttaacagaattggaatcaggctcagagaggtgaagcaacttgctcaacagcacacagccattaactcatggaaatagagctcaaccctcctctgcttggtcccactgccaatgcctggatgatacacaagctcattctacagatgagaaaactaaggtttagagaaaggctgagggacttgttcaaaggcactacgtcttgagcccacgtcagtctgattccaaagccagtgttcatgacgtgagtgctcacacaggggaaggagcttcttgagctgatgcttcat

SEQ ID NO: 24502 - DNA, 2046 bp, Bovine  19866880529851
  misc_feature (1)..(1): n is a, c, g, or t
natgtgagcccagcgtctgatagcctgcccccacctagtgaagagctgttccaagataatgaagtatagacagcagcatgtgtgagagacacagagaatcctttagatgttccagtctcaagttctggccgtccctgtggccaactctggccaggacgttcctgtggtttcattatgtgagccagtttattcaagctaattcacgttggatctttgtctcttgtaaccattggaattttttatatacagttttttttaatatttatatttctttatttggctgtgccgggtcttagttgcagcacatgggatcttcgatcttcactgtggcacgtaggatctttagttgtgacattcgaactcttagttgcaatatgcaaactcttgttgcagcatgtggactccagtttcctgactagagtccacatggaaccccggaccctgccttgggagcaccgagtgcttagccactggaccaccaagtttggaagttcccaacttgggatttttatttattgtttttaactaaactttttattttgtattggaatatagctgattaacagtgttgtgatagtttcaggtggacagcaaaggaattcagccatgcatatacctctatccactcccaaccattgaattttgactaagacaccttagcaaagacataaagagaattcacataatgaacaggaacactggtaaatttttcactcataaatgttctgtgcaaaccacatgggtacaaatccacctatattgtaaattctagtgtggctctggaaaactaagcagatatggctgcctcttgccacatacagataaaacccacaatggctcccattggttcaaaggatttatacctcctgaagctttcacatccattacctcatttgccttctaccaaaactcaaccagacaagaaggagactttagcatccccatttccaggtgagaaagtggagacaccatatggctaaatgacttttttatgtaatgcaggggtttggatcgagatcagcagttctcaaattcaatcagtcacgaactgtgtcatgactgatttgatgctggtggttaaagtaccggagcaggagaatgattcatctttttaaaaataacacattatccttgtaacaacctaattctccccagcagtcggtatgctttcctggctaggagaaaaggagtggggttacagctggcataatcggaattcccatgggagtgttatgcatgtgaatagtcaaccatgtgcattccaacagtttgggggaataaaaaaacagttgagagttaatggataagccaggcctggaggttgcttccagctctaaaactggatgattcacccaaaataaactatgagttgatggcatacaagatcaaaacaaaccacttttccctgtccatggatcttattaaggatcacttactttaaagcgttgtaggttgatcataagatgtatcatccaaaacaagatggttttgttttttaaatatttatttatttggctctccctggtcttagttgcagcacacggcatcttcagtcttcactgcagcatgggggatctttagttgattagctgcagcatgtgggatctagttccctgacaaggatggaacccaggccccctgcataggaagcatggagccttagtgaccggaccaccagagaagtccctaaaccaggataattttaggagaaaagggggcatcaatggaatggaacatcaggacaacatattaaacgggaatgactcgatggacatgagtttgggtgaactccgggagtttggtgatggacagggaggcctggcatgctgcaattcatggggttgcaaagagtctgacacgactgagcgactgaactgaactgtgtcgaacgaatcaggactagaatcaccctacgtatatgtaatgcaagatatgtgtgcttcagtcatgtccaactctttgtgaccctgtggattatagcctgctaggccccatctgtccatgggattctccaggcaagaatactggagtgggttgccatgcttg

SEQ ID NO: 24503 - DNA, 1244 bp, Bovine  19866880569696
  misc_feature (1)..(1): n is a, c, g, or t
nccattcctctgaatcagcaaagcaccagctgtactctttgacttccttggggtggttgaataccagaccttgacaacttcccaaaataaatttttcatccagagggttcagtctgcacctcctttccccaaccactcttatgattttgtactttatatctttgaatcatagaatgattagccctgagaggttcaaagactcaatccacagagaaggaaactaagacacagaaagaaggggggtaattcactagaagtggcaaaagcatgaaataacagggctggtccagagccccaggcatcctgcctgtggcatcttcccattacaatagactgcttctcctggaattctgatctccaccacgtactagcttgtgatctttaaccaagttactaaacctttctgagcctcagttttctcatctgtaaaatgggaacagtagtgacactcacctcaaagggcttttgtgaggattaaatgatttaattcatgcaaagtaggaagcacagtggcaggtacatagtaaacactccataatggcagctatcaccctccttctcattatcatcacgcagtccccagcacacgttgatcagtgagtggttgtatgtgtgtgttaatcactcggtcatgtccgactctttgtgaccccgtgaactgtaacccaccaggctcctctgtccatggaattccccaggcaagagtactggagtgggttgctatttcctccttcatgggatcttctcaatccagggattgaacccatgtctcctgtttgcctctcctgcattggcaggcagattctttaccagttgatccaactagggagccaataatataatggcatgtctgctactgtttccgccaactttattgtatttttgagcaagatatctctgcctttcaacacctttgtatctaaaatgaaagtattgcacttcagttgtctattcaataaggcatacattagccacacatagctatttaaattaaaattaaactaaaacttcagcttttcatttgcactagcaactttttctgatgctcagtaaccaaatgtgaataactctcttattggatggtgaatgttttagaatattcccactatcatagaaatttctggagctgctactgatttattgtcctcctctctggctatgttgtacaataattcatatctggcttatcatttggcatacataaatgtcatgtaaattaaaatgttacatgcaagatggaagaa

SEQ ID NO: 24504 - DNA, 944 bp, Bovine  19866880599886
  misc_feature (1)..(1): n is a, c, g, or t
ntagtctctgtgaaatggtgttcccattttaagtaggctgccttttcccagcactaattatgctcagataacgagggccccggtaccttttctgctcgagggtgagaaggaactgactttgaaggctgtgtgtcagttctgtgtttctggatcttgcttctgcagaggggtggtaagggccaagcctggtgagatcttcatttgaaacatgaaaatttctctgcaaggcaggccagggctgggtggagggttagatcgttcacaagaaaaggtcccactactttcaattgctcatgttttttgagcctagtccgctgtttgcattggccctgctctgtctcctaattggatcaggtttgagttctacacctctagcacaaaggctcttggaaagccacctcgagaggtgaccgacagaggcccaaaagtggggcagatttggcaactgacagtaacgagtacaggcttaacccctaaaggaagacttcctgtgaactttaggctctggaaattactaggtcagcggggtggagtatgcgaattacgatgtcaaactgacctgtactggagtcctggcctctctgcatctccgtcctcttgtctgtacaatgagggtcacctgttcctggcatgccgagctgttagcatgatctgacgagcttacacagcacttgacatggcaggtgctcagcagaaagcctgccccgagactaggaaacttgacttctctttgctgttagctctgccttctttctgtccttactctcgaggtaaacacaaagcctgaaggactccaggtggggatctgtttctaataacctgtggtgagatgggcatggggatggctcagctccccacctccctctcctgttgtcatagccccaacaagcgaggcccgccgacgtacaacgagcacatcaccaagcgcgtggcctcaagcccgg

SEQ ID NO: 24505 - DNA, 1613 bp, Bovine  19866880637555
  misc_feature (1)..(1): n is a, c, g, or t
ntggtcttttccagacacattcttgggagtgtctagcatagtcaaccattggagaaggaaatggcaacccactccagtattcttgcctggagaatcccagggacagaggagcctggtgggctgctgtctatggggtcgcacagagttggacacaactgaagcgacttagcagcagcagcagcagcatagccaacaggtattatttcaagtgatggttaaaaatgagtcttttatggtagggagttcttactgttgtttattttttaagcctccttcccaaccaccatggaacagttctacttattttagtaagcgtacatatgatttttgccattaatgtattcagtatcaattatctacttgcacacagctctgagtgggtgtgtttcagcattgagaattttcttaagaaaatgaactctgaattttaaggtttcttttatcactttctcattttagctggctacctggggtgaagaaaagcgcaaaagacgtctgatgctgcttttaacttttggcttgagtcgtgcagattagatttaactttaatgaaaaaagaggaaataaactcgaagtgtatgtgttcatccaaatttataggtctgagatgagaagcttgagttatttttaataatttatcaaaaatgcacttgtcctttttgctgtttgatatctcaggtattgcttagactgaaataaccaggccaataaattgatgtactgatcgttcctgggcaaaaaagtcttttaaacctcatcaacctcccctgagcccctttgcttcgacagtatctacctctccctggtcagcccctgctttcccctcctcatcacaatgacatcctcaccagcttcagcatggtaatgagctggctccatgcctgcctcttaaccttattttctttcatcagagaggctgtttctcaaaatcctgcttgtgatgaactaaccttggaggtgctctgatttataaaatttgcctccctaggaagacttcactttcacttttcactttcatgcattggagaaggaaatggcaacccactccagtgttcttgcctggagaatcccagggacaggggagcctggtgagctgccgtctatggggtcacactactgaagtgacttagcagcagcagcagcagcaggaagacagtaggtggttcaccctcgcctctgtcttagtctagaaggagttaaggccatgagagattaaaaatatctttgataaaaacatcctagatctggctgtgtatcccaaagaatttaaagtaggatcttgaagagctatctgtatatccaggtccatagctgcatgattcacaatagccaaaaagtggaagcaatctaagtatctattgatggatgaatggctaaactaaatgtggtatatagacataatggagtattattcagccttaccaaggaagaaagttttgttttttgcttcaacatggatgaatcttgagggcattatgctaagtgaaataggccagtctcaaaaggctcttatgtaaggtacttagaagggtcacatttctagagacagaaagccgaatggcagttgagttttcagggttctggggaggaggaggaagaagaaggagttactt

SEQ ID NO: 24506 - DNA, 849 bp, Bovine  19866880647430
  misc_feature (1)..(1): n is a, c, g, or t
nataaagcttccttatttcatatcaggtagacattcaactaatttgcagttaggaatttctgctaggcatctggcttacatttctactgctgcttcacagaatctccctgtgaaggaagtcccatggagatcacctctttgcttaaatagccacctagaacccttgccccatggggtgataacctttgctagctgtggtaagagccccagaatctggaccagtgctcagcacagaatgagccttggaaaaaggttttttaaatgaacaactaatcataaggtctttaccagagagttgagctttcactataagagaaagaaaaacaagcattctactcttttaactgagtcacaaacatgtcctttctactaacttcagctcacatatgaggtccctagtagggctggacaaagcaaggattctcagccctttatgaaaaagagtctggcatcagtggccacgggggggcagtgatgcgcacactccctcacctgtctgatccttgggaggttctagtctgctcaggctgatccaaggtgtccctggagttcttattctctgaagccaaatgccgatgaatgtacacccctcccctacccacaaatcagctgatcactcctgattgtcattctgcctcaattctgtaacttctctattgtctgccttgaattatatataggtagtcatttgcctagagatttcatctcctctatgaacactagttctttttttaagtaaaagataacagacttacagaagagctcccagtcatcaaggtagagctagatcaatgcatttctatcagattaaagaaacagaatattctcaatactttagaagcccccacg

SEQ ID NO: 24507 - DNA, 1350 bp, Bovine  19866880697732
  misc_feature (1)..(1): n is a, c, g, or t
nctgttagaatactgggaaacttctggtactgactgttaggtagcagcagccacttcccaatttcccagccatcctgctctctccaccgagtttctccagacatctcccatgatgcagggtatcactaggctcaagatggtatccttgtgcaaaggcacagaatctttctgtgccctttggagagatgtctggtccattgtaggaactcaagaaatctgtattggctgaatgggtgatgaatacatcagttttcctacagaatatgagttcactgatggcatcctggagccccaggcaaaggagaggtgctcagagagtccttgctgctgagctgaaggtcagatgctatccctctctcttattataagccctctttatcataactcccactgccgagacttcccccaaaagctgtgctgtagcccaaagaagactggaaatctgcatttgtaagttagggatagaatgattcgatccatgccatgaattgcaggtttccgtgggaacctctattcttgactctgaaagcacagcacttcagtaataatcacccttcttcgtggactatgaagaggaatgaggcatatgcagacaattacaagccagagaaactcccagtaaaccacagagctttctgcttccggaaccttccattaattcttggatctgggccatcttagcaacaggctgggagacttgcctccccagggagtcttgctatcaggcctcttgtgtgaatgggagagtgagagcttgaaatgatgccaggggctgccggcagggagaactccagaaccctgcatcctgaattcttaacctgaattcttaaccctgtgtgtccatcagaaacacttggatagtattaaaaataaatgccacaggcttggccctattctggagagacttcaatttaactggtgtaggagccagacaccagttttttaaagtagacattgtggtaaaatgtgcctgacataaaatttaccactgttgagtgtacaattcaatggcactaagtacattcatgttgtgcaaatatcactgtcattaatcatctcaaactgaaactctgttttcattaaacactcactcctcattcttcccaccactcctccccattcccagcccctagcaatcaccattctatgtcctgttcttatggatttgactactctaggaattttatgagttgactcatacaatggttgtcttctatgattggcttatctcgataagcataatgtcctcaaggttcatctatgttgtagcatgtgtcagagcttctttcctttttgaggctgaataatatttcattttatggatatgccacattttgtttaccactcatt

SEQ ID NO: 24508 - DNA, 4711 bp, Bovine  19866880756771
  misc_feature (1)..(1): n is a, c, g, or t
nttgctgctgctgctgctaagtcgcttcagttgtgtccgactctgtgcgaccccatagactgcagcccaccaggctcccccgtccctgggattctccaggcaagaacactggagtgggttgccatttccttctccaaatgtaaatgacattaagaattttcatctttgaaagctgtgaggagattttaaacgatttcaaagatggtaaggatgattcgagatgatttattccacatgtccctcttattgtagtgtctctcaaatctttagctctggcccaagccttttccttgagttttcccagctgtatattcaaatacctgttagacaattctcatagttgttcccccaggcactcagagccagcatgtcccaaagtgaattcataaccatcgaccctaaatctgattctcctcctccatcccttcgccttcttttgtctctttataaatggaacgtatggcagaaacttctagttgcctctgaatagtcattcacctttcttagtagtagaatcttgggcaatcttcataggaaatcactatattactacatttcccagcctcaccacagctagctgtggctacatgactgagttcccgctgaagagatataaagtggaagttttgttaccaggaaatctctttaagagggctccattttgtaattccacttgttctccttcttatactctgaaatgcaagtgtgatggatggaatgcctgcagccattttgaactctgaggttagaacatgtatgacaggatggtagaacagacagaaagaaccaggttttctaagtattgaagagcttccaaatagccctggactgcctatctccagacatctctcacctgagaaatagtcttctttcttgtataagtcactgtagttttggattttctgttattcacagctatgccttattttaagtgatagccagaatcctggaattccttccctacatctaatcttataccaagccctgtcttccagcaatcctggctccaatccatccccttttgttattctcttttgaatcatgtcatctcttaccagtatgactacaatagcttcttcattgactccccacttttaacctctccccactgatacccatgctcaaagaatttccatgtttaaattaagtaatctttctaaaactcaaaatggtcctgatacttctgagaaatcatggaatcacagacacttataatacagagtttaagaggccctcggaggtcatttaatctggatttttaaggtttattttgcttggtgaaaaaggaaaagcaaatgaagtagttttccatggtttttccaatatccatgtatggatgtgagagttgggctgtaaagaaagctgagcgccaaagaattgatgcttttgaactgtggtgttggagaagactcttgagagtcccttggactgcaaggagatccaaccagtaaatcctaaaggaaatcagtcctgaatattcactgaaaggactgatgctgaagcctgaaactccaatactttggccacctgacgcaaagaactgactcattgaaaaagaccctgatgctgggaaagattgagggcaggaggagaaggggatgacagaggatgagatggttggatggcatcaccgacttgatggacatgagtttgagcaagctccaggagttggtagaggagaaggaagactggtgtgctgcaatccatggagtcacaaagagtcagacacgattgagtgactgaactgaactgacgggccttttgctacaaacagtaaacaattccatatataaagtatagaaatgcacttgtctggagaagacccacagttgtcagcagcttctcacagatgttcaccaaaaatgaagcatctctggtaagtctaaccacctcactttatatatggggaagctgagaccagagaagttaagcgacatgtccatgatcacagagaggttcaatggcagaactggaacataaccttctattttctccaaacaagggttaccaactggaagccagtaaagatgctgagccctcctacacatcttcttaaggactgtctatttccactcagattactcaaattggactcacactggtgagggctggggtgtaatctgtacctgtgaatacaaggaatcttagcatgcttattaattatatacatgtctgtttacaggagaataatactatgaacccattaagcaccattatcaatgcatgatctaatactttcagtgtaataatgtatttcagaggaatggaaagaagtattctaaagttgatgaaaactgaattattctgagctagggcgtccttgaaacagtgataatagtttttctggggaatttcttcgtggttaggagtccatgcattccacagccaagggcccaggttcaatccctggtcagggaactaagatcccacaagacatgaagcacagccaaaaagaaaaattgttctgacttccaccacatctatttggaatggtgctttacactttacatataattttcacttacttttttaatttttattattttttttaacccttgtttcattctagaaatctgagaaggagggcagagaaagtagagtgtactagttgggaatattcggagaaggcgatggcaccccactccagtattcttgcctagaaaataccatggatggaggagcctggtaggctgcagtccatggggtcgcgaagagtcagacatgactgagcgacttcattttcacttttcactttcatgcattggagaaggaaatggcaatccactccagtgttcttgcctggagaatcccagggacgggggagcctggtgggctgccgtctatggggtcgcacagagtcggacacgactgaagcgacttagcagcaggagcagcagcagcagcagcagcagcagcagcagttgggaatattttggttgcaagcgacagaacacccaacctacattagcttgaggaaaaaagaaaattgcagggggcaggagatggtaagattattgtctcacataactgaattgccctggaattgaggcatgattggatcgaggggtccatgctgttgttaaggctctggctttgtttccatatgactcttgctgctgctttgttggcttcatcctcaggttgactcatagtggctttctattctcacatcttcaaatcacaaagcccagaatgggagcagatgagttcctgtggcaggcctcatggaggacagaacatctgtctgtcccagaaatatcagaaaaacctctcctagtgtcttcctggtgtgaactgggtcaggtgcccgcctctcaaccagtcacaatggatgatggatataggcacttactggtttgagccaaccagagcccattctagaacagagggtgggatccgttccaccaaaaacaacagagcaaaggatggtgggggtggagttacccacagggaaatgtgagtaagtgctcctggtgggaaagagtgagtggtctccagaaacaacttacagtgttcatcgtaccatggacgggagaggttacgagtcacactcatatgacacacagattctgacacacaggacccgacataaattcacggcttttttgttgttgttatttcaaactttataccatcaacagcttgtctagaaacctgaagaattttcctaccattcatacatatctaccagctctgttcttggcaaaaaaagaaaaagaaaaagaaagaaaactcatgacaattaagctgagccaggaacttcctgtccatgcccaatcaaaacacagagcccaaactccaggtaataaaggcactgagacggaacttagcattgtcctgataaataggaattcccttcagcgttatcataggaagtagctggacagaagcaagttctgggtattttttttctgaacccacacccttgtaagtcaagttaacttcagtttaaagtcagcaagtcagttttatgtcacaaatcaaatcactctatcacctccccaatcacacgggtttttctaggatttcaattcatttatatatgaattgaagtaagtccccaggttactacaacagagcctgaaactaacctacaatgcgcctagctccctgtattattagtatcagaggaggtatattagtatttctaatttacaaagaaaggcgctgtgactccaagagctaacagcagtttctccaaagtcactgtattagaaccactcagcctttccctcctggatgcatccttcattactcacacagtacacttcacttccgacacttctagtcaccaaaagcgcgtgggtttttcctagcaagcaattctccaggacatccactggatgtcctacaatttgtctcaattctaacgccattcacctggagtagagtcgatcccatgggttaagggctcagtcccacccactgctcctaccccaggtagtaagtcctcaggttacccacaacctctgtcagatgtagctgctaatcaaaggttcccatgaccctaatttgttagaggcatctcctagaactcagggaaacacatttaccagcttattaaaggatatgatagggacttccttggtggtccagtggttaagactgccctcccaatgcaggaggcctgggtgcaattcctggtgaaggaactagatcccacacaccgcaactaagagttaacatgccaaaattaagacccagcatgcca

SEQ ID NO: 24509 - DNA, 1234 bp, Bovine  19866880761316
  misc_feature (1)..(1): n is a, c, g, or t
ntctgctcctaaaagctcctcagcaaacttctcttatgtcttattggcttcgattgggttacatataaaacatcttcaaacaattgcaggagaatgggattagtttagacctatcacctggggtggtgtggctgaattgggaaatcaatggctgggacaccaaggcagggacacagggaattcctctgatggctgccaacttgggctggagagctcccaagagccccagactttccccagatggcaagacaggttaggatgcttccactcgacctttctttctcccctttttcctctgttcaaggtccgatgctctcccagcctctcctgcccacttccaccccatttgtctcttgggcagtttccctagtaaagtccttattgtgttggcatctgtttctaggaggacctagattcacagagtgagcacttccatgatctgggccagcctcacctctcaccacttgcccgtaccccaggccccactgcatgagatatgacagccaccctgaaacatagacagctcccccttacctcctagttttgcacatattgctcctgtgctctgacaccaaccccacctctacactccctgtttgactagggtctcatttcttctggaaatctttatgttctgtccccctacacacacatacacatcaaggttacatgcctttgatctggacacctagactcttcccaaacctccatcactcctcagtctgtgttgtaactcttgacccaagtgtatctccatagaaaatcaagccctgcagggggcaggaccatgtcttctcatttctcctatttgtttagtacccagaacaggccccaccacacagtgtttatagctaatggtccccttgtcttcctatggccccagtacatggctgggaagagtccctgatacggctctgaaagacatggatattatgcgttcagcattagcctggtttggatatagaaggatcagaaaaggtcctatggccccaagatccagctcgagacctggcagcttggctgttcctccacttctgcaggaacaagtctcagccccagggaggctcagtttaaatgcctgtcaatcatgctctggcgaatccgggattaaaagatccaagctgacaggctgcctgttcaaagcagaaaccaaccaggacattaaggagaagttgggtgtagaatatgcaacagcctggggcttatgaggggcagggcttctgtatgtgtgcaa

SEQ ID NO: 24510 - DNA, 3997 bp, Bovine  19866880767338
  misc_feature (1)..(1): n is a, c, g, or t
nttcgagaagaaattaatactcagagtcggtgtcagccctgccgacagcagatcaaggctgaaagacaaattgctcattacagttcagggaaccggagctgggaggagacagccgagccatcccctgccagctccaggcggctcccgctggtgactgactccagccggggactccccctggcttctgcctgccttctgaagtttgtgcagggggtgcaggggactgactctgggcaagcagcctgttaggacttccttgggggcccctcatcagctctgtttgtatcatgtcaccagcgtgacacaagccagcgctgtagaaaagctgcctgtcctgggccatcgcggtggccctggctggcagcaaagccaacaggaaggcagagggacctgggaacaaagagacatcaaacatagacacagtccccaccgtctgccctcacttcgcatgctctttcactcttctctgattttattaatttatgaagccatatctgcttgacattcaggggtatcatgttttcttcactgggtcccacacaaccccggacccaaaaggaaagctgatgcccagacagcgctgcacatacttaccacatcccctggcaaggggctgcatctgttcagagagagggtgtctctaattcgcacaaagatgctgctgcttgaacatatgaaggtcctggagacattatatttgagacctattgacttgtctccccaggtagaatataataagctccatgagaggagggactgtgtgggaaagactccgcttgcctctccaggttcactggccaccccacctcctccctacctactatgtgccccagggtgggtgatgcaccgttggccctggttggattcaaccaacaggaggcaccattaggagctcaaagggcaggggaagggactggccagagaactattcttggtctccttcctgtcctgctgacgtggtggctcatgaatcattgtacagcctccctcttgggttctggtcactgttcccttgctctgccccttctcacatctcggagaggctccctgctgctcctgccctggtaggtgtctttgcctcctgcccgcacctttgtaaacagtccctttattcaccattcttcaaattccaatatgagtaccccatctttttcctcctgggagccccgctaggatttgcttgtttgttgccaggtggccttgtgcggagcaactattaatactgaatgaatggatgctttttttttggtagtatatgtgagttttatttcttttttatgggaacttgttttaactttttattttgttttggagtatagctgattaacagtgttgtgatagtttgaggtgaacatgaatgtatgaattctggagccccaaagtggggaccggctcttggtttttcctggtgctttgtcaaaggctcactggtatcttctttattcagttatagcacagttgttggaaactggccaccaggactgtccctcctcatcctttcctgctgagcagaaccccaacatcacccccactgccaaccctttatttcagagacaacagttaaaactctgtctgaaaagttttgctgttctctctcgctgggaatggggtggggtaggaaataagtgaaacacttagcgaagcatcctttttgatttccagaaaatcaaatgtttcctccaccattctttccttttacacctgtcggccagacctcatctcctaagttagcactaggggtgctacttagcctggaaagcgtgaggcagtcacaggaacaacagggcgggtcagtctagggagacttggtgcagtggcagcagaggcacgcatcctccggaacagccattcgagggctgttgggcgtgatgaccgggtggcggcattccagccctggagaccatgcaggattctccctgcagcattgtgtgggaatgacactgtcagaggagacaataccttcatagcaggacgacagcaaccttgaggcaaatggtatccaacccagaaaacggggcccaacccacataggccacaacgaaaggcagtcatgacacagcccaggcccacaacactgtcatgaccatctgagcatcccaggaatcctctcccctgtggaaagtcagattcacatggtgctaagtggctgcaggagaagggctgctgcagggtgacacaggctggatctttgtgtaaagaattctccagaatcgtgtggacagcagcccacccactgccctttctctccctctcctcctcctctgtctctttctgtgtctcttacacacacacacacacacacacacacaccccaacacaaatgacgcagccctgggggcgtccctggttgtccagtggttaagactccatgcttccactccagggaccccgcgttccatccctggtcagggaactaagatttcacataccacacagcaagaccaaaaaaaaaaaaaaagcctacgtacaaatgatgcagtccttccacctcccaaacccagtcccacagagctttgtttatactggcattactcactggacaagcagcttttgattaaaaacactgaactctgcccaagtaattgtgctgcatacaaggaaaacatttgagggcccaaggagaagctcctctttgttcccaggaagcctgaaatcatggtttaagaagaaaaaaaaaaaaaagacttctggcttgcatggtctgaacaaaacatattctgccacatttttctataatgagcatgtgggatgttttctgcacgttatttttaatggcagagatcataaataaaattcactagtattgccagaaaagcattaaaaaagtaaaagtctcctttaagtatcaccttctgtctgtctccagctggagatcaatatttttatgtatgtggtgtggctacctccatccactttctctatagatatgactgtaaatatttatgaatctttacacagattttgttttgaggattattttgcgtgtcataaatggggttctcccatatgtatagtttcagaactttttaaaacttaagaatgtatcttggagatctttgcatggtggatccagagcataaagactaaccttattgtttttattggctgcctggaatttggtagtgttaccgacccataatttatttccctaggtccctgccgatacacactctggttactcctaatatgtcatcatggtacgtggtgctaacaataaaatgctggtgcattgactatctggacatatgagccactatttctatatggaagaggcagttatatcaattaagatactttgggcttcaaggaaaagaagactcaaatggccaaacaacaagggctttattttctcatgttaatgagaagtcagatgagagtcagttccaaagatggtaaattcaggggtatgaagccatcatcgtggacccaagtactttctctgccacccttagtgagttgggaatgcctccctcatagtcacaggatggctggagatggcctcagtgacacatgcagccatatcttcagctccctctggtcccacatacaccagttactggtgagtgaaatggagccaccatgactggcctggaccattatgacttttcctcaggggcttggaagaagaagggagagaaaatggattttattaatcaattgcttgatagctcagttggtaaagaatccacctgcaatgcaggagatcccggttcaattccttggtcaggaagatccattggtgaagggataggctacccacttacttcccttgtggcttagctggtaaagaatccacctgcaatgtgggagacctgggttcaattcctgggttgggaatatcccctggagaagggaaaggctactcactccagtattctggcctggagaattccatggactacagtccatggggtcgcaaagagttggacacaactgagcagctttcactttcactttcactctccagaaaacatgttccagctaacagcctgccagt

SEQ ID NO: 24511 - DNA, 1072 bp, Bovine  19866880793468
  misc_feature (1)..(1): n is a, c, g, or t
ngatggggatcgcatttgctcatatcccattataaaccagtccagatgctgatgacatgtttgaccacacctcactgccctgcagcccccggagagggggaggaaaagcatgatttctgttctccttcccctgttttctgcatctacaggattcagatcatagctgccatggaaactgtgcgttggaatttctggagcccttaattttaacttagcatagaaaaaacacttttgtgctgattttataattattcacgacaaggagaaagtgactaaatgtctcctgacagtgagggaagatacagcaacgctttcttctttcttcctttcttcttgctttcataaagatacgagtatttgaagtacgttatggattcaggagtcactcttccgtcttttgcagattccgatatcatagctgagttgcaagagctccagccttcagtgaaggactttgaagtgagaagtgtcgtaggctgcggtcactttgctgaagtacaggtggtcagagagaaagcgactggggatgtctatgccatgaaagtcatgaagaagaaggccttgttggcccaggagcaggtaggagcatttaacatccagcctcccctgtctgaaccagcaggttcattgcagagatgaaaatctgctgaattgacacctgggatggagccagttttcctctgcatccctagttttaattactgtggcgtagccaggaaggtctgagcatgctttcttgaactgatattgactaattttgaagattgacaagctcccttgggttgcttgatcatgtttttatagttgcatattattcagaaccaacttggccttttcactaatgaatttgagatgatcttttgtgaccatccactgggaattcagagatgtgcatatcatgcggtgagttagatagcctttgcttttgtacacatcttatatatttgtgttgggggcctctgtacttgattttttttttttttttggtatttggttttaaaacaggcctctgaagaaattaaattgttctgtggctagggagttgccagtctgagaggaggtgagaagttat

SEQ ID NO: 24512 - DNA, 804 bp, Bovine  19866880801043
  misc_feature (1)..(1): n is a, c, g, or t
ntgccacgttgcctttgcacttgctgtccttcttcctggaattgtattcctcctgatatttgcatggattgttcccatctctccttgagatgctcctatctaactacagctgtgatttaaatgtagaggaaaatgcctggagggtgcaccccaaatgttaacagtgctgctaacccttgaggaggagagtaagattcagaaagcctcagggcccatgattgtgcctacatctgtatcatttgggtttttgcatgtgcaacatgtaaaacatatgttcccaagtaagatatatttttcaaaaagaagccagtgcttagactcaaaagtgtgcaaagctgctagtccatgtcagcactgggtgaattagagtactagccattgaagagggaagcccttgctgaagaggctctacgctctcttctctctctctttctcttttcttctcccctgccatcccccccgcaccccccgtcccaccatctgtttgtctgtctctctcactctcactcactctgtctcttgtacacgcagagcctgaacagccagcagtcagccacgagcatggaggatggacctcatccacacacaccccagaggagtttttgaggaatggatccttgacttcagactgtgagatcttttcctccaggactctccagaggcaggtccctggcaaatgagctaaaaccagaaagaacagcaggcaacaacaacaaaaaagtccaaaatttaggaaacccaggcagcaaagccagatcagctgaagccattgatttttttttttttaaagaaaatcaagcctca

SEQ ID NO: 24513 - DNA, 1369 bp, Bovine  19866880816959
  misc_feature (1)..(1): n is a, c, g, or t
nccagtccatatggttcagataggattggcctcatattccagatacaagattgggcatgtgaccctgatctaggccaatgggtatattttgtcctccagggggcacagtgattggttcaggtgatccagtgaaactctattctaggagctgattggttggaagcttggagtaacagggaccatctttcctatgagagagttgccaacaaagagaaggacaggcgggagatatagagattgagcctaatgacatgcttgctcagtcgcttcagtcatgtctgactcttcacaaccctacggactgtagcccaccaggctccccttccatgactggagagggttgccatgccctcctccaggggatattcccgactcagggactgaacccgtgtctcctgcatctcctgcgctgcaggcggattctttacccactgagccaccagggatgcccgatgacatgcttaaagcccctgaattgagctgagctcgaaaatttcttcaatagtggatgcttccattacaggagcctacagattcccttttgggcttaatgacattttgatgtgaggttaaatgatttgtaaccaaacacatactaaccaatgtaattttgccccctccctgcccctgttaatatacctcagtcactcctggtggcctacagtaggaacatttcaccaggaaaagagaatttctatcaggcttcctgcattgtctcataagagcctggtttacagccccaacagagatgctcataattggccagtgaaagcaaggagccagggtggtgaatgtgtgccaacaaataattcaagccggcagaactcttggggttttataattatgtggaaagacctgagatttctgtaaggcaggggtcagcaaattaaaattctcccaggggctcagggcttctgaatgctggtttctgataatcttgtttatgtcctggggtaaataaatccgtcttttgttctgtgttattcaactctcagcactgtttgtaattaaaggggtggagggtggagaaatgaatgagttctttaattggctctgttctgggtgacatagagtaagacaaaaaggccctcatgggcgggagggggagttgggggtggcctgctctgccctgggaaacggtgataaaacccggggcagctggtgatcaagtggcaaaggggcggaaatctatcgtcattagtgtgatcaatgagcacaggctgcgcctctgctggcctgcgccagggccctcctgagacacagagagaacctgagcaaatgtggctggtttcagaagtcaccccacccccactcctctagtcaaggataccctggcggcggtattgcttatcccacactccatctccta

SEQ ID NO: 24514 - DNA, 1887 bp, Bovine  19866880817319
  misc_feature (1)..(1): n is a, c, g, or t
nagaggagaaaaggaaagaggctttgcccaggattcctgcctgtgctcaggaaattggttgcagacactgacaaataccttgagaaaaatgccttgaagggacttcccgtgggtggtccagctgctaagatttcaagcttccactacaggggatacaggttcgatccccggggaactaagatcctgcatattgcatagtgcagccaaaaagtaaatatatataaatatatatattttttaattaaaaaaaagccttggaaatcttaacacttatagagaagggttatagaagggatacaaaacgctctgggttaggtatcaggttctagccctgattctgccactgactgtgcaacctctggcaataccctcagcctctctgggccttagtttcttgaactacagaacttggaggctgggaaagataggattagaatctcttaggagttagcagggatcagtgctgaccaatgaaccatgaggggaaatctgttggagactttgggccaggtttcccctactcttagaaaaaaggccagttcctctgaatgtgatcatttctaaatagaacaccaggaactgcggtgtttgtggaatgcttatgacgggtcaggccctgtgctagactaaatgcattaagtcatgtgatcataatggtaaacttctgaagtattaccctgatgcccattttacaaataaggaaactgatgttcagagtggcaaatgttctttcccaaggtcatgtggggagcaaagggcagagatgggattggaagccaggtctgtctgactgcaaaattagtgatcttaaagtcctcctctatactgtctccgtgttaaaaaaaaaaaaagctaatccagataagcccccttcctctcactgatccatattcatgctgctcagaaccaagtaattggggctgccaaagggtgctgagaagccatgctaatgagcttgctcagctcctcttctgaaactacatcccctgctgggctgtggggcctcttccgtcaatattgacgcctgtctgagacactcggaagctgccatgaactggggaagcagctgctgctgagattttaagagagaaaggcagaaaagaaaattacaacccccctaataacgccaccgcttggcattgcagacctagcaaacccctgcacatctggagaaactggggaaggaaagtctagatgaaatgccagttgacctgcgagatgtgcgcttgggttcctgcacccggagtctattcccctacctgtggagggctggggaaatctgtctggcaaggggaagatgcgtctttgccaggcgtgctcctgggggagctgagattttaagttctgcagcccctggaggggcaaagtcgtgtttctgagtgggggcagagggggagtcagaaagcaggggtttgaaacagggctttttaagaaggatggtgtaactgtggagtcagaccattctaggcttgaaccccttagtaagtgagttatcctttctggcaaatgggatttattcactcaacaaatatccatgcatctggagaacagggcagtccagtcatgggcatataggtaaaatgcacggagcctgattgcttccctggtggctcagatggtaaagagtctgcctgcaatgcaggagacccaggttcgatccctggatcaggaatatcctttggagaaggggatggcaacccactccagtattcttgcctggagaatcccatggacagaggagtctagcaggctacagtccatggagttgcagagagtcagacacgactgagcagctaacataataacataaaaataatatggaacctggtacctaatgtgtccttaggaatgcagaaactccacaggatcaggcaggcgtcatcaccc

SEQ ID NO: 24515 - DNA, 934 bp, Bovine  19866880832018
  misc_feature (1)..(1): n is a, c, g, or t
ncaggaactccagacccgatgtactggggagggaggatgctgaactgccgattaattatttaaaaactgatttatttaccacggtgagccatttgcaaattcaataataaatctattaaggagcagttaacctctatagctctgttttaaataatcaattggtgtttgggtaacgtagagcatctgtctcattaggtcagcattggctccttatttgaggcattaaacctgaagtgcaaccaaatcagccatgaggtggtgattaggtattcactgtgggtccttcaccctcccaggaactggatcatctctcagctacaacagcaccagttggcggctcggggaaccctgggtcctctaatgccttgttctatgttctcctcagtgcctcccacagcaaagacttgacgccactaccttcctccagggggaagaaaaaaaagaagaaagctacgcggaagaagagaaggaggtgagggctgcaaggggccacgaaaccctgaagatggaggaagggacaaaagggttcttgagttaggcagtgactcctctgggattcagatcccctctttgcctcttaacttgctgtgtgaccttgggcaagtcacttcacctctctgagcctgtttccatttctataaaatggtagaaatacctacttcttggggttttgtgagtattagacaagaaagttgacgtggaagcagctgtcacagcgtctggcacatagtaaatgatagttaatatgaagcatgaccctgaccattagtatttacttctttatgtatttttggagaactcacttcatgtaagtgccatgccaggcactttgatctcacatagttctagttgtttttcttgtgatgagaaatcttaagatctaatcttttagcaactttcaaatgcacagtattgactctagtcatcatgactt

SEQ ID NO: 24516 - DNA, 1434 bp, Bovine  19866880856594
  misc_feature (1)..(1): n is a, c, g, or t
ngctatagagtgtttagaagtataatggatggttttctttaaacattcagaccagtctcagctcaggtgacacagtgggctcggttctggtccccatcaatataccatgcttagctgtgggcaagagggacctctgcctgggtctcctccagtgacaaccattcccatgggtggagaaatctgaggggttacctggaaacctttccttgagatttagtctctggagacctgaagtccggctgctgagtccccttccagggtctcttcaggctctccatgatctattctcacagggatagaccacgtttcaagtgtgcacatttgtaggtccaaacatggctatctgaatggaatttggatgttcggactgaggtgtccatgtgcatgtgtgagaggtctgtcatggtgatgaagcaagatgtagggggagaatgggagggaccagggcgctggggcagattctctccacactgtcatgttgtggtccggcactccgaggggtccaaggctctaaatccaaatctgactctcccgatcatttcaaagacatgtttgccaagataggagaacatacttcacctaagtgtgctgtcttgatttaaaaacatttagtgtgtggcttctcctgtactcttgtcccaggccctgcaagtattagcataggtctcgccatcaaaagcctacttcccccgccccgtttctcccatgaactttgagtctaaagaaggggggctctagggatttcttgaggaaatatttctgtattctcagcaactggtcatgagcatgagatacagagacactgaaacagtgagagtaatagcaatggctccaccagctcaggatatcagctcctggagttggggaggcagaacttcctttgcagattctcccaggagactttgcacaccgacaaggtgatggtccaactttaccaacttttcacccaatgcggctgccacttcccatttgacatctggctacttttgctctcggacaagggatcttaaaataaggttgcccaagtggggctttctagtgtgagatttcttttaaaattaatgtaaagaccccttttccattcagctcctttttgtcttctagtttgcaggttggatgccaaatctttaccacctctgtgagttcagtggtcacacgtgtatttccaccacctctgtcaggaatgagaaagcatcacacaaggcagttggaccctgggacctggactctcaggctggggtttggtttgagctcatggaatctttgcctcagagatgataagtgtttggtagccagtgtatcacaagtgattcaggtaagcccttcctgaaggaagccaggctggactatgaatataatggatttcgttatcttgggcttgctacctggaggcatccaggccgggcttttctccacccaggtactcgtttccac

SEQ ID NO: 24517 - DNA, 996 bp, Bovine  19866880867944
  misc_feature (1)..(1): n is a, c, g, or t
nctccaactttatcattggtaaccatagtttctactgttttccttgaagtgacagtcttgctacattcatttttgagaaaatatctgccaaatacccaaatcagaataccacagtctgtcattcatttaaggaaaagtgatgttcccccaaaaacatgattagttcaatccctaagtcaaacagtggtacaaaggttttatctcaaaacaacaatgtacttagctatacaacagaagtgctttatgggtacttcagtttcatcacatggagtattaaaaagatatttactcaaggaatgggatttaataaaagttatgtttcatcacgcacattctcaaatgaaactagcttctttcttcttgtgaacaaatagtagtgaagaagaacatgtctatgagtacactttggtaccactgccatgaatcatgctaaggtatcagtaatgttatccacactatccttttcacaccaccaagaccaacatagtgaaaaataaaaatagtattatacagttagtattatgtttactaacatgaaattatgaaataaaatacaagattatgaaattagctttactgttgttgataccgttagaattactatcaatgcaattattatgaaaatagtgctgactttgctgaccctctgaaaaggtctttagaacctcaggagctgatgaaccatgctgagaattgctgatttagaaccattcaggacgagtcaaccttaaactaagaagaatgaaaaaaataccttcccacatggcacttagttgttgtcgctgttcaatcactaagctgtgtccaactctttgagacctcatagactgcagcatgccaggcttccttgtccttcactgtctcctggagtttgctcaaatccttgtccattgagtcagtgatgctatctaaccatcttatcctcttttggccccttctcttcctgccctcaacctttcccagcatcaggggtcttttccaatgagtttgcctttt

SEQ ID NO: 24518 - DNA, 2188 bp, Bovine  19866880878730
  misc_feature (1)..(1): n is a, c, g, or t
ntttaaaaatctcacatatccaggagctaattaaagccacccacccgttagttacctgagccacgcaggactatcacagacaggatgctctgttcctctcattgcatcccaacaggggagtctcagttgcggcttgtcacattcctgaggatgtcacgttggtatctgccacctttcactgcaagttactcctttcctctttgtaattgcataggtattttggaaggagatactttcaaactggggaagtacctgtttctgataaaactttcaacccatccatttatttatatctgtatgcacttgcgtttgcctgtcaatgagttacaatccattcctgtcagtatatgtttttatactcaaattgttcccaagttggccgatgagaatctcttcaggttggcttttgtatatccttttgacatattccccatctttgaattctgtgttactttttgatacaaggtgtttgggctcttaaactcactttacctgccccagccccacagtcagtcatttctctgggagccctgcattttgttatttatttatttttttaagtggaaaacagtatttagaggccaaggtctgggcacgaggtgttctctttgctatcaggatgtcattgctgccagactccattcagtggacaaggccaggaaatacatgtacgtgtatgcagcatacctacctcatacacacgaacattaacatctgtatttatttctgtatctacttgtgtatgttgaaaaccatgtattcacatcagcatctccaagtcctctccagcttcataaggtttgttatcattttcaccctttccatgtttgtaactctgatatcaccctcaatgttttttacttatttaatgcacctgtgtccatctgtcaactctaccttgacaggctcagatgctctaggtcatctagacctagattgacttcctcaccatacgtgagcctttgataccccacattggtctgctccacatgtggttgcttccctcctcaccgtgctcggacctgtcaccctgttctggactaccatggctttccttgtcacttgtcatggatgtttatctggttattgtccatctcatggttttaggactgaattgctcagtaagggaagatgaagagaaagatttaaatttcaaagatgttggtcgacttcgaagaaagacattaagtaaataactggacactattgtatggatctggcaaaaattgagcaaagtaggcataagaatgagatttgtggaatgttggactatgtgatggctttttaaaaaagaaacaaaactaggtatcagtttaagcttaaagggagaacaaagagcatttcccccatcacacttagttctttataattgtcttaatagtttctattcctcctaggtctcatattttgaggaagaacagaacatattatctcagagtacaagtccttggatcccccagttgcagtatgcctttcaggacaaaaaataacctttatctggtgagtctttccatccatctctgtagaattagcctagtgttgcaataatcagatagcacggctgtgtaattgaatgtggttcttggccacatggcccatgacacttttcattcattctcatgctctcctgcctttcaggtgtcttcttgttctagtcctaaagatgaagacctgatccatttagaaacagcccccatttattgctggatattgcagctatggctcaaagggcaataaagagaagtcatttattggcaatagtctgatagtacctttaacaaaatcttactttaaattttaaaaattgagatagagcatggttattataagaaaatgcaaacactgaggaaatgtatgaaataaaagagaacatgcttgacctttctctctaatcgctgtcccctgggaaacacatgttaatggttatgtatgttcgttctggctcttaaccatgagttgtggaaagaatatttctgtgtctgtgcctatcacacatgtatatagtttgtttcacaaaaatggtgtgttactgtctactctgctcttcaacttgctttttgcctttcagtaatttctccctgacatcttttcatgtcagtgcatgcaaatctgcattgttcttttgagcagcaccatggttttcactgacgtgcatgtagcataacttacagaatgtaaaattcatttt

SEQ ID NO: 24519 - DNA, 923 bp, Bovine  19866880909324
  misc_feature (1)..(1): n is a, c, g, or t
ncgcatctcgaacatgaaagcgttgctgggagctttcatattccgtgttgtctccgtgtaatttgttcccttttacatagaaatatatggtattaactgggggatgtgattagaatacaggcggatgctcactttgatgggaaacacacaggcaggcgcctaacagccgctggagatgagagacggtctctctccagtaaactcacaaattgcagggcccacagtctgcctaatgagtgaagagcgctggggccgagactgcaatgttccagagacccaagcctcccactggggtcctggcctcacagtaacagtaataggctgagaagcaccacaagcccacctgttcctgtgtgctgcctgcactcaggtgctgtccacagactcatccgtttcatcctcaagcaaacgtaggagggagatgatccaattgtccccactttagagacaagaaaactgagggtaaagaggctcaaagcctgggtcaacggtgtggagccaggagctcctccttccttttactgaagcccttggttttatcctttgctgtatcctgcatccacacctcgcaggggacagggagcagcagtggggtgtgggatgagagcctgcccctgctggaaggcctgagagaccccactcccacacagaccaggagactgtgctctggagagtggggtgatgatcccagaggaaatccaagtagtcagaatcttaacgttcctagaatacatgcacccattctcctaatttgatggccaggaaaacgggtcctgagcagggccagtggggtctgtgaatgtttcttccatcaaacatgcccttcagggtatacctgtggggtcaaggtgagcagccgcagaagacctcaccaaggtagtaagagaattaatagcaaacacttgtactcgctgtatgccagg

SEQ ID NO: 24520 - DNA, 1001 bp, Bovine  19866881007822
  misc_feature (1)..(1): n is a, c, g, or t
nacagctgccacccctcaacccaaccagccagtgttccttctcaatggtcctttccaaggccacggggctgcagcgacagaggtctacttacggcagaaccaaatcccccatactggatatctgacagccttttggctggttggaatttatttctttcttcctcttttagtttctccagttgttgctgcctctttttcaaggcactctcctccttcaggatggtgaagtatccacggccaatcttcacccactgaattaaggtgctgaagaaaagaaagagggaggaagatgggctggctatcaaggcaatgtcttactatcttgggactgacagttaactgaaggacactctcaggcccagtagcaggagacttcctgtctttagaattccaaagtcacagagttacttaccctaagcttgaattctaccaaagaccacctcctaccaaagaccttgaacaaattatctaacctctccaggttttggttccaccactcaacaaatacttattgagtgcctgctatgtgctaggcactctgctaggtactatgaaatgagaataacaattcacccccttgaggaccgatttaattggcagtatttttatttgttttgtttgtcatggtttgtcttagattcctcgacatgtggtatttgagttccatacacgtatgtcactggaaggtcactggcaatcttttcctaagtgtagaccctgcttctcaactcgtacacttttctgaatttctacgctacatgccacattcttaatctctaaaatggggttaatcatagcatctatctcataggaacaatttgaaattttcacaaaaatttggcaggcgaggatcaggtgtcatctgtccagccacgttcttgtcacagcaaaataatctctcaggttcctcatgcataaaactgcgcaaaaccaaatgactgtgaagccagattatacataactggcccgaattgtccatttgggcttttaagtttagggag

SEQ ID NO: 24521 - DNA, 1678 bp, Bovine  19866881007913
  misc_feature (1)..(1): n is a, c, g, or t
natagagagtgtctggctttgtgtctgttaacagtggccactccaaaaaggctagagcctctctaacccttaataacaattcactgaaagaatgaagatttcccctcctcagcatgcagagtgttaacttagaacctcaggctgttagcgcttctctgatcttggcactaattacgtacagaaatcattttgtctctgccatgtctaatgaaagcgactgtacagaaatgggatttatcatgatatgtgttaggagagttttttcttctttaaaagactacctcaatttcccccacttttcatttccccctctccttgccagataatcaaatacaaaagttatattaacctccccaaccacttcaattaaaacgctcatccaaaatttgaaaacaattaaaaaacccattatctcagatttaacgttctctgattccatgtctattttctgccatggcgtaaacggcaggtaacgttatcacagtaggtgccttctggaaagctttgcctcgttctccgccagtcagtcccgaggctgctcgcccggcacgggccttattaaaaacccacatgccctggtgtactttcgtcatgtccaaatgcattgaaataattgattgttttaatgagttctccatctgtctcattttcttctgtctttctctactcaggaatggatttcagagagagggaaggacagatccactcttgggaggtcatgggctgaaagatgtgagggtccttgacttggatctattgccctggggttctgcataccgtgatgaaattagaaatggttcttccaaagaagagcatgccatgaggtgtgttaggaagctgtggtggctgcaaagaacacaagacccctaaagatgggtcaagagaaataatgctgtagtcactccttgtgacttctggttgtgtcaaacaatatgtactgtgtgcctgttgtatagtaagataccatgccaaatagcagagatatggtctccaaggcctaggagattcaataaaaaataaacgaacaataacaaccagcaaacaaaaaaccaaaacgcaaaacacaaaacacccccctccacaaatccccaaattccttggatcagacacattcatacactactcatggaaatgtaaatttttgaaacctgcctggagtataatttaacaataactatcaaaacatttaagagatatacatgcctattcacctagcaatcagccttctaatcatttatgataaggggataatcacttatgtgtataaagatttaactacagctgtgttctgtgcaacacttataaaagcataggggaaaaaaacattggaaaatctaattgtccaatgacaaggaattatataaactaatgacatatctttagaatgtaatattatgaagtcattttaagagtatactagagaagaaaataaattgaaggagtaaaaatgaagactgtgttgttagttccctcaccagggattgaacctgcaccccctgcattggcagctctgagtcttaaccactggactgccagggaggtccctgggtttttaaatgttttgaggatttacggaggttaagctcttaacatggttcctggaatatggcaagtactcagtaaacctttagctgttagtattaacaggaacctgcccatctctccataaagcttctaa

SEQ ID NO: 24522 - DNA, 1350 bp, Bovine  19866881014196
  misc_feature (1)..(1): n is a, c, g, or t
nctcatttgtgtccaactgtttgcgaccccatggaactatacagtccatggaattctccaggccagaatactggaatgggtagcctttccattctccaggggatcttcccaacccaaggatcgaacccaagtccccccattgcaggcagattctttaccagctgagccacaagggaagcccaagaatactggagtgggtagcctatcccttctccagtggatcttctcaacccagggatcaaaccagagtctcctgcattgcaggtggattctttaccaactgagctatcaggtgccagtgctccaaagccaaggtgatatcaggctgggagctgggccctgacctgcacagtcctgtctcacaggcaccctgcagacagtgacttcttgtgttcccatcagatctgcagaagctcctagagatggttcgggaagatgcccggagaacaatcaccatggaaaatgagatgcaaagacaggcacccaggtatattctcttgctccctggtcaaataaaggatgtcagcatcagagtgatatcgttcaggccagcagtgccccgtggttgaacattttctctgtgacaagtgctgaaccgtatactttgttcacatatatcacctccctgagtccttccaacaaccccacaaggtaggtactgttgtctgtattttacaaataaggaaatgaggttcagagagggtaaggaacttgtttcaagtcacccagataacaaatggtaaggcaacaactcaaatcttcaactttcttattccaaaaacttttcctttaactactacgctgcccttcttcccaggaacccaaaggttattcattcattcttttagtgagtatttatgaatatggatggaccaactgtacttattattgcaggaagtgttatgaaagaaatctcagacctgtaagaggaagtaataggagcatctgatctcgtctgggatggggatcagagaagctccctccaaggaggaaactttgagctgagattttggatgaagcatgaagaagagctagctagcccaagttactagaggagcagggagagcgggcaaggggagtgaatattgcaggcatgcatgtgcagacatgctcagaacggaccgaaatgctgccagaatggggtgaggagaggtatacgtctgctgagaccttggaagccacctctaggattctgatttctaaccatggagcaaaaagaatcccttttgaagtttcgagctgacagacagccaatgtaattggctcagagcgtcaggacttgaaccccgaggtgtcctccttccggtggaaagccccaggccctggatgtctgaccctctaaaagccttg

SEQ ID NO: 24523 - DNA, 922 bp, Bovine  19866881062273
  misc_feature (1)..(1): n is a, c, g, or t
ntaaatgctgcagccaggcacagaatggattatcaacctctctgtccttgggtctgtctgtacttttatcactatctatgtgaccatgggcaagttctagtgtttgaagtcatttggtgtatgtggatctaggctaaatgacttacctaaggccacacagcaagagggtacatttcagagcttggcagggatttattcatcattttcctccttctgactcttgagagtatgttggattcaatgtgaagtctttctccctaggagtctgaatcagaagcagtatgcctcagtcatctctttggtgccacatacccaaggagaattacatcacctgacttgtttagaatatatcacagtggctgttcttgttgtgtgaatgtagatggatcctgtgtagcagtgggtgggtgctggcttatccagtatagaggggcagggctgtgattttcaactgataaggaccatatgtgtctgtcaggtgggtgtatttgggtaggtgtatatgtcagcgtgtagtatagtgcttctaagacttacctggggaaagacttgtgaagtgaaggttttttgataatttaggatgtgcaagggttgagagagagagaatgcagtgaagtacaaaaagggagggtccttagaggatagataaattggagtttggggtgctgtgttttccaaaattttggacccatattattatttgtctgagatattttaggtggccccatggacacagcatgaaataacacataataacatagtgagaaaacgatgcccttccaattcactttctatccttccgattgtcaaagcgttgtctaaatttgggactgctgtttttaacacctctcaatacttgctaatcttcttttcttaacaaaaaaggaagcaggtgtcaggctcagaagcccaaagcaggtag

SEQ ID NO: 24524 - DNA, 1729 bp, Bovine  19866881081284
  misc_feature (1)..(1): n is a, c, g, or t
naaattttactaactggcagcaggagtgctgcaaacacgattctttgttcatcgcaggaagatcccatatttgggtagatgggtggatggtcgggaaagtggagagatgacagattttaagatgtccttctgagttgtgtctgagtctcccctttatttagaaaggaaaaaaaaaaaaaagatcttcccgatttcatcatgtggcaatagaaacacattatcattttctagtatccttattaattctacttctagcaagagtttatttcaattgacaagatgatcaggtccaaacagagcagaaacaaagccttcaataatgaatgcgctaattaccctcctctgagagatggaagcttctgtttagggaaagtaagacttgttttatacatgaaggcccacagatttttattcaaacctttggggccagctgcatttcaaaattgtggtttttgtttttttgttttcttttttggcattttagaatggaaatatgagacaatataccatatagagcattttactcccagagggaactaggacagcaccctattgtcaaacatatttctgcagaaaaaaaatgaatgtttacactaaatggatactcgaggtaaacaaaggtcatcaatagtcttccatcagttcagatcatgttttgctgccaagtaaattatgagtttttgttttgtttgttttcaagaccctttggattttggaactgaataaagggttgtgaactcatattggttttattcttattagaggctcactttcgaggactgactagaaacgagtggacctttacagagaagcagacaagacccggtgtaagcaagcacttcaagccttagtgacacctcttcttagtcccactcagtgggaaagaacagggcagaccccaggtcaaagaggggagcgagaagttaccgatttacctttcaggcagagggaaggagctgctccaatcgccctgagcctccagagtcaggtaatcggtgctctgccctggagctacgtgggcagcgcagtcaagtatgtcttattgcctcagctgtcccggagacaccactggacccactctttttttttttctttttccttttttgactgcattgtgcagctatagcggtgaaaacctagaatcctgaccagtataccaccaaggaattcctggatccactctttttttttttttttttaagatttatttactcatttcatttttggctttagtggctcttcgttgctgcatgcaggctttctccagttgtggtgagcagaggctactcttcattgcagtgcatgggcctctcactgcagtggcttctcttgtaaaatataggctctaggtacacaggctacagtagttgccgctcaagggctctagagcatgggctcagtagttgtggctcatcggcttagctgctccatggcatgtgggatcttcccagaccagggatcgaacccatgttccttgccttgcaaggcggattcttcaccactggaccaccagggaagccctggacccactcttaattggaaactccaaataattttgactttcattaagagagtccagacactcaagggctgggcttctaggcccaaagaacccactgcctcctttagaaaaagatagatgcctttctacatataagacatttcaaatatgacacaggtacctaaatctagccactgtgttataaggaaactacctgtcatgtgagtg

SEQ ID NO: 24525 - DNA, 1241 bp, Bovine  19866881090864
  misc_feature (1)..(1): n is a, c, g, or t
ngtggttgttacacacacaccagcaccctctgtggacatgcctctagataaccaaggtagagctttcctctaagcctgtagagcagaggggtgaaggaagggtgataaagacagtggcttttctgccgtccttggtttggcaggctgagtctgtcctttctgccagacacatctaccatggctagaatttaacaacctcatcagacaggctttaacatccttagccaagtgctgtatgtgaaggacagtgtgaaaagagccagacagaaaagccacaaagcaagaaaacaagaaacgacagtaaaaccttccacctggccatgctcctggatcccactgacatttaaggagccagagatcccccttcagaagcaaacaccttattttccaggggaaatcacccctctaagagatgcataccccttggcctcatcacacagtattaaatgaggtgaattattagcagagaagatattgtctttctacttactgtttttaatatctgtttcacctcctgttagaatccaacccaccttgtgccaaacaccttcactgtctcctcgatttttatttaatacttcagccgtcttataattcaaatgcaccatccctggtttcatggccaatttaacatgatactaaaaagaataaaaatctaactgctttcctcctcgcctgttccaccagatgttcggtggcactaagcagccaccgtacgctcacttgctgaattttagcggaagctgacacccagggcttctgtgtgtgcccagttctaggttgactcttgaaggcaatggcatgtcttcctccaaagctgctgatgctttttattgcacatgttttaagggaaacagacatctctgcaactaaaacaacagacgtgtcaaaactgaagctatgatttacccacacaaagtttagttaggtaccagcaattgcaaataagcagagatgagttagccctctccccgagcagatcccagcagagtacaaactatgcaggtgtttccaaggtctgaggctttgctttccagctgcattttgggagacagccgaagcagggtagtgagaaatgagaggtgggatttgggcacaggaagaagctttttcttttgtatgaagttaaacatttctcttggtccctccttagttttcattcattttcttcagcaaatatgtattgagtgacaggaatcaccaggtatacaccaggcgtcattgtatatacggagacaggg

SEQ ID NO: 24526 - DNA, 1627 bp, Bovine  19866881108194
  misc_feature (1)..(1): n is a, c, g, or t
natatcaaaaattgaatttctgttatttgcattgctgtgctgtacactcatctactctctcaggtgttcagtaaagcttaatattactcagatttctttccaacaggtgatggaaatacgactcaaattggattaagaaaaaataagctaggagtgtttattcacttacgaaattgaatacaccagacatgactggattcagggtcttgaataatgtcactgacatttggtatcttttttatatctttccttttttcttggttcattctaaggtattgattcccaatgtgcgctgtgctgtgctaagtcacttgagttatgtccgactctttgagaccccatggattgtagcccaccaggctcctctgttcatggaattcttcaggcaagaatactggagtggattgtcattcccttctccagggtatcttcccaacacagggatcaaactggggtcacctgcattgcaggcagattcttgctgagctaccagggaagccttaatgcccaatagttttctcaaaaaagacctcaggctaattcttatttgatggactgggatcatatggccatctttgaaccaatcattgtggccagggggatggaaagctctgattggccagggctggatcatgtgcttatgcttgaatccagagatagtgtcacattcacatcctcttggcttgaggtggctgaggagtggtttgcagaaaactgggttcacaatgggagaaccaatggtgggaggcaaacacaacatccatgcctgttgacaaaacctcgtgggaggcgtgaacttagtagagagtgagtggggctctgaatggctttgtttgccccagtgtagaaatggactccctgagaggcacatccaaatgatccctaaatagaactaagaacaaaaggaaagtatttctgggatttcacagaaatcttggagacagggtgacattttcctataattttacgaaggatatccatatcaaccttgtctagctcttgaaggaaagaagatccctgaggacatctgagttgcataaatggggaaaccaaggcccaaagaagtttccagatctgtccagatctatttgctagaacctagattgagcacagtctcttgccatggcttagcaatgttccctccacatgactcaagtagacgtctctctattgtgctgcttacattaaagctagacatatctcaaagacttatttccctggactctcctactcttataagccccttgcttgtccttggggctgcctggggcctctgcatagacctataaggaggagcttgtgtaggaacagacagtcaggctccaactctttaggagactgggaacccaggcgtctgaaagggaggcataagatgcagggtccaacaagaaaaacaaatcaacagggcagggtcagtggaataaacaggagtgaccaagaaaggacaaatagctaaagaaagtggatcgatatttataatgtacctcctattaccaagtattttgcatatattattttactcactcttcacaaaaattttaatttcagggaatgaaagggaagaggaggaaaagaagtgtccatcatcaggagccatgttttaaagggcttgaattggctacatgaa

SEQ ID NO: 24527 - DNA, 2374 bp, Bovine  19866881132774
  misc_feature (1)..(1): n is a, c, g, or t
ntcagtgtctgtttcacagaattgtaacacaagatgttaacccagctttggcatgctatgccatgctttctctttattcctgtgcccccatgaagcccagaactgctgtgggtcctgggggtctccaggcaacactcaacaaaggtggtgggaccgccaacagctcccagatgctagccctggctctttgtcagttcagcctggccttcccaacactttctgagtactcaggccacaaagcatttgagtgttctccacctgaaaaacgacgtcctatatatcaccacttaagcttaattgtgagtggcttggaggaagccacacatggggtgattttacaaaaggctattatgttggcatatgggtttcacgatctgtggccatcacagcaatggctatttttagcttcccagaaaaggtttggcaggagctatttttctttttttctttcccccttcaatgctggaattggccactgtctggtataacctggccaggctgagctggggatttccagaatgaatacagaactgttaaacaaaactggtcatttaatgacctgcgcactggtcccagacccacccagaatgttctggctgtgagctgagcatcagttggtactgacattaatgtaccaactaattagtggctcaccaccacatacttggaaagaggattccatcagtgggcctggatctccacacacatccagcagggccactgtctgctgtcttgagaagcctgtgtcaagcttgacttgtgcacagggctctgcctgtgttgttttctaggcttgtgccttgagaagtttggcaaaagaaatcaatttcagcaatgtacttgccacttgctggagggaggtcaaatttcagccatgtcctgggaaggtgaagtgagagtcattcagttgtgtccaactctttgcgaccccatggactttacagtccatggaattctccaggccagaatgctggagtgggtagcctttcctttctccaggggatcttcccaacccagggatcaaactcaggtctcctgtattgcaggcagattctttaccagcttagccataaaggaagcccaagaatactggagtgggtagcctatcccttctccagcaggtcttcccaacccaggaatcgaagtggggtctcctgcactgcaggtggattcttaactatcagggaagccctcctgggaggaaggtgtcatatttgtcaagagcacagacagacctaggttcaaatcccatctctgacgctcattaggtctatggccacttaatcttttggagcttcagtctgtgtctgtccaatgggaccaacagcactgccccctttcagggctgttgcaaaggttaattgaggtacttagcacagagcctggtatgcagtaagtacttctttatgttccttggcaaagcagttaagagcctgggttcacagagcagtgacatgtggtggaggagaaaatgtacagaggtaaaacggaaagacttcgaaaccaaacttccctgggtttgattccaagtctccccattgctaggtgtgcataaaagagttgggggttgggggcagggctgtggcaggagtcacactaaatagctgacaacggttacttctacagtaggaactgttttgggatgatgatcaaagacgacatcaaccttacttacagtaccataactgtttacaaggtcaatgtgcttatgttattactcatgtatataaacactgagaataaagggaaacagaactggttattggagttgcccagatttttgtgggccatagagatgaggctttatgacaattggaaactgtcaaattggaaattgggaaatccttcttagtctacttctccacctcctatgacttgggttggaatatcgagggttgccagcccagggcatggcaaagtctctctctagccctaagtccttgcagctacagaccaccccccgaccccttactccgaaatggggaagtaaaccccactcctagctactggtgctccattgcctataacgcggcccgctgttgggaatacagggtaaactgcttaaaggaatggaggtgaggactgaggctggaccgaaaaaagccagcatcctgaggtgacttcagccttgcacttggggcaagcccctgagagatttaagagcaaagcactggagctgtggacactcactgctgggacagccccgggctggccgtttctgcccaactcctcccacaggcaggctgcactgaagctctgcgttgggctggccaagatgctcagagctgcgtggaagcctcacgtgttccctccttaatccatcttcttcccctttctccccagtgtcagacctcatcacagtctgaggctcgcc

SEQ ID NO: 24528 - DNA, 1383 bp, Bovine  19866881155271
  misc_feature (1)..(1): n is a, c, g, or t
natctgggtggggggtgatggggagagggggggataattccttttaatcccttttacttttataatacacaggatcaaatactgtgttaaaaaagcagttctaaatgaacacttgtatttttgataattctgtgattggaagtatatttatagaacatagctcttagatgtgagatactttctagcctgcctggaaattgagatttttagccatagatctgagggttgtaggtaattgaggcccagagagatcaaattcatttcactgtgtaataacagctagcaattactaggcatggctcatatgccaggctctatgttaagcttattttatttaatcctcacaacaaatttgagagcttggtgaggttaataagggtatagagagaggaggctcagagtggcacagtgacttgcccaaagttaaacagctgttatgtgcaaagttgggacttgaacctcagtcctgtgctcttacccactacttcatgctggtatggatcatctcccagtgctattttataacacctgcctccccacctgcatctgatggctatgtgcaataatagcctccagttttactttaataaccagtactgcacagcttatagaatccactgggtaagacacaaccagaccaatgtctatgagaagcatgatctcatgcatatttaaacttattaaactttaaataaaccacgtcatgcacactgaaacatggattggagagggaaggattgtgttctgcaaccatggattaatgaccatgtgcaaacgttataactgaactattgaaatggtcatagaagggtccttaacagaggccaccttccccagcgcctgtccgcgtgcctgttaatctgagaaaaaacctctcccaaaaaagagccacgagttcatgccttctctttattctagagaaaggctgccagctggctagtgtcactggaaataccaggctcaaagagtgtcactgggctcttaggtgacactatgggcaagatttgctccgagctcttgggacctttacagaaagggtgagactccctcagttcattgagtggctttgtctatcctgtgtcccttcaaggtcctatgaggacacttcattagggtccactgagtggctggatggtggtggctcaggccatggatttcttgcttttcttttttcactctgaaaatcacatttctgatttttggcaaaagataaacaccatcacagcttcctcctccagccctggcctttctaagcaggcaggctggctgcaggatttctggtggactgaaacagcagggtataaccacacttcttttgtgtaagccaacaaactcccactgagtactgaaggtcctgctcaaaagccacattttgggggaatt

SEQ ID NO: 24529 - DNA, 1253 bp, Bovine  19866881168727
  misc_feature (1)..(1): n is a, c, g, or t
ntagacaggctttaagtacatggataatgaactcagaattccaaatgaacttcaacctattcctctgtcgttctctgtttgaggtgagaaagttttctttgaaggagatgcagagaatttcatcctttttttcctgctcccagcagaactccagggctggcccaaacctgcatggtgcgaagctgacttgccggaggaagaaggcagatgcttcagagggaggttaaggtgtcggttggacacgcaagctctggaattccaaaagccacacgttctagtcttgcctctgccactaaaccatggtgagagttaaaatcttaggggcctcctcgagtggataataatgctggccactggattattatcaagcctggataaattaaaatagtaaatataatgtattgtgccagtcctccatggcagctgtaaagaaactaccctaggaggtttggtgctatgcttatacccattttattgatgagaaacctgagacacacagaggttaaccaacttgcccaactgcagaggtagtaagtggtagaactaggaaaggaaacactgaacaataaacatgcggatcattacaattgcaaaggaaagggtgtgagaagaaatgccacgaagggatctggggtttgggggcaatacctcttaggaatgggtccattccgacaaaagtttttgtcccggtgacatgctgataaatgtctaacagctctgcggggaaaacaaaaccaaaccaaccatccaagtttgtagtgttcaccagtttctgtggtgtaaacactgctcccactgtggccagtttcaagctaccagtttcaagcgacttcgccgagcacagagcgaggaaggaaatctacgcggtcagcccccacaccatcgctgtctcctctcttttgtccccacctgacttctgatcgtctcccttgaaaccacccttcagctgcctcttccgggccacgtccctccacctgtgctactgaaccctcacagaatgtgctggtgcaaatgatgtgtatccgtggggccccgccttacctccccagaggcaagcttttgattgtgatcagaccagtcaaagtgatggggtgtggggtcagggagcaatgtccttccttgagctcagtggtccctgcacacagcaaagacagttttcagctaaatggacagcagtggagccgtggagagaagtggctcggatgtcattaaaatttcatgtactcccgctgcacgcaaaatgcagtggggtg

SEQ ID NO: 24530 - DNA, 831 bp, Bovine  19866881170619
  misc_feature (1)..(1): n is a, c, g, or t
naagtttactctccccagaggaaagcattgatcaccatgataaaaccaccaaaggcttaaatatcagtctgcaagctgagttctctgggctcacgtgtacactcttcccatggaccctgcccactctctgcttgctttgttgtttataccttgtccgtaatgagtctgcagtttgctaaacatcttgcctgttcctcagtgttctcttttccaaccgtctccctttcccccgcccccctcacacttgacagagcatccccagctgttcccctgacgtctgtatcaacccaagtacatttagcaggaattcatttccatcttaatctgattcaaggaagtggatcatattttaagaactaacgaagatgggtttagaacattctttcataaaagacaagagaacaacagacatttcaaagattgcctctctggccttgaccttcaaccaatcattctgatcttctgccatataaaaattcttacaacaaaatctaacaaagctcaatgggccagctttggaggcagcatccataaattaatagctgtcattgctatcccttgtctagcccctgccatgcaaaattgggagcagggtaaagtagtggttaagaacacatgcttttcaacaacaaacagcaacaacaaaacccgattaaaaactagacagaggatctgaacagacattttttaaggaagatgtatcccgatggtcaacagatacatgaaaagacattcggcatctctataatcatcagttcagttcagtttggtcgctcagtcgtgtctgactctttgcaaccccatgaatcgcagtacgccaggcctccctgt

SEQ ID NO: 24531 - DNA, 1931 bp, Bovine  19866881173911
  misc_feature (1)..(1): n is a, c, g, or t
ntaggcttcttggaggaggtgacatgactaagttttgaagtactgatacaaagtcatctcttccactagaaagtaaactccccgagagtagagactttgagtgtttttttcatggctacacccctaaaagtcagaacaatgcccagcattgcaggtgctcaataaatattggttaaatgaaagcatataaggggctccccaggtggcacagtggtgaagaatccacctgccaaggcaggagatggaggttctatccttgggtcgggaagatcccctggaggaggggatggccactccagtattcttgcctggagaatcccagggacagaggagcctggtgggctacactccataagactgcacagagttggacatgactgaagtgaattagcatgcaggcatagaaaagtaaagatacaggaaaggaatccaggcagaagaaactgtgtgtgcaaaggcatgggatgcaaaagggcccaggacatctggaaatggcaggaagatcattgcagggttagcacaggatgtgggggaacagaaggaccctgaaccacaggctgagttgggactgagtagggactcgtccctgaaggcaatgggaagttagggatagattttaagtggagaggtggcagaatcatctctgtgctttagaaagaccatcctgtctgtcgtgaggagaagaaaacggggatgagggagagatggcggtgctggaagcccagagcaccgtctgttcaactagtttgcccaaagccccccagcaagaatgccaggcttgactgacagggcatgcgacggggtggctgtggacgctggagggaagttcggtccctgcttcaccttcctcggcctcctgctggaaggcacatgatcatgcggaaaggctattaccatcccaccagaagaagcctctgcttgttaaaattctgggccatagtgtcttgtattaaagctgatattaagccataaaatgtaatatgttatgacaccataaaatgcagtgtaattgctatagaaccataaaatgtaatgtaacgggcgccgtgaccattacgctgcttcacagcctaaaacacttagcttccactctgcttttagacaaacaaacaattcctattcattgctacctctggaggaaggtataggaaaatcaacccagatgagcatgaattgtaaggcaaatgccaaaggaggatgcagtggggtgtggaggcaaccccaggctttgtaggaagacagaacctaggtttcagtttttttcaattatgtcttgatcaagatcccaaaaaagcagagccagagatgggggttcagactagatttctcctaaaattacattttgtctaactcctacaggaggaccacaaagctgcacccaaacaggctgggagttagaggaggaaatgggggagctctggcccacaagcccccagcaaggggaaccaccagactcgtgacagcaggtgtgaattgcccccaggactgaactgacatcactgaccttctgagcataaacatggctacttgctgcttcacgcccaacttctgaaacttgccccaaatcctctcctggccaattcaaacacagaaccgtatagggaaggcagtttggggcaaagattttcatttaactaaggtgacactatgtaagatgattctgagaagggaaggcagaggaaacagggagtagaatcacagttggggagccagctatggacggggaagaagggaggcctgtgggtgttcccccagcaggggccaaggctgtctgggggctcaggcagaaacaagggattgctgagctgagggcaaaggagaaggaggagttagctaggtgagatggatgtggaggaagacactggtgtatagaggaggtaggggggagggggggagaaagggtgagggaggtgaggaggagaaaaaggagg

SEQ ID NO: 24532 - DNA, 2584 bp, Bovine  19866881210017
  misc_feature (1)..(1): n is a, c, g, or t
ntgatgattaaataagttactgaaaagacaatgatatggaaataataatagcagtttaagtacttatattccagtcttccttctatgtttttatagataactcatttaattttcatcacagtgctttgaggacaacattattattcctattttaaataggaggaaactgaggcacagagtggttaaataagtcacccaaggtcacacagcagagccacatttcaaaggtctaaaatcagctcttgctccctgctccctctctagcactgaatagaaccacttgggtccttaacatcctcttgcaccagtcaacagaagctgggacttagaaccagccaacaccctacattctctaggtgtggccccacacctttaagcaccagtattcttctgagcatctgagtggagaaggtgtgccaggtagctgaatttgggttgattaaatcaaggagaaaatcaattaaatttaaataaagaaaaaagattggaaatcaggcacaatgccttcttaattacagcacctaatcactggctgaaaaaaaaaataaccacagaacatttcatttcatataaggccttgtgtatctaaagtgagaggctcctaatgaaatgtacatttccccacttgactagtaattgactaggcgatcctggcagtttcatgagtggaaatgatcaggcgtaatagccagagcttttaaaggatgtgacaacacaggatgctttgggggcttattgaggggtagttgaccccaagttctcctttccttgcagtacaactcacaattctcccgacagtgaatgcagccactgggcagggccaagtgtgcaatgcagcaggcgagcatgattaaatggcttttttttctgcacagtccagtgtcatcgcaaacacacagagctgggggaagatcgccggcaatcagcgactaaatgcctcaaagaaattactctgacaagcatccctgccatttagatcctggattatagccttctaattggtctccctgtcccccatctccctcattccaatctttcttgtccactgcagctaggggcatctttatataggcacatctcattgagtcacttctttgattaaaacccttcactggaggctcgttgagattagagcagtccagactccctaccctggctcagggaagggatcaccgacgtggatcggattccagcccatcatttctctggcctttgttccctgttcctgcatcctttattccaaacatactgacccagtagaattctttcaaatctttcctgcactcatgatttcatgtctttgcatgtgcagttccttctgcctgaaacacccttcccttcacctgactaacccctgtatcacatcctcccaaaccagtctcccacgtggctagacttgcttttcagactagctttctcctatcacggcaaacattacatggaataatgattgttcacgagctcagtgagggcagattcttaggtctgttgaattgatttctgcccagaacccagcacagtatccagccctgcttaaagactttgttgaatgagtgggagtagacttgccgcgaatggttgccatcatctgcatgatgtggagcttacttcttacaaggtaacacatctagaacatcatctctcacttggtatgctatctttttttttttttggactactaatgagtgtaataaggctcaatgtttgcttgctattttggtccttttagaaggtgggcagtgaccagagctcctggggacatcatcgactcagttaattggacaactagcccccgtttactgtacccctgtgattgcccagcattgagctggacagctgagctttagaacgctgacaaaggtgaagtatctgtggtacaatagctcacagctcagtgcaaagcagatgtgcaaatggatacttacaacaccaggccataaggaaggatcgatttccacaacagttccttctgtagggcaggggactgaagtgcagaaatgggccatagctttcctgaagtcacaagtaggaaaactgtatatcccacctgcctcccctcaagacgcccatgccatctttagatggaggagaatctcccaagccaccagtgtagaagccagatccagtgaagccatttttgagatgggtaagcctgagtgcatttggaagcaggtgaggtttagagaagcatcaaaattagagtttagtgaaagatatagtgattccaagaagttaaggtctggagaccaagaatcataaacaccgggtctctgctccaggtccactgaatgatgttggagagaagttctcttaaaattccttattgtctgcagtttggagaaggcaagtgttgaactactcattgcattcattcattcattcaacaaataccagatatttaaatgagccaggcaatatgctaagtcctctgcagacattttctcattaaattaaagctgattttaaggtattcttctaatttctccccctttgcatatggggaacctggagtcagaaacaaaaataacttgctaaggttgccaaaattaataataatataagagttagcattttagggtcattt

SEQ ID NO: 24533 - DNA, 1311 bp, Bovine  19866881353037
  misc_feature (1)..(1): n is a, c, g, or t
nactggagcaggttgccatttcctatgccaggggatattcccaaaccagggattaaacccaccatctcctgctttggcaagcagactctttaccaatgagccaccagggaagctccctccatgattacccgatattaaataacagtcacccctctcacttttctaggccctttacactgattcattctctctataatttattactgatgaataagccatattattacttgcttgtgcatttattacctgcttttccatgtataatccaaactctgtgatctctgggaacacctgtgtcttgttcactacatccccacacttaaaactggcccggagacactgcaggcacccagggaatcagagctgatgaattttaggttagcctcagctaggacaagaatggcaagaggcaaaccttgctggaggctgggcaggaattgcaagctttgagtttgaaaagagccaggacagcattccacacagatagaccagagggaacaaagacatagaaatggaaccctcatcatgggggaaaagtggagttctggaagcatggaattgacggtgagaagggctgggtagaccccactagaatccccatctttcctgggcttgaagcatctcctagctccgcttctaaagatgcactgagaagcggctgacagagatggatgtgttttgctgccctcccttcaatactgccaggcttggcctgcgctcctggcagccccaaggagcaggggggcttatcagatgcatttatcctgagtcataaaaccaatcttgatgcaatggctgcagaagctcgatgcaggagagatgctaatacctttgatcaatgcttgacctgggatctgcaggcagggcgggcaggcagggagggcagcaagcatgcttgctggatgttgctagatccacctgtggctctcagactgctgactcttcctggttaggagccaggagatttgagtgacagccccttcagagactgagtaggcaatttcttttccttctctgggactcagagaaggaggtgggacacaggtcatcttcctatgcagtttggacctcatctcagaggcagaggggagagcttcaagccttcactggaactgctatcccagatgggtgagctcccacctgctaaggacagcagataggaggcttggttcacagagaagtaaaggaaaatggaaatgacacattttaggcctttcctgtttgtttatattatcttattttatcttcacaacaactcaatgatatatggactgatattatcctctattttatagctgagatataaactca

SEQ ID NO: 24534 - DNA, 1278 bp, Bovine  19866881379096
  misc_feature (1)..(1): n is a, c, g, or t
nacactagaaaaattcatgtgatggctcatatggctaactggaaaaataaaggaagtgtgacttaaatttgtaacctgtttaagttataaaagagatggtccttatgaaatatctgctcatattctaaatgctttctttgtactaattttatcttaaaaacaatgtctggaaagtatctagctctttgtctctcaaggcacagaacaaactatggcgctctaagcttcttcattgtatgctctccagcatctgactttccttacagtcagagaggaaagagaaaatgctgggtccccacacagatgataagaaaatatctgctgaagagtggacagaatcccagtggcatggtcaagcagtcagcgtgatgtataaacaccagccatcaggagtactgactgactgtgttagttatatgtttaacacatgcaatccaagtgccacatacatgcatcttaacacatttaactatcacaactaggttttattattattctcattttacagatgagggcaatgagattcggaaagattaggtagcttatccatattcaaacagtttgttagtggtggagccaggattcaagctgggtccaaaagccatgatatattctgcacttccctggtggctcagacagtaaagagtgcgcctgaaatgcaggcaacccaggttcgatccgtgggtggggaagatcccctggagaaggaaatggcaacccactccagtattctactgcctgtcaatacattacatcaaaggtggggtatgtggctgggaaactggtttcaaaaaattcttttctgaaatgcacttttggaacagagccctgaggaaattaatacctgttgaaatatatttacaagcactaattttggaataacagggtttgaactgcctattttattataattattgcttcatactcctgtgggtcatggtttggacaaatgagtgtcacttttctcacagtgggctgcaagatgctcagagacaaggtcggtgaacttgtgaggtttctgactttttaatataattttattttactttcaagtgaaatcatgactacaaaatgtcaattgatattacagagaagatccagacaaagatgtggtcaaaagctataggtagtgtgttcaggacaaatcgaagttttcctttgcactgaaaaaggtgaatggattacagtcttgggcaacgggctcatgtgagtgaaaaccatcagaatgaccacttatgaaggggcttatgaagggagtgctagtagggcaagaatttt

SEQ ID NO: 24535 - DNA, 705 bp, Bovine  19866881639424
  misc_feature (1)..(1): n is a, c, g, or t
ntataaatggaatatggaatcatatagtaggcagccttttgtacccgttttttttttccgttcaacactaagtttgtaaaatccatcactattgttgtctatggtagttcactcatacccattgtacagatgaggaaactaaggctgagaaagagcaatcttaagaaaggtcctcagacaaccaagggaacccaaagctcctctctgttgcctctgaattaccaccttcttgctgccacaacagcgcccctctgtggggaggatcagctcctccttttcctgtccacccaacaggactctttgaaaaagaccagcttaatcacctccccactgcctttttttttccccaaaagcctttactcattcttggctccaagataaaatcctctttttttcccccagctcattccttcctgtgctatcgatagaaaacttctccagctctgctggcaattaccacagagagaaatctcatctatttcgggcgattcatttgcgctttcataccgggcctgtctttaacacacctgaatggccctcttcaggacagcctgccccctcaagctgcggtttttcaatgccacctgccccgactcacaccccctccatcctgactcttatcctttccatgatttcattccttgcactgttggaaatggatcattcaacccagactgtgctaataagacgaatagctcttccctg

SEQ ID NO: 24536 - DNA, 799 bp, Bovine  19866882136893
  misc_feature (1)..(1): n is a, c, g, or t
nactatataattagtccagagagtcactcaacaaatagcagcaacacaccctgggaggggaagggggagctgattttcagagtcatcacatggtattaattgaaatgtttgcttttcaacaaagtatagcctgtactcaaggcctcatttctcctgggaaatccttcttagcccccaggtccaagctgggaaccctcctctgagcttccgcagcgctttaaaccacccaagtatgaaccccactctccttggctagctggcatcacatgggtgcttgtcttgcccatgggcctcctcagggagggaaaagagtccaactattcacactcagtctccctcagcaagcccagtgagcgcagcacacttatcagctaaagcaatgaatgcgttatgaacacagccacaggaaacagcaccagagaaaaggctagacatttccttccaccttttccaaggggacactaaaaaattctcctgttgcttataaaggactgtcatttaaatgccgttggtttcaaagaaataagtggcttgagcttgaagatgggaaaactgtcaaccagttaagcaagatttcctcctcctctgcccctctgtgatgaggaagaggagaaggcgtgttacctgcgggaggtggatgggccacggtggtggtcggtgccggtctccttcaccaggtttcctttgcagcagatgacccttaacttatcctgatatgaggacgccaggtagatggctcctgaggagattgcagggcccaggtagcgtgggttggggatttccaaatatgctcgggcgg

SEQ ID NO: 24537 - DNA, 1464 bp, Bovine  19866880525178
  misc_feature (1)..(1): n is a, c, g, or t
ncgcctggggagaagggctttgcgggaggtgggactgagcgcggccgcagaggccacgagtgtggtgggaggcctctggggaggggaggagagcggctctggagacggccttccagccccgctgtgaccgattcactctcccggtgatttactgaccctctttctgtgccagttccttcaaacgtcagattatgtctaacatcgcttcttgccattctgtcattttagcacccacctggctgtagaattctcttcctgtctacttccagttttttgcttaaacattaaagtaaaaaaaaaaaaaaaccctcacatacactaacttccttttgttcccttttgtttgattctgcccaggttctttggctccataaatatttcccacttaaagagtaattacattaaggaaaagccatacatttaaacaaatatggctttcatggttgcatgataactgcgtctaaatcggctaattcttattaataaagggacaaggaaatatgcaaagacataactgggtcagagccttggacactgacttaaccttcctttgcccttctctgctgaagctttggacggaatatggacaaagagcaatttaaatctctttccattcctgtccttagagcagcttcacatctgaacctctaataaagatgcggataataaaatggcagggaaagtacaatggaaattatattgactctcatagaagtgttggaggagaaatagattctcttccctcaactctgtaataatataatcatggtatgatttctacttcgctagacttgggactatttggaaatctttaatgaatataatcaggtagtaagcatttaaaagttactcttttctgaaagccaggaaattatatgctcagtcagtggaaaattcaaagaaaaaggaaaaagaaaaaaaagcaagctacctttttttttttaaacaacataatacacgtgtcgtgatggaatcaaggtgggaaatgagacctgagttacggcatttgctttggaccctgcagtataaacttggggggagtcatataatatctttggggatgcggcttttgtgctgttgcaaaataataattgcaagcatttatatctgccacgcaccaggcgctgttctaaacttctcatgtttgatcacttaaccctttgactaactctgtcgagtaggcactgtcatcagattgccatttcgttcttgctttatctcacccaacatttcaattaagttacttgaacccacgtctcttggattatgaatctatgcttgtgaaacaccgtgctgggctgccttgttatttacatcatttttatctgaggccaaatatttcagttacacaaaaagtgaacatatttctcaacatatacaatagtacccaagctgaatataaaaactcctttgtctttaaaggaactctgagaaaggtcatttattattttacttaattagcaa

SEQ ID NO: 24538 - DNA, 978 bp, Bovine  19866880526856
  misc_feature (1)..(1): n is a, c, g, or t
ntgctccttaccttggacgaggggtatctcctcaccgccgcccttcctgaccttcaacgtgggataggtcaatgtaataacataagtacgtgcatgtatacatatatacccagggagagagaagaatctaatatcaagctgtaaacgacactaacatgtaggaaaggagtttgacaggcaactcactttatcacatctcatcagccccaagtatcttaaagacttgctgctctgtgcaatcagggtggctccttggtctgtaatctccttacaccatccaacgtccacggtctctattgtcatgctgtatcgcccaatggctatcagagctgcaaggggagacagaggaagacaggaagcacaaatgtcagcagcataagggatctctatcttattatgactatttctctcatttcctcactacatttgttcctgaaatgttgtgtataaacgaatgtttcgtaaacgaaatccaatttaaaatgctttaggaaagcgtgccctatgacagagcctttcacaaagtgaataatcattccataatttcccctttattggaacacaaccttttatcagtttaattcattacaaggttacctgtacttccaaacattcatatctgtagagggcatacactcaaatgaattacgcatataacattacaggaaacccccaaggagtaattaaattttacccaagataaatttaataatttttaaaaagaaaaaccttcagaaacaccattttgaggtgtgtgattctgcatatgaatttctttaccaattggcacattttttcccccatctgttcatgatctgtaaaatgtaagagaatataatatttttcacattagtccttcttgagacagctgggaattaagaggacattacacatacagttgaatttagctggtgctagcatttgttacgggagaaggcaatgataccccactccagtactcttgcctggaaaatccca

SEQ ID NO: 24539 - DNA, 1722 bp, Bovine  19866880565829
  misc_feature (1)..(1): n is a, c, g, or t
nccagtcaatgtctaacagccacctctcaagtcaaaggaagcaaaataactagtctcttcgagttacgtaaagaagtctctcctttattgttaccatgatgaagcaggtagacaagatagtcgtggcaatattttttccacttcaagataaattaggaacatttggtacttttaagaaaaaattttttcagttactaatgaacatttttgagttgtctataactgacttctctctgataagttaatggagaactggaaacctacttatttttgttggactactgacttgaattttgtttgaaaacaaagcacaataaagtgactgatgaaacattgaaagaaaatacagcaacaacaagtaagtacctaaaaatgataattgtaaattacatagatgaataagccatgtaaaaaatatgttaaactttgttatctatagaactggccttcagtggttattaaaaatgatggtctctaagtccattgacttttaataaaaagacaccaaatagataaacaaatgctaagtcaatttctcttcaaatatttaaaatgttaaaggttaatctatgttgctgaattagccatgacagagtgaaatgttgtaaataataaacggcctctaataataactgtaacattatataatgataactgtaacattatataacagcaatatttaaataacagttcagagtcacattgcatgctgtcagcaactagccatatgaggaaaaaatgcaacaataactcctactacacagttatgttacccaagatttcagggaagagcaaggatgtatgtatggctctttacaaagcactgaagtctttgattcttgagcatcccatctgcccaacagctaagaacaaccacttccttttatacaaaagattatgagccaaatgtgaaaactgaaatgtacagagaagaacttcttcagttaataagctctcataagattttaactataaacacacaatgattctctagtaaataaaactggatacaaaagagcatattatctaccacaaggttatggttttctctaacacagtaattttcttctgaagaaaagattctataatttcaaagaagtatgcttcaaggggagaaaaagcccctcagtcttttaaaaaattatggtaatacactgacacccaacataacgaactctctttcttgacacacgctgattggtattctgcacgtattccaagaagttaagacacaggaataaaagagattgcacttgaccttttttcatatcatgttagcaattactcttttcaattcacctattcttataactgacctcatttggcagggagatattaaatatccaaatattttaaggatggtagataatattacaaaatgattaatttcttaccatccacctacagagcctttaaaaatattaaagctaccctgggtaaagaagctcttggagagttcctctcaaccataataaaggaaattctaaacagtaattaatatgagaaaatatgattgctctttgagcactggtgaaggaaacgtgagtgtacgttaaaatttggtaaagagaagcagcacgcagaaacacataaagagaaaacagggctcctatggggcccgctcaggctccaaggaaagcttttcacgaagattaaagaggcagtgggaaaaaaagagtttgactagcttttcaggaaaatacatatacagtagcaatccat

SEQ ID NO: 24540 - DNA, 1402 bp, Bovine  19866880587178
  misc_feature (1)..(1): n is a, c, g, or t
ntgctgttatgtaccttgctacatacaatcgtttttgcgactgtctaaaacagttggtattatagagcacaatggactcccttctcaccacagcccagttcagctcagacggcatttcctccagcaaactcgagaccctaccctgctctgtatcagattcatccaccatgtctcgtacgttcccgagccacctgctcatacctttggcacaggccccatcacctcacactgcaactctgtttacttatgattctcattcactggcctgtgggctcctgagagccatctttgcgcctgtatctggattctaagcatgtcatgcagtgtctagcacagtggagatgcccatcaaatgcttgtgaaggcaagaagaaagcagcgttcggttatctgtatcattcacagccctgagcagtgcttcacacagagcaggccctcaacgtgacactgttaaatgaaaggaaagggaacaaaaaagaactgcacttattcagggccaggaaaaacggtgagcaaagtcatctcgtgaaatcgtcaaacaaagccttcctagtaataaggtaaacttatctttatagaagaacagggaaggaagatgactacgatattttatgttcacgacagaactgttgaattcctcaaaacagttgtctggctcagttctaccatcaagcaggtcaactctgaagccttccaaccacgtgggtgttcattccattttgaacatcttcagattatattctactgcttggtaaccttagacaatgcttattgatattttataatcaaaaaaccccttctaatgtaaaagcaatccccctcttgctactttaaactagtttcttttgttcattcttctgtagggatagagtgctggtttgcatccttatgataaacctcttacatactataagacagttattaagtcatctctgagctttctattttcctggctaagcaaccaaactcctttaatctttccccacatggcttattttacattccattaagcatttctgttgttttgccatagaccttttccaatttttacacttccttttaaaaggtaggaatccaaagtcaaccaaagagtttaataagagctcatacaacactaaacatagcaaaggattactttccaaccccctgaatcccactatcacaggagctgtgtagcttgctttgctcaaagccaacaagtccttaccgcctctccatggctgctgacgctcctgtacgccctgaaacctggggcgtgcggggggcctggcaccccactctctccctgtggatggtggttcggaggtgccctgggcacatgctacaccctctttctgccctagcttgctggactagactttggggcgtggagcggttccaggtggatctcatcttaattttc

SEQ ID NO: 24541 - DNA, 848 bp, Bovine  19866880605699
  misc_feature (1)..(1): n is a, c, g, or t
nctgaaattttctttgtcttttaatagaaagaataacttagtagataggagcaaatatgctttcattttcacaagttttacaatatatgtccagaccatttattggaaaggcatttaggagattattttatacttattaaaaaaaacagaatatgatatattgtatgactttaaacagcaactaaatagtttcaccaggatagtaggcaaaccaagaagtcagcattattacattccttttctgctgctactgctactgctgctaagtcgcgtcagtcgtgtccgactctgtgcgaccccatagatggcagcccaccaggctcctccgtccctgggattctccaggcaagaacactggagtgggttgccatttcctcctccaatgcatgaaagtgaaaagtgaaagtgaagtcgctcagtcgtgtccgactcttagcgaccccatggactgcagcccaccaggctcctccatccatggaattttccgggcaagagtactggagtggggtgccatttccttctggacctcctctaattaccaaaaaaatgtcctctttagattgagtttaaaattaggatgctacattaggtaagtctcttccttaccttttctgtagggttggctgcctgttgaaagcagaaaagaatgcattttgtgcatatgtaattatacagataattgcctctatcatttaaaaatatcatttgccaaaatggtgtctatgattaatgatgtacatttatcacagagtcgactggggtatattataaaaccctttccctaagctcacgcatctttcctctcttcttatttttttcaatgtaactcgtttagtaatcaaatgttt

SEQ ID NO: 24542 - DNA, 1836 bp, Bovine  19866880631233
  misc_feature (1)..(1): n is a, c, g, or t
nacagcatattcaaaagcagagacattactttgccaacaaaggttcatctagtcaaggctatggtttttcctgtggtcatgtatggatgtgagagttggactgtgaagaaggctgagcacagatgaatagatgcttttgaactgtggtgttggagaagactcttgagagtcccttggactgcaaggagatccaaccagtccattctaaaggagatcagccctgggatttctttggaaggaatgatgctaaaactgaaactccagtactttggccacctcatgtgaagtgttgactcactggaaaagactctgatgctgggagggattgggggcaggaggagaaggggacgacagaggatgagatggctggatggcatcacggactcgatggacgtgagtctgagtgaactccaggagttggtgatggacagggaggcctagcgtgctgcgattcatggggtcgcaaagagtcggacatgactgagcgactgatctgatctgatctgatctgatatgttcattatctttctgtttgatggtcttttccccagagagactaccaggaaaaatcaagcctctttttttaagtggcatactcagaagcacaataacatacttcagaaatgacaatggatgtgtgattactgctaaaatttaatacacgtgcttgatggaaaagtaaatttcgtaacatcctatactaatgtaatccatacactgaataaagactctatcctcaactttctatttagataaataagccggaatctcaagacaataaagtctcactagagggtatccaatagcagaactttaaattgctttcagcgtctccatgacgattcagtgcattaatgacaagtgattggttaaaagcatttaaatcaaacttatgttcttgaaattttccatgaacaaagacaatatccatttagaaagatctcacaaaaatgagtttggtgtagaaaaatataataatataataaattattttaaagcatttggctagtggataacataattgagtaggtggaatataacctaagcccttgaatcacaaaagagtcataggtgatgggtaatcaaaaacatctgtgctcacttacatttaccactgaaacatgaactatgaaatagcggatgcccataagctgatctgcagataataaaacatcaaagcaactaacaacatttgaatgctgtcctcactgccctaaataacctgagagcagaaagaagaagaattctcttcatgtatagtagtagagaagtagtaacaaaagtctacttcatacatagtagtagtctgttagttttgccctatttttatatataactgtaactatttactagctatgatccaaaaagagaaaagaaaaccccaaacagcaataaggacgatatgtattggatgttttttatgtttttaatgaaagcgtgacaagtgaaaaccaagtctctaaaacggaagtaatttctaattaaatgacttcatcattacaaattttaattatcattataataacaaaagtagaatttaagtaatctgattttaaatatttgagtaaattaaatgtatttctttctacctctttcgatgaaagcacagaaaagaggtttcttgggattagctctcttaaaggttggctttcctgtgtcccagaataaaatcaaaaacaaactataaacaagcaaaaaccttccttttctgagtgaaaatgtgacctttggttaacttcctagaggtgttctccaaaaatggtacgtgcaccaccgcttagagtatcagcgattcccttctggtagatagcatctgtctggcctaagagaactgca

SEQ ID NO: 24543 - DNA, 1088 bp, Bovine  19866880671555
  misc_feature (1)..(1): n is a, c, g, or t
ntatgattgtgaagaagactaaagctcccagatcagttagctgacctgctgaaaatacagacataagatgctgctctgatgtctgcgtgggaccttttctcaaggacagaggagaatcgctgtaatccttactatctctaagaaaaaagtgaaaaagaaccaacggactgagtgtcttgagggcatctcactgtttccaacacagattaattttttggatgggctatcatgcagcattgtcaatcaaaccctcctaggattgtagcgtgccatccgccctcagtacagccggagtcatgaatgctgaaagttagctacgaaagaaatggaggtcatgtccccgactttcaaaatgtttgcaggctctaactttctgttaaggactgagcataacaattacttcgagttggtgccaacggaggatatttgccatgtgtttaaggttatttcatgatggcaaaactgagggtaaggatggggggggaatgttattttggttactgtcatttcaaagtatcattcttaatagcacccgcaactctagatgaaattcacccagtaatcattcagctcatcggtggcagccatgcagtatttaagcctttgtcctgctttgcctattaatggaaggtacacgcatgtttgcaagtaaaatcctcttttctgcttttcttgtagtttctccaactatatcttattgggtacacttaagagatcagtaaataggtaagcctctactgatggatcaacaattatctatttcaagtactgatactcagatattctgtatttcataatgcatgtttttcagagaatggcaacgtcctttggatgacactcttgatggaatatactcctaaaatttcattctctatgtaaattatctactgaaatatcacagaatgaatcatgcacattaaacatgaaatcagatagaaaattaatctgcatttgaaaatctcatcacttcccccatacagcacttggtaagtatcgaatgtcatccagcacgctcccctgcatcactggataaactgcttccagagctgtgcggagtttggccttctcactgacttgatactcacgtg

SEQ ID NO: 24544 - DNA, 2062 bp, Bovine  19866880719195
  misc_feature (1)..(1): n is a, c, g, or t
nttaatttcatggctgccgtcacccatctgcagtaattttggagcacccccaaaaataaagtcagccactgtttccacggtttccccatctatttgccatgaggtgatgggactagatgccatgatcttagttttctgaatgttgagctttaagccaactttttcactctcctcttttactttcatcaagagcctctttagttattatattgcagtatgctgctgctaagtcactccagtcgtgtctgactctgtgcgaccccatagatggcagcccaccaggcttccccatccctgggattctccaggcaagaacactggagtgggttgccatttccctctccaatgcatgaaagtgagaagtaaaagtgaagtcgctcagtcatgtccacctcttagcgaccccatggactgcggcctaccaggctcctccgtccatgggggtgcatgcaatttatgattaaaacacataaattggaggggatagatcaaagttattttagaagtatgtgtgcaatgaaaaatctttgagatactggcatagaactacaaatggaaaaataactatcttgatttgtctacatatttctgaataaaatgaaaagagataatctgattttaaaaggaactagtctgatgtgttgtcttaaagtctaatcccaaaccattggtatttcctactatgataactgctgtgacttttgaggaatcttcccttataaaagtgcttgtttctgagatttcaaaatatagcaatttattgatgtctatgagttgtgggaccagggatagtgaatattgatctgtgaataatcaatgagttgaaactggatagattctcttaagtctttaattgctaaatgccactttctggctgtgaagatggggatgaaaaggagagaactgagtgactgccatgagacaattgttgcagattacatattacacatttaatgtaatctgattatacaccaaagggttaacaagcagacctgggttgttcaaaccctccatcctccaaagaaaggattggctcttctctggcttctgggaagtaatgtctaaatcctcagaatatcccgcttgataagagtgactttccatagctggggccttgggtgaccccagataacttacgtcaatgatgtcactgatggtggaagccttgagccaccctccatcagtctgtccttagtgggagttggagcctgagtgactatggtcaggcatgggggctttccatgcctacgttaccaaccccagcagcagccctggacaccaagactgaggtaagcatcccaggttggcaatgcttggtacatagagatccacatcattgctgggagggctaagcattgtctgtagactccgactgagggagggtattggaagcttatatctgcactatactctttcctgattttaatgtttatctgttcatcataataaacaataaccataagtgaaacagcttttctaagtcccaagtccttttagtgaagaatcatagggtggtcttggggagctcgaggacaaggatgagcatatccatgaagttgatcaaactctgtcatccgatctcattgcacagaggaggaacatgaagcttgaagaggtggaagtgacttgctcaagatcacacagctggaaaataacagagccaggtatccaaatccaggactcagttctgttcagttcagttgctcagtcatgtccgactctgggaccccatggacagcagcacgtgaggcctccctgtccatcaccaactcctggaggttactcaaactcatgtccatcgggtcagtgatgccatccaaccatctcatcctctgtcatccccttctcccaccttcaatctttcccagcatcagcatccaggactgtttaaaactaaaacttgtatttaaagtgaaagtcacacagttgtgtccgactctttgtgaacctatgaactgtatagtccgtgggattctccaggccagaatactggactggggagcctttcccttctccaggggatcttcccaacccaggaatcaaacccaggtctccctcattg

SEQ ID NO: 24545 - DNA, 907 bp, Bovine  19866880770487
  misc_feature (1)..(1): n is a, c, g, or t
nactgagggaggcaaatggaaagcatgcaggaaaacagagctagagcctgagaatgcgaactgctggtccaaacttcatggctaactgggactgtccagaccttcagggtcttcagggccatgaaccagtcaagcccacccctcctttttttgttcaaaccagttgagctggggttttttattaattgcaacccaaagattcctgaccgtattccatgtgtttgataaatggttttaaaaataaatgtggatagaaccctgaactacattttggtcattgatggagaggctaataaacttatcttttgtgtagagaaaaactagtttcttactataattgaaagtttaaaatatattatttgcttagacccaagcgtcccttcattatttttagaacttcctaaaatttatgccatatggaatctggagggggatgtttgaattctaaatgaagagtctcaaccattacaagctgcatgaaacataagtaaaacatttttgccaatttttaaaattttatttgtataccctattttagatctgggaatctgacactaaaaatggtctcagatttaatgttgatttgtattcaatgccaacaataaaaaaaagaaccctagttaatatgtctttggtgtttttattttagtgaactgctatttcataagagcggtttcccagattgagtaggggctggaggggacggcgggcaggatggtttattctttatctgtgaagaaaaatttccaccaatagtctggaaaaaatatgcaaccgtcttttctgcaagaacttaagaaagtaatgagattttttttcccctccttagcttctaagaaatttacagtgaaccccattgttcttgggtaatctagtcttgggacatatattttagaacccgaatgta

SEQ ID NO: 24546 - DNA, 3290 bp, Bovine  19866880826917
  misc_feature (1)..(1): n is a, c, g, or t
naattacaatccttatttccttttttttcctcccctccagacagactattttgcagacgcaggcaatgcactcagggcagggcagacagtgattatcatcaccccctgctttcatccattagagctgggcgttagcaggtaagggtgaggggctgacaaagaggttttcaaaactggtcagcataaatgcttccaggaggccaattcaggataatctattgaaatatggatcagaaatatggccagccaaggctgaatacctctatctgttgcatttaagccaaagcaatagaaagctttcatgggagaaaaataacaaaagccataattacatgtggagaattgtctgttcacatcatctgggggttaattttgtgaaatggttgccattctgtctgggtccagcatctgtctcagtcattttatttgttttgagatgctgcaggggtgagatccctggagactcgagtccaggaggccttctggtttccaggagccaatttgtgacaagatcaaaggggtccatggtcccaagagaccaagttacactttggaatttacaggtgtacctcattttacgcagcccttctacgctggaaacacactggaaagtaacttttagtgaattgaattttattaacccactaatccttttaattggtagtggcccctgatcatttaattgatcaaaattgaagtggagccataaaataaatcttgttaaaagttaagaatgctttgctgatgtaactatcagtgttttatggcaggttttttttcccccatgtaatttttattcgataatttgggaagtggagaagtaaaacaaacaaaaaaatcattttgaaagcttgaagtaaaatttccaaacacttagaaaacagtaattacaatgccttaaaattcaaatacatagataatgcttaaattatgagagataaaaattgccccactctgctttatttggggatagttcaagcaaacagacaagtataaagagtaagacagtaagcattcaccaccagcactcagaattttaagatactaacaggttttctttattgttcaaaaataaccgtaggtacatacactcaaagaaggtttaaaccactttccggtgttacttccctctgttgctctctgagatagcttctaccccaaagcaggcatataccctgcccatccattgtctgtgtttttactaaatgtatattttaccaatttttacttacttatttttgtaagttcttaaaatgttcgtaattgatatcacgtgtcagtcttgcttctttcactcactattttgttttgggttctttctgtatcagcccatgtagatcaaggtttaaataaatgtaatcggtatgggacatgccatagctacttacttactcatttttctattgatgtgcatttatgtggcttccaatatttcacttgtataggctatgcagactgtctccttttgtataaatgttcacgtttctttcaagtctatcacagcaattggagtttctgagtctggaaaacgtgcatctttatgaacaccaccagattgctcgccaagtctgtattctcaccagtaatttatattctcattgtaataatgcggtcagattcatcaacctttttctttacaaatttgacttgctgagcttggtttaagaatttcttccctctctgcatcataaaaaggtatagttagttgtgtgttcacatttgtgtctttaattcatttggattttttttttttttgaagtatgatgtaaggtcgggttctaattatatagttttccatgggcagtgaagccacttacaatgcctcctggtttctaaggtcacctctgcttacactgaggtcttatgtaggagtaggtatttccattaagtgataggtctggcttcttttccgttcgctgctatgttgaccttccccctaacaccacattattttactcgatacagtgtacactgtagtaattcatgatatctaatgaggcaagtctttccttcatatttccttcttcaaatttgtcttggttatccttggaactttatgctcttatatgaattttatagtcagtttttggaaatctttaatatgataaagtggtaattaaaatgtgtgatataatccattctacttacatcaaatcactaaatctaatttattgctcattagtcaatattaaagatctcctgccatgtcttgacacttaacttctttgaaaaattagcttatcatgttccctttcttctacaaataattactttccctcactttcagtaattttcatgttattcccattgtcccaactcatgggctcttaatatccattcctgcaccaggttaactgatgtaattcccttcccgttgtcctgctgtgacagtattttgtaaacataactctttctctgacttgatcctcctctattttcctctccagtaaattctagaaatagcttgtagagcaactgttttcctgctttaatcatgcctcttgtatgccaaaggacttagactcttatttgccaccgtcttgagtgaccctctgaacccatggatccatttcacaggtgaacaacttaagtctcaaagaggccttgtcctgcccagagtcactcagttagctagcagaggaattgggactctaaaggtaaaaacctaatttagagcccaggttcactgactcctgaacccactgtctttctgtcatctgctctcctcccgcaaaccttcagatattattccctaactgatattacactgcattaattttacttcatgtaaatctcccaagggaacttccctatcttagtcaaaatgtgcctcgttctttcccactactttggaaacaccagctttcaccttgaaacccagtctccctacttttcactgaggtacctcaccttcttggaaacaagtctctttttcagactgtataactacagctactactaagtgaaagtgttagtcagtcagtcgtgcctgactctgcgaccccatggactgtagcccaccaggctgctctgcccgtgggattctccaggcaagaacaccggagtgggttgccattcccttctccaggagatcttcctgacccaggggtcaaacccgggtctcatgcattgcaagcggattctttaccactgagtcagcagggaagccctactactatgctgttgctattaccactcttaacggcagtgatgaaaccatcacttactgcactcttaccatgaatctagctcttgaacgacgtgacctctcctttcttcactccacagat

SEQ ID NO: 24547 - DNA, 1024 bp, Bovine  19866880827548
  misc_feature (1)..(1): n is a, c, g, or t
ntgcagagttgaaccggtccccagcctcctcagcctaggccctttctactgcctcctgctgcttgaaagagcttgtcaaagatcaggggcttctcaaattgattccctggcaatttttctttcagaaaaggaaatggtttcttcatcttcaagctataatcactttgtcacattaatagggaatatcttctcatttccagactcttgacaaataggtcccagtgaataaatgaaccctgctctttctgctacctgctaatttattagctgttttcatattaatatccagggccaaccttaggaggaggcaaaccaggtgtgcaatgcctgaaattctaccactgtaacatctatgtctttgccaacctttgtccccagtggaagcgcaaagggttttcaaaggatcatgaggcacgaattgaaattttactttgtgctagtctccgcggctagagaggcaaataataacaacatgaattgaacccttataaccacgaggcagtatgctcagcacatttcactatctcacttaactatgacagtgaaaatattagtcgttcagtcatgtccgactctctgtgaccccacggactgtagcccaccaggctcctctgtccatgggattctccaggcaagaatactggggtgggttgccatttccttctccacgggatcttcctgacccaggaattgaacccaggtcttccgcattgagggcggattctatgaaacaacccaatacacaggtcccattattatcctcattttacagattagaatattgagagttaggttagaaaatttgcccaaggcttgcagctaagtaaagacagagggagaggattttgaacccagtcagtttggctcccaatcctttgcttttgaaggttattctctatgaaacacgtttcctatgtgtgagaagccgtgctgcattcagagagagtggggtaatgggagcagagcgctgtgggaagtggaggggtgggtgctgggctttgcctggcacagagagcgctttgca

SEQ ID NO: 24548 - DNA, 1099 bp, Bovine  19866880835913
  misc_feature (1)..(1): n is a, c, g, or t
ncccgctggaacatgaggtgtgtaacccgctgtgctcagaggcacgcgtggagccagggtgtggaagatgcgtagctgtgttctccagtcctgtataaaggtggccgtatatttacgtaagacaaggttctatagcagtccgttatcaagagaaggcaggagcatgaaggaattcttttccttgcaaggtttatagagggggaaatttaggaaatcagaagtgtaagcaaagagagaacaacccaagtcatttaggttgacttagcaagggggacactcaagcaaacagatgctttcgtgccgaagatgattgcttccacagaaacccctctcctcttcggggatcaatatcactaaccaagggagaaagtaaacaaaaagtgttaaaacatgacgtcttctggacttaacaaaacaaacaatggtgataaaataacaaagaggcgaattacctccatttcaagtcccatttgggagatacacttctttgcagaggaaacctcatcaagttgagcttcatccacagtttttaaatatttactatggaaaagagtactcattctctttactgatatgtgtgtgtgtgtgtgtgtctgtgtttataattagttttcgttctttggcgcctccttaactcaattggatattagcagagcccttgattatatcttttccctcctccttgttttaggtattccagtcactttgctttttgcaatctgaataaaaggagatctgggaattaaactcaaaggactgattctggccctttaagcagtttgggacttagtctatgagacagttaaatctgttgcttatatttagcttatggctctctgtagacttaattcattcgtcctgctcctccttgtcaggcataattcagttggcttcacgtacctaaatccatgaccatctgcataatttctctttgagtttattctctttgccccatatttgcagcctcttgaagtggccagtctggtggccgtccgcagactaagtttcactctcatgatgccacacatcgggttgggggctcagggaagactgtcaacagtgttggaatgcctgaagtcttttttcagcaagctgggga

SEQ ID NO: 24549 - DNA, 2427 bp, Bovine  19866880838318
  misc_feature (1)..(1): n is a, c, g, or t
ntttttgctgactgtatagagcttctcctctttggctgcaaagaatataatcaatttgatttcagtgtcgaccatctggtgatgtccacgtgtagagtcttctcttgtgttgttggaagagggtgtttgctatgaccagtacattctcttggcagaactctattagcttttgccctgcttcattctgtactccaaggccaaatttgcctgtcactccaggggtttcttgacttcctactttaaccaggcaagaactttatgtcagcgggcttccctgatagctcagttggtaaagaatccacctgcgatgcaggagactccagttcaattcttgggtcaggaagacccactggagaagggatagggtacccactccagtactgttggaattcccttgtggctcagctggtaaagaatccacctgcaatgcaggagatctgggcttgatccctgggttgggaagatgccctgaagaaagaaaaggctacccactccagtattctggcctgaaggattccatggactgtatagtccattgggtcacaaagggtcactttggggtctcaaagtgcttccatatgtcgacacttatcagagtatgtcccatggagtacaaatcccttgaattgttctattgaaaataggttatgtggtcaaatgagttggagaaattttgcatgctagatctctactcttccacatacacataggaaggtttgccctgcacagtaacatgttagaaactctggtaagctctacattaaagaaccctgtttaaccttttgtaaggtggcagttttctcagaatacgtgacatagaccccttgtgtagccccttttaatgaaatactactatcctagcttttgaactgtggtgttggagaagactcttgagagtcccttggactgcaagggagatccaaccagtccatcctaaaggaaatcagtcctgaatattcataggaaggactgatgctgaagctgaaactccaatactttggccacctgatgtgaagagctgactcttggaaaagaccctgatgctgggaaagattgagggcaggaggagaaggggatgacagaggatgagatagttggatggcatcactgactcaatggacatgagtttgagtaaactctgggagttggagatggacagggaggcctggcatgctgaagttcatggggtcacaaagagtcggacacgactgagtgactgaactgaactgaagaagttaaacaagcatccatacgcatagccatgtaaccgctgccactgtcgtgaatattctttctcaaagaaaaaaaaaatgtgacttggtttccagtcaaaacatgaggcacttccccccccccccaccacctttttaaaaaaagaaaacaaagccacaaagcctacttgttagttttgggattcatttattttattctgctccttgctgcctggaattcagggcccttctatgaaggacttcaagggactcatcattccgtaaatttgttgagagtaggggacatttttgcatctctagcgcatagcacagtgcttggcacagagaaaattgagtacgtgtaggctaaactcagctgttgaactgaatgaactgatgagacagatgcataggacagggcggtaaagccgggagctgacgggcgttgaacagaaactcgcccatcggaaggagggaggccagcggtggaggtgtggctgtgacgtgtgtgtgaaggcagagtgcggttctgcttcctctgggaggctgtgtgtgcttccttgtgtctgtgtatatggagagatgacggtaaatggaaagaatacaggtcagaattgccatggcttgctacgcgtgcaagtccatttaagcaacatttgagtaaaatttgttctttaaaaacaatcaagaacctcttccttcctctaatcgtaaaaggttatctaccttgtctttttttttccgactttccaatttggctttccaaccaacaagtaatattacttagtttatcgttttaccgtgacttctaaatatatatatataaaaggaacaagttatggatgaagaaaaaatcagtctatttataaatatattaatgtgttttattccactcaagatgcctccctggtctgaattaggctgtaatggagccaaacatggagcttagcgctggtttcatggggagaagccgagtagtcaattttaattacttgttgccatatccttaaacaatgcaccaagcatggaaatgttcaaaatatctttccttctgtctgatttcactttagtcaatccaaatttggcatcactgctttttgaaatatttttgattgtagagcagttggtgattttaataatttagtatagaggagagaatgaagagaaagaaactggaatttaaagcacaatggcaaaaaagttaatttaaagtgat

SEQ ID NO: 24550 - DNA, 1516 bp, Bovine  19866880894319
  misc_feature (1)..(1): n is a, c, g, or t
nggtctttacaaaagaaggtgatatgtattcacatggtttgccttaaaaacattttataccctaggagtactttagaaggaatgatacaataaaaagaatgtcttttttattgtataattctatcaaatagaattacatataccacttttccttccatacttttgaaagatgtaaacgtgtaagctggcataaagggccattttccatttacgaagccaaagaagaatgctaagtaacatatctgagctgaaatgccagcaccagtttgtccaataggttttcaagatctcattctgcaaatcagactgaacaggggaagaagctagggaggggaagctaagatcgtatcgctgcagcaacagtggggagcagggaagtggggggaaggcacaggacaccacatgccacctgctaatcaattaggaggcctgtttgcaagctcgagaaatcctggaggctctggggctgtagacaccactatagtcaagagtcaaggaacacagaaaatgtaactgggaattctcttttgaacttaaaacactcacttatacttttaacacccatatgttaacaatactgtagtccataccagccactctgctacgccatctgctccaaaaaagtgttatttatcaccactgtacatgtgattgctgtttaaaaagctgcattgatatttttccttttcgtctgcattaatcgcactgttggatgagtctgagaatgaacttgattttcaagtgcagtattttacaatctctcattaagacagcggtagcttcggtgtttatgtaactgttttacactcttgttcttaatacagaaaacatcaatgtataaatcctttccttgttttacgtaacaagattattcaacctattgctgaatggggtcagaggagcttgtaggtcatttaatttactatttatttcctctaaaatcattcctggaggctgggagtcctctgaggactgctgctttccttccgcctctggctaaccaccccacctcccctgtgccaccctctaccttggaagatctgacaagtattctttagtcctgctctcctgaattcggaactattgacgacttcacacgagaagtctgactgatgtgttacacaaaggccccgatgtaggtgacgtctcgagatgtgctaagaagcccattattttcacagcacagtcatctgcctgtagaattttctgcaaacatttccaagggacaagacacgagagcctccattcctgttttgtgttgacttctgacctaacagcggaccagtaaatcccatgtgtaaataggaggctgggtggcaaggccactttcctaaatatttcacagtggtaaactctccaggttataaattacaagagaaataagacgatcatctttccccaccatgaacttgtattcaacacttacttttctattatattaagcaggctagcaggaatttagcagcgcacagaaactcgaagaggaacaaaaactggcctaaacaattcatcactg

SEQ ID NO: 24551 - DNA, 873 bp, Bovine  19866880895691
  misc_feature (1)..(1): n is a, c, g, or t
nccaaaccacaaccctaggaagaataacattcttgaaatacttcccaacgacttccatccagagggagtagaatttatagctctgtgtcagatgtcagtgatctgggatctctagtcaccggcatgaatttatcttaaactaaatggcatgcatcatgcagaaggcaagattctcacgtgctccagagccataaggccggaccaagctcactgcaaccacaactgctttcagaaattgtgctgagaaataatgtgaccagaactcatttagacagtcactcagatagtttatgtgcccatatttatgagcattttttcacaccaataatcataaacgcttgtgaccagtttgggtcttcatgtaaaaatgttaacagttgtgtgggtgggtcaagaggggagtatacgtgtgaaatgaatctctcattgtacatattttattaccatctgctgtttcaatgagttttaattacttaacatgcaattctcagtgctgagaatatatttaaaagtaagctaccccactcaagtagtttccacatagttggggctgggtagggagcagggaacagagccacaaaacgtcagaggtcacaaaaattctcagcctgcacccaagctttacttggccagcacaggattttttttaaacaagacttaaagttcggtgttgaattgacctaaaaatcgagattattaggtttgtcatagaaatatgttaacatctggccacactatcatattaatattcatgtctagccacagagctgaacagcagttgccctgtgaagtagagcctgagctctcccggatgaccacagtctcacttctttccacaacacaccgtcttcctcacttaccttgtgtaaccct

SEQ ID NO: 24552 - DNA, 1389 bp, Bovine  19866880949194
  misc_feature (1)..(1): n is a, c, g, or t
ntaggccctctccagcgtcctcttgcagtcctgcaggacggtgctgaaggtgatgtgcgggtactgctgcaccagctgctccaccgttacctcgttgacctgcaagtgaacaagatctgccgtcacacacaggcaccaggaccgcccctcgtccttctcatcagcgccagcaagtgtttgctgggaagacctgccctaagtactacattctacgtggtgctaggtagtactaagttctacgtagtactaagcactactaagttctgtgtagtactaagtagtactaagtaagtaatactaagttctatgtagtactaagttccacgtagtactaagtactatcttccccctacgtttttttttttttttaaagatgtaaggtatcgggaggttagcgctttctaggagtataaatgagctgaagtgtgtccgttgaagggtgagtgcctgggaggggaggcagcatgagacactctcatgtacctctgactctgccaacccacctggcagcttttttaggagagaaccatagactgccggagaggatgcacgggactctgaataggagtgctgggcaaaatgtttatttttcttccccttaaatgttaaggtcctggcaaacctcaggtcccttcgtggaaaagggctgaaaatgtgaggaatcaatcactaaaacatacatggctggcaggtcaaagatggccccaatagaccttaaccatcaaagacaccaccttgattcttgattagacaaggcaatcagacaggcctaattaaaactaacaccttttcaattgctgtgctgtgaagggattaatttgtcaattatttttaagctgattgcagttcatatcacaaaagcagacagctcccttcatccttcagataaataaatgattaacctaagaactgcaacttttagcttgctttatttaaaatctttatcgaacacttcggcattttcaaatacaataatgtttcatttatattgaataagctggtctgcaagaaggttctgctgagacacgtttttgtgcttcctttccatgtctgtccactactgaaaggatcaggaccatcaggaaaaacctcaaacaatatcagacccttgcaatttgctttgaaagccagcttgggagtatgctgaccgtgacattaagtcctctgcacttttctaaaataacatggtgttttgttaaactatgttacatgtagtatttgttaaattcagagttgatatttccacattgcactgatgatgcttattttttgtcagaatttctattcaagactttcttgtactgaaatcaactgtcattccaaatttaaccaagctatgcagttcaatctgtgttacaatgtatgacttttgtttacaaaaacatgaag

SEQ ID NO: 24553 - DNA, 945 bp, Bovine  19866880972371
  misc_feature (1)..(1): n is a, c, g, or t
nttcctgtacttttggtcgctttggtttacataataactatgaattcacttaaaattaaaaaaaaaatacagcttccgcctccttcacattcaatacgttctgatcaagaagcgtgtgtttttaatggtatcgagaacagcctatgaatgcttgaattgactctgtgtcccaaaccccactccacactccccatctctccccttttcttacttcctttcatcatgggagttttttgtccgatagcttaacagccagtaaattattcctgattagtttcaaagacaaaagtcccccgataggatgtgggtggctcaggttcctcactactctctggagagacagcatgggaaggaagaaagagttttcgcaccttatccatagtggacatctgctttgcaggctaacccaggtctgtcagctgaaatatgtgcctggaaacatggggtgattcatcaccaggcagaacctttgtggctctgcagtggaagttcttagcccttcttctacttcagtgtatatgaatgacattgatacgcagataatcctgagtttgtgtatactatctacatctttgtttgtgttctgttccctggatgataagactcttgacgtcagggattgtggtttatgtacagaaacactacatacaagaactggcctgggatggttaaaaatctgaggcacatcctgggtataattctcagcttctcaacttagcaggtgctgtgggcctggacaagttgcttaacctttccctggtttacctacctcagctgtaaatgagaggaataaagctatttatctgttaagtcttattgtgattattaaatgacatgttacattagaacaatgcctggcacagagtatgtgattcgtaaatgctagctactaataaatacttttgcgtgactttctctattttcattattatgtaccaaaaaaaa

SEQ ID NO: 24554 - DNA, 1091 bp, Bovine  19866880978807
  misc_feature (1)..(1): n is a, c, g, or t
nttatggtattctggcatattttaagataaaggatggaagagaagattgtattctcctatatgttacaaacatttactgtgtggaagcaaaagcccgggccttaaaaagaaaacaggaatgtaaaaactatagtttttataggttaaactatggttagtccagttcagtggcctgtggttcattagaggccattccttttctgaaaagaaggcaggcaaaattctggcaagttccaactcctacctgcctcctgcaacaataaataagaacgtcagtggtaaagctagaaatattccagagagacttgctaggcttccaaacggctaatatgaaatttagacggaatataaaataaaacattcagtggataatctccctgcccgtctccacctccatcgcccttactgctttcactactgatgagaaagcctcaattccacaaacattaagcgcacctttaatttaaaatgaagaagacaaaattatttgcgtggactataagagtattctgaagatgcgattttaggcatcattcaggaaagagttaaatacttccttaccagaagatgccacaaggctttgtagtgactaattgcctctttaacctctgcactcggggagctggcctgcacttcaataccagttttgtgatagagccaaagactgatgttcaacacagacctcctatgacctgtgtagccctggagtcaactcggacaagatgctgacaaaaggtctccttctcacttgggaaggcacagaatccctttttggatcagccaaattcccagaagacagagacaaagcaggtaaagactgtttggaagataaagaatggttttactgctcctgacaatatttcccaaccttccaatgtaccactcaaaattctgtttgagaaaatggttttagtaatatgaaaaaaatacatatttactttaaaatgcaatgaagagggtacctaactggatatctttgaaagcttacatcattagatagctgtaggaagactcaaagaaggcaggttaagcttctcccttacaactgtttcccacgtgactttaagcattcatactcgggaagtctgtac

SEQ ID NO: 24555 - DNA, 1201 bp, Bovine  19866881007423
  misc_feature (1)..(1): n is a, c, g, or t
ncagctgtaactcgggggctgttgtcctgagtgtgaactagtttagaaaccggcaataactcctgccgatgggcacttctgccccaagaagggcaaagtcaataaaatatgaaattcaaagtgtttcagcctgagagttcagagtgtagtgcaggactggattaaaatgtagagaacactacactttctctactcgtttttgttttcgagggagaaggcagagtcccagccctgggtcctctcacttgggaccttgcatcaggcacacaggagcgcacgctcacgtggacacacacacacacacacacacacagacgcagacaggcaaacacacatttattccccagtcctagtctacacgtggcccaccttgaagctaatgaagttaagcttcagggtccgtcattaacatggacctttaccagggccaggatcctagagatacatccacatggtaaagtacttttgtaaaatctgttaaagcaagatgctttgcattcatcttcttaaagagacaccccaaattgcataaaccccaggtcctggaaaatcctgactttcctcctgacccatcgcttcagggtggatgtcaggaagctgtgtcttttcctgcttctccttttttttttcatgtcaccaagtgattctgatgcacagctaggtttggaaatcactgacgaagggctacagactgatcagtttaatgagtctctgacttccaggtagtatttctttctggagctttgccaccattgattgggatgtaaaccatataacactacgcagtctggaaaaagctgacaactggcaacattcgcttccacactgcagtgatgaatcacataaccctctgtgccgagtaattaactatccatttgtatgtcctggctgtagtgacagagttcttttcaacgaggaaggaagggaatttggacataacattaacagttgttaataccaagcaaatagagtaaattggatttattaaaaagagtatgtgtgtggttttttttccctaggagttgatataatttatctagctttctaattatagctaggacagaaaatggctgaacccagagacctctcacggtatctaataaacttttacttacagggagaacgtttcttgggctggagaatgacaaataatttactaagcttttccgaaagatagctaaaggtgtttcacctatatcta

SEQ ID NO: 24556 - DNA, 1003 bp, Bovine  19866881051386
  misc_feature (1)..(1): n is a, c, g, or t
nagacttagctctccgtaatgtcttattcagatttattggtcatctgaattttattgcatatatgcagaatactgctggttcgtgtccactatactgtgagaaatatgcgtgcttcaccttggaaaaggagtacctgaattagtccttataaaatcaccttgtcctggtgatgctgctgaagaactgatagtcttttcataaagtaaggaataaacctatcaccggttgctttaaaaggtcattgtctctcgaaaagtagattagctcactttgttccatgggcaggaatcatcactctggaaaactgtacataccaagtaaatttctgctctcacttttggcttgctcttgtaaaagaggtttcatgcctaccggttttcacttgctaatgtaaggcacagctcctcacaggtagagtggcgggacaccaaggatgctgtgtctagtgtgcttttaaagtttctccccttaacaaacgcagattcccaagcatggaacgcctgcacagaaacactgacgacagattcggtgattgagtattttggatgttgttggaggccagtggttaggaggtgagtcacagcagtagctgaagtgactcagttccgttttatggaagaaagtgactgaaatggcacctctcccttggttcgtacgtatcatgcagaatggacccgctcttctcccgacatacggcctgtggatctctgctatgtgtaaatcctcatgtaacagagatggtgatttagcctgtcacttagaaaagcctgtgaatttatgtgaagggaagggataaacattgccatgatatttgctggaagaatcataattaactctgtgtattctctcctttctaagctaaaaatgggataggatgagttgggggtgggggggtggttggttcagttccgctagaaggaataatgttccacgttgatacatctgaaactacaaccttcctctactaactaatccgtctagggtgttcagaaaggaggagtt

SEQ ID NO: 24557 - DNA, 1145 bp, Bovine  19866881090286
  misc_feature (1)..(1): n is a, c, g, or t
naactgatggagttaggggtggtaatatacctcactggggatccaaagcaattaaacagtattgcaaacccaaactcggagtggatttaagccctcatagggaagtacagtcccttcttcgggaagaaagtgaaactaggcattctgatggcaaacaagaaagctttccatttgattctctccttctttatagcgtctgctttatagcatcttcttgctgtctgtcacatttgagcttatcttccttattccgacaataaggaagcaatgttatagcttgttatgtcaaagctgcgagggaagcatggacctagctgaagaaagcacgtcgttatttttcttaattatttcagaaatgtcatctccgataccactcagccttttgtaactatgaggagaaaattgaataaccgcccgttctccctagaatcgctttaaaaagtttgcagtcaattttttcggacggccaggaaacaatccgatgatacaggtaagctttgcaggatgataggagggtcattacatgcaatcaggaaaaaaaaatattatggtatatacaggcagactgtatcacgtcgtccagttagtttaggttaagaaatgttttctctcaggaaatgcctttaaaccagggctacgttttatttaatgatgtggaaaaattccacaaaatatccttatgagaaatgtatttaattttctctttttaagccagtcagcaggtaaagtgagctgcgcattgctcacatgactagcaccgcctggcagagcacgctgaaatatgcctggtcacgcacattcggaggtaatgttagttgggagcagttggtacggttgcttagcactttccagaacctgattgacttcagctgctgaaaggttctgcaaggatgctgacagatgttggaacccagggcaaactccccttgcctatttctgtccttgtacgaaggaatcaacagaagtgcaacttggcatcccgaaaggagatcctcaccttctcccagctttaatgactaccctgaggaaagagcatttatgccctgctctgaaagagcagttagcaaccttggtgtcatcgggtgtgcagggcaagggagctgaagaagctcgggaaatatgcctgcgcccccgggtgcatcgtc

SEQ ID NO: 24558 - DNA, 1582 bp, Bovine  19866881093507
  misc_feature (1)..(1): n is a, c, g, or t
ncggccccatggactgcagcccaccaggctcctccatccatgggattttccaggcaagagtactggagtggggtgccactgccttctccgcaacagagaaatagaaattgtattaaaaaatggaagttctagaactgaaaagtacaatacctgaaatagaaaatccgttgaatatgggtttaagagcaaatggagttggagaagtcagtggatgtgagtatatagcaatagaaatgatctcatctggaaatggagaggggaaaggctgggcggagaaaaacagaaacacgaccctgagccatgtagcccgggtggcctaatgcacaatgcaattggaaccccagacaaagaggaagaagagaatagaggtgaaaattattttttaaaaaatagtcacgtgcctctaacttggaaggacttaaactctaagctctttcttgtctgtgttggcagaactgaaatatctttaatcttttcagcgttccgattgttgctttcgcggaactctttaataggctcccccacgcatgcgcggaacacgagttggccagggctcggcgtcgggtttatatgccgattccgacgggtctctttcattcccaggacttcccattcaagttccaacctcttggacacttccctgacccttcaggtctagagatggcagctttctgctcgaacctggacggtctccagcctccctggtgccacgcagaccgaggcgtcctctcaggggaaaagctgtgtcgcgcaatgagtgcgcttcctttttaaagggctgagtcccctttaatagctgcctgctttgggttgttgtgcagtgacttcaagaggttttatgtttctgtttttttcctacagtttaattgttatctgtgggagggttaatccaacacgaactgctgtgccactctcaaccccacgactccttatgtattgatatttaaaaaagccaaatttagactggagaactgccgtcagtgccacgaatatactttgtacagttgcagagacagcttgttgcctctaatacccatattctctttcttcttcaggaatagtgaaagtcgctcagtcgtgtccaactctttgcgaccccatgggctgtagcccaccaggctcctccgtccatggggattctccaggccagaatactggagcgggctgccatgccctcctccaggggatctccccaacccagggatcaaacccgggtctcctgcatggcaggcagattctttaccatccgagtcaccagggaagacctcttcaggaaaacccagttggatggaaagccacatttcccaatttcctctgtggcaatatcgattctgctgcatataagcagactctatagggaggaattgtgcagacatcactttaagagagaaagagacagcagaacgccccttttctccttttctcccctcccgccacgtagtgtccacgacgccacaggtggggtttccgcatctgccttgggtcatgaattggtaatagaccgatggaggagagttcacgcatcccccaggagcgtggtccctagtccccgtgcaatccccacaccagatctgcctgccag

SEQ ID NO: 24559 - DNA, 967 bp, Bovine  19866881093841
  misc_feature (1)..(1): n is a, c, g, or t
ntaaagttaaaagttgttctgagcccagagaggactggggaataaaagcagtgaaccgcaaaactgtgtcaagaaaagtttacttttcatggtcattgaattaacgaaagaaagaacaagccagcctggtccacctctttctgcctccgcatcatgctgggcctccctgccacagacgctgctcaggccccaaacgcctcttccaccagaggagagctgccaaaaccgagtgctccttgactgggggagggagggggaaaattggaaattgctaattctcactttccactcacttgcttgaaatgtgacaatcgtgtttctggggcatccttcgagagacacaaggataagacgtggggggcaggggcagaaagcacagcgcctgccttttttccccctctgtggagatggagagagcagaatgacttgcaggtggccccatctgaagccaagaggaatgcaacgatttggaaaagagctctacctattttttttttaattgcaaaagaaaaaaagaaaatgagaagaaaatgctaatagttgcagctagaaaatatgcctgggagaatggcctttatcatctgttttttgaagtaggggttgagaaagagatgaagccagggagagaggacccagagggctgatcctgcgaacagagcgctgtgggcaccgggacacaattggtacctgagggagaaacttgcctgtaaagtcattacagactcgctcagcgattcggcgagaatcatttacatggtcttctaaatggtatagccctgtttcatctccagacaagagtgcgagaggtgtttataaagatcctagcctctgtttagggatgtctaaatacattctggtaattagcttaactttgatccaatgcagtgctttttctcagtaaaataaataaatcaacgaaaggttctggaatactctcccctttgagacccctgccattaatatcaag

SEQ ID NO: 24560 - DNA, 1537 bp, Bovine  19866881096019
  misc_feature (1)..(1): n is a, c, g, or t
nctgtcctctgccttcctattacccttttctcctgcatcctcccccgcctccttggctcgtctttatatctttataaccctggtcgagttggatgagttacactctcagaatgaaccaagatgtatgagttacgcagttacaatgaaccagatgctccacaaccttcgtcttcaaatacacataaaatctcaccaaatgttattcggagaccattgctttctcccatccttccccctctggtctgcaaggctaaagcagaaagctgggaggatgtctctcaaacactctccttgggtgaaaataatactgcatctattcaactttttaatctgccataagagagctccaacatggctgttaacgatattctttgaaaatatcttcctaatctattcacaggcctcaaaacctttataagtttaaacattgccctttcaaaataatttggccaagattacattctagaattcaccttcgaaagttcagcattttatgtggccttcatagtcactgaatccgcgctaaactcattatccttacaagcgcactttttctgcacaatgtggaatttttttttttttttccttttcttactttccaataactgcagacaaaggcattgacaagaagggggaaatccttcaacagtctaaactgaatttattttttcatgttcagtctgctttttaaaaatttcttcatactttcattatctgtgagtaatttaagatgaatcccaatcaggccaaactcagagtccttttctgcagtgaattcattctcgaaaaaaacttgtttttcggacgaattacatataaaccagccagccagctctactcgagggccagtctcagccgcgctaccaggctgcaaaaatctgatgcgcactttccacctcccctgtccctttccgcctgggagaaaagcaagaagggacacatttccggggaccagaggccacgggagccccagaactggccggcctccccgcgctgccgcggcgcattacttctgcttttctaacctttccactggtgagcaccatcaattatgcactagaataacaggggcctggcgaggcagtgtaacagaaaggccgattatgacaatgaataattcaaacacctacgcgctgtgttccttttaccactgataggaggccaggggacggggatccacgttgcagactgcgccacaaggactggttcggggcaaacccgccgcacgctggccagggaacccgcctgctgggagcgaagaccggaaagaaatgaactgctcgcaaaagtaaagcacacttgcagaaactgattaaagaatggcagaggccacacgaatgctaacacctgaggcttactgttgaccctagatacaggcaaggacgtgcagggaacaacatttgagaggccgttagcatcttataccttccagaaaaaggtcaacgactacgtatacaaaggtcttcagagaagacaccctgtttccaagtaaagttgctcaaacttcactgaaaagaaattcaaccttggagcctct

SEQ ID NO: 24561 - DNA, 670 bp, Bovine  19866881119042
  misc_feature (1)..(1): n is a, c, g, or t
ncttttgacaggggccgtgcaaagtttggaccgaagccccccaccaccacaaagagccagcccccaacagagtcactgcaccaggcggtggagaccagacacagggcgtcttaagcagggccccatccacctgtggggtgactggcgagacacggcccgccatgcacaggtggatagcatatttgccgagtgggaaagaaaggcctcttcctctaggcagctgagggtcagcgtggccagcagatcccgggatggatttcatcccccagccttgtctttggctgggcttcccttagtaggaccaaacttgcagggtatacgtaccaagcagcccagttctttaccaacttaggggtgcgtctccagacgcgcctttccggaacctggtaacacgcagaccgtgttgcgaatcattttcctgcagcgtttctacctgccgtgtggatggaaatcaggagcccttgggacgtggagctatttaaaaataaatgtggcatatgtaatcatagcaagcgattatatcaattctaaatggactttgccctaagaaaacttttaaaaaaggccaagctttggggttttatttcatttaccagaacccaagtgaatcgagcatgattgaagtgcctgtgtttggctgggctcctctatgtgatgttggcttgtcggg

SEQ ID NO: 24562 - DNA, 914 bp, Bovine  19866881146421
  misc_feature (1)..(1): n is a, c, g, or t
ntcattgaagagaattttgtggattttttaaagtaaatattaacttatcaaattcaaatgaaaacttaaaaagggaaattgtagtatgcaggttagtaagaagtttattgaggacagaaaaatttggaccatccttattctttaaggattagcaaagataaggggctcataaaggagtgcatttaggaacatatttggaggtattcattgtgtattaaaaacacggaatttgatcaatattcttttcctgaaaagtattcacagttttgtcaacataactggaaaagacccaaagcttaaaactcaaacgatattgcaggcagtgtttatcatcttctgcttcccctacggttgataaaagttgactgatgggatttgaaaggaagccaggagtcttttttttttgtatgtgtgtgatgtctgtaaagctgcagtgatttcaggcgctccctcttgtaaagatctacgtatgcgtgacaaggaatgcagcatttaggaattcgcttacgtgtttcaaaatatcattaacaaaagcattggagatgatagctgcgttttgtgtttttttaagctggactgttgtgtggtgcggtattccaagctgctttcagcaaactggaaaccgtctccacggactcaggctttccctttacgtttgaactttcctggcagaaatggcttgtcgatagagtccaagctagttcattccctttgtgtgtagagaattagacacatgaataccacaaattaatcaaatgtaagtccagaatagaaggctctcacccactaacatgactgtgaaagccgctttgaatgagagggaaaggacccatcaaatatacatgaaaaatagtgagtttatgaaggcccgggaattgttgggctgaccggacctgcatgccaccacttagcgg

SEQ ID NO: 24563 - DNA, 1220 bp, Bovine  19866881183877
  misc_feature (1)..(1): n is a, c, g, or t
ncatgtctggacggcctttcctttgaccgatactgtaaacgtccctgcatcttaaatgcctgtctttctgtgacatttgatgcgaacacaccagggctaaagaccacatgcaggcacataccaacacaattagaaaatgcattaattgtcaaggcagtgatcagaatgttctgcttcactcaggctaataaggagcaactaacaaatgatgtcacaacaaagcctggaatgctatgaacagagagaaagcacatctgttcagggtatcaggaactgcttcctggaagaggaatacagtagtgtaggctttggacgatggatatgatcttcatagagatggagacaagcaggagaagaccattccagggagtcacagcaagaggagtgaagacttgctggtggtagctttggaggtggatttgggggccatacagaaagtagttcattctgagtcaatgagatccggtgcaagattggaagcttgggctgcagtggattagccatgttgtggggtgtcaccaagaagcttctcatattgaggggagggtcattatgatggattattctttataatgggtgagctagctgagtgctcatatgcgttatcattgttctgcaccattgtgtatctcagctgctgtttaattgacttgcaaatataaccggtactggaaaattttgaaggtctcgaattaggtctggttcataagtggttaggtggtaggaaggtaaaaaccggggcagttttagtatttccagatggcaccgcatggtgctctatcacacataaattacttctctgatttctagattgagcagttgttttcaaacttaatttttagccccccccccaaaaaaaaaccccattatttgcaaagatcattagcagaaaactaatatgtaaaaaaaaaaaagcagatgccatcattcaaacatcaggctgcatttaggagagattggcagctagggcaccccctcttctgctccagagaggctgtgcagaggctccctgggctggctgtatgagtcccttttcaaaaccccaaatacagcctgggtgattacttagaggagtgcgggatgattcacccctgccttttcaggcacagaaggggccccgtgcccctctggagatggaggtatttctcccatggctcccgtttatcaagcccttactgtataccaagcatggtgctttacggactcctcagtcattatca

SEQ ID NO: 24564 - DNA, 1004 bp, Bovine  19866881249871
  misc_feature (1)..(1): n is a, c, g, or t
natgtatttctctcttgatgcttatttggacaaagcaacatagcgcttttcagattcctgtaacaaatttgtttccctgcattttaagagtcaggctagcaaagctctagcgtgcgtgtgtgtgctgctgttgcgtgaaggggagacaagaggaagggggctggcgtggagtatgaattacacatggtgaggacacttggcgcggactgtctagaagcagatgtgtttgatgtattcaaacacgtgcatattcaaaactcacgagaggtgttaggagagcggatcagttccctccacacttcctgcccagaatgtcagaacaaaggctcgcttgatgaaattgaagggcagagatttatgaggggaggggtcacaaaaggaaaggaaattccacttcacgttgccttcattccgccttctgaatcggcttccatggaaatccctcacatcatgctgcggttgggttttaatacggttaatctttctcactgatggtagcgccgcgtacagggtttcgctgagatgatgataaacgtaagaaaatctcccgctttgggttgtaaaccgtccttggaatgatgaacttgattctgcgcacagcgctggcagagttatccgaggaaaggcctgagtttgcttcccctgctcagaagcagggcttttggatcatcactgcacgggatgagcctttaccagccacttgtgacaacctgagatccactttgttgaagaggctgcttcgttttggtgttagctgtcattttccaaagtgttagggctaagccccatttttaaatgtatacttttttcattatacaagtaatacgtgctcatttaagaaaatgcagaaagttatggaaagaagagaaaaactggtatcacctcagacagtgctactcttaatttttcaatgatttccctcaatcctgtatttcctgtacaaagagttttttttttttttcttttgctctctagttgactggtttatgtaatatataatcaca

SEQ ID NO: 24565 - DNA, 1110 bp, Bovine  19866881275842
  misc_feature (1)..(1): n is a, c, g, or t
ncctgtgtaattctaatttatgtaactagaaataaagaaattccaagaggctttggtcagaggacatcggggtggacctttcagaatctatttatgtctgctccttaagttgggtggcccccgtggccctccaggcgcccctatgggccgaggcgaggcggcttccctgcagaagggctgctacctgctctgggcagaagcgcacagtggggtgaacgggggctccctgcccccatcgacgactccgcagacacgtgagcgccaacaagcatttccagccaagtgctttgccaagagtggctccctcaataatgctctttaatgctaccccagacgctggcattttcaaatcaaatgaacagtgtataaaattagttctgcatgaagttacagaaaaagaaaaaaaatatagaaagtgaaagggagcttttaaaagctccagaatttcttcatccaactgcttttcacaagggtttggcatttgagaattgctacatttatgatgttattcgctgctcataatttaggccctctgtctccaaacttctgtattaacacacgttgcagaggtttccacctcgacattttatcacggaggtttcccaaaccagccggcctgcctctggccaggtctggtttctcagccaacgccacgccactgggctcccttgcttttcatcaaccttgttaccccaaacatttttcattaaccttgaacactgcatttccattggccctacagctttcccaggaactttttttttttttttggtccttcttagttttgttctccatccaaactgccatgtaagaagtgaggaaaataccatattattagaagaaacagatctgaatagaatctagaattcactgaagttgtgaaaacgacttctatgaccaaagccactgactgtctataattgcggaaagcagaaaaaaacatattgctcttattagagagtcccgttggttatacaagtagttttaactaaatcaccaaataaatgcgtgttaagttgataggtgatttcgggtcaactctaattcccaaggtcaagtaagcctttgaacagtctttaagaatataagttcaccccaattcatcaaagc

SEQ ID NO: 24566 - DNA, 1442 bp, Bovine  19866881316407
  misc_feature (1)..(1): n is a, c, g, or t
ntagatttgttgaaatagctctgacactgagattaataagagctctcccagaggtaataggatccgtgtgcatatagggaaaatttaagggctgaaaatcggatgctagacactatcattaaaacacttcctctcgttaattgttatcatgcatgtgttcgccatgcagaagtgaggcagccaggtgccccattcactgaaacttgcctcaaacaaagtagctctccactcccaaaaaggcaggctggaaatcaaacagaagtaaacgcagttgggtttggaagcaggagaatctgtgtatgtgaaggggggagggcattgtgtgtgtgtgtgtgtgtgtatattctagctgaattccattttcattaagacaatcacaaagagatggtccgtccaatgtctctataaaaggaagcgtccaagtttttgaggtggacatccgtggaatcactcaggtcctgagactaataaagatttggggtggctgttagtgacaccctagcagggttcctcgggggagcaaaggcctaggagggaaaaccaagggttcctagaggccccagagccgttcaggttggaataaataatgcgtaatgttcttagcacacagcaccatagcactgggctctgtttttattttttaaattgagaaatagctcatggaggaactcgtgaagttgctcagtcgtgtccgactctttgtgaccccgtgaactgtagcccaccaggctcctctgtccatgggatttcccaggcaacagtactggaatggggtgccatttccttctccaggagatcttcccaacccaggaattgaacccggatctcccacattgtaggcagacgcttttaccgactgagccaccagggaagactcgttggttaattctaacagcactgtgccaatctcccaccctttcagaggccatctccacctctcctgctaagtgtgtaggcacagagacatgtgcggagttgttcattcaaccttgcaagctatcgctattttaaatatatgctcctgttgcaggaaggcggaccccttccagtgcccgaaactgggctcttgtctaacactcggaaatgaattgtccgaggagacacatgtgctgacaaagcaagagattttattgggaaagggcacctgggtgagagcagtaggggaagggaacccaggagaactgctctgccacgtggctcgcagtctcggggtttatggtgatgggattagtttccaggtggtctttggccaatcattctaattcggagtcttccctggtggctcacgcatcgctcagccaagatggatgctagcgagagggattctgggaagtggatggacacgcggtgtctcctttcgacctttcccgaactctttcggttggtggtggctaattagttccatattccttaccaggatctgtcataaaacaactcgtgca

SEQ ID NO: 24567 - DNA, 727 bp, Bovine  19866881399742
  misc_feature (1)..(1): n is a, c, g, or t
nattagtgttagtcactgagaacaggtctactgagacggcccctgcaacgaaatgaaatgcgttttattactaagtgccgaataaacctcacggagcttttcttgcctttttgagaccatgttagttccaaagaccaaaaaagaaaaagtatcaaagaaacagggaacttggaggccatttcttgtcccaactttagcaaaccacttgaagctctggtctgtgtcaattgagaccacattggaagggacctgaaactggtgttttaggtaaaattcagcagacttagtccccatgttacaagaaccgttgtaacaaaactttgtacatccatcaggcatgtgaactgttttgtataataaaagccactcctactaaaatacaacatatgatggagtgattagcatgcttttcacattgtgatcattgaaacgtagcagccaaataagctagtgaatttgatgagtgagtcaaagcgggtatgacgttgatgagaaccaggtgaaaggcaggtgaggcatatcacaaaatgcacacagaagtaaaatccacctcaataacaaagagttgcctgtgcgcatgtgagtgtcctgtgattatttcgcagccctgcatattaaataacgattgtggctcaggatgcttgaattttctgtgtaacagtaaaaagtaagttgaaaatacatgaggttcttctcaaggattcctgagcatttttcttttatataa

SEQ ID NO: 24568 - DNA, 1261 bp, Bovine  19866881430849
  misc_feature (1)..(1): n is a, c, g, or t
ngtccagaaatcgacctaatgaaaaagtctaccacggtgttaaaaggccagcgaatgctcagcgtggactgattgccaacactctagaacaggaagctcccctccctggggctggtaaagagccttccatagttgggcggtgataacatcacacatccctaacgcacgtgcttttgccttcctgagcgccgcgacgtcacgacctcacggagagagaaagcagacgtgtgcaaagctacggaggaaacagcgggtacggggttggctatggttttccttggcacacggggatcttccagaagttcttctggggatcactttaaacacagaattgcacaggagagggcaaaggggcgagaaatctcagaaatcacagaggaaaagtcagacctggctctgtgtgacatctagaatgttctcttgcctcccaattttcccacctacaaagacgaaatcagacgttacatgaacccgaagaacccacagggcaccacctctataaaggttgcctgactcaccttaagaactaaattttaaaagccacggattgggataaatcactaggtgacataaaaaagcttttaggtgaacttgacaatcgagtggcctcaagacacgtctgtctcatcactgaggcactcggaacctcctgccctccagtaggctcagcctttaagtaacacctcagcagatctgccgaatgaggccagcatcttgccccagggtccccactactgggggggggggtgtctccccatggggaccgataagcctgggaccacaggacttgagtggtggcagctctggctggtcagagagttaaatccaacaatttaagggagcgtgtagtcaggcaggttgagaaagcatgggacgcagcccctcgtgactgcagagacccatccctctcctgactgcttccgagtctgcccttccaggggactccctgctactgggacctgctgggccccgtggaccccagggtcccacctggatccagccatctgggccctgaaaggttccacggtccccagcctgaatggcgattgtctccagaagcgtcttgactgtgtttgaagcatcagggcttattaaaaccccgaagggaagtaatccctgaatgccactaaaaggtctccagctgctaccgtttatgaaggaggcttgacaagatgtggcgggaaagaaaggggaaggggtgagcaggaaggacggggagagagaagaatttagacaaggcaaagtatccaaacagagcccc

SEQ ID NO: 24569 - DNA, 928 bp, Bovine  19866881439212
  misc_feature (1)..(1): n is a, c, g, or t
ncacctgtgggattctcttacttggaactgtggctctttacagggaattaattgtttacaaagttttggtcacatatctcagttttatatatatcatcttcttgaatgaaaccagggttcctttgaaatttgaatgtatcgacatatttggctttaaaaccatatatttttcgtctgtctttcacccaatccatactttcattttctagtacataagaagtatgcctggaacttactaggcacttaaaaatcatttgttgaataaatgaatgggtttttctgtatgcagaagacagtattttgaatattcatgaaactagcaaaaaaatctaatcatagctgctgctgctgctgctaagtcacttcagtcgtgttcggactctgtgcgaccccatagatggctgcccaccaggctcccccatccctgggattctccaggcaagaacactggagtgggttgccatatcatagcaaagtaaccaaaatacatgaggattagttcttagcctaatactaagtacaggagaataccaagtagagtcgtgttgggtatttgtttgctcggttggttttttgtttgttttgctttgatttgaaaagacattagtttgcagctattctgatttggcactgagctgaaacgacagggtttggtcctgagctcacacgtgcatactggtactgtggctattgcatatggaactgctcagtagcaatgcccaaaggatgtctgtaaagtaatgtggctgatctttaatcaacatactggaattttcctatttaaatcactgtgatctcctacaaattagtcatcttttgagactattccttattcatcacgctgtagtcacacttcgttgatctttacaaggtgtgcatgtgaggtgtaaatggatgatgtggccgaggagaggcagaggacatcagg

SEQ ID NO: 24570 - DNA, 1595 bp, Bovine  19866881521098
  misc_feature (1)..(1): n is a, c, g, or t
naatgcaactagaagctctaatactgtctctcttcctttacttgagcagatcatcttgtgaaacccttggggtacatgcctcccatgtggatatctttattctccatatcagaaccacaacttgattcctttacgtcacactgtcctggtcagccaggacctcttttcaggtcctcactttaatattatgtcaacaacattgaattgtaaagagttattctttgaaaagatagaaggagaaagaatctatatgtaggatatagtccaaagcagtggaatgctaagctgtgtgtcaagggggttagagatcaaggcaaaaagataatggactttttggactaggaagggtccacagaagagggagaatgtggctggcttctcagatggatggaattgggttgggaggtggaagcataaagtgatgaaggcctggagggaggattaaatgtaatcaaaatgggggaaaatgtaggaccagcccagctggaagacccaacccaggccagccctgaagctcttgacctttctcccattaggccactaaagtgattcgatcctgttcctttgctagctgtctggagcttcagaggctgaaagctgcctctcgggtctcatctgtcagggtaactgaggactgtccatagttctcacagcccagctccttgcgagcctctttcctgagctctggagcctctggctggctttcaggcccatccccaagtggccatccatcccaggccttctcgaggtaggactaggctgtcggtgacgggaagggaatttcagccaagatcaggacctcccagtctggtaagcaagtcatgttttcaagttaaaaatcccgacagtaagctgtgtggtgttttgcggtgtgtgcagtgttcatttaaaacatgtgtgtgttgggcggggcctacggctgaaataagatccctctggcacatcagcgccatctgtcagcttcacttgggaccatgtcttgaggacagtccatcccttgagagtgggtgtggagggaaggtcaccgcgaagaaagcaaggatggtgggcggggtggcaggacggacgttcacggagtcaaaaattaaccggtgtcaaaattaaccggtgcgcgtgtggtaacaggaagaagggaaggaacagatgttgagggtagaccagttgccaacactcagggacggccggtctgtctttctgccagtgttccatccaagctttgggggaaacaggctcactaccttgaggtcttaatggaacatcagtcagggttgcgggggagcaggcttgtgccaaggagacgtcatcccagaccagatttcagtgaggcagggcaagtgtgggctctgccccctacacacagcttcagacccaccccttccaggcttgctagtgcctggagcatctttaggaaagccaaacttaaggagcctgtggtttcctcttggcccccacgccctgtggcccctgacatgttatgagccgccgaacctccagatgcaatccagggtcaaaacaagcctcgggctgtgctggttaatcttcacaacacaaggacccgtgagggcactgaggcttctacagagatgggtttctga

SEQ ID NO: 24571 - DNA, 969 bp, Bovine  19866881653508
  misc_feature (1)..(1): n is a, c, g, or t
ntcatgtgagtgcattaacaagtgacccacacgtgccattttgtcctttgcagttctatcgtctgctgtggatctatgtacctgtaataaaatcagaagcaatgccccagtgctggaaagaattaaggttaaaatttaacagtaggattaacatctttcatgtcatacttggataaaagccatttgcaaagaaatttcttggcacaggtacaaagagatgaatatgaaaagtgctcttctttgtgaaagccatagtagctcccaaaacaaagagaggcccttcttgttgtgtgatggtcccagtgaaggctccttctgccctgcaggactccagcaggggctccagccccggcggtccaggagactcacaggcgcctagaaagaggacagacacccgagtcccagccctggagattctgactcgggagcagctataaaagctcctgtgatcccaacatgcactcatggctgagaacctctggaacaaaataacctacaactcagacaaaggcagtcaactgaaaacagaggaacttatcttgaaggatataaacaacttatgtgttctgatatttgaaaccaactttgtctctccaacagtcccaactccttgtacataatccaaagctttaattcctttgtttgtaatgtatggagaagggaatggcaacccactcccagcactcttgcctggagaatcccatcgacggaggactgtggtgggctacagtccagggggtcgcaaagagtcggacatgactgagagacttcactttcacttcccttcttatgtgtagcctgtcttccacttttaaacattattctgttcctcccactccagtgttcttgcctggagaattccggggacgggggagcctggtgggctgccctctatggggtcgcacagagctggacacgactgaagcgacttagcagcagcagcatcagcccagtattatgaagcaaacc

SEQ ID NO: 24572 - DNA, 1796 bp, Bovine  19866881763234
  misc_feature (1)..(1): n is a, c, g, or t
nctgggattctccaggcaagaacactggagtgggttgccatttccttctccaatgcaggaaagtgaaaagtgaaagtgaagtcgctcagtcgtgtctgactcttttgcgaccgcatggactgcaggctcaccaggctcctccgtccatgggattttccaggcaagagtactggagtggggtgccattgccttctccgacctacagcatacccttatttaaataaaaagaacatatgtagccttttcagaaacacagttaacctgtgctttttttctcaaatatatacaaactaataattaggatacttttctccaccagctacatctaatgtcacccaaaaagtatgtaagttgtgtgcttttgtatttttttttcacttgtttagagactccccaaaggcaagaacatcttttttttaaaaatttaattgataccattatgtacatacacatttatacacacgtagcatgtttatgagcatgcatatggatagggagagacagaacttatttttcaatcaattttcccccaagatttcatcaacttctgtgagaattctatttaaaggcaagcagaggatataacccttagtcagtgggcatgatttcatgaaatagaaaatgtttctaagccccattttaacattggctttactttttctccctggatctaaactggctaagcaaaatagaattatggcaaagtaagaaactctttcctcaactatgtgcattttttcttttttctttttttttttttactttttttttaccttttatggctcagttaggggatattttggagtgtggatttttttttggtagtcatttaaataattgtctcaattttttttgatttttcttggccatggtagagacggtcttttaaagcatattatttatttttttaggaaaattgtcctcttactgcagatttataactctagtagagacttccaaaaatcttatgccaacattgtaaattttactgtgatgttgtaaagttacagttagggtataattttttaaaggcatttcattttgtagtttggagtaatagttataagctgctctctatagaaaccactgtaacttgtgattttagaacgtcagataataatgcagaatattggccaaaacttttaaaatgagaaatattttactgaactaactctttctaaactgaagtctgggagagaaatgtgttgttaaaatgactaccttttaaccaaagattatcacttccatttccattagtctaccttgggggggctgcatatgatgtatactaattaaataggatttattggttcagctagattctgaattactctccttccttatggattaagagagtgcctttcttaacccttttccttgaaatccatcaggatcttttatgtggactggctagtattctgcacacttctaatgcttaataaatattacattacaatattagcataataataaatcatcttaaagtactacatgggctattaagtgagatcctattcagttgagccaagacatcaaaaagttttattttctctatacgcatacaaagtaatttaaaaactccctttccatgaaatgtccttgcatccataagatgtctacatattacagagtgaagtggtgaagtgtgtgtctccagttatgtatttcatttgttcaattcattccggggcctgaatttgccattttagtaagaggaaatttaaaatcgggcagacaaaaatggaaatagcaccatttgtcaagtaaatgcccttttcccatggcaattctgaact

SEQ ID NO: 24573 - DNA, 836 bp, Bovine  19866881807370
  misc_feature (1)..(1): n is a, c, g, or t
natgcttacatttacagactgagagatttcacattaaaatctgcacttctggtttctttggaaaagctgggcatcctggcctcatcgggtttgcttcatctcacgacagcgtttggccggagtagaggagctgccgtgtctctggatctggcctgttctgtagggtcagggtcgccatggtgccttcttccttcctgtgaattatctgccttgctgttctaggcatatggtttaattgaatagaagtccattggaataatgatccaatcatctcccttatattcagttaccggatccagtgccgtagcatggagtttgtcaatgttttttttccccttccttatcatccatggtagatgactttcacatgtacagcacactctcaagggtgctgtcagggttattctagctgtaacaagactgtgagatggttgctatagcctggaaaactctcttctcagaaaaagaaagcaaatactttgcaggcttcagaaaaactattactggtaacaaatttcttgtgacatctcacaactgatcaggacacacctgtgtgaagtgagagggcagttgagaatagctttgaagctgaaaaaggaaaagcataaataagtttagagaattgtgtttataaagcgtgatggaaaagaaggcttacaagacctccaagtaaataattttaggtcagggtaaatactgggtttactcacttctattcagctccccacacgtgtgttatgatcagggccagcccaccgcatgggggaaattggcagccaccttcttctcatgattgggctggtaaggaatctctactattagactcatttctagga

SEQ ID NO: 24574 - DNA, 1321 bp, Bovine  19866880356199
  misc_feature (1)..(1): n is a, c, g, or t
ngcctattgggcagcattgctctagccctgcaggaaggaaagatagaatgaaagatggctgaggagtgtgagccagacgtgtgaaccctgggtgtaaggaaaatgcagctaagcttggaggttagttggctcagtgccagttctggctctgccactcctaattcttgggaaaaattgcttccccttcctggttatctcattgccaagaaaatgaaactgttgggcaatgtaatcctaggagcccatccactgatttatagattctatggctatttagcaggaaaggaatatattaagccatttcttccagatgtggagaaaagagccttgactcagagagaacgcagctggttccggggctacccagctggaccatcgggcgaatcatttaacctctcttgacccctatttcctcatctgtaaaggagggggcagttattggggggatgaactgagagaatgtaaaggaaagcacttagagaaaagactagggataataggctgccacaaggtcacataaagtgggagagtgacagtaagttaaatgagtttatttgctgaaggattcctttaatgcgctgatgtgcactgtgaatctctaagcattttgcaaaatgatacgacccccagaattccattttgtgttttaattctcttaaggaatgttcacaggcattggttatgattacacggaacacacttgggaattgccatttgcagagacggggccacagcttgctctgatggccatcccccagagtggtccctaaacagcagatgacctcaggaagaacgggaaacatcagggttggatgacatcatagattgcctgggttgggggcaggcagccacaaaggaaaccagcaaagggaaagaagagggcagatctgggggaggtgcagagtggcacagagaagccgaggttactgaaagttagatgcagacgacaagccaggcactgaccttgacgtttccatgtgcatcatctcccatcctcagagcagttctgagaggtgggtggggtcatttcatacttactttttatttatttggcggtattggatcttagttgcagcatgcaaactctttgttggggcatgtgggatctagttccccaatcagagatcgaacctaggccccctgcattggaagcatagaatcttagccactggaccaccagggaagtccccccatttcatacatgaggaaacagggtctcagagaggggccgggtctggagtcaaatcactcataattttgtatcctgatgtctattctctgagtgtgaaatattcccttcctttgttaagtttccagagga

SEQ ID NO: 24575 - DNA, 3731 bp, Bovine  19866880427961
  misc_feature (1)..(1): n is a, c, g, or t
nactctatgactcttctcctcgctatattggggaatagccaattaataaacaatgttgtgatagtttcaggtgaacagggaagggactcagccatacaaatacatgtatccatcctccccccaacccccgtccatccaggctgccacataacattgagcagagttccatgtgctatatagtaggtccttgttggttatcaattttaaatatagcagtgtgtacttaaatatctattctgctctgacacagagataaaccaaagaacaaaactgaccaggtctatgcccttataaagaatgtaaattcttatgagaaatctgtaagtcaacgactgtatttcctcaaagctaaggcatcattgatttccatcatggatttaatagcagattttcaaggggaaaaaaaagtgctaaatatgtacattgattggatgttagcatcaaaaatacctccctgccaacgtcaccaaggcaacgagttgctatgacaaaactcagtttatttcttactaaagtaaagaaggacactatctagatagactttgtagcatctcaaagaggagtaagggcaaattgggctatctattgagctttaaaagtctggttcagggtgggtctttcactgaggggcaagggaagtcatggttagcactggataaggatcacgataaaatagtctggattggtatatacagaaattgaggtaataggactttcctggtggtccagtggtaaagagtccacctgccgatgcaggggacaggggtttggtccctggtctaggaagattccacgtgccgtggagcagctgagcccttgtaccacaactactgaacccacgctctggtgcctgggaaccaaaattactgagtccaagtacctagagcccgtgctccacaagaaaagcaatagcaactgacacaccacaactagagagtagcctctgcccactgcaactagagaagacccatgtgaagcaacaaagacccagcacagccaaaaataaccaaataaataaagaaattgagacaatggcctccaagagtcttggagcataaattgtcatttgaggctttatttcaaagagcttatgatgggtctttcaaaaaggccctggactcaacaataaagtcatttgtaacttttatcttcttgatcaaaagtttcctagaatagtaaaattatgttgatgacagcagtagaatagtaaagtcatgttaatgtatagagtaaactatgtagatggccttttaaacgtgaaaaatatgcatcttcagagaaataaagtggttacacaaataattataaagtaattatataattataatgacaaaacatgctggacaaacatagggtgctaggggaacatgtaactgaggctcctcacttactctgcagaggtcagcaaaagcatctttgaggaacttgtgtttgaactgatgcaaaatgatgagtttggctacaggaagaaatgaagaggcaggggtgggcggctaagatagcatgtgcaaaggtccagtgacaggaaggaacatggtgtatttaaggagttgtcgagagatcagcagggctggagcacaaggttaagaggacattggcacatggtaagctaactcgcttgggggttgggtggggaggagattgctgctcactgctatacttcagagtgatttcttttttcttaaagaaaaaaacactttatgcctttagatccaaagacagcatccccagaacctcaatctaagattctcaaagctttaaaaggggtaatgaatgtgccttcatgctagcttactagaacatcaggttaaaattgttgcccaacaatagcaaaaccagttctagaacatcctcctacatgaactcaaacttgtgatcaaacaggttgtcttgatgctggtctggagatcaggccatgcccaggaaggcaaataaatttaaattaaggagtaattcccgagtgcttgatttgtaaatgagttaaatcaacatttctttttttaaaaatccaggattaagacctttacagtggtttttgctttatatccaattatccactaattcagtattaaaaatactttgataatgtctgctagataccagctgctctgctagatcttgaataaaacctgcttcctgtttttaaagattctaagcaattgaggatgagagcaatggcaacgctagaactacgtgctcaaatgacattctctattcaggggcctctttgttccagttctctctgtctgtgtaacaagctacctccaaacaatttattattatcttttgtggtcttgtgggctgactgagttcagatcagcacttcttgcttggtatctctgagtcagttgcagctgtaggtcaactgggaccacagtcatctgaggactcagctaggttagacaactcagatggctcatttacctggctggcggttaatgatgaactttggtcagcagcacagctgaggctgccatctggagtacctacttgggacttctcccatatggtctgggcttctcacaaaatgaaagctgagttatgagaggaagcagaccaggaacaacgttccaagagacaggaacagaactgttgggccaggaaaggagattgggtgaaacttccccagcattacttctgccatgttctactggtcagagaagtaacagggccttcctagattctaggagatggagaaacaggttccatttctttcttctgtttgttttttaaaaacttgttattttatattggagtatagctgatgaacaatgttgtgatcgtttcaggtggacagcaaagggactcagcatatgtatacatatatgcatataaccattctcctccaagctcctcttccatccagcctgccccataacattgaacagagttccctgtgctatactgtaggaccttgttggttacccattttaaatatagcagtgtggacatcagactgcatctctcgatgagggagggacaaggtcccactgcacaagagcaagagggtggggtgggagatctcactgcagcaatctttggaaagtcaatctaccatattggaatagtgatgatattctgacaggagcttgcgccaagccttgtaagaaggaggagagggtgcaaaagaataacatgtattgctcttgcctctgaggtggttgttggcaatgctaaacacttgagagaatgaattaagatacttccaaaaccacatacctgtcagtacagagaaacacacaggcagctcccagttcataacagaaaaactcttctgaaaagtataaactctttgtaaaaatctcaactgggagcctgatttagactatttaaagggggaaaaagtataatcagttatgtatcaatcccaaattcctgatcaatcttccaaagtgaaagtgagtgttagttgttcagtcgtgtccaactctttgcaaccccatggactgcagcccaccaggctcttctgtccctgggattctccaggcaacaatactggagtgggtagcctttcccttctccaggggatcaatctttaagtcaaaactaaaacactgctgggactccctgatggcccaaaggttaagaatccgagcttccactgcagggagcatgagttaaatccctggttggggaactaagagcctgcaggctgtacagtgcagccaaaaaaaccaaacaaacaaaaaaccactgtaatatatctatatataaatgacaaccaatcatat

SEQ ID NO: 24576 - DNA, 1165 bp, Bovine  19866880501873
  misc_feature (1)..(1): n is a, c, g, or t
ntgtgtctgggtggagagagaagtactctggaatcctggggagttggcatgtcatcctggcaatcgtcatgcacatttgctgagtgaccatggccaagccctctttaggtctgttgtttgtctgccttttaaccttcgctaagattgagagagtcttcaacgtacacatatatcttctgaggatgcttctgccccgcatcctgggcttcatgctttataagctgcttcctccaagcgctctccaggctgctgacacagcagatggagccggtgcctgcccacgactgacagatgagcctaatttacagccctcaacatttaaccacttggctatctgacagtgtcatctagctccaagatgccgggagagccctccccatccccagcaacacagacaacttcccacccccatgctctgtctgcacctgggacctggggaacatggagcagagaagccagcttccagccacgggtcagcgaggccttagagagaagccccatttggacttagcaatagtgtctagaagcagaagatgctgacgtggtgtccagacaaataatagctagcttgatctattttcaggtccagtttctcagccaatgggattactttggctgacctatttagtaataatatcagtacttctagaaaggcctgatactgattataaggtggtctgagaattgaaacacaccttattcttgtttgttgacattgaagacttttgagtggtcagacatttccatgacgataacaacaactctctaatatctgttgagtgctaattatgtgtatgtgtgttagtcgctcagtcgtgtccaactctttgcaaccccatggactgtagcccaccaagctcccctgtccatggaattctctaggcaataatactggagtgggttgccatttccttctccaggggatcttcctgaaccagggattgaatctgggtctctcccactgcaggcagattctttaccatctgagccaccaggaaagctgaccatgtgctagacataaacatattcacaagctcttattttgcccttccaacacctctataagacagatatgatgattatcactactttatagcaaggaaacagagaatcagagatgctaagaaatttactcaatattgcacaggtcttaaaaggtagaaca

SEQ ID NO: 24577 - DNA, 3925 bp, Bovine  19866880525628
  misc_feature (1)..(1): n is a, c, g, or t
nttccttctctgcaaatgaagatgataatcctgcctaccccactgggttgttggtgaggattaaagaagctaattcatgtaatgcgcttaaagtgtccagatgtagttgaaactcattaaataattattctagattcgcaggaagtgtgggggtttgagcctgaaggcagggagaccagtttagaagaaggaatggaacatggtggaaacataagctagcacaatgatggggtgatggagaagagctgcagtagctcctacctgaactgagttgactcaagaaactgacattctccagggacccagcaacaagccatgcaaatcaccaaacagatgtcctattcccggggttcctaccatgtccaggtctggacagtcccatgctgaactttcccaccacattgcccctgatagtgtgagtctgagatctgagctagaaagagttaattcagtgaggatccacagttgaagggtacatcttcatttcattctgccttgtctgtatttgcctgttcttttctgcagcctgccttctgttctgaggaagaagggctgcaaatgacctgcttcaggaccaaataacaatttaatagagtggagattcattaagacagtgctgatggcgactatagtctccagaatggagaaacagcccagaggacttagattctctaccagttttctgacctcaatttacaaggcacaattaagttccggaaacctcagaacagaatgaaataatgaaactactggcttttaatcactagtagaatcatgaggagttagcagacctctaacattattcagttctctcttttaaaggaaagtttctgtatcagtgacacataacctgatgtggattgctatttttcctttcattctcagaatgtactcatccaaatatatttttttaaaacaaaactatgtgccatgatagtgccaggtattggaaagacagtgataaacaatgccaacctaacccttgttcttgtgggggttaccttcaggaagagccgaacaacaacaacaaaactgctaaaaaatcatggcaattactggagaaggaaatgaatcaactggtctttatgtggctaaaggacatgggtcccaattttaaacatgattttcaggtttttttgtttccttttagatcataattgttatgaagcagacagacaatttcatgcctacctctggcagcttggggaattgacttaaattgattgagtcatgggttaataactcagagttattatcactttcttacatatctaggaaatcagtgttgaagggcagaatagagaaacatgatttgttttagttttttcatagttaggtgaagtttggtttcttagagtattttggaaaaactttagtaatgatgttaaagtaggggttaggagtgtgggccctgaagtcaggtacttgggtcaaaatttgggtcctgctacttattggctgaacgactttggcaggctcattcaccttaccaagtctcagattgtaaaatgggataataaccaacttctcagagatgttgggagaattgaatgagatgatgcatataaaggcttagcaaagtgtctgacacatatggcatatttctaaaaataatataacagagaaaggaggtgtgctatattgccgggtgcagtggaaattactgaactggtctatgagcagcagcaaggaagagtatgttcacaggcagcttttgcctgctcctaacaatgattgctggagaaggcgatggcaccccactccagcactcttgcctggaaaatcttgtggatggaggagcctggtaggctgcagtccacgggatctcgaagagtcggacacgactgagcgacttcactttcacttttcactttcttgtattggagaaggaaatggcaacccactccagtgttcttgcctggagaatcccagggacaggggagcctggtgggctgccgtctatggggtcgcacagagtcggacatgactgaagtgacttagcagcagcaacagcagcaacaatgattccatttccctctctccaccccaacttcctcctttgcaaaataggaataataacgaccatcttttgaggctatagtgaggatatgaagcaatgtatttaaaacatctagattggaggccagtacgtatcactcctcagtacaacgtaagaatcaccatcagtaccatcacatcatcatcaccattagcaccatcgtcagcatcaccatcatcactatgatcatcaccaccttcataaccaccatcatccatcttcatcactatcaccatcgtcaccgccattattagggacagttagttgttttgctgcttagcatgcttttttgccttcccatctgccttaggttatattgcctagaagcataatttgcaataggatattttgtgtgtgtgtgcaaatggtttattgagaggctgctctcaggacaaacaagtatcaggagagagtgggagaggaaagatgcaaagaagtgatttggggtgatgtccagctttggtcagatcctgcagggagttctagtgcactgtatcacagagtttatcctatccagaggccagagaactgggctctataccgccatattagtcagtcgttggttgcttgcctgctcccagaaggacctaatttcccagacacgcctgatgagagggctcctatcaatagcaaggcgatcccccagagaaggatgcaagataaactgtcagcacccagcatcacagcagctgggagatgaatgcacagactttgtattgaggctgggataccagtagcatccactgtacctttctgatgcactttgatttcctctggaagccccctcccctactctcagtcttatcccacctccaaggggagacttgtgacctgagacttggccaaagagagtatgagatttgcctgcccatagtaattggttcagaggtgatcatgtgatctcctgaaagtcaataaaactcaaggaaacttttgctaggaatgctggcagagagttagatggtctttcccacagataatgctaacaattatggcatcacaagccagatcagtcaggagccaaacatggggtctgagaatgaagatagttcagtggatgatagtcaaatgacagagagaaacgaggtccctggatcaaaacatgcttgaagtttactcttcccttgcactttcacattacataagccgtttctcccactttcgcttatttctctgagctgaaaattctggatacctgcaatagtgagtcctgactgatattattgctgtaatggccccaggagtgctatgtaaatgagaagcagtcaatcaacttacaggattattgttgctatgtaaataaatttctcttttgactgcgtgagcagagacttccaagccagggcagttttccaaattagatttttcattgtctcagccagaagagaggcacattaggctactcagagggcaccaagcctgcccatacctctgagaatgagactttcctgccagctttccctaattgctgagggccaggtgctggcaaagtgactttcaaacaaagtggccatcgtaaggctgacagcttaaaacaagccagaggaaggcatagatttactttagaaggaaaggtagacaaaagtagagtgggacaggcaaatgggtgatgtcaatgagcatttttaagagataaattgagtcatattcaaaatggtaagaatttatttgagcaaaaatctatttgaatctgccagtgcccaataggaagtggttaggagtagcccaacacaggagcttggggaaagatgtttatagagaaaggctgaaagtaacgtgagggaatggtttgctcagctatagcttacttggttgccttatggggagaaacctagtggctatttgggtggtgtctttaggtatcaa

SEQ ID NO: 24578 - DNA, 709 bp, Bovine  19866880566062
  misc_feature (1)..(1): n is a, c, g, or t
natgaggttctgtaggttgcccaaaaaaacaggcacaagcaaaaatacagatctccctaattctcacatcctcaagcacatcgaagagtttggccctggatcagagatattcccagctgatgagctgagcagggtaaaggaaaggccaagagaagcaggctttccccagtcagcaaatgaggaggcttccccagccttgggtcctccaaggtcaaaggctggcaaacagtctataattggagtcatatgtcccctagcctttgggtaaccacatggctgaataactccaaatcaccatcatggcttagttattgtctcaacaacagatgaaattcagaaagaagagaagcgatgtgggtgatccgagagctgcagtcctagaaggccattatctgtcttaagcttcagcccaccctaccacctactcctccatgggaggttataatacagcaataagtctgcaattatattttactggtgaaaaaaaaatagtggtgagtcaaaagccagctcatagatgtaacatctctactagttacttaagtgggagggggccaagtcttgggctgaagtcagactcctcactgtgggcccatgttcttgagtctgactgctctggaccaagtctcccaggagcacttagccctagctggtgatgaccaccaggcacaagagaggtagggttaaggttcggaaggaggctgtagga

SEQ ID NO: 24579 - DNA, 1043 bp, Bovine  19866880646653
  misc_feature (1)..(1): n is a, c, g, or t
ngtctgactcttgcgatgccatggactgtaccctgtcggctcctctgtccgtgggatttcccaggcaagaagactggagtgggttgccattttcttctccaggtgaccttccaacccaggggtcgaactcacatcatgcttcctcctataacttattcagttatttccaggacccatcagtacttaaactggcaaggaactatatccacttgggcattcgttatccttggaccaagagtattatgaaacacccccattaggtcaaaaaggtgagcacagaagagagatttcatttaatttctcctaacactctctaagattaagaagacgaaaatgagatgccattgaaagttacttttcgtcactttttttcaaaaatcctcccacttcctgttttctcttgggagattgaaaagtgtctccttgcatatttttcattatcaggacttaatgagaattttaattagggctactgcacactttggtggcagctttcaaaatgtggctctggcttcttatttgtcaggcagccagtccttgcgtcattgccaaagatgccctccatcataataatcctaatagctatcatttattgaaagtgtacttcgtgccaggcaatttgcatacattagcaccagtcttcacaaaagtcatatgaggtgggaactagtcaccctaattttagaggaggaaagtgaggctcaggctggtgaagtgattggcttggagccacacagctggagacgggcagaccgaggactcactttggctgaattctctggtcaggaattttttctgtccagccctcacagggggtcttggggacagacaacaagacaatgagacaactcatcaccacttccgatcagaattgtggttatgagttattatgtcttcagcctcggattctcagtctcactgagaacagtgctatggtttagggaatcccaggagactctgagacacccaattagaaggacagtaatagcagatcccagaatagactgattgcttattcattattctcttattcctgaactttt

SEQ ID NO: 24580 - DNA, 2446 bp, Bovine  19866880664210
  misc_feature (1)..(1): n is a, c, g, or t
nacttcagtcctgtggatctgggctgaggcccctcattgccttaatggaccatgtgaccttgggaggtcatgtaggtatcattcataaagcactttgcctccagtcagattccccagaaacagaccctgtggtgaagatcaccgtgtgcttcagcaagggttcagaaagacagagctacagagagtattatgaaataaagaatttatcatagggtcaaaaagtggaacgactgagaaattataaccaggagccattttttctgggtctctgttgttttatctgtaaatttgagataataaaagcttccatgctaaatagcgcagagtgggtactcaaaaaagtaaatttccttcaacaggtaaagcaagttctaggcaaaaccattaactacatcagtggctcccagaatctcattttgcagactgacacagtaactttaaaaaacgcagcagaaactcacacaacattgtaaagcaattacactgaaataaaaatttcaaaaaacggggaaagttatgaatgagcgccaacttttaattttgccaagttatgacatcagataagtacttactagctatgatcaccatcatttcgttaaaaaacccgacagtttatttatttatctacgtctgtgctgggtctttgtttctgtgcacgagttgtctctagttgctaagagcaggagctagtctctagttgtggtgtacgggcctctcttgctgcagagcaaaggctctagggcatgtgggcttcagtagttgcggcacgtgggctcagctgtgactcctggactctagagcacaggtgcagcagttgtggcacatggccttagccactccacggcatgtgggatcttcctggacctgggattgaacttgaatctcctgcgttggcaggcagattctttaccactgagccaccagggaaacctaagaaacaacattttaaaaccaaaaaatgtaaggccattgattatcaccaacttaacaataatgatggaccatgttgtcaatttagctttatggtgacatgatccttatttttcctctaataccacataggttagtgaacagtgtcgtgggcaggctggtacccaggtgtgtattttgaggaagaattgaactaagtagcaactgaatatagtctcctctccttcacttgtctgcatctcttaatcctctctgcttcctcctcattcatttgcaggaaatctattgccttccctcaatgcaccaaaggtactccactgtggtagccctatatcttatcctccctctcttccagggcaactaaaagactacatttctcagtctcctttgattgacaagccatgtgcctaattctggccgatgggctgcaagtagaaatatctgtcaatcctagatgaaagcatttaagagccagtgtgtgattctccatcttctttttccttccatagtgaagtgtctgttgaagtggaagtgccacagagggaagcagctaccacacagagagtagcttccctcgaaatctgcctagacacagagggctttgcaagagcaagaaataaacttgggtaaaacctgtgagatattggtattgccaattactgcagtataatgtggtctgctctatccaacaccagcataggaccaagatctattggacctaagcaacttcacgtctggttttgttaacaattactgcgtagaaataaatattagtctgaaaagaaaataatttctgactttcaattttttactttttaaagttctaatgctttcttctatctgagccatcccgggaaactatgttgcattgtcctgttcaattcagttcagtcgctcagtcgtgtctgactctttgcgaccccatgaatcgcagcacaccaggcctccctgtccatcaccaactcccagagttcactcaaactcatgtccatcgagtcagtgatgccatccagccatgtcatcctctgtcgtccccttctcctcttgcccccagtccctctcagcatcagagtcttttctgatctaaattaaaatgtcatagcttagttggaggaaaaacattcagccagccctgagttccctttattatttaccagatgcgattgtaaagctgcttgtttgtgggcattctcagagaatctggacaaatgacttagctcttgccttttctccagggttttgttattcttttaaagttcctgttacataaggtacaaggtaaatgcagcatgatgtattactttagattgttttcaaacagtgtaatggacagtttgctcattgattaaaaaatgtagccaagaccattcattttgatattaaaaattcaattgttgattgctacttatttgttttttaggcatttgtatatacctactggagaagacaatggcaccccactccagtactcctgcctggaaaatcctatggatggaggagcctggtaggctgcaat

SEQ ID NO: 24581 - DNA, 964 bp, Bovine  19866880718166
  misc_feature (1)..(1): n is a, c, g, or t
ngcttaacatttttgggtggtatttacattttaaaagaggcacttatttactcaaatctcaaaatataatacccaggagatatttctgagctgagtctttttggtgctctgtatctgtgacttccataagcagcactcacaaagaataacagcacaaaaatagattcataaactttccaacaaacttctgaagtcttcagagacaaagctgatagctttggacacaaacaggaaataaaatttcaaaacgccaaaccaggagaaacaaagcgtggtgcaatgggaagatctcgggccacggatatcaaatggacctgggttctaattatgatgccaggaactttcctagcaggccaggggttaagactgcgtttccagtgcaagggactcaggtgcaacccctaatgaggaaattaagatcccagatgctctacagcaaggacaaaaaaaaaaaaaattatgatgccagcactgataacttgatgacattggccgtgatacttgattttttgagtcccagtttctatacttgaaatagacatagttaaatatttattgtggtgcctacatgacacaatggggcttccctggtggctcagtggtgaagaatccgcctgccaatgcagtaggcttggcaattcctgggttgggaagatcccctggagaagaaatggctacccactccagtattcttgcctgggaaattccatggacagaggagcctgttgggctacagcccgtggggtcgcaaaagagttggacgtgttactaacacaacaagtgacacaatgcaaatgagaagccgagtatgatacctggcacataacagatttttttttttttaagatgactgttaatgttttgctgtctttatcttcatcattgtgatcaccatcaatggctcctgcactgccaagctgaattgtctggggaaaattacttaccatcccccagcttcagtgct

SEQ ID NO: 24582 - DNA, 1329 bp, Bovine  19866880748217
  misc_feature (1)..(1): n is a, c, g, or t
ntgctttacatttctaggctaacaaggtgcggtaatttcattccaaatgtgtaaatattattgagtttgtcagggctgctgcccgaatccgggacagagaactgatgttcaggaccaagaggatatggaagaaagaagcagcgtgggggaggaacggagaagcttggctaccctggcttgcttcagctaacatttccgtgtccttgtgcattttgtattaacacgctgcagagagcatctctttggggctgtggctcatacagaccctgttctctggcctcagaggtgggaggtaattctgcccttggcactaaggcaaggatgagggattccaggagcagagagttggttgctcaggccatggtttgccttctctcatgtttccagtcccttgattgattctctcttcttctgattgattattatctgatacttgcttaactgactatctaattacccttgaggtacctcaacgtttcagcagttgaatgaatgagagtctcatcctgtctgtgcccaagtcaatccctcccccaaatccaagggattttggagtcttatctgagttgttgagaagagaaggagatatcagaggaactagtcttccccttgagccattctcctttttatctgtcactgcttcagagagatgagcttcttgggtgcccgggaagcccaaagtatttccagtttccctgagttgttctcactccctggttgttattttcttagggccctggaagcctggtttgtagtaaaagcttcatgaatatttgattgaatggatggagagagtgggtagatgggtggttgggtgaataatcaaacctctctactggtagctgaaatggtattacatgatttcagtaccagatgaggagacagaatgttgatctattgttatgaaaattgaagatcatgtttaacagtttctgtcctgaagaagcttagagtttgtttaaaaattaattaattaatttaaaagttgaagtctagttaatttacaatgttgtgttagtttcaagggtgcagcaaagtggttcaagttatgcatatatatatacactattttttcccaattcttttccattatagatattataagatataagaagtttagagccttataaggaatttaagataggcttatagttattaaatgattgaaaaaattaccatctattaatcatctgctatataccaggtttatattatattttcatagcatatatatattttaatatatatcaaacttcttttaagagcatatgtgtatataatgtctataaatttatatgtaaatatgtaacatatataatatgtagtaca

SEQ ID NO: 24583 - DNA, 1080 bp, Bovine  19866880782017
  misc_feature (1)..(1): n is a, c, g, or t
nttgctcccctgccagtttagaaacccagggaacctttaccaatgcctcctttcccaagtctggggaaaagccctctgtggtcaaaaacccctattctcattaatggatttaggattttgaagtgggaaggagaaaaaggagatgcatctgtcacaaacccttgccagaggcaaggaacacagaggactcattgcttaagtggagagagaaataccaggagacaaaatagaaaacagtgcatatggcagaagaatgatccaatgcacaattattgagtaggttttgcaaacaattcttaccatccctctaaaaacattcatatttccttctctttaaaaataaaaagcttggcaacagggtttctgcaagatcatacttctacaaagagttgtaagtttccatctaataaacacggccaattgagaaattcataatacatgaaagcaatcccaaaggccatgaagtcagatggacctggagtgataccataagcctagtggtgaagaaaaagagttgtcaagttgatctgtgaagtaaagaaaataatgaaagcaagtgaacacagtccaaaaaaattaaaagggattatcttacccaaaataggatgatttaatatgctaacacacagaattctttcctctgcccccaagggctgtgtgcatgacgatttgtactttgttttagaaaacttatgattgtttggaagtgttttaaatgattcaggggcagagatgtgaaggataacaaatgaagcaactaaagtttcatattttattgtgagttcggccctacttaaaagtcaggctgagcttctaatcaaaatatgaagggagagagcttgaaagtaatatgaatcattaatatgggagtacttaaggtaacgaactcaaggattttcgaaaatttgcagcactttttcagataacacgaagaggttgagtatttttatttccctctccttcaagattctttttaagacatatttaaaataggcctaaggtcaagatcatgaaaggaaagaacagttttgagttactcccttataaattgcacagaagacaacacataatatcttaata

SEQ ID NO: 24584 - DNA, 1556 bp, Bovine  19866880783291
  misc_feature (1)..(1): n is a, c, g, or t
nacccattctctctccatttaccccatggctccaacagtaggctttatctatctgataaggatgctgagatcatttcaaggggaccaagcaaggcttatggaccatgatgatcaaagaataggagttattctcagtatatattaagttacctgggcttcccagataaagaatttgcctgccaatgcaggagacacaagagacacgagttcaatccctgggttgggaagatcccctagagtaggaaatggcaacctactccagtattcttgcttggaaaattccacggccagaagagcctggtgggctgtagtccacggggtcacaaagagttgaacacgactgagcacacacataagttgccctggaattgattccaagatgccagaataagaagcaagctttggcaatcatttagttccaaccttctttttgcagcagaagaagggagcctggagacctgcctgaaggacagagctctttagcagaaccagggcaaaaccccatggctttcaagaaccatccgttttgccaactgctcaatgcaaggggcttccctggtggctcagatggtaaagaatctccctggaatgaaggagacctgggtttgatccctaggtcaggaagatcccctgaagaagggaatggctacccaatccagtattcttgcctggagaattccatggacagagaagcctggtgactaacactttcaccttcaacacaaagagaatgcaaactgcactgaagggcttccactgaagtcttttaatatatagtttattttggaattataaaagctgtgcatgtttgccatagaaaattgggaaaatacagaaacaaagaaagttgtgacaaaaataaaatgatcctgtttcccaccacccagagagctgtagataacttggcatgtttccttctaggactcttcctatgcatagctttttgtttgttttctttttagtttttagatacttgtgaaggcactgtgtatgcaatttgttaccagccttcccacttaaattataaatattttcccatgttattacagtctctttgtaaacaattttctttttcaatattcaagtgcaatagtctcctgctctatgcctacaccctaccctgctcacacatgcatctattgcgatccccttgggaactggcttcaaccatctgtgtttaaaatttttctgttacctccatatagcttaaaatgtgacttctagatttttctacttcataattacctgttgatttcctgctgtgatagatgggaattgagtttatttctaccaccaactctagatatatcttttctccttattcttctcccaataattataataattatgccattatttttcttatttcctccttggccaccatgataattgtagataacttgcctaaccctcactttcaagatctttgtcttgttttcctccctacacttctgaacttctattgactctagtttttatttttaaaatttttattttattttatttttgactgcaccacacagcatgtgagatcttagtttccgcaccagagattt

SEQ ID NO: 24585 - DNA, 3093 bp, Bovine  19866880796153
  misc_feature (1)..(1): n is a, c, g, or t
nggctgcaaatggcattatttattctttttatggctgaataatactccattgcatatatgtaccacatcttctttatacattcttctgtctatgggcaactagttgcttccatgtcctgactactgtacacagtgctgccgtgaaataggggtgcatgtatctttttaaattatagttttgttttcaacaaagcagcagaaattatgtcagagcaggggcactagagaactccaccacctctgtgtgttttttgctacagttttttgatgctgaaaaaactggatggttaacttatgaccaggaagtttaggtaccagatatttacaccgtgattttcattctgtttccattttgggacatccttgctaatctctctcttccatctttcccaaatgctttagtgaataaatgggttattatctctcaaagttagacaactttttccttcaaatgcaggatgtgactcttggctctgagtgtgagattgttggaagatgtctaaaatctccattcaccctggacaccatgaaatatacatgacaccaaaataggcagacttgacaactccccccacgcatgtcaggagggtaatgtttgcgatctatatgcatcttggtcaagtggacatctgggggtcagcttgaaatttatcgataatttcatcagggtgataacatttcacacattacccaaaccagcttcctcttttccagatgatctgaagaaccaggtgaaactttgattgcagctgaaaaagctctagaatcaaagtggccctgcctgcccctggctatggttttacttcccttcccctgaaagagagaagtcagcctgtttgatgtttggatggatgttccaaccaatcatacatgtgcactgatggtccctaatctacaaggtccaagagctggaccagagaacatcctccttcctgcactgaagaatgttttcttttctgcactgaaaggtagctcttcctggcctctgacttctgaagacagacactgcagaggacctcttgccaagaaaagaagcaggatgaagagctggatatctttttttgaaagcttttttaaaaaaattgtttgtttatgtattaatttatgactgcactgagtcttcattgctggacatgggctttctctagttgcggtgagtgggggggtgcctactctctagttatgatacacaggcttctcattgcagtggcttctcttgccactaagcatgggctctaggcatgtgggcttcagtagttgcagcttgcaggttctagagtggggttcgctagtcgtggtacatgggcttagttgccctgtgcatgtgggatcttccaggaccagggatcgaacccatgccccctgcatgtccgactctgtgaccccatggactgtagcccaccaggctcctctgtccatggggtttcccaggcaagaatactggagtgggttattgtgccctcctccaggtgatctacccaaggatcaaaccccagtctcctgcattggcagtggggttctttaccgctagcaccacttgggaagccccaatataactgcagtgtgtgtgtgacagtcactcagtcgtgtctgactctttgtgaccccatggactgtagcctgccaggttcctctatccatggaattctccaggcaagaatactggagtgggttgccatttggatttctcattttttttctggtggcaccgctttgcttcaaatctacctccagtcatttctctagactccagccatccccctctttctttttctaaatatcactatctaatttatacccccaactagattagcaagaaggaaaaccagcccaagatcatggggagtgttttctgaaggatgttagggaatagagatagaacatgaagccagtcgaatgcacatcaagaactgtaccagctatttaatgcataccaggttatcatggcaacctggggtagtattatagttacaataatagcattactgtttccattctccagacaggaaaataaagatcaggaaggttcaatgacctgttggaagttatactgcaaacatatagtggaactggaatcagaacccaggactggtctggagaagagacaaggtcattttggaagggaagcttgagattacggctacaaaatatcccaaaatgttgaagccagggagaaaaaaacccccactgtgatggaagagagcagatgaagcagaaatgtgggaaaactgaaatatatgcatttcttgttttttttttttctttttatttaacactctttatggaacttaagtcattttgtaagctttgaaacataaaaatgtattatgtataatgtgctttgctcataaaattatcatgtttggtgtatttaaagacgtgagaacatgggaagaaggaaaggagtttaaggggaatagctttttttcttttttttttgaaaaaagttaaaaggttttgatggggaaaaaaatgttaaataaaaattttctatttttttcaccagatgttcatgattctatttacagccattaaattttccctttttctgttaactttcaggaaccctcaaactgaccctcaggggttcctccatctgcctcaggcccaaagctcatcatcactatccccacccctctggggatatcccctccttctctttagttgtggacacttcacaactctggcacccttgatttttctggctctttctcaagtaccagccttccatccagctttctgttagtagctgttacttggttctgcctcttcatgataaactactccttctgagtggttagtgtctatatagctcacagtggcttctagtcatctcactgagatgacttatgatccttgggattggctgggtactaggtaaagaggactgcttctctaagacttttacaggggtcaggccagggaactcccctttactacacctgtatacctgggggacacagtcctactctagggttcctggtctgatgaatggagtgtgggcttgaatgtcactcccagttggcctcttggtcaagtgctcatcccctctgtctcagatcaagccaaggttttcaaaagaattttgctaaa

SEQ ID NO: 24586 - DNA, 2679 bp, Bovine  19866880848846
  misc_feature (1)..(1): n is a, c, g, or t
ngcattccctgcatccgacacctagaggtggccctcttgggaggagaatagctcatggaggtgtcagatcatctgcccattctccaagacccggattccagtctgtcccatgggtgaaactcactgggaccattcagtgcccattccctgctcctggagctcacatggtttcctctttttattcattcttggttttcttttcaccattttcaccgagggcctaactatgttctaggcacaggaaataaaatgggtgataagacaaacaagctgtctactcccagagaaattttattctagtggggaaaggagaaaattgacaagtaaagaaataaattaattttatattgtggtgggtgagggccagaaagactctgggacagtgacatcaggggaggtggagagacttgatgcctggatgttagtgagggcccttctaaggaagactgaagacccaaggaagagagttccaggtagaggaaaccgtggaccacaggccctgagatcagagtgagctgatgtactccaggcatagacagagggttcgcatggctggtgagcagtgagggaaggagagaggtttagcaaggcaattaaaccagtcaattctaaaggaaaccaaccctgaatattcattggaaggactgatgctgaagccccgaagttctattactttggctacctgatgcaaagagctcattggcaagaccttggtgctgggaaagattgaaggcaggaggagaaggggaggacagaagatgaggtggttggatggcatcactgattcaatggacatgagtttgagcaagctctgggaaatggtgaagaacagggaagcctggcatgctgcgatccacggggtcggaaagagtcagacacaactgaacaagaacaatggtattttttgtgttagcttattaagttgtattttcagcagtcacgtctgtgttttctacttcttgatatctgcctgtttgtttttttttttaatttacttatttttggctgtgctcagtcatctttggtgctcatggactttctctagttgtggtgagcaggggctgctctccagtggcgatgctcaggcttctcattgcagtggcttctcttgtggaggatgggctccagagacgggctcagcagttgggacacaggggcttagttgcctttcggcatgtgggatcttcctggaccagggattgaacccatgtcccctgcattggcaggtggatcctcaaccactagaccaccaggggcttcctatctgcctgttatttgttttgcttggagtgttcactgacacatgttgattgaaatttttcctcccctcattgtattttacacagcataagtggtcctggtcccttcaagttattatttccacaaaatactgcagcccaaagcagaaggctacaaggtcccatgtggttttcgtgcctgccaagttacttcagtcgtgtctgactctttgtgaccctatggactgtagcccgccaggctcctctgttcatgggattcttcaggcaagaatactggagttggttgccatgcccttctccaaaggatcttcccaacccagggatcgaatccgtgtctcttgccatctcctgcattgacaggcagattctttaccactattgccatcggggaggcccccgacgtgggggcatagctaatgaacgttgggtcacgtttcaccagtacagtcaaatcaggaggaccacacctgagcatcaaatatgagaatcaaaatctgatgaggaaattctagtatgtgctctttgggaactgtttttttatacctccttgggctcagttgaaagatacagctcctagcacttaacaagctccttgtcacatatgtccatagatctatcagaatacttctgctgggaactctccgacaggaaggggatgatgtctccctgaagtcctctaatttcactgcctctggctgagacaagttgggaagaaagcagtgctctccttttcggactggatggcttcaaggaaacaagtaaattctcagcctcaggatagataatggtgtcgaaatggccctggtttctctccctagtctcattttccatggcaagaggagttgaaaagttggcactcgagccaaagcttcataaataatttgttggaaaaggcaaaccctgatgagagccaaagacctatatttcaaaggagccatggaaattctgagttctctgtcctggcaggttctaggaggtagtgagcagaggaaatgataggctgtggggagcttcaggatccaggattccatggcttttgggagatgtctgtgatgccttcaaaattaggggagggtggacctctgctacttcagtgggtcactctttgtcacatcactgaggacatctttctcagctgcccaggcctttgtgtcatcagacccagctgcccacatgggtagccccacctcagagctggaccctaacgctctcactatgctgccttatttctaaacaactcttcacctacatggccacatttttttttttttttttttttctgatcagcttctgaaccggttaatctgtctctttcatcttgatcttgacttttggcacttttcccatcccaacctcgactgtccctctacagctaagatgccgtgtccacacaaactcaaaggcattttaacccagccat

SEQ ID NO: 24587 - DNA, 1527 bp, Bovine  19866880976717
  misc_feature (1)..(1): n is a, c, g, or t
ngagtccgtgtacttgtgatggtgacacattgcttctaacaaaaacatcgtcctccctacccagaacatggagtgccaagtcaagtacaattatagataggggcttcactttgttttcctaactggttccatggcatcctactttttggatctcatgcttttcctcagctaaaagggagaaaagggtactgcaagcctttgcctttgatcattttaatgcaatcagcgggaatctaggaggcacagttattgctgaaagctagggttccagtgggttactttgagcaggttatttttctaagtcctcactttctcatttataaatgggataaagggacctccctggtggtctagtagtcaagattccacacttccagttcagggggcatgggtttggtccctggttggggaactaagatgtaacatgctgagaagctcgccaaaacaacaacaacaacaataggggcttcctggtggtccaggggctaagtctctgtgctcccagtgcagggggctcagcttcaaaccctggccagggaactagaattcatatgctgcaactaaagatcccttatgcagctaagacctggcacagccaaataaataaatagggtaagaagaacctttcaaaggatttgtcgtgaggatggagataagccaaaagtgcttagtacaggccctgaaagggactcaatgaacatttaattttatttttatcagcaaatggtgatcagaaagatgaaggaaattgatattaagttatatgaggagtgattacaagatgtttatttttatgggggagagttacaatggacataaagactatcttcaactgtctgatggaattctgtaaaaagaagagtttttccaaaagacaaaaccagagataagagaagtgttacaggaaggtgtatttgggttccagaagttttccaacaactgctcccacatggttaatgactagaaaaggagagagactctcctcatgaggaatgccttgggaaacctccttcgctggataggggaaaactcctacacatccatcaagatccatctcagttgtccctacttgagaaagtctgtgatcaccttcatggtccagcctaaattcagtgtcttgaacttgacctccccagattttacaggttacctgttaacctgcctctttctgcatctatatgataaacttcttttgttctcagttgtttagctctttagacacattgcccatcataatgcctgggactgagtagaaactcagatgtcaaggggagaaagaattgaatggacagaagtgatttctgatttaggagaggaaactgacaccggttgtgtataaattttcatccaactggaatatgcgatgtgttcttggttatattttctaatatccaactgatttttaccaagatcttatcaggctgtatatccagcaacaaaacaacagcttgaagcaagaaaagggtaaacaaacaaaccaaatgtatttggttcctctagcaatctcactcctgggcatatacatga

SEQ ID NO: 24588 - DNA, 746 bp, Bovine  19866880989320
  misc_feature (1)..(1): n is a, c, g, or t
ncagctcaccctggctcctggctgatggagaacaggaggcaaaccagcatggaacccgagcactcctgatcccattcagcccagagagcatcagagcagccaattaagatgttttatcctaaaagttctcagtgaaagcaggtggaaagaggaggtcacagagcttggagcacaaaaaaagagaaaaagtccatatctatatgtgctttgaaagtcttattctaaaataaaaattagggggaaaaaaaactgggtcattgaattgaaattcgtcaggatcctcattaaaagtttgactttttctcatatgaatctcaaataatagaagaatatgagaatggcatttggttattttagggtcataggaaaagtttaggcttttgatccaaagagaccagggttccaattttgattttttggcttagctctgtggcctgcaacaagccaaatgtgctgtttaatcccagtttaccccctcatccgattaaatggaactaatttttggggttaattaaaggaattaaataaaattcttgtaaagtgtcttcatagtggccaaacatgatatgtgctcaatcaataaaaactgccacatctccaaactctgtaaagcttttttaaaaaagtttattaaagtatagttgatttaaaatgttgtataatttcttctatacagcagagtgacagtatgtatgtatgcatgcatatatatatatataaatacatatttttcatattcttttcta

SEQ ID NO: 24589 - DNA, 2686 bp, Bovine  19866881077605
  misc_feature (1)..(1): n is a, c, g, or t
naagactgacagacatcctggaacagcaggtttggatccctccagaggccacatccctctgcctgctggagcttgtgatggctggaactgatcctctgggacacgctttggctttttctaatggctctgtgggaagctgagcctgcagaccccctcctcttgtgggaagtcacccataggagttccaccatcaggttccagaacagtgggcacgggatacctccacagtccactgaacaccacgactgggacgaccaggagcaagaaagttccatcgtctatcaatggatgaagccaacacgcatcagccacttcctttcctacatgagaaggctgagcacccaaagaattgatgctttccaactatggcactggagaaggctcttgagagccccttggacagcaagaagatcaaaccagtcaaccctaaaggaaatcaaccctgaatgttcattggaaggactgatgctgaagctgaagctccaatactttgggcacctgatgtgaagaactgactcactagaagagaccctgatgctgggaaagattgaaggcaagaggagaaggggacgacagaggatgagatggttggatggcatcactgacatgaacctgagcaaattccgggagacagtggaggacacaggagtctggcatgtgacagtccatggagtcacaaggagtcggacatgacttagcaactgaataacaacaacaaggtttttatttataaaaagagggcataattaaattatagtctgtgaaaccatttttttttaattgaaatacagctgatttacaatgttgtgttagtttccagtgtacaccaaagtgattcagttattttcacattgtggtggcttttttgtggagcccagactctagggtgcatgggcttcagtagttgtagcatgccagcttacttgccccatggcaggtgggatcttagttcccatgtcccctgcactggcaggcagattcttaacactggaacacaagggaagtctcctgattaagttttgatcagttcattaaactgggtgccatattctttcctgtttaaggactacaccatgtgaggtaggccagtcagctatcctgtccctgggatttgaatcttgaatcgaatgatcccataatggaaaattgttgacgttcaatcacctccatcacagattgtgctgaaaggagcagaatagttgcagttctctgaaacttccctggtctctttccttcctaaagtgaggttctctaagcatttcttctgattctgtgagctaacccatatttcttccaaaagatcatttattggcttaagtcatccagatatagtttctgttgcttgcaacccataagccttgagatattcagacacagcgacacacacagagataagcagagaaacccacagaacatgaagataaagcaggcacatagacaaaccctcctgacttgtattgaggacaacagacttattttgaaagaaaaaaaaagtgagtctgaaataaatagctcggccagatgaatttatttctagggagtggtagacttgttatatgcatctctgggtattttcacagttccattgttggaactaaccccttttatttatttacactgaatgataaaaggagtatgataatatgcgtgaaataaggtttctactttgctttcttctctgatctttttctcacaaaatttaatctaaggagccatactaattcctactggcaaagcctgaagaactgactgccacatctgtccattcattcattcaaaaacaaattataacacctactctgtgctgggaaccttagagatgtggagatttaaaaagtcagacaccctggacccaagggagttacggaatcattcattgaaaagaattccctgagcatacccactaagtgtcagctaatccatcatcctgttctcatggagattagagtctagagataaacttatgaacgagacacgtgctgatgtagaacgatcagcagggaaatcttttttttttttttctgaatgagagaaagtgcatttggctaattaataagcatacaaaacatatttagttcaagatttgtaaaggtttaattatgcagtcatgtaaatttagaaatattcttttcataagagcaggagagatagatactgatggaggagaattgagggaacacatcttggtggatgagatatataaagaggatagagctacagagtatttatattcttgtgaccgtaagaggaggctgaattctctgctgttcagccaaatggaggcaggatacaatacgctgaaaaatcagagattgggtaccactctttgttgttccatatgtggatattcctcctcatgttgatgattatgtgaaaaaaaagtccatatgcaaagaaatatgcaataattagagacacagtaactcatagtttgctgtttccatctgggaaatatgggaacagagtttgggggaggtttgagatgaaggcaggaaaaagataatatggagaaaaattagaggattcaatgaaagaccaagactgtattcttgattgcatcatacatacatatgatatctacctggggtttcttccatggtcatggtagaaatcagacaagtgttcacagatgccctttatttcacctgtccagcttatcaccatcgtgcaagggggaagccctaga

SEQ ID NO: 24590 - DNA, 1552 bp, Bovine  19866881094702
  misc_feature (1)..(1): n is a, c, g, or t
nactaacctaaatacttaaaggaataatttcattggtttttcagaaactctgcaaaataaagctttttcttatccccaacttctgatgaggaaactgaagctaatagttaagcagggttaagctacctgctgggattacgtagcttatttgtggcatggttgggtttgtaaaccagagccagtggcttctgaaattgaagtatttgccagtttcagattccagactccattcctagccctacccatctcacctctcctccactaggaaggaagaacaaagaaaatgttctctcagagcaaggttctcagcatcctgcatcaccatgacaacaggtcctagtcaatttcttcacaaggaggggaaaagcaaaagtcaaaccgagccgccatgggaacattctgtgggcaaacaccatggccagtgtgcttggagccccatgtcctcactcagtcccaggtgactcactcctgggattggagctgggagctgggccaggttcctaaataggcaagggtaatggtgctcttggacagcctgcaggtcactttgaaaagtaatcctttttccttaagaatctgagctcataaatgagcagattagaaatcaaaggggagaaaccaatgaggattcctggcaagaggttttagggcaacccagctttcttcctaggatgacatcatcttgtttcacctctcctgcccaccctcagccaaggtctagtctgttttgctttgttttgtttttttttttaattttttaatttttatttttttagtatagttgatttataatgttgtgtcagtttcaggcatacagtaaagtgaatctgtttatatctctctctctctctctctctctctctccaggtcctccctggtggcttagatggtaaagaatccacctgcaatgcaggagacctgagtttgattacagagtcaggaagatcccctggagaaggggatggcaacccactccagtattactgcctggagaatcccatggacagaggagcctgacgggctacagttcacagggccacaaagagtcagacgcaactgagtgactaacactttcactttcacagaatactgagtagagtcccttatgctttacagcaggttcttattagtgatctatttgaagactgtcaaatcccaagagaatgtagactccaaaaagtcaggggtcaagttaagctctcttttactgtatacacggcacttcacaggtcgctcagtgctaaagaatctgcctgccaatgcagcagacacaggagatggaggttcaatccctgggttgggaagaactcctggagtaggaaatggcaacgcactccactatgcctgcctagaaaattctatgaacaaaggagcctggtgggctgcagtctaccagtgagggtcacaaagtgtcagacatgacagagtgactggcatgaactgcatatacatgccaaacaatgcctgactcagagtggatacttactagctattgatcaattaggttattgattgcagataacacaagcaatgatttgactggggcagaatg

SEQ ID NO: 24591 - DNA, 863 bp, Bovine  19866881344887
  misc_feature (1)..(1): n is a, c, g, or t
ntagaacatacagaaatggataagagtaagggaagggtagggagccagcaaccagaggctccaggtattaaggaagcagggcagcagaaccatcttctgtagactccagcatttgagcagctccaatctttatctccatcttgttttgctgcgtttgagggctgaattcccagttagagtcctgtcagtcttgcttggcttgtatatatgctccctggctaggacaaggtgaggcacagtgatttacagtttcattgagaccctagacactgagaggagatttcctaaaagaaggacaggaacaagaacatggtgtatttgcctgaatgggacctccttttctttggttgtcatttactggaattacaatcaatgctttgcagtggttggctgatggccaacttcagtcatggattgactctcactggaaacatgaaatagagacgctgtccgagaagggagtcactagattctggaggactaggatgagactacatgatcctagtcccatttgatttaattcagggagccttctctgtacccaagaaaggatagaaaatgtggtccccagagatggagtctcttagcaatctgggctttgcaataattcttctgtgcagagtacctcatctggatttagacccgaagcagtgggggtggggtcacttaccacagggaagaagaagagatgggaaagacaactttatagcaccctttatcatgaatgtaacagggtcagatgaggctgacaagctggtcctcacagctgctgtgaaaaaggaaggctgggctgaaattgcaatatgaattatttaggcagaacatgatgaagggctttctggctgcaaggaaaggcagaacat

SEQ ID NO: 24592 - DNA, 1663 bp, Bovine  19866881423567
  misc_feature (1)..(1): n is a, c, g, or t
ncattttcttagtactttacatgtatctaatctttctcaccaacctatgatataggtatcttaactttccccattgtatagataaagaaactgaaacactgaggttaaacaatttgcccaaagtcacctcacatgtacatgatgtggccaggattcaagtctgggcagcccagctccagaggcaatgcttctgacccctcatctgtacattctctcttttcacaaatcataagccaccaacttggccaacttccttgaccatcactgcctgaccatctacgtttggtctcctgttcaacagacatttcgagcccccttactctgtgtatgttctgtgctagtttccggggcgatattggcaaatgaaatggtgcagtccatgtcctgaacttgtcaggccaataaacttgaccttcagatgcattgctatccacaccactcagaggtatgggatgcatactattttttatctttttatggtgtgttttgcatcctgtatcttccttagggaattagttgtgtctttgctgttggacatctctcttaacacttagatgatcacaattgcttgatgatcatttaatgatgatgatgctataataggcaatgttccatatagattgcttaagtcttacctacaaaagaatctggatatggtgccaggtaaatcatgtcttgctaataagtctcattcccactttgatgtccagagaactacttggcatatggttgaaacccactcactgaggacttttatgtccccactcaggaagtaggacttcagtatctacagatcatctgaagaacctcatctgaagccttgggttctttcaagaagaactgttggggttagagaagtgtgtggagtcaatcctggctcttgagctccacgtgtctcacagtaagggaggcaaagggtaaaagagtgcccgttcatcagagtggctgcatgtctgtcgatttcaccttctgtaaatctgcttctgttgaactaatgcctctggtgcccacatttaatattttatatgctcccctgaacctagagaaagtcaaagcatttggaaacatctttaggattcacagtttagcagaggattatcctatcatgtaacataccaagtgaaaaataccaggagttgggctttcactctcttttacataacagatgttgagaagagcatcagagggaagcaggtagaaacaaccacaattaagtggaaacaaatttgctgtatgactcagggagttcaaataggtgctctctgacaacctagaggggtgggatggggtgggaggtggggagagtagttcaagagggaggcgacatctgtatatctatggctggttcatgctgatgtatggcagaaaacaacacaatactgtaaagcaattgtccttcagttaaaaataaatcattttttacaaaaggaagtggaaacaatcaagttagtggttcagaggtctatgttccacatcaagatgctaccaatgggcaagaggaaaaaaaaactcactgggccaaatttgttaaaatcaggccttgcttgttaacacaccagacaagtaccttaggagctttttttagagcattttgttgtcattgttcattttgccttgatttctgctccaacacagggaattaaattcagtctatttacctgtt

SEQ ID NO: 24593 - DNA, 1714 bp, Bovine  19866881427186
  misc_feature (1)..(1): n is a, c, g, or t
ntgttatgtttaggatacacgctgctctgcctccttatcatgaaatcccactcaggataaataagattcatttcggctatagccatttgttcttgttagggagctgccaggatggcatgaaatattaaatgacaagggttaattctgttctcagcaaagagctcccatctaatttcccataagattgtacaatgggtcattgtgtcaggcttgaaatcagcctgcaaaagccttccctgagaaggttctgtactctggctgtattgatgattctggcttttgtgatgggaaaacaaagctgattcttcctgccactgggaggaatgaggggcttggttgttcccagggtgtgcagcagtgactctgacaatctgcctctagtgactggtgcttcgttattttcttctggttcccttgtgacgaatgggggtttctgggggtggtgctagtggtaaagaaccttcctgtcaatgcaggagatgtaaaagacatgggttctatccctgagttaggaagatcccctggagaaggacacggcagcagcccactccagtgtttgtgcctcaagaacccctgggtgaaggagcctggttggctacagtccatagggtcacaaagagttggatacaactgaagcaactatacatacacatctttgggtattggtctttcatgcttacttctcctggtttcttatacagagatgatttgtgttaagtgagaaggttgttgctttaaattacattgatgctttattaatatgttaaatgatcatgcttgagctatattcacttacagcatatgcatgtgcattatgcagggcattagtaatgaatgagaatgctttacttaaagatctgtctataaatcagttgaacacgagggaaaaaagagtcattgtttatttatgaagcctggaaaaggaatcacagagtgtaaatgttatgtattctcttattctaaaaacattatgaaacattgattatatgtttgtcattaagtttattcccatgttgcctttatattcctgatacagtgttactcttaaggattaagcctctgaaatcttctgtagacttaagagtagaaagcttcaaggctaggtagtaaactttgctcggacagaaattggatatgtgctctcttgctgtgcaaatggtacacaggatgagccttcagagtgtgccgttctgtgggagtgttttactactgcccggggtccattaacactttgcttctcagtaaattcaaattaatagacattcattgggtttcttgccttcgaattaaggatagggccaaggtactgtttgttgttgtttagtcactaagtcatgtctgactcttgtgacctcatggactggaacccgccaggcttcttctgtccatgggattttccaggcaagaatactagaataggttgccatttccttctccaggggatcttcctgcccagggattgagcctgtatctcctgccttggcaggtggattctttactactgagccaccagggacaaccaaggtactgttagaacatctaaaataaagacattctgggaaattattccctacagcagaactgtcactcttcataatacttctggagtggaatattcacatgaaattatagccaacaggaaacaaggcaccattttattacttggctaagattctattgagagccattgtttcaaaatacattgctagagtgg

SEQ ID NO: 24594 - DNA, 1524 bp, Bovine  19866881740618
  misc_feature (1)..(1): n is a, c, g, or t
natggagcctggtaggctactgtccatggggtcgcaaagagtcggacacaactgagccacttcacttcacactttttgccaagatatcttcaaggtgaccccaggcaaggactttaggctccagggaggaagagggagtgttccagtgaggcgttcaaaaggagaggttgccatttactttcacaagtggttgaaacacccagagccaaacctaaaattagaaaattaaaactaagagaattcaagcaggaccattttcatcaaaagcaccaagcatatgggccatgctgtcaagtggagaccatcaaactgaaaaagtgtaaatgaatctgggagattagacagatcagctggaaaaggaggcaagtgccttttgaaggcccagattggagatccgattttgtccccggcaggaaggctgccctccacttctgtccggccctttgagacagccatttgccttagaacatttggtgtcacccctggaaaactttctacagagaaaaaaataataataaaagtcccccaggatattactcaatagaaagctctttttgaaagtgtctgtaacagcctgttgtgtgttttaatgagttgaaacgtgtgcctccattggctgggattttaaagaaagcctctgtctgcctgttccctctggctcctattagtccctgtttgattctgcatattcataaaacactcggcaggacacatcacagttcaaacaaggctttaagctttgctgacttgaataagcctctccctctcactcagcagctaatccactgagttcataagacacactgggcattttgagctgtgggttggcagaacaaggtacagatttcacaggctagtaacattctttcttggagaaccagtggggaaagggggtcccaagatgggctctgcccacttctgtttagcatggggactaggagtcttcccccatctcagtctgtaaaatagtttacattttcataaaagtctgaaagtgttcatcactcagtcgtgtccaactctttgtgaccccatggactgaagtccttcaggctcctctatggaattctctaggaaagaatactggagtgggtaaacattcccttctccaggggatcttcctgaccaagggatcaaacctgggtctcccacactgtaggcagattctttactgtctgagccaccaggtttactttgcctcttcttcttatcctttggaaatttctattaagcaagaagccagctgtactgtccaaaaaaagaaaggaataatgaagaaaaatgtctgccggtaatttattaatacaaagtttcctttccttgctcttaacatcacctatttccctccaagctcatgtcaccatctaagttcaaggccaccttgacattttatttggtttggaggatcagcctcctccctgatatctctgcttccctcatggcttctgtgtcctctcttccatgtggtcagagtgacttttctagagcacaatactgtctcttcacttattcagtattgacgca

SEQ ID NO: 24595 - DNA, 1219 bp, Bovine  19866881889344
  misc_feature (1)..(1): n is a, c, g, or t
natagtgcttaccaaaatccttctcttttggtttctattgaccaaatatgcccttaccccaaaagagcagttcttctctttgtgtacctcattttttgaggtgcatctcattgttctccatcagagaccaagaagagctcctaagacataaactgtggtacaggtagtcatttaagtttgttgatttggagcttatgctccttaatttctcaccagctctgtctgttaatacaatttacagccatataaaaaatgaaactattatctctagcaggtagattaatagacagcaaatcatttagtctggtgcgtatgcaaatgtttttgtcttcctctggacagagtgacaaggagagcgggcagtgagagagagcttgttttgatgataattcgactgactctgtagatcatcacagtcctcaaacctgactcacaaatttaaaaattgaaatcataaatcacccaaatccagggcaatcatcccctccttgctttcttcctttgctcattatacaaaggtgtttttgcagcatgacaatcaccatccagtatccagaaaccctgtgatgggttcctttggaaatcttccaggaaaagattatctccttgtggtaaaaagaaaaaaaaaaattcaacaattcttctctgactgactatgacttccaggatcatgttaccctggtttgcaataaagatatggatgtgctgactttgaggcaggagaaatgtggcttccaggttaagcatttaaaagtggcctcctgtttatatttcttgaggcaggggatagataagctctaggttattagacatttatagctagtctcttgtttatactttgagatggaaataacaaaagaaacagggtaaatatctggactttgtctcctgtggacacttggcgatgacactaatggcaagggcagaggggggataacgttgtttgtgtaaaagatcaagaggttacatatttcccatctttggggccaagaagatcttcactgcacatgcacagaaacgcttcttagaggtcaaaaagggaggggatgccaggccataataaagtgtcctaactcccccaaaggcgcttgaactgaaatccatctttgctgaaggatgcgaacacatgtagaaatggtcttgaagcaaatcagccatggggtcaaagcaaaacagttggccagaggaaaacaaagacctggaagactgctagcttatg

SEQ ID NO: 24596 - DNA, 1799 bp, Bovine  19866880466431
  misc_feature (1)..(1): n is a, c, g, or t
naactggcccttaaaggctaattcagaaaaaaaaagaaaaagaaaaagtaaacaaaacgaattcttctagaagaatgaagagcaattgtatagacaatgtcatgggactaaaaaaaaaaaaataaagtcaaacctttagcagaatttcttttccttcatgggccaaaaattcaagtaatactttataagagcaaagtgataggactatgcattttagacaggcaattcttggatttaaatagcacaatttaaaatattggaagccaaaataaataaataaataaataaaataaaatattggaagccattattttcaacttcttgaatacagatctccaaactcttcattaatcagcataatcctagactttctgaaactattaccaatttactgctaataatttcaacagtttgaaacaaatgttttgcaattcacacttgaagataagaaaaagtattaatcacatgaattttggacctcaaaaatttaaagtctatctttagagaaatatttagtttgttttaagaaatattatttgtctaacatatgaatatatacttaaataaactaaactaaataaacttaaactaaaaacaagagcccgtggaggtaatagaagagttctggaatttgttacatgggttgagacatacatcatggcttattaaagattaataacatattttagtagaatctacagcgcctactatataactgacagagtaacatacagtgttcttttatctgactctcacaaggctaaaatctataggaagtattaatatcaataaaaatattatgttctctaagcaaatgagtaaagtaaaagttgatcaagttcattaagcctgccattgtcaaaatgctttaaagaggaaactactagagatgtgatacatttggttagagtttctaatttttggcattaattattttgttctatcatttttcaatacaactggctatgagacacattatgcatggtaatgcatgacaagagttttaagtatctgaacatggatttgagtaagtgtgcttaatctagagagtttaatcagttttatcaatactacacatgtcagagttggtgagtagcatggtaatgtgacctcattaaattaatacttgtgacgagtatgaaaatgaccattgaatattagaataaataatgcatcgtcttatgttcctttgccactgctgctttaggcatctggggaaattaataagggttattgtgtcaatcaggcaaatcagaagtaaaaagaaatcttcaattaatcatggtattttacaacaatccctttggggaaaaaagagaaccctattaataaaaaagcattatgccttctgttgcagttgacaaacagtgataagcttctctggggacattctgtatgagaaattcataataaagttttccttgtaaatttttctaaaatcattccaactgctaaatcttagcacttctgaggcacgaaaccctccggggcttcttctaaagaggttttcctcctggccttcacagagtgagccgctgatttctgactaggtcctttgtagcctgctgccagccactgtcacagttaagatgctgaagcatgtcccctgcatcagcaaatctggttaatcaggaaacttcccagggaccatccagggattaaccacatattactagctttgagacactcacagtgagaaccagtttccacagactttgtatagagcttgttaggtacaacttcttggtcactacttccgggcttattcctagaaatttcagatggactggtcatcaaga

SEQ ID NO: 24597 - DNA, 3346 bp, Bovine  19866880480272
  misc_feature (1)..(1): n is a, c, g, or t
ntcctggtggagaggcactcttgcctgctctcagctggtgttctgtaggatcttcagtgtctagaggtgtattgccgatgtatccatggagagagatgtgctccacatccatctactcctctgccatcttggatctctactagaactgtgtttgaacatacatccatgggatttccaaacttcccaagccatggaagacaaataaggagcaagatttcaactggcagagacagcagtggtggagaaaagatgctagcatattcacatgtgttcctaattatctggaggctttgctctcccttgacattcttgaaagcagaaccacagaaactaagaggttggaatcatatcagctgagttcaagtcttggtcatgctatagactaacatttaaattcaaggcacgtttcttaagtcttctgagcctcaagttccacgtgggttaaatgaaactagagttgtgatgaagattaaataaaatgttagtacaatgcttaggtagtaggcttggctccataagaggttattgttagtattattattatactctaggcataggcttaaaatttttaagtatagtgatcatacttgcatgaccatagttgaaccctgatttcctctaaactttttttttttttttttgtcagtgagctatatattcagagcataccaagtgattaaaacctggtgtcacttataattaacttgcaagaaactgttgcctcagtgagctttgcttctctcctgaatgtagaaaatagaaaatcacatgacagacacctagaaaacctgcttaattgcatttgtcgctgatcacaagttaacagaaaacagaggagatgaccatagaatatttttccaatttattgagaaataattggcaaatataattgtactaatgtatattttaaagtatacaacaggatgatgtattaatatacatttgtggaatgattacaaggtcaaaataacacagcacttcacatcattaattttgtgtgtatgtgtgtgttgagaacacttaagatctactttcagcaacttttaagctttattaattatagtcaccattaaatattcagaacttattcatcttataaatgatattttatagcctttgacctgtatctccccactttccttttttcccagtccctggaaaccaccattatattctctatttctataaattagcctttttcttctttttttaaaatataaatttatttattttaattagaggctaattactttacaatattgtattggttttgccatacatcaacattctttttttaatatatatatgtgatatcatacagtatttgtctggtttatttcacttagcataatgccctaataccctccaagttcatccatgtcgttacaaatgtcaggtcttcctttttgtactaaataacattccattgtatgtgggaaaataatctgaaaaaaatagatacttgtatatatatagctgaatcacttttgtgtatacctgaaactaatacaacattgttaatcaactatactccattacaaaataaacatttttaaagttgcaatgaacaaagagtatgtttttgaagtgtattaagcatatctacctataacacgggagacccaggttcaatccctgagttgggaagttctcctggagaaggaaatggcaacccactccagtattgttgcctggaaaatccgatggatggaggagcctagttggcaaaagtccacgggtttgcaaagaattggacacaactgagtgacttcactttcacttttactttcaagaacataggctcttgtgtcataaagcaagaaaataggcaaaaatctaacttgacagattacgtgtatatccctgtatttattatttatatgcagagatgcattaagactaaaaagatcaaaatgtagctaaaaagtttttcatagaggagacacttgaagcaaattagtatgcactatgtttggtttgctgtacattaagaccagcttaatttttagtgcagttaaattactaagttattttactgcataaattgcaatttttcctttctttttgcctgtaaagtttcataaagaagcatgcaactcaatgtcataacttaaaccctcataatatcctgagttaatgccagtagcctaaatgagcaaagtaccctcagattttagctgtgtagtgtatgtgtgtgagcgtgtgtgtatacattttcaagatactctcaaattgactcttttggacccaggaagcttctaataaatattgtgaaacaactttaactgaggctgcccttctaggcatttttgccttaattacccactccctatctaaatcacagccttctgcctgtcactttttcaaggcccaactgtgaatccaaaccaggtgactatgtgaatatgctggaaagcaaagtgacataacacacctgagcttctattttgctcagggcagtgattattaacatgggaaatccgtagtgagtgaaatggccagagtttccacagaacttattgcttacagcttttgggtcccctggcctttgccagctgttccacacctggacctggagaacagaaacagcccgcttcaatttatctttcctagacttgttgcttatgggactcagatgccaggtgacagggctcagaagcagcagtgagagtctccacctgcacagctctgaattccccaaagagcccttgttctgactctgatgcagacaccagcttttaacagtgtgtaagctttaagtctaggggggaaagggaacttacacaaaactcatgttttagtgtgagaatgttagactaatctgggacagattgattaagtgagcaggaaactggggtcttctgaaatgttcaaggactttgtcttccatgggacatgagtgctgcaaggagtttctttctgaaggcttttctgttggatttctggaactccagagaagtttcctatgccctgaaattctatgagctgcatgaaggtagtagccattttatcccccaaatcattataccagttggcacatattaggcactaagaaaaggttgtttatcaaatgaatgggaaaaaatgacaaaaaaatcacctttctgaattctaaaagcaccatatgcatgttggtggttaagagcacaagccttggaggggtagaatccagtttcagattcaataatagttctgcgaattttctatttggaaccagtctgttgttccatgtccagttctaactgttgcttcctgacctgcatacagatttctcaagaggcaggtcaggtgctctggtattcccatctctttcagaattttccacagtgattgtgacccacaaagg

SEQ ID NO: 24598 - DNA, 1544 bp, Bovine  19866880481570
  misc_feature (1)..(1): n is a, c, g, or t
ncacatgcttttgtgacaagtataccatttcttcctaacttaatgcaatctgtacttgtggtgtccatgcagtcgtaacttagagatgtaatgggtctgaacctcagtctgtttttatacaaacacaaagaaaggaattgacatttgcaacagatttcaatttttttgaaaactcatcatttggcataatgattgacattaaaagaatgccatttaactcttggctgaatgaatgatctattattattatagatggctctataaaacattggaaatacacagaatatatgaacacagtgcaatatcagtataggtgagtgtgagtggttcagattctgatttattatcaacaattgttctgttgtttcccagcaacaactatagactgaactcttgggaaagcgcttgttatacccagtttgacttccaggaaacttactcagtgaaatgatttgagtaactagggcaaaggatataattattggtatatagtaatttgattgacctctggcaccagagtatttgtattaaatattttcaactggagcctgggtttaaatttcttccagtttgtctgcactcttgcccattttgagtgttattaaaaacattgaggataatcaagtggaaataaaattttccctaaagattgatgtcacatttgcttgtttatgttttctcttgtgtaaattgttagtttacaatcttcagtgttcacaagcaagatactatttcctctggggagaaagtatatcagacctgtgagtatgaagcatgtaagattcactgctctgtatggctttatgttacttattctctgttccatactcagatctcctccctctttgcaaggtgcaataaacatgaaggaaagtttgggtagagagagctgtttttcactctttcaccctcatgtattcattgacagaaaacctccagcaatatatctacctaggaagcagtgctacagaagattttgttgtgttattacctactggtaattttatattataacagtgacttaaagaagttgaaaaagaataggcattttgcatctaccaatcatgaacacagtgtcatacattactgagtccacagacatttcatcactgtaaaagaaaatcccctcaaatcatttcaaggatatttcagatttgtgtgtgttgtattttaccttataactaaatatttttttcccttttacactgtagtctttaatatctgccttctgccccaaataagcaatttctattcctgattcagaaatttacactgcaagaaacaacaacaacaacaacaacactctatctaatattttgtctagaagtagaaatgattaattaaaggaatgatttatcaattacagggcaaagtacaataataaggccaaggaagagtatacattgcatacacccaatgcttttgtttgggtaaaatatgagatgtaatgagatggtactcttatcttgattaattccaaactgcctatctcacttattctagtgccctcaccctctcttctaatcacattgacacaagaactt

SEQ ID NO: 24599 - DNA, 2031 bp, Bovine  19866880525932
  misc_feature (1)..(1): n is a, c, g, or t
ntattgaagctgagattggctatgggagccgtgaatctagtcctaatgtcatgctccttatctcttagaaatggaggcatcagcctccataggcagcctctgtgaacagctgccatccctcatggaggaatttcagtctctatggagactgcctccatttcaatcctagtcaattagaggtgaaaagtattccatttgcagtcacctaagccatagagtccacctattttttttttcttcgttctttcagtcaaatgatatcttcttatctaagattgaaaaaaaaaatcagaatcatggtcatttaattcaagctcattcagttctagttactttttcttttgtttcaaatggcagccttctctgtaaatcagataaagaactgtatcattatgttatcatctttgaaagctccataattgtagcttttctacccaagtcactgaaataaaacatctaattctacactaaatataaatttatttccagttttatgtattgtattatttactaggtgatagtgcttccaacctttttcagaggtgagcctatagtataaagaactattttttaaattacacatattttcacaaaagacaatgaaggctacatagattaggagttactcttagtagttcgtcaatacttccatattttttcttaaggacataaaagacagatattactgattttgctttaaaattagtccaaaaggctggaaaaaaaaagtcatattgaattaattaatttagatctaattaatttgtgtattcactagagcaattaagatttgtgtaaaatgagcagggattaaaaaaagtacaataaacaatatgaaaatatttactagggataatttactgctgagagtctattactgtatttttctctttatccttgttcctcaagaacacagtggcacttattatgattgttaacttttgtgatttcaagtgacaaaagtttgattcacacagacattaactgaaaaaaaaaaccaaaatttatgtggagagtctattaactaacttcagacacggctacatcaaggagctttttcatcattaaatcttctttctccattttttaaaatgatttttccatgaatgtgacttcatactaaggcagatgattcctttgaggtaccattatgcctaagaacaccttcaagttttcattctaaaactttgagtatacacaaatattttatttccttccagttttattgagatataattgacatagagcactgtataagttcaaggtgtacagcataatgatttaacttacatgcagcatgaaatgattatcacagtaaacttagatgaatatccataatctcatacagatgggtttccctggtggctcagatggtaaagaatctgcctatcaatgcaggagaacggggtttgatacctgggttgggaagatcccctagaaaaggaaatggcaaaccactccagtattcttgcctggagaattctgcggacagagaaatctagcggactggggtcgcaaagagtcaagcatgactgagcaactaacactttcactttcatacagatacaaaattaaataaaattattatcctgttatgagaactcagaatttactctctttacaacttgcatatataaataaccactgaattgtatttatcatgttgcatattacatccctaatacctgtatagcttataactggaagattgtaccttttggaccaccttcactcaataacccctccctccaacctctcagctctggtaaccacaaatctgatctctttgtctataggtttgtatgtttgtttttcagtataaatgacctacaacattatgtgtgtttcatttacacaacatagtgatttggtatttctatacatttaaaaattatcaccatgataagtttagtcacagcatgtcaccatacagatactacaccatcattgactgtgttccctaactgcacatatcacatcagtgactcatttatttgcaactggagggttgtacctcttaatccccttcat

SEQ ID NO: 24600 - DNA, 2244 bp, Bovine  19866880539980
  misc_feature (1)..(1): n is a, c, g, or t
naactgggacttccgtagttcagtcggtaaagaatctgcctgcaatgcaggagacccaggttccattcctgggttgggaagatcccctagagaaggaaatgccaacccacttcaatcttcttgcctagagaatcccatggacagaaaagcctggtaggctagagtccatggagtcgcaagagtcggacacggctgaacgactaaaccaccaccacaaccaccaccacctgggaatcccttgttgttcagccactaaatcgtgtcctactctttaagaccccatggactgaagcattccaggcttccctgtcctttattacctgccagagttcgctcaaattcatcaacattgagtgggtgatgctatccaaccatcccatcctccgcggctcccttctactttgccttcagtctttcatagcatcaggatcttttccagtgcgtcagctctttttatcaggtggctgaagaattcaagcttcagcttcagtatcagtcctttcaacgaatattcaggattgatttcctttaggattgattgacaaactaactccttggtattaagattccaatgagtttacttcaaaggtgccttggggcatattatacaaatagattgttgttagaaatctgaatacccaggttgacattgttcaaatgtgtgaagttcagtttatctgttagaaatgatttattatttatatctgcaaatagatatgtttctgaaagttctgtttactgttctctcagagaaacatacttgtaaattagtgaattgctaatctaagtcttaggttttctcttaggtgttctggtcattgactggaggaaatctggccaatatctactggtttagccaaacatttcacaacctcacacaaagttagacttctagattcaacttcttgtcttgaaaattccagcacaagtggacaattagaggtttcccttgggatgagtggcctgttctattcagatacgcaagtaactcaagcagcattggtctactttatcccatgtgaaatctaaccttttatttagagcctgtctctattttgacttgattcagcagtcatttatattagtccctgatgttctacttcaaaagcttttaatgttgataaatggcctttaagttccacctgctaaattgctttcttcatacagaaattattttttagtattttgcctgatctatgacttttttttttttttttgagaaagaatgaggccattaactgatgggatgctagaatgattagtacaaactgcatcaataacctccttacctgtgaagcacaagaacaggtatataggttgatgaaaaacgttgagagccacaagaactcatctttgtgtatgtacatatatttcttctttacagaaagagttgagagactctaggatgtgccatttttctttatcttccattctctctctctctctttctctcatattctctgagagtagaacaatgataactttatttgtgaagaaaatagatcatgagaaaagctctttcattaacttgtcttactacttatttgcttcaaaaaagagcatactctggaagcatgctttttgtgaaagcactgcatttaaaataagtttcaaggctctacctttaagtgcagagttgcatcagagaaaattcaactaaaagtgttataaattaaataaatgttcaaattagcacaggcttaatttttaaatgagtttccttggtagcacagctggtaaagagtccacctgcaatgtgggagacctggatttgatccctgagttgggaagatcccctggaggagggcatggcaatccactctactgtattcttgccatggagaatccccatggacaaaggaacctggcaggctatgatccatggggttggaaagagtcagacatgactgagtgaataagcacaacttttaaggtaataagaaccctgaagatccagctgagaaaccgggacattgaagaggttgtcacaatcatgggattttgtcctgaagttttcattccaatcccaaagaaaggcaatgccaaagaatgctcaaactaccgcacaattacactcatctcacacgctagtaaagtaatgctcaaaattctccaagccaggcttcagcaatatgtgaaccgtgaacttcctgatgttcaagctggttttagaaaaggcagaggaaccagagatcaaattgccaacataccgcggatcaggaaaaagcaagagagttccagaaa

SEQ ID NO: 24601 - DNA, 1448 bp, Bovine  19866880548042
  misc_feature (1)..(1): n is a, c, g, or t
ncagaaaatatgtgaagttaactataatcttcaattttattcaatgttttgacacagataggaaatatagcaaatggaaagacaacatgagatatttagaattcttcttaatatagaattgatgcaaccacatttggtaatatttagtatcatttactttaaactagtaactgcaattctactatgaattatttctgccattattttagaactagaatactgttgatagtatttaatattaacactctctatgtcgtagattctgtaagaaacaagtaaaatatgcagttctgtttccaggacagtttcatttgcatttcattacacttttaaccctcaatttttattcttttagaggctattacaggggctggtaatcataccttatatattataaacaacacttcagtcatcaaagagatcatgtggtccattcttctgattctgagcataacagccttagatcattcaaatctattcttacttttctaatttttcaggacaccaggtgtaaagatcaaatcaatcaaaaaaaaaagtatatttcctcagaggcaaatatgtgaaataaattgagttatatcttgtgaggaataaaatgattagcatttggtctcaagctcagaatcaaaggataaactaaaacacagtaccataggtagaataacattttaataaagcaataacaatgtcataaagtgatattcaatttattctcaaatgattgattcaggcaatacatgctggtagatttcagaggagggaagaaatacatcctaacatttgatagaaattatctcttgctgtaactaaacggcattttgactgagtcttttgtaatcactagaaatggcaagttacaagtctgcttatttttttgagcctttatcatccataacttcttggatgtctttgaaacttttcctctagggttgagtcgactatctgttaaataatctataattattggcatgcatgtgtgtgtgtgtgttagtcactcagtcgtgttcaactctttgtgaccccacggactgtagcccgccaagggcctctgtccatgggattctccaggcaagaatactggagtggcttgctattcccttctcctgaggatcttttcaacccagggattgaaccctggtctcctgccttgcaagcagattctttcctgtttgagctacaggggagtccttatatacaatgctttcttgaaataatacagtattgtagagttaaaaaataaaattaaatttaaaaaaaagaaataaaagaaataatatgtactctgatcccattactatatcttattttttaaagcaacttgattcaattcagttcaaatgtactaatattgccattgcaaataattcatttggtgaggacaaagaagttcttgtgtcaatgtgattagaagagagggtgaggcacagaataagtagataggcagt

SEQ ID NO: 24602 - DNA, 921 bp, Bovine  19866880559128
  misc_feature (1)..(1): n is a, c, g, or t
nagataggtagcaccattgataaataaaaaaaaataatagcactgtgtcatatgatttgttattacattgaagattatatcttgtaacatgagaaggaagatttaaatgggtttccaaagtcataaccttaaggtgatgaaaatatatacataatacaaagttttcttactttgtttttgtaataacatattccttctttaacaataaaatattaaattatagctcatatatttttaaaagtctgtcatgattatcatatatgtatgctgagaagcatgcttgcatcaataatatatattaattactttcacaactggattttggtcaggcatcttgataaatgattaaacttttgaacatatgtatctttttttttcaagaagtctgaaaacaccactgatgaatgaaattttataaaaatgctattatttgcttatatacaaatttctgtctttctaaaataaacatacatagcacatataaaatcatgcacaaagtaccagagagtagctttgtaaaaagtacaaaaatactagttataataacaagtctaaatttaatttgttcatttgagattataaataatatatgcacatactttcaattcagttcagttcagtcactcagtcgtgtctgactctgcgactccatgaattgcagcatgccaggcctccctgcccatcaccaactcctggagttatgatagcaattctggaggtgactaaatgtgataattaaaaggaataattaatgattgttttcttagtatatcttgttcttttaaaacatagtcctactcttaaagctaaggctccattctgttcaaaactagagatttgaaagtattatcttccgcaacctgataaaaaatggagcaaaggaactatgtctatgtctaggtattgtttaaagtaaatgta

SEQ ID NO: 24603 - DNA, 1352 bp, Bovine  19866880596340
  misc_feature (1)..(1): n is a, c, g, or t
nattctaagtgaattcataaatgaatggaatgactacaaaacctgtgactttgtctctatatgtgacaaggtcttttgagttatcaaaaattcacaacatagttttaaagtcttaaacctgttgagaatatacagaatgattaaaaaaaaaaaaaaaaaaaaaggaagcctagtctctagaatgactactcctgtcacgccaacaagagcaaacaaggcatttggcaactcataaatgctgtgaaagctccgtaactagcagtactgtttgttcatgataaattcactctgtctttcctacatggtcttggaaacattatcaaactcaaaaggagcatgggtggaaggatgactcctgagagctttcacctatttcctgttgctaaggaaacgtcttccctttgtacatgttcagaatagcaggttcctttgaatcctgcctttcaagctctattttttaaagaaaacatatagatatataacccatgtcttgaaatgtacacagatttactctttgtttctactacctggtgaagaagtgtcatccaattagaggtaacatatgctttaagattaaaacattggagatagacaacttctctttgttgtttcagactttgtcaaatctagtgtttctgaatccacaaaaaaagtcagtaaacctaagatatcactatgacctgtgaatatgtatctctcaaaaattggttgaaataaagtatagcttttgatatttgatagaattgggaacaattatacttaattactgcataataagtgacagagttattgtacattaattactcggagatttttattaagacaatatgtgtctgcttattttcgttgaaaaatattatggaatttttctcaattttcttctttaacatttgcggatggattggctcaaatgctagaattcaatgaattggctttcaaagataaaaatgtggagttttattataccacggtgattgcaatatttatttgcaagctattaacaatagcatgtgtggacattggctataaatactagctgatttcataacttggattgtaatgctataattatatgttgttattcatagtatacaactgagaatcatagcccaggccacagctttcttacagcattctcattaatgtcctgtttatttgagatctttcaaagaattcctaggagcacccatcatgatatttttaattatactctttatatcttttcaaaatgttttggacctgtcctacatgcgatagttgtgcatgattccctaagactacagcctgcaaatccagattacatcactgcaaagttaaaatgattttgattattggatctatagcataatttc

SEQ ID NO: 24604 - DNA, 1498 bp, Bovine  19866880741987
  misc_feature (1)..(1): n is a, c, g, or t
nttcataagtattttaaagatcaaaattctcaataatttcccaaaaggcttagactatttgaggttgcctagtacaaggtgcccaagcaagataaattttgtcgtgggtgatgtatcatatagggtgcaaagtgtgtacctctcctgggaaaagataatttttatgactaagatttagccagtagggtgcatatatatctataatgcaatcaaaaagtcttgctctcaatggaaaggagggaggtggagaaagagagagggttactataccatttccaatcaaacattgttaactttgtcaaccttgggattgtcaagactatgttacaatgaacagttaagacagaaaatcatctttatcatatttcaggtattagagtgttgcagtttcaaattcaccatttttaccactgttgttacacagtcaaatatccatttatgcttatgatggcattaacaatatactcagaaactgaagatagttaagcaaacatgtaaatagaaagtagaaaatattccaaccaagatcttagtctgggtattgtggaaatggctttatctgagcacgtgcaatcagtattcactgaactgtgagtttagtgcaaaactctgattaacagttcctaaaaacttaatctcatcagaaatcttgggatgagggaagcttaattgtctactgaaagtctggtacttttcacctgcacgtagggctgccatgatgaagttgttttaaaacagtaagaggaagagcaaaagaaaatcagccagaagtatttgtcggcaagattccttaatgtccgtttcaaaagtcacagattacagttaaaaatggaagccctctttcaaacaaagaaagaaaggttatgaaaaaatacagtttgccattattgatgtatgaagccggctctgattgcatctatcctgtagctcccccacatgtaccactcggatattacctaaatcttggaaatgaaagagaagcttcagccgtcgctcttcccactgctgctatgagagcccagtttgatgagcatcacatccgacctctgtttttctcatttaacttattttatagactgcttgtcaggtggtctctgtgtggtttgctcagctaatactagaaacatgtaaaagtcatacaaattataatttaagaaaaggaaataaagtcaattgaccatcgattgttcttttctcttataccagtacctggtaagagcatccaagtgtaatgattgtgaactcaaagaatttctgtttcactgcactttatttttactggtaatgaagttagtggcttcaactttagtgtttctctctctttctctccccgaccccctctctctccctctccaaaagcacatctatgacagacaaatagttattctactgttttagcactatggtttgcctttcttcctttctgaatgcttgataatgatagaagaattagacaaaagcagacttcttatagagcaaaatctttagttttatttga

SEQ ID NO: 24605 - DNA, 2594 bp, Bovine  19866880869483
  misc_feature (1)..(1): n is a, c, g, or t
ntgactgatttgatctctttgcaatccaagggactctcaagagtcttctccaataccacagtttgaaagcgtcaattcttcagtgctcagctttctttatggcccaactcttaacatccatacatgacaactggaaaaaccatagctttgactagacggaccttcgtcagcaaagtaatatctttgttctttaatatgctgtctaggttggtcatatcttttcttccaaggggcaaacatcttttaatactttaatgtattaatttttcatctagaatatgaaagaaagaacttggaaacaaatacattttcctttgtatacatatcctacctaaaccgaaagaaagttttaatactcattttaaagtacctgagaagtcagcttttcacaggctcaaaaatatatgttgaaatactgctgtgctggtgggcatgcctgtaatataatttctttgacttctctttgagaaaaagaagccttttttttttttccaaaggcacttcatgtagcacgttaattcagcattaattatagaacatgtcaaactgtatttcagtcaaaggccccctgtaagtctccagagctttcttaatgacagtaattataggtcataaaaagagtcgtctaaaattaacatttctctcatgtcttaataggaaaatgtaaatggctgcaccgtacagatgttttgattagtaaaatttacacttccttttttgtttcaatgcttgtcaaacttcacagtgttaaacataaggtgctgcctttctcacattcctgaatagacgaaggtgcatcagagcagttgtaggagttcttcaaatgctatgccttattattttgtgctgcaattaaacaaaaataaatcaacagtttcttctgccataaatgaaaggatcctttaaaagacagaacaaactgacttttttttttttgcttttgaaaattttcacgaaaaaagattaaagaactgtattggacacaagcttataaaatgctttattccaacatggaaaaacatcttgcctacttatatatttaagtctcctggtaagccatattttatcatataccatcagaaagaatacatgaaacctgctctactctgaactgtcaaaatttacttactagaaaatgagaatggaaacatcctggtttaaacaatgttaatatcatcaaacatccagggaaatataacaaattaaaagagaatcacttcaaagtataaaaggcctacaccttaaataataataaatctaatacttgacattcatctccctggaaagtaaaattagataaacttttgcaagggcattcagaacagccaatccagtttattaataatttcctgttttcatattggaagctcatattatctggtcgcagccacagtagacctccacagatatttaataaagctgccttcagtaatcctctctgattacctataacctcccagctataacacacactgtgctgcagcttcacagaaggacagcacactgtcaccagctatgatgtttgacagcttattctgctgcatcaagctggcacaaaattactttttccaaatccatccctagttaataaccaaaagtaataatggtattcagcatgcgtaatactctgagaaggcaaaatgaggcaacagaaggggggaaaaaaagattaaagagtgactattatggaagggagatgaaaaacggaatcttgtaacatacaacgtttcaattataatgccatgtggagagttctacatatcaccctacaaaatccacactgcaggaccaagaaacatggaagagatttcctattgtacttacactatgtgtatgatttttctcgttcatacagagcaacatggagaattttctttctaaattattctgaggcattctcttgggagcaagaaatgacttacctttagtggaaaatgtctagttaatagaatgtattgctttgatctcatcttaaagtttgcaagagtaataagctattttgcttatagaatagagcagactaaccttaatccaaatttacaagcataccaaacccaattcaacctttctttcttttttgaagatgaaacaccaaattaaaagtctgaactgtcaaatgaaaaaatggatttgtttcatcatctaggcagaatccagtacattacatttgtcttcattacaggtgggtgaatgaccttggtagaaggtcaaatatgacagtgacaattaatagggaaaaaaaatccttgtctccttcctttcttcttttcttctttccttccatccctcccactttctatttctttctttattcttttttccattaattcctctttctttgttttcccttcttttcctttgcaaatctccccacttttccttcccttccttcttcttcctacaatatttttcagaaaagcttcatatacttttcattttctaggtggctaactatacgcagaatatagaaatatattttgaatgagcacagatgtaatgaagtcataaccaagttaaatatttcatcaaaaactaaaaatattcccatatgtgtttatatttatatgcagaggattaaaggtgtttctcactta

SEQ ID NO: 24606 - DNA, 1527 bp, Bovine  19866881030555
  misc_feature (1)..(1): n is a, c, g, or t
nttgcctggcttctctttctcgctctttgtagtttctcattcctttcacatgtctctcacccacaaggtggttgagcttcttttcatggcagctattgtccaagacaaaaaacaaaaatagtaagcatgcaagcctcttagatctcagcctggaactggcaaaatatcatttccaatgtattccattgatcaaaaccaatcataagaaagccaagatctaaggggaggggacataagaccaacaataaacacacagggatgggaacaacttttggtagccatctttcacaggttccttcacaattttttgagaaataggctcatattcttgttgcttgttagtttggggtaaattacttaacctttctatccttaagaatcttcaactgcagaaaaagcctaacattaatctttgttttgcaatgttgctgtaaaaactaaaagattatgcatatacaaattaaatacattaccattcacattgcatatttcaataaatggggattattataaaagcatgatatgcaattcctattatctcaaaaatgactttaatataatacagatttatagcatccactgatttcaaagaatagtctagacaagtaagatttaagtaaatctaaagtttttatttttagaactgaataagtctgtttacataatgaattctctttatattttatgtaatatcaagaatagttgggtttaaaattgcagcatggaattggcagagatattgcttcttaaaaatacttgcctacatagtgcttgaccagcataattgctaagtattaaattcaaccacaaaacttttttaaatggataactataaatagaagaatcaagacaactttttttttaagatctccagacacaattgtaaaatagcatattggagattatactagcacattcccttgaaccaatgacttcttaataaatgaatgcatacaaaggatatgaattttttcttcttactagatatatattacagtggaagactgaagtccaaaaaaatcaacatgcaaagaaaatctattagaacataaattaacgttttaatctcagacgtttctgctgtttttttccccccaaaataaaaaaacaagacctttgttctttgctgcaaggaaaaccagattaaaagcaaaaactgtttaaatacaatctctatttctgtcaaatgccaccttttttgagaattttaggctacatgctttcagtgggatgagagagaagaaaataatagagtaaggtgggagagaggaaagttttagccaaaactgctgttgctgctgctaagtcgcttcagtcgtgtccaactctgtgcaaccccataaatggcagcccatcaggctcccccgtccctgggattctccaggcaagaacactggagtggggtgtcattgccttctccgcctcacatctgagatgattgatatttctcccgccaaacttgattccagcttttgcttcatccagtccagcgtttctcatgatgtacactgcataaaagttaaataa

SEQ ID NO: 24607 - DNA, 1458 bp, Bovine  19866881080497
  misc_feature (1)..(1): n is a, c, g, or t
ntgatcctcacaatcttcaccctcagttgactggtgaggagaccaaggcttagtacgatgacatcactcgtggccacttaactagaaagtgagacagccgggctctgtggcttgaagatgctcccgtcacagctcaaggtccccatcttacacgagcccgcatatttttcaggcagagagtcaaggtaaagacagatttcacaccttggaagcagacgggcctaaagaaaaggggagacagagagaacctgcattaaccagctgtgtgaccttttgaaaatcaatctcctacagcctcattttcaccttctgtaaaacaaggcgcttagattaaatgctctctgaagaatcatccagcactaacactcaatgatactgtgaagtatgtcacgtctgctgacaggcaagtgtgacgggaagggaaattttgctattaacaaaaagaaaagagaagaacaaccacagccccttgtgcattttagagaaacagaagaatccctcccaggctccttattgagcctttggttttagcatatttcttatacaagagtcttacaagtcctctggtgcccctcatttactgatctcagtgcttcagaatccttctcaacacagtgccccaggcagccaacagatgatcaaagtggacatccaagataaaatgcactttatatccctcccacacaagagttatctggggtttttagaagagtatgaatcttacagacgtgccaaggttatgctgtggtcaaacggtggatgaggggcagcctcttgaacaagtgcaagtctactaaacacatttgcagggacaagattaaaacgcatcctcagagagcccacgctgtggcggtccagcagacctgacagtcccttaacataaactctcattaatagagcttaattaacaccaccgaggataggaatccatccactcactttcagccacgagacagagcagcttctcagggagggtccacaccagaccttcagattctctctgggagaaagaatgctgctctcagaatgccaactcccacaggctcgtgcatgaaacacaccgattctcttatccatctatttcaagtctttttccctggggagtgaagatgagcctgtgggatcagggcagcaggctgtaaataatggtcgcagggaaagatggatgatgagagagtgctcggccaggctcccggctgctatcgcatcccagctctgcctgcttcagtgaccaccccacctctgctcagtgatgcccccaggaaggagtgcatgtcctccaggcttctatttttgactgcctttttcctatgcatccttgctgccctttctctgtgcaaagctgaatgataacagccatagccgaggaaaaacacaccctgaaaagccagctttcttctcaaaaaaccaggcactcccatgagaccctttgatgtgctgcatgtgttctttgatgaa

SEQ ID NO: 24608 - DNA, 1078 bp, Bovine  19866881081105
  misc_feature (1)..(1): n is a, c, g, or t
naaattttaaggtgctggatagatagtagattatccagatattagtagatgatagatgacataaatttgcatagatatgagattatttataaaacatatcgtgtatatatttgcatgtagatagaagggcaattttaatttgctgcttaggtgagaggtgaagcacccatggggatatttgagaaaccacagatattagctaaactacattctagtgagaatgaatcagtgaactaaagacctttagtttggtgtgtagaatctgcaggcagagtgaatacacatttctcaacctctctgcaagctatgttcagattctcctctagaggcctaaataatacgaattttaacagtgcgagattatcagcttccaatatactttcaaattttggaccaattctgatgttgttgtaacctttgttgatgttgttgtaaccttttccttacaaatgtatgataatgaagcattaaagttcaataatatgtcattggtattactttatttatatctaagttccagcttctctgaagcttgaaatctccacacttttttaaagataaagggagagtttttcaagtatccattcaagttcattcaatgcactgcttgcttagaaataggaatgtatatattcttgttaagtttatttatttttaaatagaggataattgctttacaatattatattggtttctgccatatatcaacatgagtcagccataggtatacatatgtccctttcttattgaacttccctaccacatcccaccccatcccaccattccaggttgtcaaagagcacaggatttgagctccctgcatcatactgcaaatttccactagctatctaattttgcatatggcaatctatgtgtttcaatgctactctctcaatttgtcccaatattcttttattctctaagagttaagtaaatttatgtatgtgcttgataacagggcagtgctaaaacaactctgtaatcctatagcattaaatccataaaaaagcaatccacttgacacaagacacagaaaagcaagtataattacattataatacacgagttgtcaaaattt

SEQ ID NO: 24609 - DNA, 995 bp, Bovine  19866881229151
  misc_feature (1)..(1): n is a, c, g, or t
nttcatagaagacattgttgttcagtcgctcagtcttatacaactctttgtgacccgcagcatgtcaggcttctccatccttcatcatcttccagagcttgctcaaactcatgtccattgagtcagtgatgctttccagccgtcttgtcctctgtcattctcttctcctctgccttcaatctttccccaggcatcagggtcttttccagtttgtccactcttccttcaggtgggcaaagtattggagattcagcttccaggcatcagtctcagaagacatagatttataattatcaaaatatgacaaatggctgtgttttggtaaacatatcctgctaaattagaagatatcaaaataatataataaagagaagataaaaattcagaaacttcaaaaatgaatttgagaaaaacaaattatataaacagtgttcttaactcagtagtaacatttaagttactatgtcttaatatttcaactctaaataaagaatactaactcttttacatattaagaagcactttttttcttaagtaacttcaaaatagattgagctagaactgaaatattctataactaatcttttaaaatgaaaatgaagaagtctgccttagaatcaggtaatgaatgaacatgagacaaaagcgttcattccagcaaactattttcattcagttgcttctggcagcactaggttttcttctctgtgtacaggcactttggtttgttttaaatttggaatcaatgattgcacaaacaaaacttgttctagaaataaactgaagaagaaggaaattatattatttttgtcattatatctacagtctgataagttaactttacctagtctctaggaaaccacttcacaccatagaagaggttacttgtacatgagacccattgtccataaagagttaatctagtctctgtggtgaagcactttactctctgaaagctctttctcttcactcctgttcaccataggaacaggcca

SEQ ID NO: 24610 - DNA, 764 bp, Bovine  19866881606189
  misc_feature (1)..(1): n is a, c, g, or t
nactggttaatgacgtctacaacaattcaagttgatcacctgacccctttcctctactcttaagccaaatatgagcatatggctcttcttgggaaccttccatcatctcttgcccccactacaactctgtcaagtcagaaactgggcttcctgactcagccccttccagagctgttaatatttatttttctgtatttcttcagtttgactggcatcctttgacacagagagctttgaactacatccaggatggctcagcctccttggtctgctctatcagtgaacagaccctggcatctgctttgccccacagtggcagagggcctcgggaattattgccccactgccgggtgtctcaccatgtgtggccatcaactgctggctaatagtcatgcctgctcgtgtgattcaaaaccaaatatgaatagctatttcagttgctggtcacttgatcaaactcagtgttaccctaacagaagccttgacctgggttttaaattgaggtcagtggtcaacacaactctgcagttccagctctctgctcccctgcaggtttgtccatgatcatgaggctgtgggtgaagggcagggacaggagaaacagtgcaaagcactgcgggctttaactgtacgcaatgctgggctaaatcttggttctaccacttccccatgtgttaccctggacaggttaggcagccactctgaacctgtttccccaatggcaaaatcagggtaataaaatctaccttgggagtgttgagtgg

SEQ ID NO: 24611 - DNA, 2698 bp, Bovine  19866880434017
  misc_feature (1)..(1): n is a, c, g, or t
nagccctacctggggtgggctggaaaactgtgggcactgactgagggtcccacgtggagagtgtaggctgctgacctgaggtgggctgacctggtgtgtctcttccccgccgttcaaaccttcacttgggtctgcatactgcccagcctgcaagatctattatgtgcagatatattgtgtatgctccctgcctcttgctcccaggtcaccccatttgcccactatgtgcaccccactcttattccccactgaggctgggcaccattaggttgccccgacacagaacactcagctgcccctgagcaaggcactagggcagcccccaggatcatggcagggctagcctgggggaaccctactcttccttcctgcctcccactccctgccttccgtagggagggctcagcctgaggactctctttggccacccctcatctcccatcctctgccatggggcctgggcctcctgattgttcagtgggcgcagcctggggccagagatcaccctgaatttgggggggagcaggcctccagcactgtttgacgttccttctccctcatccagcagtcgtctgggggagcccagaagttggtccgcattgtcagtatggacagaaccaaggccagccctctgtggtcaagctttgaagggagccagttggacccgagccgggtagaaggtgaggtgggtggagctggtggagggtcttcaggggccacagtggttgggcagcttggtcaggataccaccactcatctaggccagaatctgttttaagaatcataatggatgtctatgtgcccttctggaaagcagttgttatacactcttagtgacctttaactgatgctcctacttctgtaacctaccccaaaagatggtccgaagcccctggtacagtcatctggacagcagtccttttagaatagtaaagtctaaatactctccaaatgcccaacactccacaaaccagtgggccctcagacagctgctgtttttaaaagtcccagggaatatagcagttggggtgggggacagtggttgtgacaggggccagcacagcacagacccctgcgcaggtaaaactgtgtgatgagataagcagaagtgaatttagagaaaggtaaaccattttgagtttattttcttgaaaagtgctttgagtgcccgtgtccttagtcacttcagtcatgtctgactctttgcgactctatggcccccaggctcctcagtccacaggcaagaaaagtggagtgggttgccatgccctcttccaggggatcctcccaatccaacctgcatctaatattactgaaatgaccaggagaggagagagggaaggagggaagcactgggatcatgtgtccctgaggatgaggctaaggaagaagacacaggaagcttccagactgtttggaaggataaactcaggttttctatcctccctgtgagccagacagggaaaagagtttaagctgcagcctataaaggtgatcctagagaagcaggacatctaatcagcaagtacaaagaaaccagccagggcaggtgtggaggccatggtgcatcgtgcaggagcccggtgtacccgcgttactttcaggggctgggctgcagcagcgagcaaagcagacacaggccgtctcctgggggcgggggctgctgcagcccggcacccagcccacttgcggctccttcctcccacagacccctccaccgtgtgcttttggaccgagagctgcttcaccctggtgccctacaccctggtgcacccccacaggcccagccggccccggcctgtgctcttcgtgcccagggtggtcgggaagatcctgattgagaagctgtgcctcttccaagggtttaagaaatgcccagcaggtacgctctcacctgggagtcccacctgactgtcaggtggcgaggcgaggcctttgcagaatgctgtatctgctttcaagggggtggatgacagaggagtggccaaaacaaaggaccacaaaccagggggcttaaaacagcagagatgtattctcttagtgttctgacggttggaagtctgaagttaaaatgtctccacaggctgccctttctccaaaggctgcggtggagggcatccttcctgcctctgcctgctctggtggctgatggtggcttgtgactctaacactgatctctgcctcctcatctgtgtgtccctctgccttcacattactttcttatgaggagccagtcattgaatttcagaccaccctactccagtacaacctcctcttaactaacagcatctgcaaagatcttatttccaaataaggtgaaaatctgaggtttcagatggccatggatttgggatgggggaggggtggggcaaagcacagctctgctggcagctaggtttgtacttcatggagtcatacaaccaaagggctccatccacctacccaaagccactcaatatagagccattgagatgaactggccagtgggaatcctgggtcccagtggccctgctctgcaggaaaggtggctcagctggctggagggcaggagttagctccttggcactttcttccgtccagagagtcgggttacaatgtgagggtgaacagggccctgttcttttctcctggagttcacagaggggacagaggggagcaagtgtgggccacacagttcctccagtgagcaccagctgtg

SEQ ID NO: 24612 - DNA, 2698 bp, Bovine  19866880477419
  misc_feature (1)..(1): n is a, c, g, or t
nctcaggcctgcagagggtcgggggcgtggacgtgtccttttgtgaaagacgacagtggcagcgcctgcgcctccctggtggtgctcagctacccagagcttgaggtaacccttaaggggactctgggccaggggccgcaccgctggggtccccgggtgcattcgtgagagaggcgggacactggacagggaacagtgccagggtagaaccccgcttctcctcttgtgggagttcactaataaattggaaagcttttgaagaaaagaggaggggagcaaaaactgactagattctgtgacctaaatccaaattaactcatgatctccaagtttggcagtcatcttttgctccccatctcaggaactcacagcaacatacccccaagttgcccaagacgctagaaatctttgtcttcccataccccttagctggtcacacactaactacatttttcccaccacctaaaatcactggagtctgtccccttgtctctatcgctgctgccccttcttggctgtaccactgtcacctcttgcgtaggggacaggcggaatcttcccagggtcctttctccatgttgtcaacagagcagttttcctaaaaagcaaatgtgagcagtcaccacctagtccagttaaaacacttaagtgcccatcctgtgatcgcacagtaaataaaagcaacactcactaacaaggcataaaggctcttcatgatctgacccctgcttaatataactcacagtaggctcacctctggccacctgccgcgttcatcacccactccccattctggaggacttccgcttcctcaagcactccacgctgtatctgcctgcctaacctttgcagtgatgtttcctctcctggaatatttttcatctggctaactcctcatctcttaggtcctccagtaagtcccccacctcgtcctacaagaccaggggttgctcccagcatcctctcattcctctttatcacctgggatagaattggcctgtgtgtctcctgcaccagaatgtaaactccacaatagtagaaactgtactctcttgcacaccagttatagccttggcacttagcttgatgcctggcacatagaagatgctcaaatagatatgtgaatgaatgaacagtgcacccaccattcctttggagtcaacagctcaggaagccttggctgaagaagagcttgacaaagaaacttctgctctgcagcttcagcatttccccctccatgctcctctgcctgctcccagagctgccatcttcctgcctcagtgtctttgcactttactcgaagagcttttagtcagaatttagcagaaatatattgatacctgactcagagtttggtgaggaataattgagatcatgtatggaaagcaattaacgggcatgtggtaagccctcaaaaagtaaatgctaaggtactgttaattcttaggacagcttctcatttttcaattcagttgttcccgtcgctctgtaccgttctctacctgcagaattaatcaccttcttgtcctaggtctctttgttttgcatatgttcttacagtacttctcacactgtattaaagttactgatttaagagatcctctcagatcttacagcctattagcagagcactctccctattgcagtaggcaactccccttcattgcagaaatcattttgaatagtgtgtccttcttgtttagttgccaagttgtatctgcctctttgcaaccccatggattgtagcctgccaggttccattgtccatgggatttcccagacaagaatactggagtgggttgccatttccttctctaggggttgttcccgacccaactcaaagaaaagaagttattggcttatattgtttttcccaccgtctgtaggttctcgagagtagggttatactgtatttttttcagaaccccagcacttggatgtagtcagcacttgccatcctatgctatgggtgcttagtctagggaatgctcttataagagtctggtccagtgactcccaaatgccaatctatgattctgtgcaatcagagtcacctggaagtgtgtttagaaataagatttcataggcaaatctgtagagacagaaagtagtattgtggttgccaaggtctagcgattgagatggagggtaactgttaatgagtataagaattatctgggagagattaaaatgttctaacgttagattatggcaatggttgaatgactctgtaaataccagaaatggttgaattatactcttcaagtaattttacggtagcaaattatatctcaataaagttgttgattcccgggcccctctccgtttactgatatttgggtttttttgacaatccttcctgtgattccatagcaaacccaggctgtgagtctctggtctgccattcacacagccagaaactcttgtcgtgcctgacaaattgtggcctcacacagagcccattccgtaactggaagagcgtgttcttttccacatagagctgaaatgtacttgtttgttacttctgctttctggtgcatagtacaggacaaacttttcctgcccttctctgaaaaccctcctatttgaagaccattgtgtgttctcctgagtctcattggggtgattcccagctcctcctcttgctgctggccctctggcccgcctgcagtgagcagggctcatttttatatccagc

SEQ ID NO: 24613 - DNA, 1819 bp, Bovine  19866880495922
  misc_feature (1)..(1): n is a, c, g, or t
natgggtaagatacctgggcctcaacccactcccatgccaggagcagagcccctccccccaaagctgtgacagtcagaaatgtctccagacattgccaagtgtcccttgggggcgaaactgcccctggttgagaaccactgatttaagggcttgaagggattttggggtgtaagaagttgcatatgtaagtttggggcttgggaagtgatgggagaggggtttatctacatctgtctatccttccttctttccctccatccttccttccacccaaccttccatccatccactcacatcctggcattgactgggcacccgctgtgtctgagtttagggtgaatgtgcagggcacagactcctccaagcagacagagcagggtcaggtttataaagaggaaaccctagcaagagctttccctagagctcacaggggtctgcgggggtgggggggtgttcagcacgggctcttgagggagcagctgagtgtgtgacatccccatcaactgtcaccttcagagtacttgagccaggaggagtatgacacctccagccagagaggggacatcatccaggaaagagaggcatccggtggcctctactgtgtcacccgcagagcagttgagtccctcatgggaaaggtaaggggttgggtgggggttgggaggaactccatctccagaggagggcggggggagaaggcaggaagggccaacctccagagacccctggagcacccaggattggtggttagctcatctctggctccatcacagaaagatcaaaccctgtttctgccatgtgaggtccatgtgaccttgagcaagacttaacttccctgaatctgtttccttgacacagatgtttaataaacatttgttaaatgaatgaataaaatggagataacactccatgttttaaggttcagacaaatatatgaaaagctcacggagaatgataaaattttctgttgatacaaagcagttaggaacagctatgatccagaggcccagtggccccatctccttctaacccccaaagaggctgatggagccaccaactcctagggtttgagctccacacaaagcctccctcaatcccagtggcctctgatttttaattcagaagtgaaaagtcaaatggatggaaacttttaaaactgtacaggaaacatgctcatatacaaaggggcatgcccaaattctttccccatctcctttgcaaacttcagtcctgcctgtatgcttctctccatgtttcccctgagtgtgggctcccctcgtgtcctctgaggctaaggctgacttctctccccacgtcccccagaacacccacgccctcctggacatccagctggacagtgtctgtgtcctgcacaggatggagattttccccatcattatccatgtctccatcaatgagaaggtggcaaagaaattcaagtaggtgcacccctgggggccggtggtggggtttgaacaggctctggaactccccgtgaggcccacggtgaacatgtccggagcctgtgtcggggtttccaggatctcaccctgtgccaccccctgagtgtcacagatcagttctcccgcaacatccaggacaaaggtcctgcagccagcccccaggagtaacccagaggacagtaaggtgagaccctagaacctgacctcggctaagtccatacatttcctggggtacagttaacagtccaaccatgttaggtgaggacagagactgaaaaacactacttggttcataactgggacaaacccagatgtcctgctgcttcctttataatttgagaactgaacttgtaaa

SEQ ID NO: 24614 - DNA, 1245 bp, Bovine  19866880502096
  misc_feature (1)..(1): n is a, c, g, or t
ntacccttcagagccttcccaggaactgggtagggctttttagacaaaaggattcactataaaaaaactaccaatagaaactagtacatgattgggcagtacaatgctctacctggggactctgggtggctcccagaagcatagccagatgagtgagtagccggatgagaaggaagaccactggggacatctgtcggtcagataccacgggcgcacctctgggtggtgggtttcccagcacgtggccagtttgagttctgtctgtggtgtcactggaaaggacgagagaagacagggtgaaggctgaagaagataatttcttctggctctgggggcgcatttcagagtctcaggactgagagaccaggttcacggtcttgaagaaaatgatgctgaaagttactgattgtaataagcctagaccactttcccgagtctttttctttatagacagccccttctggctgaccaaaagcccacaacagtataaagtggctgtttgtgagactagtgggggggaagaggggcaatataatagtagagggtttgaggtacaaactattatgtataaaataagctacaaggatatattgtacaacacaggcaatatagccaatattttataactataaatggaatatagcctttaaaattgtgaattacaatactgcacacctgtaacttatatagtattgtacatcaacttcagttaaaaaaaaaaaaatgtatacctgtgatggattcattttgatatttggcaaaactaatacaattatgtaaagtttaaaaataaaataaaattaaaaaaaaaaaaaaacaaataaataaacttttctgataagcagccctgagatgacctctaaaaatggttcagcattcacttgacccagaaaaccccacaaaatcatggaaatcaagattcactttaagaacattggtgaaaaaaaaaaaaaaaaaagaacattggtgaaaccgccccggccattgagggtgtgcatatccgaaaagccaccgagtatctggaggatgtcactttacaggagcagtgtgtgccattccactgttacagtggtggagctggtcggtgtgcaaaggacaagcactggggctgaaggcagggtcggcggccgaaaaacagtgctgaatttttactgcacacgctcaaaaatgcagaaggtgatgccgaactgaaggacttagatgtaggttatcttgcctatcgagcacagccagttgaacaaaacc

SEQ ID NO: 24615 - DNA, 1981 bp, Bovine  19866880526797
  misc_feature (1)..(1): n is a, c, g, or t
nttcctttattcgtttctttctattcaattatctgataaaccatatattttttaaaagacagagtggatcaaacttgagtataaattcacaggctgctgtgcacaatgacatccaagctgttatgcagaatgaagaaatcatgtaggttaaactggccaatcactgctttctgctccccaaaccaagagtctgactcactcctattccttccgacataaacaactgagcgtcatggagaataaacagaaagcaagactagggtttgccatatacgccacaacattcactattcccctgttcgtctgaggcgaagccacccaattcccagcagtactcattaagattcagagcatcaagcaaaaactttgagcagagccgaagctatacaaatacataatttataaagaaagtcagaaactagaacatacagcaaacagagtagatgcaccacaggaagagtggggggaatcaagctactgacgaaaaggaaaaactggcttgcctcctgattctcatcccaaagactgctagaaagaaatgaacaataaacctagcaagaagcacatcaaacagaatttttgcaaccaagacctgtaatacaaaacaagatactcatcaccagcagcaactgtatgaacttgggcaatcctgtttgtctgttcctttgttcatttcaatgggaattggcaatgagggagcggttctttaatgtatgagctcagtttgttaccttgagccaccggcctaatttgggtttaaacactcttttttgaggccaaattctgtttatagttccctgtctagattttccactaaatccaccttcactcctgtaaaatagcctaataaaaagggaagacataagaggtaactcttcaacatggagaatcagaaagtctcatccagagatgttgtctcagacgggtgcagagctctccccttctccccctcccactccatccgaatgctgaggacacgtggagcaagagtacttccaacatcggagacccttgggaaatttaggtttctaaaaaccaaattaaagaactgcatacaaaataggttgattacagagatcataactgctttaaacaagccaaagaaatcccttctcaaaggaatactacactgattctttttgtggttccttcatgaaacagatggtctccggttggcgctacctttgcaaacctgggcatctgtgatgggggttctacacgcccccctggtctgaggagccagtctacttgcactaatgagctgagtgagtgaggaaccaaaaatgacgtccttgccttttcttgtaaaccccttttgggacgaaacttaagtgtgtacacacacacacacacacacaattaactcttcagtctgctccctcataaagtgacaataaaaatacttgtcacagagggattaaagaagctgtctatactgaaaaattaactttaaataagtcgacaatatacaaacaattctgttgaggcctcagggtctgagttgagggcacaggttaaagaacactctgggtcatgtgctggagcatctacaggttgcacaactctgttggaagctggcaaactttgtaacatgggcactagatatagatctcaataaacttgttagaaaagacatcttttcaaagaatgttaaatagcatgagatatacccaaacataatctaagtggagagaggaggtaaacaaccagatccataattcttatttcaaatatgcaagtacacgtacgctgaagacacaagagttaaaaaacaagatgtcacaagtagttctgatctctggggagtggaaagtgatagatgattcctctttttctttctacctggccctgctgtgtgtgtattttcaaactttctaccatgaacatacgtcatttctataagcaaatgggaaaggttataaaaattattttatcacaatagtcaaggagtttttgatgtgtgcatagatgtatatatcat

SEQ ID NO: 24616 - DNA, 1722 bp, Bovine  19866880532520
  misc_feature (1)..(1): n is a, c, g, or t
nactcaatctccttttatcgtggtttccaggggctgaaacggagatggtgccaacagtcactccctggactgatagggacagctggacatttggggtgcgccaaggcctgtgccaacatggtgacagcagggttccgagtcctgtattgagagacaggcttagggcccactgcttgatgcagctggcctcctccctctccgcccaatgaaacggagcccattgccaggctgtgagggagaggactgtggtgtagagctggacctgaacaagctcttggagacaggtcggcaagtagcccaagaaaggagggagacagggcaagcttcagtagggacagaagtaaggtgaggcactgactcagcctcacctcctcccatcgcgggcctgctgtgataagtgtctccggagcaccaacaagcctcaggagacaaagtcgccacaaggaaggccaatctccgagagactggaggcacacgccgcgcccccgctgactttcccctctcaacgcctgacacccgccttccattaagaaaagccacccacaccaccatctgtatccctgggtcttggggatgacgcattctttacagactcgcagacacattttcctcaggacaccaggagggcgcccagggcatcaggagatgaaatgaacgccacagagcggcgctttgcagcctttgtttggataacgagcagccaggattcagtcccacagagaaggaaatggatgctctgggcggtgagcaggcgccccacggaggtcccgggaacctctcatgctccctgggcagctcatctacaacttcctcccagacaagcctccttcatgctggctgatcagcacaggccacggggaccatatggggtgtggggatcagctccccttcccctgctgacctgagcaggattgtagcgacaggcagaaaagccgggtctagtccagccactcgccccagaggcagcgctccaaggccaggctgatcgatgtctgactgacgcctgctcgcggggctgggaggacctgtgactcttccttcacagtgtttccacatttccgccaattactcacattctcgccccttgtgccgtctcttggggatttgttttccccacttcatttccaaattagctgccagtgaatcattactcatcttctcagtgactggcaggcgttaatgaattactgattttcaccttcaaccagccaatacaatatatttatgttggaaagaaaggtactttttgaattaagacttgtatcttttgatagttttcctttcaaacataatacatgtgtacaattctggcttgacagtggagtaattctaatcacagctactgagcctggggtggcaggcatgggctgccaccaggctgagtccctctgctcacactagccccatgggatgccgcttcccttcctgctgcgatgctgggacagaccatccagcatggcctacacagacactgggctggctagttgcctgccgcgagagcctcagtctctttggaatgtggacagtaatagcacctccctttgaaaggctccaggaatgaacagactgaatacatgtaatgcccttaacacagtacctggtacacagcaggtgaccaataaatatcacctattcttgttcttaactctcaactaaagaatcgttgggttaccctatattcttaagccataatccatgtattttttaaactggagtataatt

SEQ ID NO: 24617 - DNA, 1969 bp, Bovine  19866880603188
  misc_feature (1)..(1): n is a, c, g, or t
ntatgctgtgctgctggcctttctgaccggctgcatccagttaggcatggggttcctgcgcttaggtaagactttcaggctttgctgccatgagggtggggggctacagttctcctcctggggattcgatgcctttagcagttccttatttgcatttcaagggctatcccagtgtgtgtgcatgtgtgtgtgtgtgtgtgtgtgtgtgtgtgtgtgtgtgtgtgtgtctaaggaaggatgactctcagcccttccctattatgctcagccaggacacttggagaagtgcccaggggctcagtccatagtctctcctgttctccaaaccagcccgaacagggcatgccctccactagtctttagctccagtccaaccctcacctctcccagcccatgttgagccagtagggctggaaccagtgtggtgttccctcttggctgtccagggctcctgctggacttcatctcctgtcccgtcattaaaggtttcacctcggctgctgccatcatcatcggcttcgggcagatcaaggtaggcacactagttggccctggggcacctaccggctaacaggactgaggccgtgtcctgatatgtgtgggcctgtcaaacctgctctttgagggtccagagcctgtggtgctgacctgagtctccattaataaaaccatcctttgggggagatcttgagtgatggccaagttctaccacaggtaaaccagtactggggaaccagtaatgacagcccccacacttgtcagagttttcgtgcctaagtgcttggttcacctcacagagttctgcagcctcaaatatacactaagccatcaggtcttcacagatcacaagcatactgccaaaattttgacaagcagattgctcccccaagctaatttagctaggtgatttcatttttatgtctccccacccccaacttctcattcagtgtttgtcaagtatcatgcttctttatgtttccatttaaacgtctgtggcaagtattggaatcagtaatcattggtcatctgaggatatcatttgttctccttccactgggttctgagtgcctggagggcagggactgttttgcttccaccgtggttgtcccgagctgtgctgagcagaatgaaactgagctgaatcgtagagattcagggcaacagacacatgcacacaccaggctctccatggtgtgattcccacagtcgggctccgcttcagtctggctggtgacagtcttcaaggatggaggccaagcaagaaagtgaaaacacaaagccccagaggggtacatgtgagagagactagggtagctgacccttttgggtgtgggactgaatgcaccctgcatttagttctcacaagtcctctgggaggtaagcttatcattatctccatttacaggggaggaaacagcctagaacaatgtgggtaaattcaaagaatagattatgtacacacatatgtcagggtaagcttggcaaatgctgtttcgtgggacgctgtgtcctttattctggaaacattatccttcatttttagtgtcaagaatgctctttttttcataacacagtgagagggtatctgctttacgcattcctattcgacaaccctaggccctgtcttcaaaaccttcactacatcatgacagccctctgagagcctttaggctggattgggtggggttcctcttgacctgcccaaacaggagtcccctgcccaggacagagacccctctctgtgtccaccctcctcagtgtccttcctcttcaatggctgtgtgcacagcgggttttggggtccttggagcctgaccaccctgggagtctggtctcgactgccccttctgatcccagccagataaagaactaaaacacagagcggcgccccttctccatgactaggactgctatttgataggggccccgcggccccacccgcgcagctcagcctgccgcgcagatttta

SEQ ID NO: 24618 - DNA, 1556 bp, Bovine  19866880640968
  misc_feature (1)..(1): n is a, c, g, or t
ncagtaacatgcttgggcccccatggctcaggactcacatctccctttggctccaaggtcagggagtgttagggctgcaacacagagcaggaataggtccctaggggccttcctcatggattttagaattctgggtgtcaccaaattggggcctcctgttatattgaaggcatcatagcctggagggtgatgcagcagcgatgggttgaccatagcagcttccccctgttggtgatttgatgtgtgaggcggcccaccagcttccagagtggtttggattcaccctttccaggggtctggacctagtgccctggagggcccaccctgctgagatgccatctcctttccagatctcacgcccaccatcttggattggttctccatcccctaccctagctatgccatctttggcacaaagaccgtccagcttactgggcggtccctcctcccagtgctggaggcagaacccctctggaccacagtcttcggcagccagagctaccatgaggtcaccatgtcctaccccatgcgctccgtgcaccaccagaacttccacctggtgcacaacctccacttcaagatgcccttccccatcgaccaggacttctacatctcgccgacctttcaggacctgctgaatcgcaccacagctggccagcccacgggctggtataaggacctgcatcagtactactaccgggagcgctgggagctctatgacaggaaccaggacccccacgagacccacaacctggctgccgacccccgctacacccaggttctggaactgcttcagacccagctggtcaagtggcagtgggagacccatgacccttgggtgtgtgctccagatggggtgctggaggagaaactggctccccagtgccggccgctccacaacgaactgtgaggcccttcctgcccctacagtagggggcctgctgtcctgagtctgagccgcgtccccggcacatgaattcctggggggtacccaagatgctgcagtatcccccaacctgtgacacgtgaggatggtctggggacctgcagggaaaaaaggggttgggacatggggcttaagaccctcttggttctttggaaaccacagacattcttgtgcccctcacctgagaggagatgggtttccatatgccacgagggtggtgggtgggtgcagaccacactcagtgtggggacagcatctgtcaatcctggtctggacagggagcctctaaaggacctttgggctttcttcttccttcactttgcccatagtcaggctcccaacccctgggctgggtttctgtgggattgctgattcttggcaggctccttgagtgatgggtttcatcctggggtctgtatgagcagagcttacccttctttttgagagggtcccaggatgaagatgccactgctgaggcatgaaactgccctattcactgggtaaatcctggatgaacatgagtctgtagcacagacagcactcgtggagtgcttcagaccttccctgcctccgcccacctggagcagaagctctgcctggaaagcccaga

SEQ ID NO: 24619 - DNA, 1052 bp, Bovine  19866880643953
  misc_feature (1)..(1): n is a, c, g, or t
ntgtaagaaatacggatgttccatgaagatgagccttgaatctgccctgaaaacactaagcgccaaagcagatgcttctctagatgctcttcatcctcgaagaacctctggggttcctgccctctcccgcccacctcctcaggtttcttcactgagaggaacacggtcatcccttctgacttctctcacatcccagggccagagtctcctgactccagggcagcagccctcccgccagcccatggccgggcgcctcaccccgaggaagcacgttccacgcaatcgtgtccgtgatggctgtgaagatccagttcagctcgcccaggggggtcctcctgtcattcagccgcccgggaatcctagaaaacacaaaatagccacagtgacagaaacaggtgatggaggcaggaggtggtgggaaaagaaggagggaggggacagcacatcagaccaggggtgggggaggcttggccatactgggaggacctctgtgcctcgctgggatttttgagactcctggatgtccaacctctcatcttgaagttcagcttccactgcactttcttcccctccccatctgtacagaaggagcaggtgtggcctctccagcactcatgtgtgacgacaggcgtaaagcaactctgaccaggggagcccctggagccctgcagctcaccacaggcttactctcagcctctgggtggactggccctgtactctaatcaagacactcctcttgggctggacacaggtcacttcccagaagccaagggtaaaggccagacctcctctgtgggcccagctcttcaccacacattcacctgttcaacatcaaacaaacttactcaggcctagattctgcctcttaagttcacagagcaagcatcgctgggctgaaaatgccagcggtgaggacatgagaggcaggccggctgcggcccaggcctcccagtggggcatgtgaggggagctgggcttaattccccacccccacaggggaaatttgaacacagcaagacaaaacccaatgggacaaccaggcaacactcttg

SEQ ID NO: 24620 - DNA, 1192 bp, Bovine  19866880771682
  misc_feature (1)..(1): n is a, c, g, or t
ngaaagttttctctctcgaatgctctttttcctaagaaatctgtgtccctattccacttcaaatctttattcaaaactttttaggtatgcaggacctaggggttgagggccagatcacagtggtagttgcactacctctcacagtttcagtttgtagctctctggactacaaatgcctcgttggttccagaagactcacttctgaccagtccatctccatctccactgctcgctgtgacccccaccaggtatatcctatgggccgggaacctcagcagcagacgggaagacgacgagggtcacagggtttctcccctactccctccaagtagctccccctacagctccctccaggtcatttcttcctcttgcctctccagtcagggaagggtcctgacctgtggccaggagcatctcctatttgttcctttaacccactggccctctgggagacgcagctccacctgagggaggtgcttgctgagggaaccacctctacctgccatccatcccttgggtacctgcatatctgctggcctcggcctctccctgccctacgtcctcctcttcgctgaactatgaattctttgagtgacagactgcctgcccttccctttcgtggtctcttcttacttcgaccatctgagaaagccccgcatggggtcacgctgaccagcgcactggactgactggagcagagcgtctcaagcttcaatcaatatgctggccaatcacctggggctcttgtcaacctgaccaattcagcaggtctgggcaggccagagtgtgtatatcttaccagctgccaggtcatgccaacggtactgctcatggggcccctgtttaagcagcagggccccagaggactggaataaatgccacctgggaggggaaatggggaggggactgggaggggggtctacaaggaagagcttactaatacaggcggtaaaaactcagccgaccgagtacctggtctctccgatgttgtggaaagtgtaatacacttgcaggaaaaactgcctggggatgtgctgcagtcccagcaggttctgttcaaacagagattgtggttagacaaccttctgcgacgtaaaccctgaggcctctcccttgcagcatcgtaataccgctctaaagctggagtcccctacccataaccgcccttcctgagggaaaacacttgctggct

SEQ ID NO: 24621 - DNA, 1898 bp, Bovine  19866880781087
  misc_feature (1)..(1): n is a, c, g, or t
nggcccaatgtgacccaaacagactctcccacaggtgcctgtggcaagctcttaagcccaagggcacaggaagagtaggtgctgtgcgctagcccacccacctggcagcccactcacctggcgcacaggctccgggatccgaaacttgcagcagctgtgggtcaggcgcacagctgcctccaggcttatcttgtggcccacagagacatagaggggcttggtgctgtggtcgtggctcctcagggcctgtgacagagagggcgaggtcagggcgctgggcaggctttgtgggtgagaggactgacacatctcaggtggcgggcaggggcttgggggactggcggcaccttcagggcaccttcctgctgcttgtcttggggacaggatagggccagtgaggacccagagggcccctcagcacagttttggaggggaggaagtaaagatgcagggtcagccagaatggcaaggtctggggtacacacattacacgggtgctaacccagggcccagctgaggggtccttctcagcagggcacaggcccctggccacttactctgcccaggacggtcccagagcctcccatcagaggaaatgagtctcctccagcctttaggagctgtatctggaaaacagaggaaaaaaacaaacttgaatacctttctcggtgaagggccgaaggcaagcctgctcattttcaaaccatgagcagttgctgagcaaggagatggaagggcccatcccgtgagtgggtcctgcttccaggcaccacctacggcactgtcccaccctgacaagacgctctcctcaaccctgcagcagagaagggacagtagcccacctagtgctgggggtggggaagcgccaggatggtatacacacagggccacaacctgctcgaggctgcttatttcctgctgctttctctccttctacaaatttgagcacttctgattcaacctgacgaactttttcaggtggtagggactggctcgctgagtgggtcaggggcccctgtcaactcaacaaacacgtgctccactcaggcatagggagctggaaggaaaagacagacacaactgatccccgctcccagtcggctgtccaggtgggtgaaccatgcatgtcattgtccccctctggaaggggtcccagaggacggggatgccccaggcaggtaggtgccccagttccacgctggaggaaaagcacggaacgttgcacaggccccgaatgcctagtacctacaggctctgcttcctgtgggcgccacagcagcacgcaggtcagggtagacagagcaggagaggcaaacgtgtgcccagaggctgggagaggagttccgggtctccagagatgacccaccacccacgagcaactctggtctcctcattctgcccagcgacccaggatgggaagagagtgtcccagcggagccagcccacagcagggcagtctgtgtcctgcgccacacaggccccctcaccttctccttgtgcagagcattgttctcaagtccatccacctgcaggagtttcttggccaccccgatgcaaggcaggtctgtgaggacaccaaggtggcaggccaccccaaaacctgcaggggcaaaggaagatgaggctggagcagtgagcccagcagtcaggagtcggggtgagggacacaccagagcctcaccgagcttcccatcaacggaggcctattggtgggcaaggactagggggttcaggcctcagagccccaccttgaccttgaatctggccctctgccccaacttcccagctggcaggctggatggatgcctccctccgtctgactagattaggagcctaattacaattaacatgctcacatgtttcacctgcttctcctttcattttctggcacattccat

SEQ ID NO: 24622 - DNA, 725 bp, Bovine  19866880809800
  misc_feature (1)..(1): n is a, c, g, or t
nggatgctggcagagcaggaatttgttgtgttctgctccgtgtcttgctccttgcagtgtgagctcacagccctgctgctagagttatgtttgcttccgtcagacatggacaagccagtgcttgccttatcaggtcactgcctggtcagacctgttctgtccttcctcagagggtcactcaccacccctctctcctctctcagggaatgggggccgggctggtcgtggtacccctgatgggtctcctggagagcatcgcagtggccaaatcctttggtaagatgctcaccacccacgccctccctggcacctcaacccggagctcagcctgccttgcttgcctgctctcctgcttgcttttatctgctctgatttttaaaactttgaatttttatccaagtagcacatgtttatgttttttgaaaaaaattagtggaaatggattgtcaatgaaaaatctcttccagtagctggaaatatttgacagtccactctctggacataaaaggtcctgcattgaggctttgtcagttgaactttctgtgtgtggtatacacccttccgctgccagctaatttcaagctgaatgtggagtctgaacattcaggtcttgtgatgagatatgaaatagccactatccattgtatgcatacagctaagtaatttcattggtcataatgaaagttagtaaagtacattaagaacggacacattttaagtattat

SEQ ID NO: 24623 - DNA, 1785 bp, Bovine  19866880881329
  misc_feature (1)..(1): n is a, c, g, or t
nagagtgtattttattgacagtgaaagtcctcagtctgtccactctttgcgaccccacggactatacagtccatgaaattctccacgctggaatactggagtgggtagcctttcccttctccaggggatcttcccaacccagggatcgaaccctggtctgctgcattgcaggcagattcaactgagccacaagggttttctgctgttcatttgccttgacaatctatgtttagagcagtttggtgtttatttttctgtttatgttcaaagaaatgttatttttttttttttctctaagttaaacctccttcctttgctttttgcttttgatgcttagaaagtcctctcctgccagagcagagggaaacatggacttctgttttcctggggctttttctacagtttaatttttgacacttaattcacctggaatttaagtttgtatgagatgagaggaaaatagatttttgcaaatagctgactaattaccacactactgaaaaatcctttaaccctctgattcgaggagccattttacaggatagtaacttctcaggtatatcgagtcctatctgggggatagctattggatttctttggtggtcttattatcttaagccccaaacagattcaatcatagtagacttacaacttgttttgccatctgggaggcctggtctgtactcagtgttcaccatgggatgttctgttatcgagggctcccagccctgaaatggaatccagtgggtggggactggggggtgcagggggtacctcagtggggagggcccagattttgccacgcctccttccttttggtgcctggaacacccaacgcagaagggtggctgccctggggtcagtgggcctgaggccattgctcccaacccaggtactcactccaggaaaaggggccgggccactgtctcgcctctgacgtgggccctgtggaacagtgtgtagagatagggcagtagcacgtagcgcagggtgaaggccttcctcatggcttgctgcgccgtctcgctgaacctgtacggttcctgcggctgcggtggagggagtggcggaagcacctgggatctggggtggcagtgcccagtcccttcaccccaggagacctggcagttcggggccagccagggctggcacagaaagcagcgttccccagggcacagcctcccctgccgtccccgccctacctggctgttcagggcattgtggttccgcatgaaggggtagaaggcccccagctgggtccaacgcacacacagctcctctgaggtgttgcccaggaagccacagatgtcagcccctaccaggggcacccccagcagattgaaaagcaggatttctggagggcagagtcagacaggtctgcagatgccacagcctgaccagtccaggagcctgacagacatgtctgttgaactggcgagggaggaggatctctcccaaagaccctcccacccagcccccacccgatggctagtgcatcctgcacttatgatttcagcagaacaaccagctgtatctgctccttaacacctagagtgtgcagggcaaactggattggccagggatgaattgaatcccctcccctccccacaaaggttaagttcctagtcctaacccccagttgctggaaatgtgaccacatttggaaatagggtcactgcagacataatcaggtagaggacatcagggtgggcactgatccaccatgactcgtttccctatcagaagaaggaatcagatacaggaaacccagagggtcccaaacaa

SEQ ID NO: 24624 - DNA, 1565 bp, Bovine  19866880934123
  misc_feature (1)..(1): n is a, c, g, or t
nagagacctcaagtctggaacctgctgccattgaggtcaggtgacctggctagccagcaataagccacacccagagtggccttcccaaccctcctgagacccctcggggactgcactttcggtcctcggagcccctcagcccggcacccaggccagcccctcactcctcccaccgggtacctggtctcgttccttctgcagctcgaccacttggctctgcagggcgttcatcttctccttgtagatttcacagtccaccttggttttctggaactggagcagggtctgctccttctcttcccagtactggacggagggggacaaacatggcccacggaggtcagtgactccgcgggtagggctgaggatgggggtgggggagcctcggggagaagtgagggaagtggttctcaagaggaaataaggtgaattgacgctcatttcttaagtgctagatttcaggtgcatctagagttactgtgttgattatattttaatttgatcatcaaaatatgcatgggtcatgcatgtcaaattgtgttttgtttattccatgtcccaaaaggcatacctattttccctctgcccacctcattctcttccactgtctcctttctctcatcctccccttgctttttacagcaactaaataaatccctggctctcaccctggggcccccacgcactggaaatcactctgttttaatcgcttgtttgcctgacctattttctcatcaccccacaaagtggacgtggcctttagcattggattctgaattggtgtccagtctagtttgacaaaggaataagcaaacaggccaatgcatttcttgggcaaagttggttttaagctcagtatagattaaagaatctgcttcctcatccaagcagcccggcccctaaacacggcccagcagtgtcacctgctttcgctgtctctcagcggccaccgcccgctccctcagagagtggatgcggtccaccagctcctgcctgctctccaaggcctcgtccagattctgttccagaatgtccttctccgcctggcacaaagagatgtcagcccagggaccctgacctccccaaaggccccagggaaacatccccatcatctcgtccccaggacaggaggcaggaagcttcgagtccgggtgtggggacggatttagctttattactgcacatcaggcaggaaaaaaggcaaggtcagcaatcaaaatggggaacatgcatttcgggtccacgtgagtgtggctagaagacaaagtacaggaagctgaaagcctctgagggtagtaaagcgcctccttctttttggcagtttcagcctgctcccaatagatgcaaaggcagaggcttccaggagggcgaatatcaagggctgaggcattccctcttcacgctcacttttctgaacgatggcacagttcgggccgggtgacccacaccccatgaacgtctgtcgaagggctagttcaaaaaataggtatttattgatacctattgcagaggagaggcagatgatttgcataattttcagggtgctggcgacacgaacttctctg

SEQ ID NO: 24625 - DNA, 1190 bp, Bovine  19866880966565
  misc_feature (1)..(1): n is a, c, g, or t
natctctaggaggccctcccctctgcctggcctgggagcaagtcagtgcagggatgtgtccttccccagcccaggtcatcctcacccccagaagaagcatctctccctgggggcggacctccagctggacagaggcatgtgggggcccagcagccccagggctggatgaatgggctcaggggcccggtccagatacctgcatagggatgatgtgcccggcccggaggtggacgttgatggtgtccagcggggcggacagcgtcacccactgccccttgctgtggatgacagacgtgaagggtgcaggaggtgggaggctgccaaaggcctccattggtacctggagggggatgtcatgtcacaaagggtcctgagcagtgccaagaccctgtgctgttgctgggaggcaagatcggagacagtccacagtggggacagagcaagagaggctggagccagggctccggtggggctgctcagaggatgggagaaggggcaggagtgtggaagcaggagaactggagtcctggctcagcttggtggcaagtcacctatccagcctcagtttccccatctaaaaaatgggtcctgcaaggattgtacaagatgatgctagtggagcagctccaggtgagggcctcatgtagcaaggacccctccataccaacagtgccagagggaggacccctccaccatctcccccatcctcccaggcttcagggccccaggactcaccgtctgcaggtcgtaccacgtgccctgggggaagtagccagtgacttcaaccttctcagcctcgagcaccggggtgatgagcagagcctccccccacaggagctggcggtccacagtccaggtgcttggggtcctcggggaaccttcaaacaggaaaaactggcagggcggtctggcagcctctgaggtcagtgggctcaggaggcccatgggggaggtttgggaagggagctgaagggccctgggttacacgtggcagggctggttctggctaactgaagtcaaggcaggagccaagaataacctctccttgcctggttatccgggcatgacctgtttacatttccgacttgcaaactgtgcttttgcccatgtgttttatttggttcttgatgttagtcttacacttggtctgaatttctgtacattagggagagtgtcattttattgacaag

SEQ ID NO: 24626 - DNA, 1492 bp, Bovine  19866880987701
  misc_feature (1)..(1): n is a, c, g, or t
nactcacaggaatttttccaagtctgatctgtttagtcttcagcaactttgcactaaagccatggctagaccaagtcctccctggctaagaaaccctggctctagccagtccctatccccagcagagagcagggcatgggctgcggctgggtcctcctggtccacggcagatctgggccctgagcaggcttcctcccagttccttgctgcccctggcgtcctttagggatttccaggtcccctctccccagccctgagcacactcctgtggttttctcttataaatgacccaagctcaggcatcttgcatgctgccctactgtttcaagtcgccaaccccaagtcccagtctcgcccgggtgcacggatgagcttgagaggctcagccttgaagtcgcagaaatcaaacaaggttgtaaaaggggaggcggggggatgcgaggctgggagcagggccacgtgacccttctcagactgcaaagtgtgctggatggatttaaacagtgccatcttaaggcacgttatgtaactgaaaaacagatcggggaagggaggaggaagaaagaagggggagattggggaaatgaagagcaccccctggagagagaccagatctgctccaagggcagggggctgccagcctgagacagaaggggaacatggccaaccctgctctgttccctgacatctggcttagaggaagggggtggggtagctgacccagtaggatgccttctagaaataattcttggcctagagggccggtttagtgctgagctccctggcagcaccccgtgtacaccctggagctggtgggtgtgtgttcctggctctgggccgggtgcccatgcccactgctgggttggaatgttttgactggaatcagtcacaccatgcccagggtcatagccacagtgtgtgtgagttgggacagggcagacaagcatttcctggagatgttgccgacagacggggagctggtggctgagtataaagggaggcgatggggccctgagtatgatttttcaggaaacacaccggaagctcgccctgagaatgattggcattgtcctcaaagcagtcatctcaggggaacatggctctagggccaccttcgggctccctgctgacctgctctctctgcaggggcagacagaactgcttgaagagactcagaggggacagctctccttcctgtggggtggatgggattctggaaacagcctgagtcctcaggatgaattggctgggtcagatgagtgaccaggggctgcagtgtgtcctggccttgagggaagtgtgatgggccccaggggcctgttctgagcagcagccagcatcatggaatcgggttgggctcctggaggggctactctgaggggagctagcctctttcctggtgaagagacccccttcctctgcagccacacctttgagcaagcattggtttacagggtgtgccctacccactccctccccatgccactgccca

SEQ ID NO: 24627 - DNA, 665 bp, Bovine  19866881016125
  misc_feature (1)..(1): n is a, c, g, or t
nacgctggtcctgggctggacccggaaagagcccgcacagctaaatgtgccctttcctgatgctttgggactcgcctctctaaatggggtttggctcttatgaggctacccaaacccctcagaggtctgggcccaaccccagggcgaggctgcactctgcatgaggtggtgccatcgagcacccagcagggaggtgggacctgaacctcaccaaggaggaagggcagggcccagcggccgggagatcatgatttgctctaggaggcaccgttctccaaaggacataacaaggtgggtacctgggatcttctcaggaaggggctctgaaggaaccgctggcagctctatctgttcctgcgggagacagagggtaaaggccgtgagacactcccgccccatccttgtcccgggaaggacagcatcccgtccacctggctgctctcagcggagtttagacggcacgtgacgccgcagcatgcacacccttggcttctggcgtttctgtcactcagatcggtggccacaaaaggtggctgctcccaatgacccggagcctgaggggttccccgcccagagttctgttctgagtctgggctgagggctttgcagcaggcgcccaggcaggtcaggggccacggtggtgccccagcttggtgtggtggtgc

SEQ ID NO: 24628 - DNA, 736 bp, Bovine  19866881035226
  misc_feature (1)..(1): n is a, c, g, or t
ntgctatgcaaaatctaatatccggccggaaatgaacaaataactcacagcctcccccaggtctttgctcaccctgctgtgtgcctcagcggctaggccttttctgcctgtagggaggggtccccggggctcagcagcgggcctggcgccagagtcagtggggtgggtgcatgtgccatccaggggcctccctggacactctgagggtccaggggaccgtggccttgaatagcacatgtggacggcccctgactgcacgtggtgcatcctggggccccagtatgcccacccagcatcaccacgacccactcccgcagcgtcaacggggatgtgcgcttctttgaccctcggctgccggagtctgtgaacgtcatgcagatcgtgaaggggctgacagcgctcgacatccacccccaggcaaacctgattgcgtggtaggtgctgcctcttctctgccccttcccgcgctgcccagacagctcccgggccctgtgtaaacagcaggcaccatgacccacccccacacctgtggaggagagctgggtggagggactgagtgtggggcccctttgctgctcctcacctgcctggcctcacagcccttgaggctcaagccccctcatgggggtgaccagagaggagccccctctccccatggacacacccactccacgcgctgaccgccaggccttctcctatgcagtggctccatgaaccagttcaccgccatctacaa

SEQ ID NO: 24629 - DNA, 1395 bp, Bovine  19866881056945
  misc_feature (1)..(1): n is a, c, g, or t
nggccccacctgagaagatgaacatgcacagacacaaccgcaaggcctttccaaggcagatcctagaagcagttctgcagatcgcaccaaaagatccacagtccttctcaacggattgtctgtggacagcaaaaaactgtaaacagccaaatttccatcctgtcactctcagggaatacacagaacaggaagaacaaaagaacccaaaccagccaaacaaatctgaaaaacaggagtcgctgagcaaaggagacgcgagtgccacaaacagggcaagctgacctcagtccaattagggtcttgttcacacacacacacaaggcaatggcaccccactccagtactcttgcctggaaaatcccatggacagaggagcctggtaggctgcagtccatggggtcgctaagagtcagacatgactgagtgacttcattttcacttttcctttcatgcattggagaagggaaaatggcaacccactccagtgtttcttgcctggagaatcccagggacaggggagcctggtgggctgccgtctatggggtcgcacagagtcggacatgactgaagcgacttagcagcagcagcagcacacacacacagacacagacacacagacacacagacacacaaagacacacacacacacacacacacacagagacatgcatatcactcttcagaaaacaagtgaaggcacacagcttggccaggacaaggctgcctctgcaggatgagggggttgtcatcagggagggactcgaagaggttttaaagccacaagtcactttctctttcttaaacccaataatggataagcaattaatttgattaatttctaaaccatgcatgtattccataatacgcacaaatggcctaactcattccccaccgcaaaggaaagtatattatttgagaggaaaacaatgctcaatatctaacctaagaattcatacaaagacaaccaaacatctccaagctcatttatgttcatattttcatgtctccagagtatttggagaaaactgtaaataagatttctctgcagattgcctggctctgcaaagaaaaacagatgatttttgtcattttgtcaatttagaactgcttacaaaatataacggaaaacataacaagtacctcatgacctgcaaatccattcctaggtatttactcaagagaaatgaaaatatatgcccacgcaaaggctattacatgaaccctccagcagctttgttcattgcagccaaaactggaaaaaacctgcatgtgcatcgggaagagggtggggagacaggtttgagtccatccatgagctgagacgctgcgacaatgtgggtaaatctcagaatcaggttgagtaaaagaaggcagaccccaaagaatacccaccgt

SEQ ID NO: 24630 - DNA, 1231 bp, Bovine  19866881220293
  misc_feature (1)..(1): n is a, c, g, or t
ntgcatccgcatcactgtgctcagcacacaactccacggtgcgtctgcatcactgtgcttgccacacaactccacggtgcatccgcatcactgtgctcagcacacaactccacggtgcatccgcatcactgtgctcagcacacaactccacggtgcatccgcatcactgtgctcagtgctgtcggccccaggttcatgtgccttaaactgttgttgttgttcagtcgctgagtcgtgtccaactctttgcaacccgtggactacagcacaccaggcttccctgtccttcaccatctcccggagctttctcagactcaggtccattgagttggtgatgccgtccattttccttaaacttaggcacataaattttactcagggctatttgcatatagtttagaagtaaggtactttataatgtgtaattgtgagaaggaacctagagatttacttcatctagaaattatgttattttggggttgagtttttaaatatttgaatggctgcaaaacaaattttgtcgtaattggaggttcaaaaattgagatatatatataaaacacttattccaaatctgcttccttttacaatctaggcatatataggcagtctacccagagtccttcagagtagtgcagtaaatattgcttcaagtctttggagttctgtgttcttggtgacggctgtgaagtaacatttgcagcacagatcataatgttgtttgcagtttgtcagaggtgctgtgcagccgggcagatggaggggctgagaagcaggatgctgaggatctgcgagggcatcaatcctctgtttctggcacagatttaattgtttggttcaagtgggaagccatacgttaacttctacttcaacccatcatgagctctcctacagatgctggttttatacaggtctatttgtcttggaaattgagcctgagagacaaaaattcatgcttgagttgtcatagatgttgctggattgagacttgtggagctggttggatgccctctgcctgccccagccctgccccctcgtgtaaactgttacactgtgtctccaggtgacatcttgggatgagttccctgcccagatggggatgtctgttttcatcgcactttctgtatgacccaaatgtacactgatgttccctttctgagaaagtgagaataaggagttaaagggagaacacggtcgaatagtttgggcatgcaggtctttgtttatagcc

SEQ ID NO: 24631 - DNA, 1798 bp, Bovine  19866881240077
  misc_feature (1)..(1): n is a, c, g, or t
nactgtttttagtttcccagtccatgtgctgggtcatcttgaggggtttaattcatctgttatatttgcttttgtgttagataggaaaatgtattatattttagaaaactaccagaaattgaagtatgctatgtttattttcttgcactatagagggatggtggtgtagttcatgtagcttgcatcaagcaggaatgtgatccaagcagtagatgaaatggagttctaggtgatatgaacaacttgcagacttactactggttgggagtggtgactacagtactgattggtttatcctccttttttaccttaaaaagtaacgtcacagaacccccagcagtgcaggttattgtaatgtagccaaacaacacacaagtaattggagtaaagtgtgagcctccctcacccccattctccaggagtaaccacattctttttttaacctcaggtctctctgttttgcaacaatgttccttagagattgtttctgtataaataagattatgtgttggtatgaaaatccccttcagcctaatacttcattcagtagtttattctgagcttagtatgttggacattgggttacgagtaggtggggaattttaaaaagataccatcttccccacaaggagctccagttatggttttaagtatgctgtcctagtggctagagctcatttttttgttttaatttacaggttttgaaaaaccatcagcaatccagcagcgagctattaagcagataattaaaggaagagatgtcattgcgcagtaagtctgctcatgcaataggagtcaggctctagtcagcccaggaatctgtagtttagtgcttctccattcaaacgcctttaccagctcttgactggacttcagctgtgggctgtttttatttttgtgtcctccactctagaaagcattctttttttttctttaagccagatttacttacttattgtttggcatatacattaatactcttttaatagctttgtttctgatttgccttatttttaaagactcatttaccaaaaaaaaaaaaaaaagtctgaaattgtagaaaagagttatataaaaggtaatcctttgctactgcctggaacacccattctacagattctgcagttctgtaaccccccgatgcaaaggccacttttactgtccttaacacctgtgatttaaaggttgtgcctaagtcctgcccccttgtggttaagatgttggttagggcattggggtcatgtgaaggggggactctccttggaagaagctgcctaagtgcttctgcagcccaccgcctcagagcactgctgcagcaggggttacatgaatgggagcagaggcatgtagcccagcattctacatcccatttatctgtgttttctttactagatctcagtctggtacaggcaaaacagccaccttcagtatttctgtcctccagtgtctggatattcaggtaatcttaaactttaatccttggaaatacttcctttaccttctgtaactacaatcttcaagaagtacagttcttaaatatatctagttgtactgaataaacatattttaagagaatcttaattgtacactagtatctgagctaatatcctgtcagaaattcctttttatttaaaccgttttttaaaattttattgaaatgcagttgattttgcagtgctacattagtttcagatggacagcaaagtggttcagatgtgtgtgtggatatatatacacatatgtatatacttttaaagattcttttccattataagttatctattttatatatatagta

SEQ ID NO: 24632 - DNA, 1751 bp, Bovine  19866881543307
  misc_feature (1)..(1): n is a, c, g, or t
ntctagaaaactcttgttattcatacctttattcaacatttcatcagcctcatccaaaaccaacatcttgatagcacgtgtcctcaaactcctgcgacgaatcatatctataaaattagatttccaaataagtagaggtcaggttataagtaaagagccagccatttcaaccagtattcatcgcatttcagggaccttccctccacttcttaaaagttactcaaatgcaaaaagttatcaggtagcatatcaaaatgaaaatagtcctctatcactgaagctctttttatagacaaaagcaattaatcaccaaagacacgcccaggtgtgccggcgacaacgtgctgtccgtagtccaatttcctgatgtcctcccccacattggtgcccccgatgcaggcatggcactggacgttcatgtagtcacccaaagcaagcaggccctgaatgaaaacacaggttcatgtccaaggtctgcaccaagaccactctaaagtcagaaacacctgcactctccccaaatgaagactgcttctaatttacaacgaccaccaggtattatttatgctattacttttatcataaaactacagacagcctaagtctcttccttccatttttttctgcaccagaatgaagttagttttactgtttttcttattataaaagcagtatgtattagaaactatagaaaaataagaaagcatgcaaaattcacaatcctaccacccagagacaacattaacatcttaacaaacacatttccatttccacaatgtttacactataaagaccaaatagttacaattatttttattaagatggacttttttttgaaaaaaattataattgtaagattacaaaaaactaaggggaatcatacaagtagaactaaagatgacttcatacaaaccagtgatttatggcaaaacatgaggaatcaggggggaaaaaacccaatagaagagacaaaacagattcaattaagtcaatcagttggcttgaccagtgtgaatggcagagagggatgacacctatatacggactccagacaccccaaaacccaagcttggtcagaaatctacacagacttcagtcagccctccctatccttggagccacctaagttcagatcaggcagttctgtagtatatattcatttttaaaaacctgcatataaatgggattcatgcagttcaaactcatgtggttcaaggatcaagtgtacttgcaaatgcgaccctgccatctttcaccatctcaccttctggatctgtacagctaactctcttgttggagccaagatcaaagcttgggtttcacgaacctaggaaaataatttttgtcagaaaatagagaacctcagtattttcgaggggggtgtgtgtgttagttgctcagttgtgtccgactctttgcatccccatggactgcagcccaccaggttcctctgtacatggaattctccaggcaaaaatactggagtggggtgccattcccttctccaggtagaccgcacatattcagactcagatctattctgaatatcacctcatgttaaccacacatctgatttcaggtaagcaagtctgaatattacttaaaccagacaagcagcaataatgaggtatactagtcaggattcttgtttgcagacaaggatttccactagttaacaaaagcctcccaatttacgacacagaaaacaatctatgggggttatatgggaaaagttggggagcgggataaat

SEQ ID NO: 24633 - DNA, 1499 bp, Bovine  19866881646866
  misc_feature (1)..(1): n is a, c, g, or t
ncaacccactctagtattcttgcctgggaaattccatgggcaagaggagcctggatgactacagtccgtggggtcacaaaagaattggacacaacttagccactaaacaacaagaataagggtgatctctactatggaaacatatgggggaaaaagatggacaggaaatgtgctaaaatgtcaccagtggttttctctgaatggaggtaattgttagttaatatgctatatatacattttggtatttttccatactttccacaattcgtacagattcatttttaatcagaaaagtaagcatttctgtgtacataaatcagctgcaccagggttcaagcaagcctatagttcataacttgcctaacagggtggctgaggccccaccaggggtgaaggagcagaagaggaatggcaggagctcacagagctcacgtgcttgtttcagccagcattatccccagttaggggcccggctgaagggccaccttctcacagagagctgagttcatgcctgtcgctccccatccacgtatccagggcactgggtgggaacacagaggaacagccattgcagcaacagcacgtgacccaggagggagagccaaagcccgtggcagtggtgggcagcagatgagggacgcctcctctgtgggtgatggcacactgggccagagaaggggaggaggcgtctgtccctggaaggcagaggtggagagagtggcaggaagaagatcatgcctaagcttcggcccattttctctccttctgtcctgacagcgtgactctgcccggaacctcgagtggctgaagacagtgaaggagagtcatgggtctgtggagctctcatccctgtccctggccacagcaatcaacagcagaggcatctatgtgatcaaggctcccacggatggccaaaaggtgagcctcacatcgcaggcacagctgcaggaggctcttacgggctgctgtcgtcggggggtttctgcctccccaaatcgacctctgactgtgccctgttccacagatttccccagacacagttctgcatttaatccttcccgagggccagggaggccacgaggagaagcgagactactctttagaagagctgaaagagcttttgaacaaattgatgctgatgtctggcaagaaagaacacagcaatgctgaagtcgtagaggtattttccgaggtaaggatttgtatctacgttggagcaagtgtcctaatccatctgtttgggctgagcactctcactgctgaggtgcctgggaagtcagaagagattgagtttgtctttaattcatgggaatcactctgctcttaaaactgtggagagtagagccagtgggtcttgcagagtgcatgtatttcaaattcatgacccaaagagatgtccatcttctccataaatcagcaagcatcccaaaatacttaaagatgtagttggacatcgttcatcgaaatccacagtaaccacaatcgtaaaggcatatcag

SEQ ID NO: 24634 - DNA, 1846 bp, Bovine  19866881873322
  misc_feature (1)..(1): n is a, c, g, or t
nccggtgactggcaattccatcatttcttggggtctcggtttcctcattgtaaaagatcttttaaaatggaaagaaaacttacctcgtgggaatgttgtaaaaaagcaaatgaaatagcaaatgtgaaataaacagtcatgcagaggggattcttagtaaggagcaaaacctgagaagcataaacattcttttcaagttgggaaccaagcacgtagccatcagcgattaaaaattgcactttcctgccccatctgcccacctggcgccatcatcacctgaaaccccagcacctggttttcatggagctcccccgcccccggcctttataacccaagagtccttgcataacaagtgatttggggctggagctaacgatcatctccaggagaggatccgacagctgggcctctttttggggaacttggcctggaacccctcagccttaagcctcagtcgacagaccctttccttcgtgtcatatttctggcttagtctctagttgtggacaatggctaagccactctccttcctgtccccctgcaggtcgctgctattaacccaaaccacccactggcccagatgcctttgcccccgtctatgaagaactgcattcagctggcagcctgtgaggccaacgagctcctgcccatgatccccgacctcccagctgacctgttcacatcatgcctcaccacccccatcaaaatcgccctgcgctggtaagtggcgcctgcctcaaatcccagcaacctcacttgcctggggcttgccatggggacccaaggaatctacctgactctggtggaccaagttccaggcatgaactcaggactccgagtggatgctggggatttcctctcagggctcaggatgcgctttcccccaggtcaggtgtgtgcatgatttctaggagctccctgtctgtatcttggctaactgaggtggtgtcctcagtaccaaggtgggtcatgctgaaaagtggactttctttaaaaaaaaaaaagcttctctagttatataattctttgctcgagttgaagtagaatatttcatattacttccctaccatcactcttttgagaagttcaaagctcttgtgactgtgactgaggaaatacgtgggctattccaggatggtagaagctgcatgtaaggccctctgtccctggcaggactcacagtggaatgtgtgtgcttcctgcctccaagtccaactttgtcccttagaccgtcttgctcccatttaatatctgcctttccattttatgttttgctggaaaccatatacatgaaggtaagtagcccttggtgagccacaggcaggacggtgcagccgtgtgggttcactggactctgtgggggcttcttcctcaacttcctgccagggtgtcctaaccccaccagacacacggggtcctgcttccttccccacagccctggagaaagtactgagacaggagaggactctaggggcagcaacatggtgctcaaccctttgggaggccccttgagtgactgtagcctgggtgggggtcgggacatgaagttgcctccaatggctggtttgatgagaacttggacttgcagctttgcctctgttgcagcatcgggttgacacacagcgcctggaagagggcatctgcctcccactccaccccatccctctcaagtcccagctgtgggtctctccaaggagaagccttttctagctcagctgatccctaaagagctagaggagaaggagcggggtgatgggcagtggccccagctgccgagcccactccacagctcagcccactcagacagggcctgacttcggccgctcctccactgcacctcaaaaag

SEQ ID NO: 24635 - DNA, 1716 bp, Bovine  19866880360692
  misc_feature (1)..(1): n is a, c, g, or t
ngcatctgtgtgtgtgtgtgttggcgggggtgacatctgtcacatttaatttaaaagatacggcattcctcgatcttaatggcttataagtctttgctgctaaagtgaagtgtaatatgttaccaaaatttgctctcaaaaacacatgtaaattacccatcttggagctcaacatttcattcatcatcttggggtcttcatacctctcaatatgaagaaaagttgggattttcaattatttatggttttatttcaccaatactttatctttttttttttggctataccattccttttccaaaatcttagttccctgaccagggattgaacccgcccctcagtagtgaaagtgcagagtgctaaccactgggactgccaggaattcttcatcaatacttttatcagttttcatttctcccccttatcctttgtcttttcttagtgatttagagttctacaaagtatccctattttgttacaaaatttcttttctttcaaaaataagtcaatggaagctttattttggcgtctttcctatggtgatgatttcaatttagcaagtatttgttgaatataaaatatatgccaaatactgacacaaatatttcattttcacaagtatatgtgaggtgttagcctccaatgtacatactggagaactcaagtacaaagagacaaagtcacagggctagaatagaacaactactaaatagcaaggtggtacagctagtatttgacttcacaacttctgattccagctctaatattctgttaataaggcttcttaacagaattaaatatcagacagtaggggtatgtgtttcactttgttcttatttttctttctttccaatttattttccatgcaataatgtgattttttaaaataacatcaacaaagactagagatagatcagaaaccattttgattataatcaaagaacagctctaggtggcaaaaaagtctaggtaacttttcttcagagtcaaaactgatgtcttcagctgggattctgaaacaacagactaaaccaagtcttcaaacatgtgatattttacttacggagtcattaattttttcttcttccccctgggctagttcaagtctcatcatattcataatgattattccagaatcacgtctatggaaagaaagaaaaaaaatacacacacacacattctttgaagaattttgtattaaatttctgcatgtttttccctttatttttctgaattccgaatcctgagggttgatttatccattttttgatagacccataaagtttggagaagccatagaagaagcttttgaatccttactcctttttttcaaagcatagattttgctttgtattaccaaagttacttatcaagttttaaaatatttagattatagaaattttaacagtaacatcttccagtatttagatatgttctagaagaaagtgttttctttcttcaaaacctattttttttttcaagtcagtgtattgttcatcatttcatttcctatctttaaaagctaccccttggcatctctagtggttttcacatacttttgaatatattcaaaagatcagaagtgacatttcccttgtaatctgttctttgtgagctaattcaactcattcagatggattaaacatttgttgaaaattataaaacatttataatcctgtagtgatctttttatctggataatttaaatttatttga

SEQ ID NO: 24636 - DNA, 828 bp, Bovine  19866880489152
  misc_feature (1)..(1): n is a, c, g, or t
ntttattaaaatcagtattgctttctggttaagagcccatgcatgttatacagtttgacttcgtaacctcatatttcaggttggccacttaccaagcttcatggtaactttctttacttttctgaaactcattgtgtgtgaaatgaaaataatagtaccttcttcacagggttttaagaggactaaatgtgatgatgcatattaattattcagcatatttcccagcacaaagaaaaactcaataaatcttaactattgaagtctgaagagttttaatactgtgaaaccaatgaactcttacatcagcgtagcaatttatttggctcacttttccacaagttaaaaaaaaagcctaagcgatcctttttcttttctcattagatgaataccttcccaataaatctccatacagcatagggtactgaaatgttttatggtgcaatttaagaaaaaatgttgagtcctcttagagcccatattgaagtgtacctcaaaccaaagatgtatctatcactgcatcaaactgttcttttggaagaagctaaaactagatagttaattagatatggttcaagtttcttccctattgaaaatcagttcttgtcatatgtcttcaaatgataatatgtcttcacttttaatggtattgagcacaggctgtttgttccagatggtctctgaagttgatttgttagaattcatagattagcagacatatttcaaagcatttctatccatagctcctgtgttaaacgagtgagaactgggtcaagcttctgggtgttttcctagtcaaccaccaagcctagccagattccaccagagaaa

SEQ ID NO: 24637 - DNA, 1508 bp, Bovine  19866880547712
  misc_feature (1)..(1): n is a, c, g, or t
ntttcacacagcccatgtcgactcacccaaacctgctatattttggcctaagcttaaatgcaaatataattttctatatagactatgacatggaaattaaagactgttttcatattgtctggaaaacagcagctgatctgattccacagttgactaggtaacacaggtaaaacctcaggtgaaaaataaaaataaaacttcagacaacagaaacatgatgaagctttgctaaaatactattttacagagagttgaataaaaataagaatataaatcattggaaaaagtaacacaaaacaaaaatgaaaggaagaatttgggtttcttcagaacgaaatcaatgaccttcttttcagaaactaaattgatcttattcagccaagtagattgtctaacaaagttaactgtaatagagggcttcccatgtggctctagtggtaaagaaccctcctgccaaggtagaagacataagacacataggttcaatccctgggtcgggaagatactctgggggaatggcataacaactcattccagagttctggcctggagaatcccatggacagaggaagcctggtggggtatgcagtcccatagggtggtgaagagtcagacacaaaatgaagtgacttagcatgcatgcactgctgtaatagactttgagatttgaatagatcatcagagctcaagagatacactaaataagatttgcctaaacagccaatgaatagagtgactatacaatttatcgttcaaatgagagcacttcccaggagagaaaggttgcaccaatagtgcagaaaccagtactgtcccaaatgaaccgtgacatgtagtcatcctgacatgaagcacaataacatcaaactatgcttcctcgagcttactagcatcgtgtggaatgtgatggcaaggggcaaatcctatgttacactgatccagagagtgctaatcttgtagaaatcattggtaatagtgcctctgaagctgtaaagtgtggtggcccttttccttactccaagccaggcaattttgttaggatttaatccatattaatttacttactattcaaaaactctgaaatgcttatctccattttaagaggaagaaaccaagatagattgtctgaataacctgcccagagtcacagagctaaaactggttgagcgaagatatgaaaccacaaggtctagctttccaattcctattttaatcactgtttatacacctccttgttaattctttttctcttgcataaattttctttaataatcagaacaatactttaagaggataaaacttttaggatgaataaatttcccagaaggtattctattcaaataattttcattgcatcaataagggatttgcaagcaaaataataacttgtgggttgggaatatcttgcaaagaatagtttaaagtgatagactttgtaagtcagagctttaccgccagcaattttgttttgaatcgtaaaataaaatgaagaaaacggcttttcagaa

SEQ ID NO: 24638 - DNA, 2874 bp, Bovine  19866880570216
  misc_feature (1)..(1): n is a, c, g, or t
ntgatgcttttgaactgtggtgttggagaagactcttgagagtcccttggactgcaaggagatccaaccagtccattctgaaggagatcagccctgggatttctttagaaggaataatgctaaaactgaaactccagtactttggccacctcatgagaagagttaactcattggaagagactctgatgctgggagggattgggggcaggaggagaaggggacgacagaggatgagatggctggatggcatcactgactcgatggacatgagtttgagtgaactccgggagttggtgatggacagggaggcctggcgtgctgcgattcatggggtcgcagagagtcaggacacgactgagcgactgaactgaactgaactgataaacctattcatctactcaggagtagagactgaaaagaactgagggatcggctgctaaatggggaaagtgaggaaaaaggaacaaaagaggagtctgacaatcattaaagactaaacagcaagaaagcagtgaaggagttgggagacagagagagaataatgggaatcaactttccactaagggaagtgtattgccacatacgacttcgcgtacaatatcctctccaatttcccaagaaagagttgcaagggaaaatatactcaattaaaagatatttagaaaatgtttagacatagtgagttggacaataaggtcatgatgtgaagaatattggtagtccatttttagtttgaatagttgttctcgagatgttcatactgatcatctttgaagaagttgctcctcaacacctaagttaaatatcagcaatgaaaaaccagcaagcttctgagttgcctggatactgagagggtccacatcttacatagcagcagtagtatgacctacctggctgcaatccggccaagctctagcaaacagagacacacttctctgggttgcttgtggaggactgaaaaagaagacgaaggcggacacttttacaatagaagggattggacagcagctcaatggggaacatgcttgacccccccgcctcacacctcagggtcccagtaagggagctagtcttcattctgatattcacagaaaccatcctgtcccacagtacacttagatctactgaagtcctaaagcagttttcaaaactctttgcctagcttccctaccaaaaatcatgagcctcaggaatctcactctgaaaatattttcttcaattagtcaatatttgtatgtgaatattgaaaacatatgtagttataattctgatataagtagttgatgaatacttaaaaacagcaaatagaagactatgaagcaaagattgtttaaaacttctaactctatcttcaccagtgatattagcagaaataatgcaatgaataaggattaaaaattacatatcacagccctttgttatcctccaaacaataatgtaaggtgagctctctgaatcttgatatcttctcctattttgattatattttaaaaggaaacactttcaactgactgaattttgtaaatatgtacaaatatataccgtcagtcagtttgggccataaaatgagcaaatcagaagatggttctttgcaatactatttattttctaatataatctgattacttaataaatttgttttaccagtttctttggacacattcagtaatgctgacaagtcatacttgcatttgttgaggctaccggaggagtatgtgttgctcatacttttttttttctttttaaactcagactagaaaaaaatttttaatgttattatatacaatacctaataaagacaaagatattagggggaaaagattgtattgagaatgctctttacatagacacaatatcctgataaaagaaaatacgagtttattgataaactttaagaaaaatagcaatattgcttcatctttttttgtggattagggggagccttccctggtggcttggatggcaaagagtctgcctgcagtgcaggagaaccaggttcaatctctgggttgggaagatcccctggagaagggaatggctacccactccaggattcttgcctagagaattcaacgggcagaagagcctgatgggctacagcccattgggtcccaatatactgataaaagaaaatagtagcttactgataaactttagtataaatagcaatattatttcaattcttttatttgtttatttattttaggcagtgctggatcttcattgttgggcaggcttttctctagttgtggcaagtggcggctactctccagttgcagtgcatgggcttctcattgcagtggcttctcttgttgcaaagcatgggctttaagcaagtgcacagatttcagcagttgtgcctttggacccagtagttgtggctcctgagacctagagcacaagctcaatagctttggcacacaggctcagttgcttcacagcacgtggggtcttcccagatcagggatcaaacccatgtctcctgcattggttggtggactcttcaccactgagccaccaaggaagccctgcttcaattcttaaatacacaattttataataatttaatttcccagcattatttctatcccccccccaacttaaatatctaatttcttctctccacaggctatgacaatggcaatatttgccactgacaccagaatggaatttgttggggctgtgtggtgaatagaaaaatacatttacttagattgtgaaagtatatgattttacttggctttaaacaagcaaaaattattatcttgctataaaatgtaatctttaaagcttttaaaatatgttctaatatcatcagcaatactcattgaaaagaactgattatgggaaatctgaattacagagtaattccat

SEQ ID NO: 24639 - DNA, 1437 bp, Bovine  19866880663085
  misc_feature (1)..(1): n is a, c, g, or t
nttaacataaggcaattctaacaccaagggttgtgatgtattaacctcaatggcagaagcagtactaatttagaagtctgttttgattctttggccatcaaatccagaggcatagatttgcattttctatgctttaaaaacttttttccttgtctttaaggcaatgctttaaattattggtctttcaatttgcagaaatgaaaaacaaaatttctgaataacacatgttccaactgccaatgcaggaaaatgtaggtttgatccctgggtcaggaagatcccctctggtaggaagtggtaacctactccagtattcttgcctggaaaattccatggtcagagaagcctggaagggggtcctaaagagacagaggcaactgagcacgcaggcacacaaggctggttaacttattagaatgtcaggttaacaaggccaaaattcagggtataaagtccaactaggccagttggttttccaaactatttctgacaacacatgttgttggttaaagaaatctcttcacttctgaggacttaaaaaaaaaaaaaccaacaaaaaacctacaaaagtaaggcattaataatgtaaaaacggtgtcttgttggtcactggaaaactactttttctgggacaagcacatatattttcaggattattagaaacgcacgttctaaaacacttgttaattctatggttttaggtaggatacttgcaatgttacctcctgtatccagaaaatccatggcactacaaggcagttactttacatatttgtaattaagttacaattgctttattatatattaggacctaaaataatattttggacacatgaaagtacaggagatgtggtgagaaaacaggaattttaattttgtaaaccatacattcgagtaattagtaacacaatgttgcccacagagaactggggtctgggctgaaaacttctcttccccagtgcaatatcatacacgactcccaagagctaacaacaggtctgtccagatgctaagaccagggacttcgaaatctccgtcttgagccttataggacttcagggcagttagaacttcatctttcagaggcggaggggcctgacagaggctttgaaacctgctgaacaactcctcccagggcacatcctggggctcagttccaatccaaaggcctttcggaaggtcatagtgcagttggcgaccccagtttgtgagcagacccaggtagacaggggacagctctggatggcgccccaccacggaagttaaaagctcggctgggaggttgcggcaaaaggcaaccacgatatctgatttccccagaagccaacgaagcagttcttgacgcccgtctcccggtgttttggggctgcctactcccaattcctcttcttggagccggggggatgcctgcggcagcagcagcgcggccgccaccac

SEQ ID NO: 24640 - DNA, 2015 bp, Bovine  19866880716562
  misc_feature (1)..(1): n is a, c, g, or t
nactcacactaccaggaggtaatatacagctgactggctggggccttgtcactggccactagtccctggcaatctggtggttaggagtcaacgctctcattgctccagcctgacgtctatctctggccaggaactgaaatcctgcttcaagtcactacaggctgaggccactggagatcagttcgtaggatggagacgtggacagggagaaccaggtgctaagattgaggggtcctgaggtcccatttcccaggtgaaatctcagaagtgagaagatatgtagttaaaggggagctgtaagctgagaggcctcggtctccctccttactgtttaggaccctggcaaagacagcaccaagctgcatagccctagggcaacctggagacattcacagcagaggggcaacaaagttggacaaacaggaccgctgagatggctccttcaagctgcgcttggttcccaggggcgagctgacttcctgcatccagattcccagccccacccctggggcctctcccctcaattccctcccctgcactgtgctgctcaaaagtcgtgaggaaggggaaatttagctggcaaggggaagggagcccatcacatcccctccctgcagcctcttctagcttgcaggtggaggaagctctggtttcaatacttcctcaaacacccccaaaccaccccaagcagaatttcatagtccagagagcaatcgatcgatggagccccttagggcccccagccagtaatccagagtggtgggaaaacccagacaagtgatgtaaatgtgcgaagaaaacccaggcacaacacaccctcagctctttgttatgtggattaagctgatacatctctgaacctgcatccctgaaaaatgggaaccactgctgctgctgctgctgctaagtcgcttcagtcgtgtccgactctgtgcgaccccacagacggcagcccaccaggcttcccgtccctgggattctccaggcaagaacactggggtgggttgccatttccttctccaatgcatgaaagtgaaaaatgaaagtgaagtcattcagtcgtgtccgactcttcgagaccccatggactgcagcctaccaggctcctccgtgggatttgccaggcaagagtactggagtggggtgccattgcctttgtccctagagaccttttaaaaagctaacaataactcagtcagcaactgggaaccataaactaagaaaatgcatttgaacatcatataacttaatactatactggtgtgatctaaggttaataatagattttaatgctactacgtaaattattaatgctatataagtaaatggttaatgtgattgaacctctttgttgaagaataaaaatgactgggaatacttatgataatggctaaagcctatggctgctacttctactagagtctgaaaaaagcgttctcctaaaatggaaccgtgctagaaccctttcaaatgtagttgatctcttcattcattttacatttctagttaataaataattaatgtaattattctcatcacatatatgtaaaactcagaaagtctattcttcactaggctaaaataataaaccactccccacccccacccccaaaatttccaaaatataacctaccagggactttcctggaggcccagtgattaagactccatgctcccagtgcagggttcaagggtttgaccactgaggaatgatcagtgaggaattgaggtcccatatgctgcacatggcctgaaaaaacaaacaaaaataaagcctatctacaggaagtaaaattctaaatataagttacttaaataggaccgtgggggaatgtaagaccttaccagcagcaggatttaatgataatcatgaggacctatatttttaaagcctttaaggacaaaacagaacacatacttaagggaaaatgctcaaggtcacatatcatcattaactgtcactgaataaatctttctctcatttcaagaattctctgcaaggagattaaaaagca

SEQ ID NO: 24641 - DNA, 1190 bp, Bovine  19866880720326
  misc_feature (1)..(1): n is a, c, g, or t
ncccaagaagtttcaaaatccttagctcaggttttcaggtagcagttattaccaattaaggagaattatcatcaatccaggttaaagtcaaaaatttcattttccatttttcagtttttgcatcataatacttcttgtagatcaagatattttgttttgctgttgattttgagagcttcatagctctgttacttttgatagtttatgagagtaatgagaaaattacattcaataaagaaatattttcattgcatacctcacatggttttttgttcttatacttacctaaagtgaaagtagctcagtcgtttccgactctttgtgaccccaaggactatagagttcatggaattctccaggacagactaccgaccagggaaaaggtagcctttcccttctccagggggttcttcctaacccaggaatccaacctgggtctcctgcattgcgggcagattctttaccagctgagtcacaagggaagcccaggaatagtagagtgggtatcctttcccttctccagccaatcttccccacccaggaatccaactggggtctcctacattgcaggcagattctataccaactgagctatcaaggaagccctcatacttactgaactatgagttaaatggaatgtaaagaatttaatgattcacccagtattgtatagtattctacattaaaaaaaaaaagctgatctgaattttaagttagtttttttttttatactctcaaaatcagaaggatcagtctttttctcgctatattgaaactagaaattagtaagtatttgccatgtaagatctttttttcccaaggctcttgacagggaagcaccatttgcaaatgtttcagtacaaaaggcaaagtttagtatgacagtccatcctcttctagattttatcattttaaagccagcttttaagttattttcttttccattttttggtttgcttttcttttatttccagtacttacagataggaacaaataactagattaacattttcatgcattccatttattatttatgtgattagaaatattttaataaatagaattttaagaaaagaaatcaaataagtaaaagcttacttgacataaaactaaacacttagcaaatgtatagcttagggtcctggttaaacttccattgtcaaaacaaattatttattaattgctgttaa

SEQ ID NO: 24642 - DNA, 1521 bp, Bovine  19866880821188
  misc_feature (1)..(1): n is a, c, g, or t
ngcagctaaaatttaataaacatcatttgtaccaggccattataataggtgctttatgtacattgtctcactgacttctctaccactgagctgggaaaatgtttttatccttttgttatacatgaaaagacaaagacttaattatggttagggtcttaagtaaatagtatgatggacaaaatctaagttttgactcccaaatccataacatactccattctaagctccctgcctatgacatgtccattagatgcagatttttattcacaaggttagtcctgtaaaaaggacttgcacctttttccaataagtttaaggcccaactatatagtagtgtattcctatatcatttttactttacaaatattcagatacaaaaagtattacaattgcataatcaatagtactatgcagtgtaaggcaaaggatttaatttgtttgcctgactgtattgtggtagtaataaaaattatagtaattattaggtgtttacctgtatgtcagacactattcaaaatggtttatatggcctatataagacaataagatatcttactttccaccattatatcttatttatttatttattttaattgaaggataattgctttacagaatttttgatgggagggaggttcaagagggaagggacctatggattcccatgttcatacctatggctgactcatgttgatatttggaagaaaacatcattatatcttatatctttttcgaggaagtcaaaagataattttttacattgctaatatagttttcttgtctttttactaattattgatattttaagtggattaatattattttaagacattttaatagcagatttttataattgggtaaaccatatcagttttcattctaacactctgaagcgtctgaatatttttttcttcatattttaagaaatctgactacttaggaagcctaaagaaaaggcaatgaataatgtcactggaactcagcaaagggatttgaaatgttatgcagtcaccttcattatactagttttgaattaagtcatcacaaatcaatggaaaagccacacacattattattgattctttgtaatttcttctttactataagaaatcttcagggttatacctctgtgtagaaaacaactcactataataagccaagcaaaagaggtaccagagctctgttgctatagcaacccaacctggcaatgtcttctgggacttgctctaagggaagggccaatgatagggagtaatgtgactttcttttctgctcttatgacatatattgatttactgtgaataaaaagtaacatggttcaaattgcatacctttcctggtaatgaaaaatgggctcttgtataaaaatgacaaggagttttaaacaagtagcaaggagtaaaactttcatttatcttagtggaaacattgcataaacagcccttcctcagtagttgaatgttgaaaattcattcttcttgaatagcaaggagtataaatatttcatataatttagcaatt

SEQ ID NO: 24643 - DNA, 1545 bp, Bovine  19866881563315
  misc_feature (1)..(1): n is a, c, g, or t
nttgattttctattttctaaaatattctgtttaccatgtttgtgttatttaatctacattcctacatgtaaaacaggagtgggggagagctagacaatttttaagcttttttttgtcctgtatcaacacatggccatttctgggtcatgagtcgtctttgttaggccaataacatttgtgaggttgctaatgattatgaaaatttctctttcaaggtctctatacttgtttcagcaaagaaaaggaaatgaagagaggccctttgtggtcattttgccttttaatatccagatcctattttacctcatggagtgttgcactaagattttctccttttgtctgctcttcccatcttaattattgatctgtgaattagttgctcttggaactgatgcactcagcaattcctgggtggtggagggagatggttgctaggcaacctcacctgttttagatgggtattgggccttatctttatgaaccttatttgtggagaatctgagggaaaaattatttctcacatcttaagccttcataaaatacagagatttggaacaaacatataaggttttaaatagggttatcagaagaagaaacattggatagagtgttgtgtttaatttgaaggctttaggtgatttctttaaaaaaaattcctttaacactgttttccttttctatttctgcataacaaattaccacaaacgcagtgacttcaagaaaagtacttttattatttcacagtttttgtgtgttagaagtctagtcataccaagagtctcatggactacaaccagggtgagagctgggcctgtggtttaagttaaggcctagggtcttcttccaagttcatgttgttgttgacaaagcctgtttccttgtggctgttgcattcactgtgagttgcttcttcaaagtcaacaacagaaaaaaaaagagtgcttctgcagcttcaaatctctgagctgaatgaagtcttcagtcctctttcaaagtgcctggttaggtctggaccacacagggcaatctttctgattaactagcttcacctagatgcagatattaaatacatatgataaatcccttcacttttgccagataatgtaatatactcacaggacagatatctcttcatattcactcatcctcaaggagaagaacttcaaaggtgaaagtcattagagattatcttaaaattctgcctaccacagatatattttaatgatcacattagtgttttactaagatcttaaaatttaggctgagagaataacagatatagttctttaatttcttttgatctttcagttttttaatgtaattaaaagcttgtaattaaataattggctactgactccaatattcctgcctggagaattccataggcagaggagccaggcaggccatagtccatggagtctcagagtcagacacgactgagagactaacattttcagtttttcactttcagttgtgatttatttaaataatatagtagttagagttattttcttggaaagcaaagtatttttaaacgatcttcat

SEQ ID NO: 24644 - DNA, 1317 bp, Bovine  19866881703610
  misc_feature (1)..(1): n is a, c, g, or t
nccaatattgagagtaatgaagcttaagagacagttgtatgcacattaattattgtaattattcaagctactttcccttagggctaccgtatttctaagccaaaagggtattctaggtccactatgacaattagcatctgataaatgatgctactgccacactactaacacagggattgattatttccaattaattcctgagagaaatcaatggtttcttcctaaagcatatgcattgactaatttatgttaatatgaataccttatatccacaatgtgcaagggaagataggacattcaaattataaactggttactattttagagctttgatacactatttcagagctcaaaaatgcataaaagaggtataactgggcagtttaaccacagcaactaaatctgacattgatgaatgttgatccaactcaaatgcagcaaagaagcttttggagatttttcagtttgattggttctagtttggaaacattaccatatacccatcccaagaatgggaccccattcttgttgtttggatttatacttgtcatagccagcactaaaatggtttatagttcttaaagatacgacctacagggggatgctgtaatcaaatgtttgctccattcctatgtattcataaataggtatcaaatacatgtagatcagctggtaaagaatccacctggaatgcaggagaccctggttcgatttctgggttgggaagatctgctggagaagggataggctacctactccagttttcttggacttcccttgtggctcagctggtaaaaaatctgcctgcaatgctggagacctgggttcgatccctaggttgggaagatccccaggagaagggaaaggctaccgactccagtattctggcctggagaattccatgaactgtgtagtccatgggatcacaaagagttggacatgactgagctttcacgtaatatatgccagtatagtgtgaaaaccttgaatattcaagcacaacagttttgtccttactaaacttatactctagtagaaaaggcagacacacatgaacaacacaactataggaaaatgggtggtctgaaggaaaataacagggtgaaacatgtctagatagaggatcatggtgagagaatgaaattaagctgtgaagtgaagactaggtgagaacattcttggctgaactaacaatataagaagtttctaagacaggaaaaagctcagcttctctactccaagaactgaaagaattcccatgaggctgaagtgtatagaaattggcttaatatagaatagcttattactatcaacaga

SEQ ID NO: 24645 - DNA, 3311 bp, Bovine  19866880505381
  misc_feature (1)..(1): n is a, c, g, or t
naccgtgcttgatatagatgtttcattgagaaagagacaagggacttcaaccctgacagtgatatagctcagaggccatgagagtctggcttaggaagtgagaaagagaaagctgctttaccttcatagtttgggctgttacagctgcaatttccatatggcaggggactggttcaaactgattttttttatataacatcaggcatttaaatgacttaagtttcatttatgtttatcagaggcatttacaagaaatagccttagttatgttttgcttgtacaagctaagttagtttataaaataaactagctgaggcatctgttgtgtagcttaactggttttgtctccatggggaaactgcaaacctggtctccaatttatttcattttaacagatacaatagatgagattcccattttctagatgagcagattgaagctttgttttttacttaacctgtagaagcccacctggaaagacagaattttagaagtttttgcagaaacatagatagatgtgttcttattttataaaacagattgtatgttagcacatgtattttaaaaaaatgcccttttacttgtttttgttttgcatactggagagtcaggtggtagagacttaaaaatctttagaattatatttgtctcacattgatttactataacactatcagaaaaaaaggcaggcttccttggtggctcagtggtgaagaatccacctgccaatgcaggagacatgagttcaatccctgatccaggacgatcccacatgctggggagcagctaagcccatgtgccacaactgctgagcctgtgctccgggagtcacaattactgagtgccctagagcccgtgctctgcaaccggagaagccacctcaatgagaagcccgggcatcgcaactagagagtagtccccacttaccataaatggagaaaaacccttgcagcaacgaagacccagcatagccaaaaataaacacataattttttttaaaaagaggtagatttgaaaacaacatgtaacaagcgtaagggctaatgtctcactaagaggttgttattacaaatgatggacagaggttcaatgaggagggggatgataaccactgaaagtgagagaaaaattaaactcttcccacctttgaagtcaaaccaaacaacactgtaggcaaatccttctgctggctttgttgatctggtttgtttctcaaacctctaccaaacttctgccttgaaactctgatacttctggaccaaaaagagaatggaaacttctaagtaagaaagtatcaggtatgagaccctgcctggtaaacttgagtcacagggagtgcatggctccttcagctcaggtcctgagcagacacaaggaacaaagtgtctacatgtctttcggccaagcgagttttatagattaaggccacaatccttctgaagtacatctatggtgatggcacttatcagagcattgaattagtcatggtaaccttccaagggaaggacccaacgtaagtatatttcaaattaccaaagcagagggcggaaccagatgagatgtttataagcattccaaaatttgcagtggaaattcttagtgcaaatgcctttgaagataatgggagagagaagccaactttcctgacaactcagagtcagaatactttaggagaccctggggaaaggccagatgaccatggccaagctgcagttgagaccaaagctgtctcaacagcaaatgtaaaccttccaagagaagagaagttgccttttcttcacctctttaagttgatttaatgttgttgggctttggctaatgtcctttggttttaacccaccaacgcaaggtccggtccgctagcatggatttaaatatgtaagagaaaccttctctgaagcacagagaagagagctctgtgtttccaagtaaagagagagtgtgcagaaatttgaattaatggtgcagtgtaatcggtgcaggaggggttgagttgcagagtgtggtccctccatcctgtatcaaggatgtccagctcaggagcttagtggaagttgctcagttgtgtccaactctttgcaaccatatggattgtagcacatcaggcttctctattcatgggattctccaggcaataatactggagtgggttgccatgcccttcaccaggggatgttcccaacccagaaatcaaacccagtctcctgcattgcaggcagactctttaccatctgagccacagggaagacctggtgagtgaaacccacctcttaatgctcgccctcctaacagcgacatcaaaggcagtagaccaacaatggacaatattgttattttttttggtttaggaaaaccctcgtagaagaaaaattgtactttttagaataaatgaataaaagagatacacttgtccaagcgttttctctgaagcaaccttagagggtctggcggaggagcaagaaccgaggtgcccgtgttctcccagcacccccgaggctcagacttgggtccacctgggtccaccacctcttactcaagtgctgctcatatttacaacagctcttcacagtttttctaacttaacacctgaaaaatggtcccccttataatgcatattccaatgtattttgtaccccaaactacttaaaaagaaaattcaataaaattcaaaataaagaaaatgaaaaataaaattaagaatttaattttgtttataataaaactaaaaatttattgagtgtttctatatattgaagcattttgctaagtgtttttgcagatagtaacttgtttaacaatcttcataagaatcctggaggtcaagtactatttttatctcctttatgtagataaagaaagtaaggcacaggagtttaagtatatttttaaggacaaaataagataacagcctatacttttaacacatttaagagagaaaggagttaaaaagtacacagacacttataaagaattgcttattcagggtctttcttaagggattttcataaacattataggaagatacggagtacaaaaggaaaacactaaaatagttctgacctaatgatgtaagagaacttgacaaaacttggcccagatgatgataaaggcaagaatcttgtatatcacctgccataaaatgtcatggcctcatctcacagtctgttctgcctttgcatttagcttgtttacgaatcgagccctgtggtcctccgactcccacgtaaatgcagtattctctaaaattgtattcacctgcatctgtctgccaaattagagaatcaacttaccttccaaatcctgataataaa

SEQ ID NO: 24646 - DNA, 3273 bp, Bovine  19866880547785
  misc_feature (1)..(1): n is a, c, g, or t
nctgtttggacctgctctgggtgaggacatttcaaacttttatcattatagaaccttagtaaatggggctgggggatgatttgtttagtcctgttctgtgaggtgataaatttctcttccctggtaacaaatttcctcctcttgagagggaaggaaattatttgaaacatggtcttatatgtctgtctccttctagactgtgactcccttgagggcaaagatggcatgtctttctgttttccgtctctgacatctagcacagagcatgccgtgaaattgacactcgatgcattttattgatcaaattaatgcagtagaataagatggcaccaacacattgcacaatctgttcttccttctgaatacttcctctgataactccatctttgtagacactccaagaaaacaagcaaacaagcaataagccaggaccagtgccatgggcaaaaccctggagtcatccttggaccttctgtctctcttatccacgtcccatctatcagcaaacctaactggctccccctgcaccccagctgaccacccctcctttccatctctcctgctaccacaaagcttctagtcctcctttgctgggatgattaaaatcccttcctaagggggtctgttttgcctggtcgccctgagcctgtgcacaaccctgcagcctgcatgaacctttaacatcttgagccagaacacaccgttcctgtgcttgagtcatgcccatgattccaccatgttcagcatgaaagccagcatttcaacagggctccgtgagcctgggcatctcaccccctgccttgcttccctggtttgctctactgtagccacaccacctggttgttgaattcgatggacatttcagtctttgttattgttgtttagtcactaagttgtgtctgactctttgcaaccccatggactgcagcatgccaggcctccctgtccctcactatctcctagagtttgcccaagttcctgtccattgaatctgtgatgccatccaaccatgtcatcctctgtcaccctcttctccttctgctttcaatcttttagttttcatctgatgcaaatgggaataaccatttgaaattaccaccttaaaattaacaagaaatatgagatcaaggaggaactatttccaaggaggagccatcatttttctctgagaaacagcccccctgaatgggacatgtacaggtgtggtagccgcctgcccttcatcactgggtcatgagcatttaagtgtttgtccaacatctgaatagagtctaccgttacttctgggtcttcttctccttctcagacgtgtacagttatgatttatggagcccatttctttttcctgctcatgaaacatcatgcatgtgactctcatcgggcttttgaggcaagcatggccaaggataggcaagtaacctgtggtttctataagaaagacaggttccctggaccactgtagtgcgagaaggctttcagaattccccctttcagttggacatgacaaatacctgaatggactctgggactgagaagtagagcagcatttaaaaacagacttcagactctggaaccagactgcctgggtagggctaagtcactcagcaatctgtgcctcagtttcctagtctgaaaaatggacctaatagttggctcttacttgtgttaaagagaccatctatgttttaaagcttttagaaaacagcttggtatctaataagcactcaataaccttcagctagtattagtattggaattaaaatcagaagtaaaattaagatgaaaataacatcagtatcactactcatgttattcctggaatggctgaagggaggttctagaaatgacagtaaagatgagtaagggcagagtagatgacaactctttatgtagagagtacactatagagacaagtcatgtatacctgcctttaagttgcaaatagatgttttacagacattgcctgtcttcatgatcaagaaattccaatactttgaaatacaaaatctcaaatataaacctccagtgtctcttgggtgctgttcatgcacgactctagtgagtaacttaccagctgacatttaggatagaaaattaacagttttaaaggctgacagaaagtcatttctattctatatagtttctgaaggaaccgaggttatgagtaacccttttaaaaatgatgttcccataaattatactaagttgttagtcttctgttatgtaaggcattgctcttcatgcaaatatgaatgcaaattttccattaaataatggtgtgggaaagtcttattcatgactcactttcctcatctacagaacaagggactgtagttactaattggatgatctctttggtcctttgcagggcagttattgtctctgtggctctgggtgtgaagcaattacaaagacatgtcttcaagttactcctgagttattgttgctagagccgtcatcatgcgatgcagaaaaaatcatggctcggcacaatggaggctagctgttggttttcaccttaaattctaagtagatagtgacttttctctcaaacagaatttaaaatgaccctgatattgtcatagtcacaggacactgattgtgctggagagagcaaagagaacgaaaacgacagaatggtttacactggagaagaagaaagtaccagtcaactgaaccattatccatgattgttttccagcaaggtgatggtttgaacacaaacctaattatttcctgattcccactgcaatgatgagaaaaatatgaaaataaagaaacacttaaggggatcaatgcagaagaaaaaactaatttcacatcagacagaaaaactcacctgttaatcaaagaactacagaagaatcctacaaatctatttaaacaaaactacaatcacttgaaaattagaataacattctccaaaataactgtttggtagagaggaaattactatagttattggtaatttagatgactaaatgagaacactgcacaaaaaacttatgggatatttcatgttcatggatttaaggatttaatattgttaaaatggccatactacccaaagctatctacagatacaatagaattgctatcaaaatcccaatgacattttttcttagaaatagaacaagcaatcctaaatttctatggaaccataaaagaccttgaatagccaaagcaatcttgagaaagaagaacaaagctggaggcatcatgccccctgatttcaaactatattacaaagatagagtaatcagaacagtgtag

SEQ ID NO: 24647 - DNA, 2047 bp, Bovine  19866880630533
  misc_feature (1)..(1): n is a, c, g, or t
ntgggaaggtagtttcttttctcttgtgcttcattggataacatatcagtggtgttttacataaaattgttttagccttaaatgttttctataagagtccaatgaatgagcctcatgcatcttataaactagctgaaccttggaagtaataaggtaagtgatgtcttttctacccttaagttcctgtctatggtgcttgcatcctcagttacattggttttactcatgcctgttggctacgatcactctatggactgagtgatcaggagggcaaacacactcagtgctagcccagtgcatcacacatcagacctctgactcggggtggcagggctgtctctgtggtgtgtgtggtttagtttcacaattgaaacggtatcaaggagttccagaccactcagtggcaacttctgtgtgttcattctgggtaggaaacaaaacatcaaaacatgaggaagtcaaggactcatgatgagaacaacattggccttgagatgctgtttgtgttgttgaatgtcagagactttgacaagtccatgtagtcttctttaattggaggatagttgctttacaatgttgggttagtttctgctgtgaatgagctctgagtatacatatatcccctccctcttggacctccctctcctcccttcccctctaaccttctaggtcatcacagagcaccgagctgagctccatgtgctgtacagcagctccccactagctgtctgcttgatacatagccttcttaaggtgttaaactggctgttctcggagaaaccttctagcccttggattatatacccaaagaaagaaaataagaaagaaagataggaaagaaagaaaagagagaagaaaggaaagaaagaaaaacaatagaccctggaaggacctccttgtagtaaacctgaagctaatgatagacatacctccgagtcaggaaacgtctccatacagaggatcacctgcaaggttaacttctgcagacctttgctttctgtttcacagggcgtctgtgtctttgaaaacatcatgcgtctttatgatcaactgctgctgttactttcctctcctccttctttttgtgagacaggaaaatgagatgcctaactgcgggaggcattcaggtggaaaacaattacatgatcttatctgaatctgacagccctttttatatgactaccagactatatagctcctgttattgtgagattatttgttcttacatgtttgttcaaattttatttaatgctttgtcagtttttaatatcagaatgaatcacagaaaaaattaaataagcacacttaaggcaaatcagctaacagatgtctttgtgaactcttaggtggccattatggaatttgtagaaggttatctaccatccgtatcattgaacaaaataacagcagatgatgtagcctggacagaaaatggaatcgactggaaaggaactataaattttgaaaataaaataacagaagcaagatgatatagaaagagagttatcctgaaaagcctgagaattaaaaatgcatgctaaaacggacaaatgcacacgtacacacagaaccaaagtatatgctctttacaacacacatagtaatacagaatacatttaatgaatgtatcaaagcaagtgttgacttcgtctttaaggcagtagcaccggcctgtgtgggcacctgtctccacctcagaaagcgtggcggctggccacccaggtgaccttcatctgagagtcttcccaggcagtgcttcttaaagtcatttgttcttttattttctaaatgttgatgtggcatcacaagaatgcatgtaaatcaagcacaaatgcatcgatttctgaaggatgctattctctcttatgactagagtgatgtttcatctatctgtacccagtaaaatgattccattgttataaattgtttctgaagaccctgagcaactcagcacctgaataattcaagagtagttttcaagagtaattcaggagtaaagagataaatgtaggggtaggtagtatgcttttacggagcttagaaatct

SEQ ID NO: 24648 - DNA, 1555 bp, Bovine  19866880927161
  misc_feature (1)..(1): n is a, c, g, or t
ncatctgctggagttcgtgctctccgaccggcctacagcgagctgctggggctggagctgctgccgctgcagagcggggccttcctccccttctcctcgtccgcctgcgaccaggacgtgatctacattgcctcagaggagcaccccaggtaggcggggcacacgtcggtgtgcgtgcggccttagggggctctgcagagctgctccattagaaagaacacaccattacgttctaaggtggaagggcctccagatgtttacgcgttaaaaagcggtccaagccattgttgttcctggaaattctaataacagaacgtagaaaagaatggctacaaagagctagtaataactaaagttagtcaaaaggaaattattttgatgaaattaaattcacaaataactcggtaattatagctcaggatgcctattgacatttcagggaatacagtgcatgtttctctaaggtgttctgggctgtccctgggtttgcatgctgcctcagggtttaaagccacacctggataggactggattacaaggattgcgtgtgattgaggtgtgccttataatttaggtaaaatagtgagcacatataactggcttgaaattatatcattgaacttatctacttaaaattgctgcatttctgtcactttttaggtcccttttcccaggtcttgaaggaagatttcttttggataatttgaagcctcaccttctagctgctttaaaggaagctgcccaaacccgaggtattatagctattttagctttttaaaaataagtgtaattataaaaatgtgaacaatttatgtgtttcctgttaagttgaatgagtatggaattgcctattggtcagcagccccatgtggttcaacctcatgtactcgtggtttgagatgtgtcagtcgtggatgctgacgtctgtccgaatgcaaaggtggtcctgtgtttagaaatctgtgtttagggttcgggtatggcagtggtcctcacccctgcacagtgcctcacgggcctgcatgcttccccatttctttccccttttttgcccccggcctcctccctggtgggctacgtggcggtgagagcgctgctgtgggttaggtggacatgcaaggggagacggggtccgcctgctctgcccctacatcacctgcctccagagttccacatggttgtgttggggcggctttggggacctacacgttgagaagagacctgtgcatcagggttgggaggactcctgggggccgaggcaggaaagggtgtcctctatcgggagtactttttaggaaaagacagaataattgggggaaaaatcaccatggttctgtttaaccttatctttcaacttctgtgagcacctttgtaagactgttgcctgaattttttctgtttgtttgtttatattctttcagccactcttttttttgttttttgtattgaaggatattgaacttttttaaagttagataccggcctgaaaaattctgggtttgttctaggtaaggttgtaaagcgtgctctttgtgacctgtctttgtactgtgtg

SEQ ID NO: 24649 - DNA, 3655 bp, Bovine  19866880955929
  misc_feature (1)..(1): n is a, c, g, or t
naggaagggggtgggctgttcctccttggctgggtggtcctgagccccatggctctggcaggggagtgagttcaccctctctcttcttaccccctgttcctgagcatctctgtttgataaagctctcccatttctgctttccatcagatcgcctgaccttgaaggagcacagagagtccactgtcttgggtgaggtttggtggtcgcacaggctttctctcccggctttcccagggtgcccagcacctgtcctctgccctgtgcagcctccactgctggtgaacatcctaaaaaccctttaaaatggtgagtctcatgatatgtgaattatatctaccataacaacaacattgtagttgatgtgaagcaaggcgttccctgcacactgtgtgtagaacccctctgggctcaaacacctgtgaacgtggctcccgtgatctttctggtgggtccagtggtttatctatttaactgtcttcttaagatgttctgggccttttccagagtggtcgaaacagacatctttgccctcaaacacatacgtgaacaagatgaactacagactccttaggagaacatgcgagttctactttgcacactcatccacgcccccccacctcaccactgtgctctccccgcctttcacctccccttcctggctctgctccagccccatcagatcagctcccctgctctctcacgtggcctttgcctgtgtccttcttcctcctccagcacctactcctctttcagattcgggaagcctatttgacttaccccgtgtgtgtctgctccctaagctcacagacccccacgctccaccatcaaggcctcacacagagtgatccttacacagaggacctggtcttcaacaagagaggccggtggcccaggcatagcttttccagaaaccacgttcaataaccaatcaaccaaacaagtgaaaaaacttccttctcttcatgccggtgtagacacagtagtttgacttctatttttagttccattcaacatgctttgggaaatgatgtcatgtttctgaattaacgttcctgcctttgcttcttccaaagagggcattatgcaccccctagagtaaaagcatcaggtaaagcatgagactgtacacgctttacctgatgcttttgaatctgttgttaatgtgagaggtagttgttgagttgccagaaatccagattgttcatatataactgggccaaagccccattacccaggaagagccttaagtgtagtcgtgcttctgaacggcaacagggtaatcagaaagaacttggcattagaaagggaaaaagtgactcaggccctcagattttgtcaaggtgacacatcttgagctgtcttaaccatttcaggaataataaaaccgcgcatggcccctgaattcctcttctattatgataatctttggtgcaacatcctcttttggaacattttatagaaaatacagggacacagcgagctaactatggcagtaggtacattaaaatgaatgtaccccatgctaataattagagtgaactgaactgaatggagtctcgccctagacacaacagtaaggaaacttttgacataaacctataaaacgctccatcataaaaattgattacactggatataaaaaaggaaatggtatgagcaacgataccataatgcactctaatacacttcttttttctgtttcttctggctatttatatttttcttttcttttaggaaattaacaatttcccttctgttttgccctttattttacatgttgcttttcttcactctccacctgtctccacccctacccccttgaaattgaaagtgaaagtcattcagtcatgtcagactctttgcaaccccatggactatacagtccatggaattctccaggcaagaatactagagtgggttgccattcccttctccaggggatcttcccaacccagggatcaaacccaggtctcccacattgcaggtggattctttaccaactgagctatcagggaagccctctgccccctcgtgtgcaaatgaactgatggtcagattctcggctctcacaccttttccatgggagggatgtcaccactccgagctcaccgcctcacctgtaggacccttccttggggttatgaagaggtgaaacaggctatcgctgacctggaagggtcacttgtattcatacaataaaaatgcacgacaaccaggatgctctaggcactggcactctgattaaggggcacagtccctagaggggtatgtccccttctatctggggggtgagtcagctcacagaaacagcaatcaggcaggtaccatgagaaggaggcctcacacccttgtcaccttcatcttcccccgtgctctcctctctggctctggaggtcagtgccggaaaaaccatgaagcaggccagtgtgtctcaggtccccttcaacctttgatctgaacttcacctcctctcctgacatgctctgtgcttgtatgcactgtatccccagctctgctgagctcagtaaacattacccctcctaggtgtaggctctctgccaggggctcagaaatcagacagataatgatcttaataacggctccactgcccattaggaactcaacagcctgtgtgctcagtcattcagtcttgtccgactcttttgcaaccccatggactgtagcccaccaggatcctctgtccatggaattttcccagcgagaatactgatgtaggttgccatttcctcctccagggagttttcctgacctagagatcaaacctgcatctactacattggcactcagactctttaccactgaaccttgagggcagccaagactaaaattacgcagaaacatcatttcaacataaaagggacatgctgaaataaaggcaagctgctgagtgccacagcatggctttccattaaaggctttcctggacgagcatcgcagtcaagaaagagactgctttcctgggtgaccctctgtctgtacagaggtctggtcttctcttcgcttgttgtctctcctcctgagcgtacccaggctcagctcccatcagctgtatccttcacacccccaccaggcacaccccttctgcgcaccaggaccccctccaaagtggccctgggactccattctggtgcattcccctgtgttcctgtgtgtttggagatatcatttatttttccttccatctctttaaccttctttggagaagaccacacacacagggagctcccagccagccctccctctccagcccgaagcactgcactctgacccccgctgcttcttcccccagtggctcagcagacacttcctggctctcaaggggctgttttaatttctaccacagtgtgggccctgggatcacagggcagggggaggtacatcacttactgcctctgaaatcctatccccaagaccgttgttcacttaaagcagtcattgggatgtgagaaatggaaaatcatgcacaataataataatccatgtggctaatgaaacacttcctaggcaccaaacacttgtcatttaatcttcactaaaatcctatgaggcatgtttattcctattttacagatgaaaaggagattcagaaaagttctaactgccccagaccacatgcagaacctgcaaatccata

SEQ ID NO: 24650 - DNA, 1327 bp, Bovine  19866880981982
  misc_feature (1)..(1): n is a, c, g, or t
ntgcatgctatactgttcaatcggagaaaggttttcatgtacaaaaatttctgtgactccagagacagatgtggggttcactataaggaaaaatatcccaccaattagaacagcgcttgtttgtatttacttatcaccaaccacatgctgactctttcacatccactgtcgtatttaattcccagatgaatctaacattatcatccacaattacaaattaggactcaggacccagagagggcaagtaattcgtctgaggtttccttgcaaacaccaagtgtcaagaccggaacccagatctccattcaatgttctcattctgtgctgcaccccagaattgaagcaaaagagaaacatctgctttgagattctaaaaatctcgcagagtcagcacaccttaaggggtgcatgcatgcttgactgctaagtcgcttcagtcatgtccgactcttcgtgaccccatggactgtagcccaccaggctcctctgtgcacgggattctccagccaagaatactggagcgggtttccataccctcctccaggggatcttcccaacccggggatcgaacccatgtctcttatgtctcctgcattaggcaggtgggctctttaccactagcaccacctgggaagcccatgccttaggggtaggtgccctaaattctctcctaagagctaatcacaatcttgtattctcaagcatgtggcagttttacagtctggccagacctaggcagcacaagagcccttgggcacatgctgggaaacgcttttaaatgaatatgataaatatgtgagcatgcactacagaatagagacacagacaatgcagccgaaagggtgtgattgtacatttcactacttctgtttcattcatgatagccaattgagttacttgtttaaaactacgctcccctacatatttgagtgcctctgagagttcttgaaggataggcctgctgcagtccatggagtcgtagagttggacatgacttagggactaaacaacaacatatttagctgtgaagaagtgtttcaaacagaatccctagaccataatttgattaaactaacatcctctggtcagaagtatttgagaaatgagtttatttatgaaaaacaaatgggaatcttctttattttgtcatattttatctttaccatttcttgcttatgttcattaaaattttttttaaacatttcttattttatctcatttccaaatgtttggacttggagtaataatgtcaatgaatgatcacttcaaaagcatcatgttttatgtctgtgcagtcagtgccacaataacttaaaatataatcata

SEQ ID NO: 24651 - DNA, 1114 bp, Bovine  19866881039188
  misc_feature (1)..(1): n is a, c, g, or t
ngacctatacatggaaatgatccagtgctcaataccataatattgctatactcacagcttggtcaagcaccacctctgcccttgttgacccaaagagaatgttctgtccacagccaaggttgtccagagcctctgtcctctgggaaagggacttgcttcctctggaggccagagggaactgatgtatcccagaggcccaaccatgcccaaggaggagcagaggcctggctccaacaggaaagcccaggatttacctcctgagtaatcctcagcctagtccggcagccagaagcaatgggccgacacacaaaggatgggtgtggtgcagcctctggactgtactttgaggctgctaaagtctgctaactaggccagatccccagctgcttggttccagtcctacccctatccccatcagccagtggttgactggactctctggcctcatctaaggtaggagtatgcatggaagctccactgggtgccatggcaaccatctgctggaggccagtctccccatgcacctcctgaccactcccagcacacattcaacttcccaggtggtgccaacggcaaagaacccacctgacattaaaaacattgtcaaatcatgtgacaacacccaacagattataaaagaggagttatcagcttgtgtcttccccatgaataactcagaactgatgtttaatttttatcatgtttgaatgtcctatgaatgtatttcctttgcagaatgtagaagacaggtgataataattagtttatataattatgctggctgtaaatgatgctcaatataatgttttatgcaattaaaggcttatgggacatattaccacttttttacttgtattggtaataaggaatgtttgcacctccactattgtcttgcttctggatgtgagctatgtgacgatttctgctatcatattaagcgccacaattttaataaagcaaatgtacatatgaaaaaaaaagaagctgtctgccagtgcaggagatgtaagaggcacagatttgacatttgacccctgggtcaggaagatcccctggaggaggaaatggcaacccactccattgttcttttttttttaacttaaaaaaatttatt

SEQ ID NO: 24652 - DNA, 2196 bp, Bovine  19866881070965
  misc_feature (1)..(1): n is a, c, g, or t
nctagtgggatccagagaaatatgggaaaatctcagaggtcctataggtaccttccctctagtacaacaaataaggagggcacttgtatgaccactgagatttatatatatgtatatatactatatatatatgtgtatatatatatatatatatagagagagagagagagagagagagagagaaagcaaactccaggaaatagtaaaggacagggaaacctggtgcactgcagttcatggggctgcaaggagttggagacgacttaaaaatcaaccctgaatattcattggaaggattgatgttgaagttgaagctctaatactctggccacctgatgtgaagagctgactcattggaaaagaccctgatgttgcaaaagattgaaggcaggaagaaaagggagtgacagaggatgagttggttgaatggcatcactgactcaatggacatgagtttgagtaagctctgggagttggtaatggacagggaagcctggcatgctgcagttcatggggttgccaagagtcagacatgactgagcgactgaacaacaacatttgaacacaaaccatcaaccttctttagttactaagcaagatgatagtcaaagaaatgcctaaagtgtcctacatttttaaaagaacagttatattcaggttgggaactacaggtagggaggtcctgaagaaaatggaggatgtgatgtcacgggtcgaccagaactttcagagggggcagtcctttgggtggagatgcctgcttttcacctttgtcagtgttgtgattttgtatgtgtgtatgtgagtgtgcatgtgtggttagacagagacaaatgcataaatgtttgatatcatagcaatgtcatttttcaggctatgaagaccttctaatgtgaaataataacttttcattaaaaaagtgaaagaaatcaacagaagtttttcacatagttatattgaatttcaaaggataatcatattaaactgtgtatgaaagaaagttgtcctgtccccagcatactcagtgttcccatctctgatacattcatttaaatgtattgtgtccaggtttggacgaccagacacttcctaccagggtcaagttgacaatgagaaacttgtgtaggaaacaaaatttaaggagcaaaacagtcagcaatcaagatttctcccctttcttaggctccagtatgactctgcattgttttatctttatttaaatatatttgatatttgattcattgtaatttttcattaatttctgttaaggtatttcgtcaagatattatttattttgatgaattttttggatcctcttaaattttgagccccaggttggtgtgttactggtccaagttctattcctcaaaagataaatgtctttatgaaaaattacagtgacatctcagttaactcgattaatagggaaatggtttgttcagatgatacactttctttttagcagtgtcttcatctgctgagctgtcaagttacctgtgagaagtggatcttaagaactactccccatccaattgctaaagggatctttatccatagaacacttgttcaggtgttcaagttttatggattgatctctcagccttatacttgaaaaaatattttcctaaccacacaattttaatctagtaaccagatgtgccagtgcttttgaaaaatactgcattaaaaaaagcacagagcacttccagtttcagcgccaacatgtaaagagcttgggaatcatcactctcatcctcacaataagagacaatctgaacgaactgaaaatcaaaggctttcttgaacccatcagagaatcaaggtcctagggctaactgccagcctaaaatctggagatatgggccaatctgggggaccacagccaagaccagtttgcccagagcagcagccactgcaggcattaaactggcaggcacactctagtggtaatgtgaagacttgctggaggctgggtatgggcgagattggtggtgaggggctcccagggctgcagtccagggagaccttcatcctttaatggattttaagtgaaagaacccagcatattctcatggtgggagctgaaaaaaatcacctctggctatggcataaagaggagaacaccagctgctgagaagtgggcccagtgttttctctgtgatgaacagttactctcaagtcactaagaattcacca

SEQ ID NO: 24653 - DNA, 1468 bp, Bovine  19866881238315
  misc_feature (1)..(1): n is a, c, g, or t
naatatctaattgaaaactcaggcacgccccactgccttcccactctttaaaaaaaaaaaaaatctgtggaaagttttcactgagagaagttttcagtttgattttatttttaaatgatggtcatttaatctcttaagcatttgtcataaattaatcaattaacacctgtgtattatttctaatgtatctagtagtactctgagctactatgtgtgtgtgtgtatatatatatattttttttttttttcttttcacatgaatgtcacagtcttgttggagaggagaaactgaaaccatatgatacagttagaggactagttaggactgctgctgctgctgctaagtcgcttcagttgtgtccgattctgtgcgaccccagggacggcaggcccactaggttcctctgtccctgggattctccaggcaagaatactagagtgggttgccatttccttctccatacacgtcaaatcatcaaagaaggagggatcactgtgggaaggagtgatctgggaagaatttggggtctttcgtcatgcaattattcctcatgcctaagaaaatgaaaaatatctaagtactttcctgctctcagcccatcttcaacctgaaaaataccagatccaaatctcttccccaagtttcactccttgtctcctgctagatttttctttttttttaatctttgctaaaatgttgaaggccaaataagagcaagaaaatcctgcctgtggatcagacactgggaacctctcagaaggcagtcagctcaagctcatcatctcacagggggattcctgagtacaggctcgcattccacacccccctacccgatcctcccttggcgaccttccactccaacatcatcttttgtgcagagaacaaggcaagtttctcatcacccattaatcctgctctcagccaggtgtgtagatgagcccccaggacgaggctgtcagagggcttcctgcccaggcttctcatgggtgggacactggcagagtccctgatacaacctgatggcactcgaggcagacgactataggcttcaaaattgtggtcttgtctgaacagtcacctcatcaaaaacatgacagcaggaaaagacatcccctacttctctcctttgatgttcagtcactcagtcgtgtccaactctgcaaccccaagggctgcagcacacccggcttccccgtccttcaccatctcccagagtttactcaaaatcatgtccatcgagttggtgatgccatccaaccatctcatcctctgtcgtccacttctcctgccttcaatatttcccagcatcagggtcttttccagtgagtcagtttttctcatcacgtggccaaagtattggagtttcagcttctctcctcctctcctggtctatttttattttcgcagactttagtgatcactattgaggaaaggagtaatcttgggaattactaaagcaacatgttg

SEQ ID NO: 24654 - DNA, 1093 bp, Bovine  19866881286353
  misc_feature (1)..(1): n is a, c, g, or t
naaggggcaagcgagctcccttttgaaaagtgtcttttttcaaagggcactgatttctgttcacagggctccaccttcaaagacctcattcgcccccaaaggccacctccttaatactccatattggaggattagaatttcaacatgggaatcgggggacgcagtcaggctataacaggcatttttaagatgaaaatgaaacaatgagaggtgtgtaaaatcccaaggtcgtggtccaggagagaatatcaccagcttctccgtgaccttcttacccttacccctccctttttggaagctggttgctgggaggtggcccttgctctgaaaggatgaactggtgcaagtgaaggtgagacatgaggtctgagggcagaggaagtgggttttctcttaagctagtgacaacccctgttcatgatggaatggtgggctgtgcctgtggccctcatccagctcctcgccagggacaaagtaacccaaaaggagacaaatatctctgggccacccaggccagccctctgtcagcagcagcactacctggaggaaagacactttgcacacgcactttgcacacacaggccttgatattgaatgaacttgcatctttgttttgttccgtgcacttacccttgatttagtgcatatttaaatcgactccactgtgttcctggatattccttgcatgtgtgtggcattttaatcccattattctctcttggcagaatggtccttgtgattgcctgtgacaggtagttcttaacatcccaaggatggcaagaatgggcatagccgtcaaataatcatagagtgtctttgaacaaaatgcttacaaaataaacaaatccaaacatcaaagcagtgggaagatgaaacagtaaatgaaatgagagtgcattagaagagaacttcagagtgttagtttgtacttagctttcatgaaaatgagaattattaccaacgtcctgagtgagacgctttgcactgttttggcaacattacttagtctcaatccacagctactaaatcactcttggctggttttgagtgaagcaaaactgctctgtaccatcctgaacaattttgaagtaat

SEQ ID NO: 24655 - DNA, 2895 bp, Bovine  19866880364739
  misc_feature (1)..(1): n is a, c, g, or t
nagataccaagggaacatttcatgcaaagatgggcacaataaaggacagaaatggtagggacctaacagaagcaaaagctattaacaagaggtggcaagaatacacataagaatatacaaaaaagatcttcatgacccagataatcacgatggtgtgatcactcagctagagccagacatcctggaattgaagtcaagtagaccttaggaagcatcattacaaacaaagctagtggaggtgatggaattccaattgagctatttcaaatcctaaaagatgatgctgtgaaagtgctgcactcagtatgtcagcaaatttggaaaactcagcagtggccacaggactggaaaaggtcagttttcatttcaatcccaaagaaaggcaatgccaaagaatgttcaaactaccacacagttgcactcatctcacatgctagcaaagtaatgctcaaaattctccaagccaggcttcagcagtatgtgaactgtgaaatttcaaatgttcaagctggatttagaaaaggcagaggaaccagaggtcaaatcaccaacatccattggatcatcaaaaaagctagagagttccagaaaaacatctacttctgctttattgactatgccaaagcctttgactgtgtggatcaaacaaactgtggaaaattcttaaagaggtgggaataccagacaacctgcctcctgagaaatctgtatgcaggtcaagaagcaacaattagaactgtacatggaacaacagactggtttcaagtcaggaaaggagtacgtcaagtctgtatatcgtcaccctgcttatttaacttatacgcagagtacatcatgagaaacgctgggcttggatgaagcacaagctggaatcaagattgctgggagaaatatcaataacctcagatatgcaaatgacaccacccttatggcagaaagcaaagaagaactaaagaggctcttgatgaaagtaaaagaggagagtgaaaaagttggcttaaaattgaacattcagaaaactaagatcatggcatctggtcccatcacttcatggctaatagggaaatgatggaaacagtgacagactatttttggactccaaattcactgcagataatgactgcagccatgaaattaaaagatgcttgctccttggaagaagagttatgaccaacctagacagcatattaaaaagcagagacattactttgccaacaaaggtccgtctagtcaaagctatagtttttccagtagtcatgtatggatgtgagagctgaactagaaagaaaactgaacaccgaagaattgatatttttgaactgcggtgttggagaagactcttgagagtcccttggactgcaagaagatccaaccagtccatcctaaaggaaatcagccctgaatattcattggaaggactgatgctgaagctgaaactccaatactttagccacctaatgagaagaactgactcttttgaaaagaccctgatgctgggaaggattgaaggcaggaggagaaggggatgatagaggatatgatggttggatggcatcaccaactcaatggacatgagtttgagcaagctctgggtttggtaatggacagggtggcctggtgtactgcagtccatggggtcacaaagagtcagagatgactgagcgactgaactgaaccaaaacctatgctccaaatcctcttgcctttttcctctcttgaagcaactgtctatacacagtcaagtctccatgacaaccttagctgttcttttagaggacagggggacagtccagaggttaagtccatggggtttggcatcatgtctaggtttaaattcaggctccatcatggatgtggccctggggcaaattgttttacttctctgatctttctgtggtttctcaatctctaaaatggggataataacatcttatggagttgctattaaaatttttaaatgatgtgcacaatatcttagcatggtgcctaagacattgagagtcagcacatttttcttgaatcattactctgatctagctcagtaagctgtcaaggagacaaattatagtactttgaagttgctttaaggtgtagggaattattctgatggcttccatttgccacagggaaatttatctggaggtaaagaagctgttcaaaatactttctcaagagacctgaaatattcaggttgtcccaattttttttcctatgtcttaagtctagtgcaaacaaaatcgcatactattaaatatttagtatttaatatagccaacaaattaattttaggcctaattttgtgatattgcagtatggtattatatttgtgtgtgtgtatacatatatagatagatagtgtttaatgaatgtgcatggtgatttatgagattgtaaagagctttaaccacaattttgagcaatttacctcatagtagaattttttagtgttgtatcttcacatttacagcatatgaaggaaaacgtgttagatgctgagttgtgtctgactctttgcgaccacatggactgtagcctgccaggctcctgtctccatgggattctccaggcaagaatactggagtgggttgcattcccttctccaagggatcttccctattcaggggtcaaaccccaggctcccgcattgcaggcagattcttgatggctgagtccttatggtttatttaacaccaatatcttggtgaagaatacagcctccaagggtaacattagtctttaaatgatctactttttgacctgcactataggaaagagcagggacaacctgtgtattttactacttcctccatcaaaaccacaactaccaccagtacccaacaattactgaatctccaacctattgtacttcttaagcataacagttacgggaaaaaa

SEQ ID NO: 24656 - DNA, 1520 bp, Bovine  19866880549330
  misc_feature (1)..(1): n is a, c, g, or t
ntcctcagctaaatgcatatttgacatagtcaggaacttaaataggcagttgttccactactgaaaattgtctgagtggaatgcctgagcactggcggtagtctaaaaagaaaataagagacatctgtcggggtccttcaagcagttcagctttctaatcagaccatctgaattccttagtgaaagataagaaaaaatcctgctacccattaggacagtcactcaatggtgataaagcagatgtttaaacaaggtacacatactatgtctgtcagtctgtcatttagtgaagcggtggagcgcactggagagggggttaaggaacagatgagggagaggaagcaaagaatcctgctagacctgagtctgtgagccatagaagcaatggcttaaaataacaatgtggcaacctaagacactgttgcaggtctgaaagagaagctgcaatttgctaattttgaaagactaggttagtgctagtgaaccatgattgatagagacaacataatttgcaccccctgtctctcacatgcataatttctgtgagcgctaggagcatttggccaggatatataagtttttgtggtgcatatcaagagaataattttcctaaggagctatttttatttgtttgtttggctgtgatgtaatggaaagtatgtgttttatgtttggtactgggtaaatcatttggtctctctgaagcctgattgcttcatctgtaaactgattacagtaatgctttgaagagttgttataagaactagaaattatgtatgtaaaatgcatgatagatatagctgtcatcagttttgatgggggtttctcctggttagttgctgaggttgttgttgatgacttatcttgtgattactgtgggactccagagggagcattcttcatgaaaatttaataggaatatcggaaagccctaaaatggattcaactcaatgtctttggactaagagattgtaactacagtgccactggagtgtctactaaggaatatttgcatttagggatatctaagcaacttgggggacagccttcacagttctttttatcagagggatgctctgtgaggacttaacatacagactcatatgtgtgtacacatgaatgttttataaattgagtgtacatgaggagggagctacacctggctttgagcaggtatttgctccatgcaaactacttgcttctttatgggagaatataaatcttaaataaagtaacagggaaacttttagatatattgttaatattcaaaatcagggcttcaaaatctgcttatagggtaaccctagagaatccatggatggagatggacttgaaagggtccttggaacccatgaacactatatgtgaaattttttatgtgcattttccttggctgaattttcatagtttctattttcaggaagatctctgatcataagaaagtaaagaatttctgtttattgtatcaaataagataagataaagaaaactgatcttaaaagcttttgaatatctgctat

SEQ ID NO: 24657 - DNA, 1320 bp, Bovine  19866880585233
  misc_feature (1)..(1): n is a, c, g, or t
naaccatctcttcctgaattacttggcaaaaaaggatattatggctatggatatgcatgacaattaagtggaacatggaagaagggcctccaattaaaattgacctcacttcaacatgagaggaagatgaaatgatagctagcaatgtttaaaggatgtaaagacgactttcaataatgaataaaatgttaaattttattatggagaagaatgttatgtatgttatacaatccaaaaggaattctcattcaaaataactgaaaaaaagtctaggatgtttataacaataagccttttaagataaatggaaaattcacatatctagagcctgacttctaaagagctcagacttcattgtatataatatgttaggaaattttgtttatttataatttaacccacttgagtcaaaatcacaaggaagtttaaggaatctgagtaacatttaaaacgaccacttcagtagattaaaagttgagcgtatcatcacactgtttctttgatatgatcactcctcctccccatgatattaaataagaggagggggtgaactctaacctaaactctaacctgcaatcatgtttccaaggaaagagaagcgagatgggaaaaacaaaaacaaaaatcaccaactcatttagaaactcatgaaaggcagagtagagtttgcacatatcagaccgatttgcctcggcgtgtgaatcatttaacaagaaaaaacacggactgactcagcttgagtgagctctttctgtctctgctgaggtcctcccttagtgtggcccctgtcgctctcttcagaacttgttccgcttctccttgctcactggagagaaacaggaagtgttgtttattaataagcctgaccagggtcacacccaaggcaatatcagggctttacctctcctgggcttggggagaggttcaaagatcaaggatatgctcctggttagaatgagaggcaaggccagactccaaaaaataaactcacaactgggacttgacataagtccctacagtgacttagagtcactctgcctgtgtgacagctcaccggttcctcccaaccctctggtgacactgtatcccttctaacagagagatggctggtgccttgacagagaagcagcttgcctaagaccatggtgggaacagcacttggatctagactttctgactcctacggttgtgtcatcttccattgatcactactccttgggagacctttacaacacagaggaaagctgcccagcatggggtatcctagctcgcttgtcatgagctgttcttttcccttggctttttcagttgtacctcata

SEQ ID NO: 24658 - DNA, 1834 bp, Bovine  19866880617514
  misc_feature (1)..(1): n is a, c, g, or t
ntaagcttcaaacaatattgtgaacctttgtgagtgcaagattatggctagtaaccttctgggtagatacatattttatcactcagatttaacggtaacacaggaaatatcttaatgcccctctgaaggtgattttgagaatcttggatttaggtttttgctcccaccttgctggttctttgatggtggatcagagaagaagatgcccacaatacaaacgctgtctcaaacacctgcgtccctctttgcatatatgttttctcatcatttctggcctctgaggatttccctggcttttttgcatattcagaaatgcattgtgtgtgtttgttcagtcgtgtcccactctttgcaacccgaaggactgtagcctgccaggctcctctgtccgtgggatttcccaggcaagaatactgcagtgggttgccatttccttctccagggtatcttcccaacccagggattgaacccacgtctcttgagtctgctgcattggcagtcaggttctttacccctagcaccacctaacgcaaaaatgcattagttaaaaaatatatatatatataagcctgtgtgcaggtgcacatgtgtgactgtgtctgtgtctgtgagatactctacatagagaggatttctttggacactgacacctagaacactgtatcgtcaggtctagtactgccaaaaatccaggttttaatcttatttaatctttacgataatacaatgagatagtgcttatgtgcccctttgttataaatgtagaaaagagaagcaacatgagcaggctaaccttctacgtcaatacagcaagtcagtggcagaactgagattaaaaactgtatctgccagaccaccaaaattcatgttctttcctttttgctgccctggattttatcctgtgccttgacatagcattatattagaatgttaggtccattatggaaggagctataggttcgatccctgggtcgggaagatctggagaagggctacagtacaaacagtctcaaagaatcggacataactgagcgactaagcacataaaattcataatgatgatttttgaggctgtgtaactttctaatgaggggattgaattgggacagtgcattttaaacttatactaagatattgtactatctgtcctcaaagtgcaaaaatgatcagaaactggccagttattttcttttctttaccacctctgtcctatattgcttgagtccctttaagtgttttttcctttgctttattttcttttcttttcccagcaagtcacatcacaacatctgtgcattgtgactctccaccttgggctggtgggctccctgctcttggttttgagggctctggaggtggtttccctttcatctcctgcactattctttgtagagattagtcacaaaagcaacgtgatcccaggcattccttctgctgtgcagctgaccgtgaagcaaagtaaaagggcaaactatgtataagtcaaaatggttacaggtgcagaggacagataagagtttagctttgtccaggctggacacagaattgagcttcacaggctccttttaaatttaagatgttaatacagacaaaaaacgatacctaagtgtttatattaaaggaacagattgctaattagtcacaggtttgggttttttttttttttttgcctccgttttcacttcctttcttggttcccttgcaagcgcatattaattcttttttatttctgtaacaaaagcccccagatatgtatctatgctcccagcactttgcaagcacagagtgtatgcaaaggaataagacagggaatccaccatggaaaacgggaggg

SEQ ID NO: 24659 - DNA, 1356 bp, Bovine  19866880638832
  misc_feature (1)..(1): n is a, c, g, or t
ntcctctgtcctccccttctcctcctgccttcatctttcccagcatcagggtcctttcaaatgaatcagttcttcgcatcaggtggccaaagtattggagtttcaggttcagcatcagtccttccaatgaatattcaggactgatttcctttaggatggactggtttgaaaagtctaagtacatagtagcattcaataattttttgttgaatgaatgattaatgtggatattataccaacaaataacctaaggcttcataatcataatgcagacctgatagccctgcacaattggtcagggaggaagctaaaactgaaagaaacaggctgaattaaaacccctatataaagagtgttataatagtattacaatgacagcctattaataggaatagcataaaaactctattgtaaatagattttcaaagcatgtatacatgtcgtaagaaaggcaacacattacccaaccataaatactataattcaatggattaggggagtttaaacatatcatttaacatcaatccttatatgcttatgcaacaaaagagacttcagagactcttgctgaaacataagggctttttgagaagttcaatcatacctcttttctattctttaacatgataaggtcaaagtgaatatcatagtaaaattctttaatcttactactgggtctgagtacttgtgggacaacatatggaagacactcaaaaacagtgtgggtggagcttgagagcggtgcttccagcagcagcctctgagtatagaaggaaaggtagggcttaccctgaatgcacagtggaacggaaaaacaggttcccatatctgtaaatttaatgagttcccatctataaatacacttgtatgccatacctttgtgcactttctgctttttaaaagacttgaattattatttttcactgagtattgcaattattaatttataagtccttaaaggcaggaaatgtctgattttatatatatatatatatgtgtgtgtatgtacatatatatattatatttctagagcctagatcagtgcctgacacattatagattcttagtaaatatttgttggatgaatgaatgcatgcatttgtaaatgagtgcttcagtccctagacagttggcagaagaaagggtttgggagaggaaataggaaagagaatttctgaaatccagagtcagtccatttatttcatgtcttcttccgcctaccaggcctggcaatgagagagccaagcagtgatctcacctgcagaacctgctgggctagtccagtcagcaagtgaggagagtccaaccactcatgtcaaacacagtaaactggctcatagataccagaagtacagt

SEQ ID NO: 24660 - DNA, 1136 bp, Bovine  19866880700902
  misc_feature (1)..(1): n is a, c, g, or t
nattggaatgaaaactgaccttttccgtcctatggccctgctgagttttaggaaagaaaacccaaaagcattaaattgtatcactgcaacttagtacacttatcaggctcagaggtagtgttaaagatgaagaactattgttctcttacaggtactttataagaagcaagataaatctgacaagtcaagcagagaaatggagatgtattggaaagaatttcagcttttgagatttgagttcaaactaagttttgcccctgatgtgctatgggacttcaagtctcaacttctctacacttctttgtcacctcatctgtaaattagaagaggaggcctacatcataagttatgtgtctttaccccagagcatggtgtacagtaactaacacatttgatagagcaattatgtaaggcaattgtacaaggtatattaagtatccagcgcatagtaggaacagaataaatggttgctgctatctttattatgtatcatttactacagtttactgatattgaatgtcagcaatgtttttgtgaggcagtgagtaaagttcttcaaagggtcaaaccatgcacacaaaggaaaaaatgagaggaaagatcaggtcaaaatcaatcgctttgtgtgtatattgctataagctaattgtttaactcacggttttaccccacttaatattttctccaccacaggatcagactgttaatacacttaatgaggcaaagaagaataacagtatatctgagcaattaaagcccatttgttcagatagcaataaaacctacaatagtctcctttctgcctggaagaacaactttatagtttattgaacaagggagattgtgattcagctctatctcttctcctcaaaagtctctgcactttactaccctcatctaattctctgaaaagattttttattaaatgggaaggactacaaatcaatattatcaggacatatcaaggctcagtacattctccaagcataagtgctatttgctacagcagtctcaatgaaacaaactttcctctatgctcttcaccaaatttttgctcttcatcaaaaattcttttgtctttctaaatatgaacaaatagggtagaatccagggaccgcctttttttctttttttta

SEQ ID NO: 24661 - DNA, 1491 bp, Bovine  19866880738828
  misc_feature (1)..(1): n is a, c, g, or t
nttggaaacatgcacatattctatatatttttttttgccggacaaatttagcatcttaatgtaataataaaagctatcatttgggaaatatacatattgcttctcccagagtgcacagaggtgttggtaggcactaagaaaggaacagagagatgtgccctgaggaagtctccatcctgtctccatgcacataggacttctacacatatgagcaagttgtggaagaagagcatggtggagggggcatgggatgttactggcatcttataagatttatgaactgctaaatttagagatgtcattttgctattgcctgtgtactgctggcatctttgtatgagtcactaagaaaaaaatagcaatcacctcctttgcaagaactagtatgagtaacacaaaatggtttcaattaatcattttaaccactgaattcactctggataaacaaagtgtgtatcagatgatatgccccagaaaggtagtcatccttacaaaatgctactctctgcagctatgctcttctcatcgtattgcaaatagttttctgaaagaaaaaactgttcaagcaaaatattaaacagcattcatttatcattttcctgtggggactaggcagcaacctgctgtggctgaaaatatgtggtcattacgaacctggtattgaattgtttgtttatctctagaaggagagagaggtttcaatgatgctactttttcattggtaactttaggcacttctgctttctagaggcatagcccctgtccagaactgaaattaactgatatgtgtgtaaacattctctgtgtgttttaatgttcatataattttctgtgtcacagctgttttcaacctgaggagtgatgatgagtttcattttcttcttagtgtgtggtgttttttatcacagtgtgctgggatgcttgttttctggagacctaaacatgtgctataaacgaacaggatgggatgtctaacatgctttgcttactgaagatagtaagacttcagctagtgcatcagagagagagagagttcaatatggtttgttgtctttttcatcatgctgcaggaagagggagacttttttaaatccagaagaatctgggttcaatttctcttctttctcccctctctttccttccatattcttcttcttcttattctttgctgtatggatactgtgctacttgctaagtcacttcagttgtgtctgactctttgcaaccctgtggacaatagcccgccaagctcctctgtccatggaattctccaggcaagaatactggattgggttgtcacgcccttctccagaggatcttccccatccagggatcggacccgcaactcatgtctcctgcattgacaggtgggttctttacctctagcgccacctggggaagtctcattgacattgtatcacagaataaaaaagtaaaccgagacggtaacaatatgcacccatctactcaaatctctgtgtagaacctatt

SEQ ID NO: 24662 - DNA, 2195 bp, Bovine  19866880806327
  misc_feature (1)..(1): n is a, c, g, or t
natgatgaacatagataagtgtaaaaatttttataaattcaaatttctgtgactctgggtattttcagatttacttggaatgtaaaattttattcagaaaatattggataagttctaaagtaggaacaagatctctccagttttgaggttacaaatataacagttttaagtgtagtaagttgattattttgttctaggaggaaaaaagttattttaatgccttgcttttcttttgccatctcattgcctttaccatcttgaaaatgtttggaagaaacatactatttaggaaagcattccttttgagcagtatatgctgagttccccagaagggaaagcatttaattattttgatcagatcaacaatttttatcttatcaatgatgtctttgtcatttttctggtcataaacccatcttctcaatatagtaagaaaatagtcgaacatttattatcttattaggaattctctctctgaacttgtgtaaatatatgactacataaagtcagtgctggagagtgctgctgctgctgctgctgctaagtcgcttcagttgtgtccgactctgtgcgaccccatagacttcagcccaccaggctccgttgtccctgggattctccaggcaagaacactggagtgagttgccatttccttctccaatacatgaaagtgaaaagtatgctacctaacattatattgtctttgttattattactcctaaactactcctagactactactgtagttatagaaaagaacaataggcttagattttttctcttttctctttaacatattaaaaacctccaggacttccatggtgatctagtggttaagaatccacctgccaatgcagaggacatgggttcaattccttgtctgggaagagcctatttgcctctaggaaactaagcccataagccccaactgtgctctagatccttcgagctgcatctactgaagcccatgtgccctagagcccatgctccacaacagtggagccactgaaatgagaagactgcacactgcaactaaagagtagtcctcattcactgcagctaggaaaaggcccacctgtagcacgcaaagacgcctgtgtacctcagaaagacccagtgcagccagagataactaggcaaacaaacaaacaaacaaacaaaaaacacaaaaacctccagcaccatataattttaaataaacaggtgattcaatagtcagtagcactaaagatatctgctcctaaactgactagtctggagctatatgaagtcaattccatctggaattcaatcacactttttcaaatggttaatcaccagatgcttatgaaagagaatgttgtcaaggctggtaggtctgaaattagctgtacagctgcattttggctatagacaaactctataacaagattagagtgtatggaggcaaagatagctatgactcttctactctttttttatactccagtaataaaagtgctatattaataaaaaaaagtatctaagtttataagaagcagtatctatcacttcctgaactccaaattaaacttgaatataatcagcatgtacctagacctgaacaatggggcttctctggtggctcagaaggtaaagaatccacctgcagtgcaggagacacaggtttgatccatggatcaggaagatcctctggagaaggaaatggcagcccactctagtattcttgactggaaaattccatacagaggagcctagtgggctacagtccatggggttgcaaagagtcagacaggactgaacaattaacactttcagacctgagcaataattaacacaatgtctttgagattttatagctggcatatgcagatttctgaattttattcatatgactgatacatttcttctgatcaggataataggttttgttttttttaattatgttttgttttgtttataattcacaggcaaggtcctaaacattttgaaagctaatagaggagggggagatggttgaaatggcctgctatagaatgcttttgaatgcctggaatttaaaagttagtatcagctatgatttttgattgaggactagttacttgaagatatctgaaatttatggatctcttaaatgatgattactctattatcaataatatctctgtttatttatttatttatttattcatttatttatttcttaccaccctctc

SEQ ID NO: 24663 - DNA, 997 bp, Bovine  19866880823708
  misc_feature (1)..(1): n is a, c, g, or t
ntatatcatctgtcaatgccttccagatctaaagggtctgtcattttaggtataggctcattgacagcaggaaatttacacttttcacgttgtactcattcccaagctagtgcagtactttgtgtatcctaggaccttgcatgataaaggaatcaaagttttgatcagttagccagagacttcgatttgagttccagccatgtttccatagagtcctgtgactacagacaaattattcacttaatctgtttacttgtaagataatgctcttgaaggtgcttacatctgtgagggggaatggttaaggtacagactatattatttatatgccaatatgagaaggtatgtcttggatattttcctttgtttagcctcttattttgtcaaaggatatctctaaaggagatttactcaggtatcaaatctccactatttatcttcagtgagaaatcttctactgagtggaagtgaaattctgtgtgtaaattatgtttacttagaaaggctttacctcttttcttttttccttgctgttttctccttgtctctctatgatgcactcagggggcttgcattaagcttatgatgcctggcatgattgattgtgtttccagtggctggacactttgctgggagccgtggttatatcttggaaaatcacactaatcgaatttgaagacaccgatgtgcattctcaagtaagagcctggctcttggggctttcatctaggtcaggccttataaattaagtgatgatttttttccttaagtcagtaaataaaattcatcagtggcctcacattgccttcacacttctgcagctcagtcaacctatgagtcaagcagcatttttattttctataaagctaatgttttgtggtagttggcaatccatttattaaaggaagaagatgggaacacagggtaatttgaaaacaatttctgagatcaccaaaacactagagaaaaaggtctttaaatatatgtctcagaaatt

SEQ ID NO: 24664 - DNA, 1413 bp, Bovine  19866880861362
  misc_feature (1)..(1): n is a, c, g, or t
nataatgctctcaggaagccactcttccctctgccccctcccccccacccacctcccgcccagctcagtttctcttttgtattgacctttctcctcagagaggcaaagatggcttctggtggtctaggccaacaacagttctggctactgacagtcctagacgaagagagaccctctttctgatggcacccacacaagtcccagggaagactcccattggttcagctgacatatgcccatctgtgaacccgcccctttcacagggaatggaagtctctgattggccaggcctgggagacttacccatccccggagcttgaggtcagagtcgtgccttctgaaccagaggcactgagaataggtgaggggtgtttccccatgggacattgtggagccgtttccagataaagaggcatagatgcgaccaggaacaatgacaggaaacagccaggggcaactggcttcagtgagggccatgactgctcctgacatccaggagccaaaatgctgtactccccgatccttgtggggagtggggcttgctgtgtgtgacaggggctgggggcggggtgctacccgaccaatacgcacatagtcagggcctgacttgtgaaatgtttccctcttcagaagtagcatctctgtaagtcagatcctcctatgaggtatcccaccagcttctgtctttggcttcccatttaggtttcagagttgtgaataatcaatcgtcactatttgcagattctgtatttgtgaagttatctactgggtaaagtttatttgtgaccctaaaatcaatacttatggcacttttgcagccatccatggatatgtgcagagcagcgacaaatttgccatatgcacatgttcccaactgagactgaatgaggtgaccctctgccttcttccagttctcttaccataagatgtcttttttgtgatctatttagttccactttttttttttccattttgtgctttttgtttatgatttttctgtttaaagaggcccccaaacatagtgctgtagtactgtccaggatcctaactgtgtgaagcctgtgatgtgctttacagggaaacacaagttaggcaagctttgttcaggcatgagttataatgccagtggccatggattcaatgttaacaaataagcagtatgtgttagataaggcatctttaaacagaatcagacagaaaacgaagtactgattggctgatgaaaatgttgtgaccagaggctcacaggagcttaaccccatgttttccctatggccagtcattcattgagtgtttgagatgactttgtaaagcataactaccatgaacattgagaaaaagtgaaagtgttagttgctcagtcgtgtccaactcttttcgaccccatggactgtaccccaccaggctcctctg

SEQ ID NO: 24665 - DNA, 1846 bp, Bovine  19866880875966
  misc_feature (1)..(1): n is a, c, g, or t
ntggttttgccagctgccagacagacaagcctattggcttggtttaaatccaggtctcttacagactcatggcctagagagctatcattatttctactctaaaattactctggagataattttagtcttattcaattactccttgactctcatgttaaggaaagtactttgggaaaagcatatttagaatattcttgaatccttagcttcttaaaacttagggaatttttataaaataatttgaaaattcaaaatgttacagctgtgtgtgcattttataaagattcactaagccacacaattgatttacatacttttatatttacattattttatatatataaccaactttaacaaaatatttatttaaaacactaaatattaaatatatgtagattcttacttagagaatcaaaacactgaaaaaatactacatcaaaaattgaaactaatagaaatatgtgtctattttaattctttcttttttaaaaatctattgtcaatctctatttccttgtattacattaaatcaatagcatgaataaacttctgaatatgccccaatttttttcaaaagggatttagctcctctttctttgaatgcttttttgactttctaggtttcttcttagcctctacttcagcctagtaaaaaggtttggggtacaatttatagatcccttcataaatatagtcaacttttcctattaaaatgaggaaaagaaaccaaaagcttggtattgtgacaaatcatattttattctctatacggactatatgcatttaattgccatttaaaagcagagatccttaaattttataactcaacattctacattatttaaggataatacatagattttttctcagtacattccaaaatcaatttgtcaggatgggggaaaatgccatgtgacacacacactgaaagactatacatgactccactaggggagtaatatttaaaataattattgtctgctgctatgtaagtgtatctcagtgagagactaaatgattggccatgtgaaagggctgacgagaggactattgcatttagaagttagttttaacagactggcaatgtttaaagttgtgaaaagatagagtttaaggactgaatttaaaaagggctgaattcatctgactataccatggcaatagcatgaacgtgtaaccttttattcagccaatagctaagctcccattgcatgagctagacattccaagacaaagcagaaagagatgtgttaaagattagacttgcaaatttcagaatacatagtgtcagtctagtgatgttaaaacatccatttagaataactcacagagtaactgtagcatattacaaagtggaatcatgaatatgcaatcagcaaatggttctggagcttgatcaccatctctgtcaattacagcagtcactttctgtgatggtaccttggcactttgacagtgattatacctttacatgatgtattgcagatattatgcttcggttgtttacaaatagaaccatatcttactctttcactgtaagaatagtattttaaataaggaaaatattcctcataataaatcttccacttaagtcactcatgcataatcatattgggaatatcttaaatgtcactaccacacaacaaaagcaactccctaaaatccttctttatattggtcttaaaagtgaagtaatgtggaggtttttcaatttaaatgaaaagaaactgcataaaagatcaatttacaacacagtgcccattactctaaaggtgtaggttaataaaagagaaatccatttttaaatatgaagcaagttttaagagagagatacaagcatcaatca

SEQ ID NO: 24666 - DNA, 1369 bp, Bovine  19866880877454
  misc_feature (1)..(1): n is a, c, g, or t
ntttgtgttcctggggattatttgatttttatcaaagcaaatttgaattggaaacatggcatgtattaagtcattggtacttattgtctaattctttttcccatagaagtttctatgcactgaaagagcactaagtcatcagttagacataccatgtatgatccttatcatatccagacaaaataaaagccttttaagaagctacttcacaagacaactgcatagctttcctcacaggaacttgttaaacaaataacgattattaaagctattgggtcaatcgcttacaccagtttaacaagaacaattccaagatgtctagcctattccacattccatgtgactaactatggtatccagagcttggaaactatccaggcaactcacagtagcttttcttaaatgctttgtagacactggattttaaggaaagtagtaaaattaggtttacagaggagagtcttcaaggcatacccactgtcaatgctataaatggtctcaactgtatcaaaaagttgtttaaaagcacccaaagctgaaaacgttgcagatttagctcctatctatatcagagttggcaagtgcctaaatcctaattgctgatgtggaggtttattgtatccagtgagatgagtacatgggagttttgcacaagcctctaatagagagggtactgtgagttggaatgactagcttttaaaaatgtgccacattaaccccttgcttatttttacagtcatgccacaatcagggtagaaatagaagaaggaagatttagagtggaaagacaacagatgagaaagacaggaaatcaatccttgtctaaggaggatttgggcagctttggggtctttctgtatttgaactctaaaatagtaggaacagcagttattgtaataacatgtaagaggtcaggttcagaaatagtaagcaagaggaccaattgatactctaggtcccttttcttgaaaacagagtctggaacacaaaactttgaagctaaattaaatgcccaagataagagactttagaatactggtgtcagtgttctaaatccaggcaaaaaaatctgggtcacagaacctaggacaccagcactaataggcaacacagtcaaatgtttctacatttccctcttagagtccaaacttatgaagattttgaaagatctgagcccaaagttttcttttttcatttaattcatatttgttagacacttattacatattaggcactgtatgagcagcagagactattactgaactaggcagacatgctatctctttttaaaggagacacacaataaatcaggaaatgtagaaatggacaaatgactctagaagaaaataaagggcatgataagtttgag

SEQ ID NO: 24667 - DNA, 1312 bp, Bovine  19866880909093
  misc_feature (1)..(1): n is a, c, g, or t
ncaggattctgcaaagtaaaaagatataagcaatgtctcccagccaaaagcaggcaggtaactaccagacaggtcttggtgttgccagaaactggcctagaactcacagcaagctgatggtgttgttctgttgaacagaagcaatttcacagaacatcaatataagacaaggctactctgaccatgatagattaagccaaaaataaggccactttgtagactttacatagaaaagaccatacatcttctatcctaattaatatgggtccctattattggatttttttcttctttaccaagctttagtctcatttcattccttctaccttctcaataaaagtaagatacccaatcataatgttgacaacagaacaaaagcaaggcaaaaaaaattgatattggatcagagaaatgaaaataaggcaacaaaagtagtgtactatcactacctctattattaacattactaataattacaacataagcttagagttaatattcactaagtttttggtctggattatgaaagaccttgtgctaaacaatttacctacattatttcttcaatgtgcacaatttattaaatttacagttatactcattttgcagagtagagaaaaagtgagacttgtcaaagtaattatcacagatcactaagctaataattaaacattgaaaccaagatccaaaatctacatgccaagattttattccctcagctgatagcagtgagtagggctgatatttttgaagtgattgcgtctaaccaaaagatagatgccttttgaaatttgtctgaccagaggatgtgcttattacaaatgttcaaaaggtaagtgtgtgccaactatgaatcttcttaatacaggaaaaatccatgccagtcttggcttaagcctccattctttgaaaaatttccatgaagttaggataatttttatttctattaactctcagttccaagtgcatctgccagttcttatatgccaagtaccaactaaaaggttattatgtatcagccaaattatcattttgttccatcactcactaagctcccactgccttatcgaaagttggaaatattggtactcaagttctactggataatcggggttattatttgtccctatgatcttactttgacaaggaagatgacgctatttaataaaatattttccagatcacttttggaaattcaaataatctgcttggtagtttgtactaactaaaaaacaaagatcacaatccagtcatgcttgttagcaaaagcacttatcaattacacattttccaacttaaacttcacgtaatt

SEQ ID NO: 24668 - DNA, 1362 bp, Bovine  19866880968530
  misc_feature (1)..(1): n is a, c, g, or t
ntgacatcaccctgctcgattctagtccatccagatgctcacaaactatcagattgtatctggggtgtgggcagtgcttatgggttgaaaaggagatcatggccagcattggagaaagcaagctgggagaagcttgatgaagtcaaccaattagtcagaatatagatggtaggattgctcatatatattggtcatatatatatatatatatatatatatatatatatatatatatatattccttgttcattccaagtaatcaactcctaaatatccctgagttagtccagtctaggccaaagtaaatagaaggctgtgacagttggtgtgcatgatcaccccctttggagctgggtatctaatatcattaaaaaccacatctcatgtaatacagagatatacactttataaatgaataaaacatcaaactcttttgctgtctgattcaatgttgttatcatttctgtcaagtagacaggccatgctgattatgtagatgtggaaactgaaatacaagaggttccctgaattcaattctggcaccagataatccttggtgctggaaccagtccctaggtttttgaggtcaactcggcatattttctatgatttctcatcgcccgtagaactggctttgctttctctgacttttcttagtcacttctgtggttttataccattccctccttgtcattaaataactctcaaggcaaggcagaaattctcatgacaacagaaaacaatgtactagaaaggctggccttacaagagataaaacagagataaggagaaggcctgttgtgaagtggtgtccattgctgcaaaggagaaaatggatatattgggaggaaaggaaaagagagaaaatgaaaacctctgaattagttctgaagtagtgaggagaaaaaatgttatttgtatatctgaaaacaggtatcatctggaggagctgcatctaaggtgaacaaaagtgtaattgtagaaattgtctagctgttgagattctactgggaaccatttttcaaagtaaagaaaactctgatcaacctccagtttgtttatggagaggactttgcccagctatacccagaaaacttgagaatatcacaccagcacaaccctgagacaaattgtgtttaccaaggggattttcttaaagagaaacattaagaaacaaaataaaatttgtttaattctgctgcagggacatgtgatgagtgcatgatgactttctattgtagactggcaagacttaacctttctgcatcttctgctcaggcaggaaggaaagcgttttcttagggttttgaacttacttgagtgaaatctaactaaaaaggcagcaccagagactatatctta

SEQ ID NO: 24669 - DNA, 951 bp, Bovine  19866880978978
  misc_feature (1)..(1): n is a, c, g, or t
ngatcgcctaaagctacaatattggaaaatgttgcctatttttctaaagttcttttaatgactcatgttctaatagcctctgtttaagtgacaaaagaaccactgttgttcggagggatgtacagtatattacacaagtttaccctggcaggccacaggccctgatctgcaatcctgtgtcagcacttttcagtcctactaatatggatacagatgggtgtgtgagctgctccaggcttctcacggggccaaggaaaacatggaaaacaaaggcctttatgagctccatgctgaccacagtccctgcagtattgctaaaatcacatttttctctggacttgccatatacagaatacttctcacctgagagaaatcaaatttcattcacaacctaggacctaagtttgttgttccagtaagagtaagtaattgctccctttggaaaagagaaaataaggcctttttcagcctttctctacaaacttgcaaaacagctcagtagctctgaacacacagaatgcaaaccatggacaactagttagactagagcaaaggcacacggttgggctgacactacatatatttagaaaaatgaaaaaaaatgaaaccattatctgcgaccattcaagcgagagaaagacgtgcttgcacagctcctccgtcacctccaggagccccaccctagccaccaccaaggtcgtcatctcctgtccttcaccgcatctattattctctctcggaaggacatgtgtgctattataagagtttctcattagattaggtttaaatttacttgcttttgtccacttccttcactagaaatagtttcttcgcaaaggcagatgccatagtctgtctgagctttgctgctgttgttgttctgtcttccgtacatgagaatttgtgagaatgcacagagaaggcaggctaatttagtaggaacactagatt

SEQ ID NO: 24670 - DNA, 2920 bp, Bovine  19866881082929
  misc_feature (1)..(1): n is a, c, g, or t
naatagaagtagcaagagcataaacacattactctgaaaattgataaataagagaaagaatcaaggacatgtatcttacctgtcctgcatgaattattttagagtaaccaaattgttgaaaaagagaggtttatctttgtagaaaatttctagttaattaatgcaaaagaattggcagaattagaagaatatcattttgtattctaaagaacatttgggtacatatatctttagaaaacaaaatagttactaaaggggagaggcaaattagtggtatggaattaagatacaaactactatatataaaatagataaacaacaaggatctattgtatttagggaattatagtcattatcttgtaatgactttttctaacctttttattttgtaataacttttaatggcatatattctttaaaatattgaatcattatgttgaatacttgaaactaatattgtaaaaaaactatactttgataaaaaaaaatctaatgaaataatgaatgtaggcaatgatcattaatgaaagttataactaacaataatgtaaaaagtcaacaaggaaactgataaaaataaagggggggctcaccagaacctataaatcttcagtaaaagtggggcaaccagaaattttatgcatgatacagcaggaagtacaaaacaccacacatacagtactcttgccaaaaaataaaaataaaaatgagcctgtctctaataagcctcaccctaagtacaactttacaggaaataagtgggctagaaaaaaactgaatgaaaccatgaagcaaacaacagctaaatctagaatgaggaacattctataggacagataacctaatttatttatccaaataaataaagaggaaagaggaagggggcaactgttatacattagaagaaacttatgagacataatgtcaaccaacatatgcattgtgcagacctcttttggattcaaatgtgaagaaaacaggagaaaaacattcttgggacaatgaagaaattttagcataaaacctgttcaattctctagacttaataacaacctttgaataatttttaaagattttatcatgttcaggtatttacaaagaaaataagatttcttggatttgctttaaaatactcctggagaaagagaaagagaggaaaccagggacagaaatagagcagaaatagatgaaacaagacctggaaaatctcaccaactgttaaagctggataaggggtacatagagatttgtcgtaatagtttctctatgttggtataaaattttccataataaaaaaatcctaaaatattgatataaaactctttttgtgtgtgtagctttgaaatttttactgaaaccacagaatatattcctaggaagagaactatgcggtcaaaggcataagctttttgaggttctcagaaaaaaattttaagtgctctccagaaagtctgtaccagtttattaactgcactaagatgtatgtgtccatctcaccagaccatcaccaaattgaatatatattttaaaacattcattctattttgatagataagggtatattgtttcagttaatgttttttcaagaaatgggttgaaatcttttaattgtaattagtcatgtatttcttcttcaccgaattgtctggtatattctttgtccattttttatttaagccttagtgatttttgttctttgattgtaaggtgtttttaaataacagctcttcttaatctgatgccaaatatttctcctttatttatgttttaaatattcagaaataaattttttatgtaatcaaatctatagactttggtctatgctttttttcattttgttcaagcttaaaaatttttgtcctccctaagatgaggtagattcactttctcatagttttattttaatgactttacctttttaaattttttatttatctagatttcaccttggtgcatggtgaaatgcacattgtgaaatgcacatggtgaaatacaggcttactttattgtttaccaaataataagctagtcattttttttctttttcattaaaatttttttcttttattataccatctgacacataataagtctcttcatagagtactctcatatgttcctggttctcttgataacttggcttccttttactgttgaatttcgtgcctataccatattattatggctttgtacctggtgaatagacttgttaaactaactagataagaaatgagagaaacaagaagagggcacgtagaatatatatatatattatatatataatgtatacagtagatttttatcagatagagtgtatcatctatatcatccagcattttgttagcatctacacaaagtctgtatactatagaaaagagagcaaagactctggagtgagtatacaaagatccacagtctggttttgtttatttactggttgtgtgttcttggatgaagcacttaacttctctgattctgtctcctccattgcaaaatgaacataaaaacatctataccatatgagacatccttataaaatataaaacaccgtgtattttgaaattaaatgttgacaatgcccaggatacttaaaaaaaaaaaagtaacaatgatttcattgggaagatgctgaagatacttgacatgtctttttcagtaatttctgcagtaaagatgtccacttttaatacaaatgcgtattattcaatctgccagttatgctgaaatgggtttaaaaaaaaacacacacaaaaaaaaactttctttggcttttggaaattctgcatcattaacggaattaaacattttcaattaatttcaatctggtacgatcaatttgactgacatatgggatagacaaaaatctagcttcattactttgtgcctcttggcaactgcttacagactggcttcacctgca

SEQ ID NO: 24671 - DNA, 1016 bp, Bovine  19866881157705
  misc_feature (1)..(1): n is a, c, g, or t
ncttccctaacgttagaattagtgaaggttcatctgtaaaaaataatctctcttcacccataccatgcatctttcctattgacaacatccactgtatttgccattgtatatttcccatcgactctaatgatagtagtaggacactttctattataagatatctaaattcccaacttgggggattacttcgggccaatacagttagaaagggaaagaaacatgtcattttatatttataaagtaggatataaaatgagataattgaaagtctgcttgttgatctttagtgaacaattggtgattctttttcttcccaagtaatgggttgttatatatttaattgctattttgagaaaggtattcttccaaatgggcattagggaaataggacagattttaattaaaccatttagcacatacttaataactccaccaggaggcatgataaaggtatgcttaattggcttagaaagatggtagcaatatgagaacttcaaatacaaagttaattacagagataattctatgaaagtgaaagtcgctcagtcatgtctgactttgcgatcccatggactatacagtccatggaattctcctggccagaacactggagtgagtagcttttacattctccaagggatcttccaagcccagggattgaacacaggtctcccacattacaggcatattctttaccagctgaaccacaagggaaacccgataattctatatctatctcctaatcaacagcaagggaagttgttgaaaattttaaaagtcaggcaaggaaatttttaaaaataggttgactttctgactttcatccaatttgtctccaaaaaagtctttctccagggtaggcatgtatgttctattttgtggatcagcttacataagggagaggctgctttattcctaaggctatctgacagcatgttttcctccagcactctgtatagtgtatctgataatgtctttcattcttctctctatccagtccactaattaacaatttt

SEQ ID NO: 24672 - DNA, 1434 bp, Bovine  19866881220917
  misc_feature (1)..(1): n is a, c, g, or t
nctattacttttagcttgcctgagatttcctgattgttgggctacaagagaaaagaagaaacaaaaaattccaggttttttttccttgcactctttctttcattattagtatcgttttaatttttttttttcctgtcttttaacaagaaatgtagagcttctcttgagactctttctgtcttaatctggtatgcatgtcagctttttgctgcctttgagttcaagctgggagatatttgagaaagaaaaaatgaacttcctatttggtgacactttgtgttctagtaaattgcttcacttgtgtcccactctttgtgaccctatggactgtagattgccaagctcctttgtccagggattatccagacaagaatactacagtggattgccatgccctcctccaggggatcttcccgaccaaggatcgaacctgcattggcaggtgggttctttaccactagcaccacctgggaacccctttactagtctacttgctataatttacttttcagaatcttaacataggtattctgtgaattgtcttctgaattttaggtgtattcagggtcattgtcaggatagaaattagtttattttgactggaactggaacctgaagtctttaaaaaaaaaagacgtagaaaggcagttatgaagaggagaggcagtaaactcatagaaaaaagatgaaaaggaagctgggactggtaagaagataatgaagaaaacagtgagtaattatagaaatgaaaaccactatcagaagatattattctttctacaaataggttaaatttggtgtcttcaaggaactaagattgaaaggactcataaagaaattaaagaacattgaagaaattaaaggacactgtgtggtagctgtagcttgtatactagtttgaattctcattattggtggtaaatggagcaccataaggaaaaatgaatgttttgtgtgggcaagtagagaggagaacttgtgaaaccagaatatgtttttattaaagtaattccctcttcatctactgtctaataagatctatgaaaagtttgattataggaaggacatatcaaactgaattttgaagatagacttattctattaataatatattgagaaatagtaaaagtagattagaaatgaatgcagcaatttaggtgttgagtaaatgatttataataccagagaatgtttgtttagtcatagcagaaggtacagtaaggcatagtaaattactttaattcaagtcagcaaaaatcttaaagatatttggttcagtaagtaccaatagagttgatacatatttttaaaaagaaataacatgcaaaaagaaatctatagcttcattagtcttggccattatgtcttaatcttggacacaacagagtatttataatcatgctaagagatagactaaacatcataaacactttt

SEQ ID NO: 24673 - DNA, 2055 bp, Bovine  19866881229595
  misc_feature (1)..(1): n is a, c, g, or t
ntcggacacgattgagggagtaacacacacacataactcatttattcttctcgcatggagtagtatgaaaacctaatgaaaacttgtacaactaactaaaactgtttcctttaatttaaacactcatttcagtttaaaataactaatttgagataaattctcaatcattgaaagttctgtttcatctttaatgtctctgtctctctgggagaattcattttgtccttctggaagtaagataacagccctgataaacctaaataacaacaacaatacaaatttctatggatcaggtacatcattttagagttataacctcatttattcttcataaaatttctatgaaggtgttactattgctaagtctctcaagggaatgaattacaattcagagtttaaacaattagcaaaaagaattaggaaactgcaaaccaggtctgatcaccccaagtctgcagtctaaactcacatagttttatcacagagataaatatttacctgacaccttgtctagcaaaaggtaccagtttctccacagatgtgtttcttttcaaacacaagtgggaaaaacattttgaattgcccattggagtccacatgtgtgagaacatgagacaaatctcaaataggaaatttaaaagaaaagcattaattaattgggcaagagatattttgtactctcagaccaacacaagcactacattttccccttatacttcagattacctgagagacttatctactgaagacagctctaatctaaacaaatggccatagccttgagagcttccaaagctgatatgcaaagatggctgggattcaaggcaatgcaaaatgtgctacaggaagctttcaaagcacaaattaacccatttattatgtctgtggtaaagtagcatgttttgccttgtataacatttctcatgtttccataaaccatagtttaatatccttttggaagattaaaactagaagtcatttctagtgctaacaaatactttgattgagaggtataactgttctattgggtctcacaactcggcagctggtttcttcaattacactttttaagtagaacaaaactctgaaagcaagcaaacccttgactctgagtcctgcagtgggattggacatgctgtgctatctccccaaggcacatttccttaagcaaaagtgtgtctttgtagatggttacgtctggttacttacaacatcataaacaattacattctcttttctggttcctataggccagctatctaaaattaagttaaaatatacacatttttgtaaagaaaacagacttgatttaaatagatcacgacaagtaatcattctttctgaaaaacatgctgcagtcggcatagtttcagtgaaacctcagcaagggtgtttcaagtgtcatgattttagttttactgaatttgaattgaatttatatatatatatatatatatatatatatatatatataaatgaatatatatatatatgaatatatataatatatatatatatatgaatatataataggggcaaatagcatcttacctcttcttggattatatatcttctcttctatttcaagcaggtgttggctgtttttgtctctgccctcccaccctctccaagctagaatcaaagataatttctatgtgcaggcttaactctatctcatatgtggaaaatggacctgactattgtgcaggtcaaaatctgtcaagtattggcaatgtcacatggtacaacctactggtattcaagacattcctaaacaatgcaggctgcagccaagtatactcttgaattggtcgacatgtcaaagatgcaaatctgatgtttctgggatgaactatgtacagatgtatatccaacaagtcagttttagacacctgggtgtcatgttcttgaggaattttgaatttcagtttttcccaaattctttatttatgccttttagttcctttcttggttatagctcttaaattttaaattatacttaataccagatctcatgcatttgctaggatccagaggtgtcctagaacatttttt

SEQ ID NO: 24674 - DNA, 1575 bp, Bovine  19866881267527
  misc_feature (1)..(1): n is a, c, g, or t
nactggttttggcaggtctttctccttgttttctcctgctgggtccctgggacaacaagactgcctccagggtggtggtaaagccagggtggagctgggtcatggaattgttactgggtctacaattgggcctggttagggggcttactgggcttcccccagtggctcagaggtaaaggagtccacctgcagtgcaggagacaacaggaggctcgtgttccatccctaggtcaggaagatcccctggaagagggcatgtcaacccactccagtattctttcctggagaatcccatggacagaggaacctggtgggctacagtccatgaggtcacaaagagctgtacacaactgaaacaaccgagcataaatgcatacatagtgggcttgttaccagtggcacgggcaggagtggttcctcgaagatcccaagacttaagggaatgcctctgggaccagggttgaggtggactgaggccagggctcacggccactcccaggtccacagtccggcccacaggtgagaggcctattacctggggcatgaatggggttagcctgggcaggcccctgctggacccctggactggcacaactacctctggactgtcatagaacggggccagagctgggtcgtggggctgcccacagtcaagtctgcagtcgacacacctgttgctagaggtgccagctggcatggctcacccagggcccctgggtgatcaggactgcgggagagcaaagcggaagggcctgctcgcaggcgttcagttagctctccagtctgtgggtcattccagcagcgtgacaagtgtgacactctctagttcccctgctgagaaccatatcatgaccatagataagcaggcttggagccgagtccacaggggtagagggctcttccaggcctgccgctgtggccaaggtccatggcccggccactgggatgcaggatctgccttctcaaagaggccctcctcagtcttgggctcaactaggggtttacaaactcctacctggatcccaaagctcccacaaaggcactgttatctgtgatggccaccaaatcattggtttggggctttttttgtttttttaacttctcatttattccggccgtactgagtcttcgttgctgctcaggcttttctctagttgtggtgagtgggggctcctgtctagttgcagcgcaccagcttctcattgcagcagcttctcttgttgtggagcacaggctcttcagtgtttgggcttcggtagttgtagctcccaggctgtagagtacaggttctgtagttgtggcacacgggcttagctgtctggcggcatgtggaatcttcccagaccagggatggaaaggtgtcttctgcattggcaggtggattcttacctctgagccaccagggaagccccaaatcactgtttttgtgggaggacaagggctggtaacttcctattctgccagcttgctaacattaccttctagaggtttctattgagagatcctcaagcttagagattgtttcatcagctgtctctagttcactaagtccatcaagagcattcttcatttcta

SEQ ID NO: 24675 - DNA, 1736 bp, Bovine  19866881401623
  misc_feature (1)..(1): n is a, c, g, or t
nccagtcctctataatgaaaaaggacatcttttttgggtgttatttctagaaggtcttgtaggtcttcatagaaccgttcaacttcagcttcttcagcatttctggtcagggcagtaatcccagggattactgggatattgaatggtttgccttggaaatgaacagatcattctgtcatttttgagattgcatccaagtactacatttcagactcttttgttgactatgatggctgctccattttttctaagggattcttgtccatagtagtaggtataatggtcagctgagttaaattcacccattccagtccactttagttcactgattcctaaaatgttgatgtttactcttgccatctcctgtttgaccactttcaatttgccttgattcacggacctgacattccaggttcctatgcaatattgctcttttcaacattgaactttacttccatcaccagtcacatttacaactgggtgttgattttgctttggctccgtctcttcattcttcctggagttatttctccactgatctccagtaggcatattgggcacctacccaccgggggagttcatctttcagtatcctatctttttgccttttcatactgttcatggggttctcaaggcaagaatactgaagtgatttgccattcccttctctagtggaccacgttttgtcagaactctccatcatgacccatctgtcttcagtggccctacacagcatggcctatagtttcactgagttaggcaaggctgtggtctatgtgatcagattggttagttttctgtgattgtggttttcaatctatttgccctctgatggagaaggataagagacttatggaagcttcctgatgggagagactgactgagggggaaactgggtctttttctgttgaagagtggggctatattccctccctgttatttgacctgaggtcaaactatggtgggaggtaatgcagataatggcaacctccttcaaaaggtcccatgcacacactgctacactcagtgcccccgaccctgcagcaggccaccgccaacccatgcctctgccagagagtcctggacactcacaggccagtctgggtcagtctcttgtggggtcactgcttctttcccctgggtcctggagtgcacaacgttttgtttgtgccctccaagagtctgtttccccagtcctgtgtaagttctggaggctttatggtggggttaatggcaatcttctctaagaaggccacacccggttctgctgcacccagagcccctgcccctgtggcaggccactgctgacctgttcctccacaggagacactcaaaggtagatctggctcagtctctatggggtctcctggtgcacacaaggttttctgtaagccctccaagtgtctctggtgggtattgggtttgattttaaatgcaatttcacccctcctaccatcatcctgggcttctcttttatccttggacatggggtatctttttttggtgggatccaacattcacttgcggatcgtggttaggcagcaagttgtgattttggagttattgcaggagaagatgagtgcacattcttctactctgtcatcttgtgtctatattacttctaaaataatcaagtgttctttcatttaatatgtcaatactatatatgtgattcaggattttatttaccctaaaagtttattgtttactctttgaaagcaaaacatccttggttt

SEQ ID NO: 24676 - DNA, 1465 bp, Bovine  19866881422673
  misc_feature (1)..(1): n is a, c, g, or t
naagagatgggtactagataggaagagtgaccaaggatataaacctcattctgcatcataagtccaagactttactggaataagtgggagaaacaatactgaaaatgaggagtcactatccaatgtttgttggtggtgaaagaaattgagaagagtaaaacagaaaccctggcttgcagactgccttccatattcaaagtaaattaattaattccaatgcggtgaggtgtagtaaaggcataagcatgtatatccagataggcttggaaaccaaggtctttttgagcctatatctgggagcagtgatctgcaacatgaatctggggaaatcaggtacaggagaaataagatcaagacttaaagctgaagtatctgtgccagaatcaagcactataaattccaagaattcctgagatggaatcagagtttggaaaagaattccatttttattcattttatataatgaaccccctttacatgcttttggtcacttctgaaaccttggagagtgccagagatctgactttccagcctacagactgggaatccacttaaatattaaagagctttctacattcaccatgatatcaaactagaatccaacagggttgccataaatgccccaaactttcccaaatcagtctaagattaaatcaatagacatttccatatagtatacagaaccagattataaggagcactataccctctctgtggccctaacaattgctggcacagcctcaggacaagttcttgctacttctcccaagagaagttgaataattatgttgaacatcacaagtgggaagaagtatttggaagggaaatgatagcaaacagttgaaggaaaagtactgatgaaatggttgaaaagaaaagagataaataaaagcagtgaaatgtaatttcaagacgaaattgtaattcttataaattttctatggcaactggcataaaatattttaatatctttgaagtagaatacttaatttgaggtcatgaaatgaaattaaccagctaccccaaagtgaaactgagtatgtgatcaacagctcatttgccctgtggctggaggaaggcaaatgaaaatgccaagacatgattaacccaaactgaattgggtaggaagaagacacttgcccatttaatttgatttgtgggcttagccactgcatggggacctttgcactgctattctattttaaaggaacttctagagaacaactctcacagctgtgttgatgcttttttttctaaagggaaatatcagaagactgtctctttagcactattttaattttgctcagtttgaaagtattgtacatgtgtgaatctcatgatcgtgatcttaattaggatcatatttagattcagacttaaactggagtagataataatttccattaccttgtattaaatataaggaatcaagttctcaaacactatacaaatacaggatcttatt

SEQ ID NO: 24677 - DNA, 1791 bp, Bovine  19866881497305
  misc_feature (1)..(1): n is a, c, g, or t
nctaacctggctttcctccgtactcttgcctggaaaatcccatggacagaggagcctggtaggctgcagtccatggggtcgctaagaatcgggcacgactgagtgacttcactttcacttttcactttcatacattggagaaggaaatggcaacccactccagtattcttgcctggagaatcccagggatagaggagcctagtgggctaccttctatggggtcgcacagagtcggacatgactgaagcgacttagcagcagcaacctggctttcctatttattttttccagtgtttttttttttttttctctttctttctttcttcttttttctaaagcaccagacatctttatttttttcagtgttatggccagaattaatgtgtgcatcaagagtgatttgttggtagtatggaatgaagatagataagtagttagatagacagatagatgtatatgtatatatttatagtctcccaacaaccaactgtattatatatactctagttttccagaaaaagatgccttcaaggcctggataattctgatatttatcttgtttgtagttaacaaaattgctccttgattttaagatatttattttgaggtacattttaatcagaatcgaagtcttgtaggattttttaatatgacaaatcagactttctgtactcttggtattaatgccaacttcaggtaacaaatctcaaagtgtctgtggccctattcttactgaacacctcatcagaaaagtgataattgtggggattattttaagaacaggtagatcatgtatccctctaggtaacctatgattcattattggagcaagccatacaaactaaatgggaaaggttggaccatgtagcctttagaaccctgctaaacttccttcaataatttgcactttagtgagatgttgaatttcttagagttactgtaaggtggttcttgctgtactttgtcaggtgattgtgccctttttgatgacttctgtaaaaaaaaaaattttttttttttaaatttcatagctcactgcaggaaaggaaaatgacatacttctttgaatggctaattacaaatatgtagctaaaaacacttcccttgcttttctttcattttgactttcaagaaattgagaaaaaatatttggttcagctatatgatttacataagttcttaagacctgtttatatttctacaaacttgatatcttatttgtagttttaatttctataggatgttctaagttcgctacagaacagtgtaaaacttaaaaatgtggaatgagtaaaatgaatgaatgtatacatatataaatgcatatgctttgaaaaataactatgtccaaggtattttcttatgttattaagctataacttctctattgtcttataaagtaagtacaattactgtaggagactggaggtaaaaagagttatatcactgctcaagttcagatcagtttttaaaaaactcaacactaaaactcaggattcctgcttacaactctctttttattgtgtcattgtgctaatataattttctgtgaattagagataaaatcagctgctaaggttgaatgctctcagtaacataaatcctctgcactccactttaaatagaagttctagttcattagtttttgctctctgcatagaattagatacattttaaatttctataggctggcatataatgtaaatttattctgcaagttttatagagaaacttaattttacagtgttctcaatattccagaagaaaatatgctattaacacagttttatt

SEQ ID NO: 24678 - DNA, 1292 bp, Bovine  19866881701713
  misc_feature (1)..(1): n is a, c, g, or t
nacattgccctgtgcaaacttgggtagctaatttatctgtgcttcagtctccttatctgcaaaataggagtaataataatcataagattgtttggagatttaaattgttacttatgaagaacttaaaaagcagtgcctggcacagaataaatgatcaaaaatactagatgtatttattatatgtaggagctatggcatgagatggatatagtgggcaatatttctaaattattaaaatgatttatatttatttctccttaaataattgcatcttgtactttctccatgcaatatattaagaacacgatgcccaaagtaaataactcattatttagttctgagatttaaagccaattttcttgagttcctagtgacactatggccttctaaactaagatttgatgaatgagaaagggatttgtacattccaaagcttctctttataaatttaaaattctagaaggtctgaaagtagaattataatataagccattttcaaagaggatataggattaaatggattaaattgaaataactgcctggcttcaggggatctatagtgccagctagatataaggtgaagacctagtcaacagagaaggtggctgtgtgccttgggagcaattatctggtgttgccaatgccaagatcaagacggatgatttataccagctgtagacactccagtggatattagagggacagaaatcaatgcccaaatactaggtgaaatagacagcaaaagaagttaagttttaggatccaacactcctatacctctccatggtggtatatagtctctcttcatccaagtccattttggactatggattgtaaattatcttaatatttctctgaaaaagactgatttaaactgggttacacctgatttattaaatcttaaaatatttatttttagtattagtgcaagggaatgccaaagcagattaatattttattgagaataaaggactttctatttttcctgaattacagttttagtatatatatagtcacatcactagacaagacaaggaggataataagaatgcatacaaagataatgattttggactattttctgaaccactgaaaataaaccatttgagaaagatatcccaaactcagtgtgggagaaagactagaaaaagagattgatgttagagataagagatctgatattggttgggggtatgtttatctagagtaaatgctttatttttgaacttcccaatgaaggtagttaagtgtcattttagcagaagtatcaaacttaatctatgaggaacatc

SEQ ID NO: 24679 - DNA, 1455 bp, Bovine  19866880424676
  misc_feature (1)..(1): n is a, c, g, or t
nagacattacttggtcaacaaaggtccgtctagtcaaggctatggtttttccagtagtcatgtacggatgtgagagttgaactataaagaaagctgagcacagaagaattgatgcttttgaactgtggtgttggagaagactcttgagagtcccttggactgcaaggagatccaaccagtccattctaaaggagaacagacctggatgttcattggaaggactgatgttgaagctgaaactccaatactttggctacctgatgcaaagagctgactcatttgaaaagatcatgttgctgggaaagattgagggcaggaggagaaggggaggacagaggatgagatggttggatggcatcaccaactcaatggacatgaatttgggtaaactccaggagttggtgatggacagggagtcctggtgtccagcgattcatggggtcgcaaagagttggacacgactgagcgactgagctgaactgaactgaacgttttaaacttgtcagttcttcctttcaatcattgtcagcttccagaaacccagttcccagcaatcccctctgaagcaattcattccaattcacagctggggcactaaactgattttctttaagcaaagtttattgatatattatataattgagtgttctgtttctctatcttctttgaggtcaaagatataaaaagacaacagattcagattgcattttatagggctgctactcaaatttctcggcttctcaggtggcgaagtggaaaagaatctgccttccaatgcaggagatgcaagagacacaggtcaatcattagatcaggaagatcccctggaataagaaatgtcaactcactccagggttcttgactggaaaaattcaatttacagaggatcgtggagggctacagtctgtggggtcacaaagaggctgatgcgactggtgcatgcatacattcaaatttctagtttattctttggctctcttgagccttatagtggatgaccacttgtatgtataaatagtcttgttaagaagaatcatttgactctatttgttggaaaagtatttgcctgtctcattttttattgcttgatgtttatttccattaaagagaagcatagttttactctaagcacactctcttaaacaatgcttcactttaaacatgccaagtttaatttttaatattgtcttttaacactcaggaacagaaaaattatgctctcacacatgcttgtttaaaaaatcatgatattgctttaattttcaattttcttcagcattattcattttctagtaagaaggctaacactgcatcaattttgcattctggtctacattttataaaattccttcatataatatatgatttgggtttcataatggcatacaaaagtaaacaggcagttctcatcatccacattataaagaaaccaaatttaagaatgggactttccaa

SEQ ID NO: 24680 - DNA, 2014 bp, Bovine  19866880506126
  misc_feature (1)..(1): n is a, c, g, or t
nattctgtacattggttagaatggcatttagtaattactcaacaaaaattttaattaactgtttttaagcagttaattcttctaatgttaacccaccttggatgttgcttctgaaaaataactgtgtttcagattcttgattactttggcatggaacttttccttacagtgattgatttccttatagtgattgattgaatttctgctgtctttcttatgtattctgcaagtagtgaacatttatgaatgaatgaactgatagtcaagaaatataggattgcaatgaaatattcatggttatttagtaagttgtaaaccaccttttttcaggtgccaatgaaaaggtgctctcatgctactcacacccaacaagattgttttaaaccccttcatgctcttcttatcaatcttctgtcctaaaagtgttaaagacacaagaaatatgatataactgtcatatcaagttcttgaagccaattagcccgcaaggtagtgtgtcattgttccccttattataatgcagatgctttatctaatgcctctgacttcatggtagctctatcatcacttctataacttttccctgtcttaaatcacaatttttcttcatctgcataatatttgcttattttttgtgaattttgaaatcaccactccattttttggacatttctatttgcaacttgctccatactaaaaacagagaaatccagacaatatggccaggtccagggaacacagaacagtctttccacagccactgtgctgaccttccagtgtctggaataccaaaggaagacaaaaagtgatgaaaataacaatgatgattcttgaataaattttaaaactttgagatacggacaagaacaagcctttccagtaatcaagcacatgctttattatttcttaaccccagagtgattcaagttcaatgcattcaattttagaaatctaattgcagaaaattcaagaagattcattttttttctaagcaataaataaagccatttcttttccttctcagaagtataaaagaaccggtgctagaaaacagctgcaactccaaaaagataggctcagtatctcagaatacatggtttgggtttttttctaagtggactaaatgaatagtcagttccatttctctgcccctaagaaaaggatgcatataaagagccctttcaaacagctgcaaatatgaatgattaaagtgattcagacaatggaagaaggaaacctgcatttgcagatgtcaccttcaacatagtgtcgagttgacagctttgtttttatctgctcccatcacctaagaaaaaggaaactgattttaagctgaggaaccaatatatttattttcaagaaaaataccaatcaagtctggattttctatttttgttgtttatccagaggccagtgcactgcaacagtattatacttgatgaccatagagttgattttatctttagcagacaattgaatgcaaaaatatgtagacagagttctcagcaattttgattctcatgtaatttcacaagggtttagtgtctcttcaaaattgtaacttttagtacattttactgatctttgatttggaaagttctgtttttgttttttatttttccttcacttgcgttagtatttattttaatttttattggagtatagctgatttacaaatttgtactagattctcccttgtggctcagctggtaaaaaatctgcctgcaatgcgggatacctgggttcattccctgggttgggaagatcccctagagaaggaaaaggctacccactccaatattctggcctggagaattccatggactatatagtccatcaagtcgcaaagagtcagagacgactgaccgaatttcacttcaggtatgcaacaaaattaatcagctaacatttacatatatccacttttttttttttcagattctcttttttttttttaagcttttctttttttttctttttttttttgattttattttatttttaatctttacat

SEQ ID NO: 24681 - DNA, 1761 bp, Bovine  19866880549379
  misc_feature (1)..(1): n is a, c, g, or t
natatatatatatatcagttcagttcagttatagatacatacatttcaagtttatatgagagtacattttcattagttgtaaattataagctaatataacaatttaattagaatatcatttgcatatataagcaactagtagtcaagagtgaaaaggggatataggtgacacatggtaaaatggcctatttgattatttgaataccatttttgttaaacttttggttgcatatcagaaactatgattaattttttcataatagtgtgcatactttgtgatttttttatttaaaaatattacaggtaacaaaaccgttgttttttacaagttgttatcttattacgagtaataaaactgttggataaagtttagtaattctaaataaaaaggaaagataacatatatgtcagagtccaattatgctgataaatgaaacttcaggtatctttctgtgtgatagaatatctgctataattcttaccaattttgaacttatcttagtttttatgtgtacatatctcttttaattaggctagaaatgctgtattctttagccattaactaaaaatttaatttcaatgctagaatattattttggatatgaattaaccacctgacatatcaataaacttttttctatttaagataattaaagcaaagttatacttcctttcctgtataactaaaatgacaattttgttcaggacctcaaatttatatgagatcttctctaatggaaaatgtggagagatatgggacaagtaagacaaaactggaaaccaaaacttcaaccaataaaacttgaattcattctactcatgtaccagaaaccattcatgctgagaaacagaacatgtattatataatgactgtgtttaatatcacttttactaaagctattcacattttaaaatgcctcttttgtatttaaacagctggcacaatattagacagttcttagattgatggccatatacagtatacaaaaggaaaaatccttattttaatagagaaatagtttgaagtgattgagaaagattgttttaaggaaagattaattgccttaatccactgtagctaataagaacaggtaaattatatagtaaagaatgagataactttttccctagaaaatattcctttacacatgtttcagtagggatcttgcctggtattactcaagtattacatatattgattaaaaataataggtattaataacaaaagcaaattactatctttactaggtttaacaataacttcaataggaaattatataatatgtcatatatattttatatataattattatacaaatatatgtgtataatatacatagatacttatgccaatgtctcagatatacccattctatagtagcaattatgaaataaagtcagaagaactccagaaaataccataaaaatgtttctagaaactaggttttctagtaaggaaaattatgcataatgcaaatattttaacagtgtttgtatataaaaatttaaaaataaagaaaatatctcatgattaatatatatccagaaattgaaaccatacatttaagatcatccaacttcataagttaaagggaaaagacaggactcacaatattttgagttatcaagagaaatttgctctaggtgatctatatctttaccattttagtatgtgagatctttgttgtggtacaaattgacaatatttcagaacatactaccacattatccttagcagtgtaggactgttgccagcatcta

SEQ ID NO: 24682 - DNA, 1320 bp, Bovine  19866880643634
  misc_feature (1)..(1): n is a, c, g, or t
nagtgtgaaagaaattgaattcagtctaaaatcaatcaaatggtaagtaagctgtcactaataatgagagaaatactaagttccaagattaaattcataactttttggattactgatactttctgctgccaatatgtttgacttttgttagcatatatggacattaatgacatattagtgggtgcaactacaattatgcagcattctcactagcaattgtattttttcatattactttatgatattccacatatcttaaagtttatctaactaaaatagcaacctgaatgtattttgtaatatttaacaatcattcccgtgtaggagagctgaaataccctctttctcttggaatccatgctagatagattccaaatcacttaactccttcagaaaacaattgtttcagttgcaagtttttcaactgtcaattttatgaaattaattgagattcattttgattaatatcttttgatgataaatagattgtcctctaccatgtattaaagaacagcttgtttcttttggattaaatttttatggtaaaatgcaaataattttccatttctcataatttatgatattattaccatatcctgttacataaaatgacaatgagcaaaacactcctgctgctgcaatctgtgctgaaaagcttcctcaaaatatattgtctccatttctatcggtagatatagctgtaggaggtaggaattttctcatagtgtttgctggatgatgctaatactttgttataataggcactaaaaatataacatttacttgctcagctcaaattataaacagccaaagctctctgaataagaatcatatgcttttaagattcatttctgcctgtgagtgttttctatttattagcattggcgtttatttctcatttatatacaaataaattcaataggaattgctatactctacaattaatatgatacacaatcgaagtctaagtataaatgcatacaggctcctaacaaccattttatgatttggagaactatacataattgaaagaaaataagttttaaagactgcaaataattgacaagctcagtgtttcttcatacatgaggatacaatgacctattgagtaatttacatctagatttgaaactgagacaatgcatttggtaatattgtttttgaaacaagaactacttcttcatggaaatttagattgttagattgagaaaagataacatagttttgcagttctatctctggagacaaataacttatattcacagttggccatttccaattatatgatcctagggtctcagtttcattgcttataaaata

SEQ ID NO: 24683 - DNA, 1553 bp, Bovine  19866880672088
  misc_feature (1)..(1): n is a, c, g, or t
ntgagactcattgttagagttcaaataattaaagatggagaattttggttacccaatgtcttatttgagtccttataaaaacaaacccctgaaagtaaaagggtcttgggaggtaacaccaagaagacaagggatgtagtggaacatgaaaagaaagaaggcaagaaaaaaaggcaataaaatatatattgagtgaatactctttcttctattaccttagaattgtcccattaaaaaataggaagcctgagatattcaacacttgtccttcaggggtttagggtaattcctggaggtagtaattcaatttaacctctgattttttttttttttttttgcgggggggctttttcttttccccaaagcaagctgtaatgtttctggaaaaattccttaggcagaagagcaatcaaaagataaaccgaaggtaaacccagaggtgaaaatcaatggcatcttcaacattttgtataaattctaagtttcaacagacacttgaagtgaaacatagggatgcatattaaattcaaataaactacaacggcttctaaaattatacaagtcagtcaaaattcttccagataaatgattttgaatcatgattttcaatcaatgtcacattgattcataatattcttttccaatattattaagtgtttcaaaaatattatttagttaaacaatgatgatgatttctttcataattgaaaagtgaaattattagtcactcagtcgttttggactctttgagatcccatggagtgtagcccgccaggctcctctgtccatggaattatccaggcaagaatactggagtgggtagccattcctttctccaagggattttcccaactcagggactgaaccacagtctcttgcattgcaggcagattctttactgtgtgcgctaccagggaggcccattccatgagcaaactcactcaagacagaatatttaaatatgcttgataaaaaagcacattactatgtaggctagtgagagtttgaataacattgaagaatccctctatcagtgggctctttacaagatttaatttattctgtgtcaaggcaaaatcaattgactttttacaagataatgtagtttagtagaaagcactcaacagatcctcaagaatctgatttatcttccagattctgcattaaatacatgtcttataaatcgcagaaaaatgtgctgagcagggtatgaggggtattgtttttctccagtaaaataaaaattgttgaaataggaagatttaaatctctttacagctctcttatcctatgtccaagaatggtttcaaagtaaatatcttcctcagtttctgaaaatgcttagacatctctttttttcttgtattcagtattactatcatgagctgtttaaagagaggggctgggtcttaagcaaatttttggtggcaccaaagactgtttaatagacatttaattaaattaaaaggaatatctgcataattaatttgttacatgattgtttttgaaataattgatttaaaataaatttaattttggttagtttttccttt

SEQ ID NO: 24684 - DNA, 1431 bp, Bovine  19866880796290
  misc_feature (1)..(1): n is a, c, g, or t
natagaatataagctttgattttgattttaatgttttttactcatttctctccaggtacaaatgtttatatgaagagatcatactatagttacatatatataataccacatatataaaaacactaaactatataagttcattctcactcttgatattgttagatgagaggtgataggttaacagaatatctaagaaatatgcttagaaacaatatgcaggatacagaaagtattcatgtcttaaattcttggttaattactttcaagatatttgaccatccaacccaagttcaggacatgtgtttgaacaactattaacactggcgtataggtggatctatgtgcaagctccacattttattggcgtaatataaaaatcagtgcaacagaaaataacccaatatatatgttcctgttaactctggaaaaacagtctgtccccttatttcaaacagtgatagactgcacagatttcacaacactgttatgtttcaacaattcagtatgaaaaatcaggtgtttgaaccttattatacaactatgagatagatgataaactgagaacaacaggtttgaaaaatatattaaagattaaatggataaacaaacaatcaccctgatcctattgcaggcatgattggatcttttagagatggctattgctcctgaccttgttgatgaacttgtgaaactgtctcctccagatgaaggtgacgaggttgttactgatagatacaaacagaagcaagtagtcgaagataagtataaaaattctatggaggtgctcagtaatgctctataacacctgttaaaaataaaagctctgtcaaataaatacacatagaagcgacctcataaaatacaagctgaaatcagagttatgaatctccaaaagacccatatgtcaccttattctctttgaattgatatttatctccctgaaaggaaaatattaatacttctattgtttcagattctttcaaaattcagatccacagaagtcaatgggtaaataattttgtaaaaactgacaatatagcttaaaatgtatgacccgtaaaagtagcaacacacacacacacacacacacacacacacatgtatataattgttatttttctagtgatcttaatattcactctgtatcctttgatatgggaattagggaagctctgacactcacatcaggtcacacaactgataagatttgaggttccaaacctcatcttctatctatatttcttggcttggtttttcactttatctctgtccaattttagttagctaaataatgatattaagtccagtttgaagggttggatatagtgatactacctttaaaggagggagtggtcacctctatgtagaatatattcctgcctattttctatggggttaagtagtaaccatgaataccattcagatatgttc

SEQ ID NO: 24685 - DNA, 772 bp, Bovine  19866880886703
  misc_feature (1)..(1): n is a, c, g, or t
ngtttctttgagctttaacaatccataattatacatatctaaatttcctatatagagtatatgaagagaattactttgggaaatgaggttcagaattatttaaaacagtaggataattatcaggtagcaatgatctgcttaaagaaaatgaagagaacaggaggaaaggtcatatgtagggtttgttagtaacaatggattattaacagagcaaaagttggcacaagggatgatatgaaaatacaagaatgcagcagagaacacaaagaatattcagatgaattaatgaatttttcaaataatctcaatttaatattatctaattcaaagtacgacagacataaaggataaaatacacaggcttgtaatacacttttttccctttggaaataggaacagcaggggttaatcaatagaacagatgaatttaggatcaaagttcaatggtgtggggagggaggtgggaggggggttcaggaaggggaacacatgtacacctgtggcagattcatgttgatgtatggcaaaaccaacacaatattgtaaagtaaaaaataataataataaagaaatgataaatggttaaaaaataaataaataaaaataaattcaatcataaaaaaaggatcaaagttcataagctcaaattttcatagagtacttaggaagaataaatatatttgaaagtgctttggaaactttaaatgcctttgaccttttgggaggatcaatgaattagcatcttaatagactttttcctaaacagaaaatt

SEQ ID NO: 24686 - DNA, 1609 bp, Bovine  19866880915294
  misc_feature (1)..(1): n is a, c, g, or t
nacttgcttttctcagaggatagctagctcatgaagttgtgttactcaaagtcatttctaaatttaatatcctgactgactagtggaagacattgttattgtgggccatacagactcaaataagaaaattgttttttttgttttctttgacatcttaacagtgactagggcttcccttatggcttaggcagtaaagcatctgcccgcaatgagggagacctgggcttgatctctaggctgggaagattcccctggagaaggaaatagcaacacactccagtactcttgcctggaaaaacccatggacagaggaagcctggtaggctacacaccatggggttacaaagagttggacatgactgagcaatttcactttaacagtgactaaatgtgctaccacttcaggcatttagtattggtgctcagactcagtgagaggaaaagggactttctcggtgattcagtggtaaacaatctgcctgtcaagcaggagacatggattctatccttgggttggaaagatcccctggagatggaaatggcaaccctctctattcttgcctggaaatcccatggacaaaagagcctggtgggctacagtccatgaggttgcaaaagagtccgacatgacttagtgactaaatgacaacaatgatggagaggaaaacaaaatcattttgcctttatctcactgagtgagataaactctagtacaaatgtaaactgttggtggatatacaacccatatgaaaatgactttttgacaatagcctctgctgagaaaactgcttgcattgcattgaatgttatctaaacacaactaaaaaagacgaatgggctttgatgaaggacataatctaagacaccaccacccaagtgctcactataggagctatctaaagtataacccaagaacgttaaaggcaagctgttaaaaactactcaggaggtccaacacctgattagtcactctgagtactagagacagcacatctactccctggaattctataacaacctttatatcaagtcaacagacatatggtcaaatttaagtggaagtccttatagcaagaaactttgaaaacagcacagaaaataacaaaataagctcagtcctggattcctctgtgttgtgttttaccactgtatccagagctaactacaactctattccaaattagctctcacccagattattgcagatacagcttcctaaatgtctccctgctttttttttttttctttacaatctattctctcataagcaaccagtgtgatcttttaaaatataagtcagatcatcccacttatctgtgcaaccccctctctgacttcccatctcattcagtaaaatgtaagattcctacatagaactctcacaacctggtacccaatcaagggtcagaccttatttcctgctgttctccccttgcttattctgtttcagtcatgtagatcttctagttttaaagagaatgtaccaggtgagagccaggttcagagattcatgctgactgtttctccctcctagatttctcttaacctttatattcaaaaaacctcacttcttcactccttgaagcttttttcttttctcttctttttt

SEQ ID NO: 24687 - DNA, 781 bp, Bovine  19866880917315
  misc_feature (1)..(1): n is a, c, g, or t
ntgaagaagtttaaagaaagaatctgctacttctaaaagtgctgaaatcatcagaggaaaaatgcttctttttattctattcttaaagtttgcctctgtcatctcaagggtttctcctgtcagcagcagtgaaagttctacgtaggaatgtgaatacacacagatatatttcaaaacctggaaaatttaacctaaagtacattttagctttggagtgccctcaagggtggaactgaattgctcaggagatgaataatgggattcattactatgaccagttgaaatctaacctaacccaaggtattcccatgctgttgagcagcttagaaactgtgacgaataatgcagtcctgcttcaattgattttttatcctaccactgtagccatcaacaaacaggtattttctttctaccaaaaaaaaaaaaaaagaggtgcatctgtattcattgaaagaggaaaaagtaacaaaggccatcctcttgcatattcagatgatctttgttttagctcattttagttctatgacacaaaaaaagtgcttatttatcatgcactctgtaaagttagattggatcaatatcttatggatgtaaatatttacctatacaagttgctttcattattgtgtctaaaaagtcatatgactgatgttaaatcatcaattaagagacaattttttgtcctttactctgttacacatgcaaataaaaatatgttatataaaacataaattcaacactggaaggccaccttttctttatagtatggaaaagttcaaag

SEQ ID NO: 24688 - DNA, 1166 bp, Bovine  19866881077359
  misc_feature (1)..(1): n is a, c, g, or t
ntgtgcaggactgagaacttggtaaatgggcctcaggaatagataaagcttgtatcagattccacttctaggaatttagccatgcttttacatgtgtgccaaggtatatggaaaatcatgtttggactactattacttgtgaaaacaaaagatttgaaacaaacatctatcgggagaagactgattaaaagtattacagcttatctttgagatggaatacagggcagtcatccaacacaaatacaacaaactaaatgtactgatttggaaaaattcccaagctgtattattaagtaaaggaaccaaagagcataattatgtgtgtaatggttttccatttgtgtaaaaaagttaagggcaataagttatacatgcacacacatgcataagcacacacatgtatgtatgtatgtatctacacgcacaccctcccatccctgtgtatctgtgcttatatttgcattggacatttctggaaggaagcatgtaaaatcattactagtactgcctgtgggaatggacgagagatctggggtaggtggggcttaccctgcatcgttttgtatgccttgaattttaactgtgtacaagtgtcattgtcttgttggggaaaaaatagtttgctgaccactgcgtgagtgtgtgtggtgtttgtttcaggtccgggtggtggtgccttaccaggggccgtcctctgactatgtcgtggtgaggatgatcccggatagccggcttcctccccgtcacctgcacgtggtccgtatgggcaaaacctctgctgtcatcaagtgggaatccccgtacgattctccagaccaggacctggtgagcaggccaggcgtgctggcgaccttgcttattctggacgtggtttggtttgggggcaggaaaccgaggcctggtgcgtggagctcagcaggagctccccccccccgccgccccgccatttccgccaaagacagggtcctcataggtatctcctctttgctgtcatgtcctggctgctgtattggtttgttcctccttttctctgccttcgccaacagttggcctgtaggttaaatctagcccactgcctatttttctaaataaagttttattagaaccaagttatacccatttgtttacatgttatctaggctacttttagctacaaacaagagagc

SEQ ID NO: 24689 - DNA, 1467 bp, Bovine  19866881111001
  misc_feature (1)..(1): n is a, c, g, or t
nttatccatcttcaactattcttttgattaatgggtcatataatctataatttaacatttaccataagattattacctttccttgataaataaagcataaaacagaagtaactctgtatcagaaataattttctacatggatctttaaaaaatggaaagcctattatactgtacattcttaagtgacacaaatataaaaaaatgcattgtgcattttcttctgtttgttacataatttagtccattgttaaaaataatggattattgctttacagagcaacagattatttaatgagttaatatagtccagatttaagcatttaaattctaatattcaaaatgctatccaacctatttctttcataataaaacttctaaaggtcaatcacactgaaggcaggacacaactctacatagtctgaattctagatttgctacaaaaagaaaaagcaaaaacaaacccagcatcctgaattctttattagcatacatgtttccccatagagcattaagcaagtcacttaagtcttggagctatgcctctcttgtttacttaatcattgtatttggatggacctcaggactgcctatctcagtcttgtttctatttcttttgaaatctcccaaacttccctggggttagccaaggaaaagaggcaaaataagctgaaaggaagctgataacagcaggaatgaaatattatatttgttttgttagaaatacaattttaaaagactcctctcatcgactgaagtatgtgggcccattacattcccaatgttatcctgttaaattattctcctcatttgatattcttcaccacagcaaattatgctacataaaatgagtcttaactttataagtattaacatgggatattctcagactaaatgtttccatcaagtgtacgtgaatcttgctggcactcaagactcatacttcaagaaatggattttctcatacaattaaacataagcaattgcgagttaagcagatttctattgcctcttagcagccaaactccagtgggggtaatgtaggcagagctttaacctttagaattgtggctttctgccatgcccatgttaaagcatctatggtgagggggctgggcacgtgtgataatgataattaaatattacactctaaatatactgagggaaatggttgtggaagttaattagccatatgcagcctaaaccacttagctttagaagcactgcaagcaccgacagttacttcaaaaagagaaatggcaggtgaaagtgtgaatctgcaaaggtttaagtggaatgatttcattatagccaccattaccactctggcttaaaactttctcaacactgactgtcaagttgcaaattgtattcaacatttactatgcctctgctaccctacaatcagtttcctttgtccttttccctcatatttttcaaatagatgcatatgtagatgcatttttttta

SEQ ID NO: 24690 - DNA, 3531 bp, Bovine  19866881236461
  misc_feature (1)..(1): n is a, c, g, or t
nactgatacacccgtgttaaatgtctaataccaatctatctcattctgaaattctgctttataccactatgctaggggcagcaagatttggcttcaggcagcacaaacctgcatagagggttggggtttagtcctttaagaattaaggcaaaaaagtgttataccatggtgttaggcaagtcagaaagctgaattggttgacctggaatttaataagtagaaaagagttgtcccataatagagataatataaatatggagcagggtagccactgggttaacccaagaccctgtagtactggttgtgagctttgattccttaaattgcaactgctgattagaggacagaattaattcaggatacatatatgaatgatgtagtttcatatgtggactaaagcaggtcttaaagcaagaaacatattccaactataaaatacagttattgtgagagcccattgtgacaatacatattagaataatgagcaatcagaagctcttttaagattgttattaaagttattgcagtgatcaagaccatccccaagaaaaagaaatgcaaaaaggcaaaatggttgtctgacaaggccttacaaataactgaggaaagaagagaagctgaatgcaaaggagaaaaggaaagatatacccatttgaatgcacagttccaaagactggcaaggagagaaaagaaggccttcttcagcaatcaatgcaaaggaatagacgaaaacagtagaatgggaaagactagagatctcttcaagaaaattagagataccaagggaacattttatgcaaaaatgggcactataaaggacagaaatgttatggatctaacagaagcaaaagatattaagaagtggtggcaagaatacacagatgaaatatacagaaaagatcttcatgacccagatgaccacaatggtatgatcactcacctagagcaggacatcctgcaattcgaagtcgagtgggccttaggaagcatcactatgagcaaagctagtgaaggtgatggaattcctgttgagctatttcaaatcctgaatgatgatgctgtaaaagtgctgtgctcaatatgccagcaaatctggaaaactcagcagtggtcacagggctggaaaaggtcagttttcattccaatcccaaagaaaggcaatgccaaagaatattcaaactactgcacaattgtactcatctcacactctggcaaagcaatgctcaaaattttcaagccaggattcaacagtacatgaaccacgaacttccagatgttcaagctggatttggaaaaggaagaggaaccataaatcaaattgccaacatctccttgattatctaaaaaacaagagagttccagaaaaatagctacttctgctttattgactataccaacgggcttgactgtgtagatcacaacaaactgtggaaaatacttaaagagacgggaataccagaccacctgaactgcctcctaagaaatctgtatgcaggtcaagaagcaacagttagaactggacatggaacaacagactggttccagtacaggaaaggagtatgtcaaggctgaatattgtctccctgcttatttaaattatatgcagagtacatcaggcaaaatgccaggctggatgaagcacaagctggaatcaagattgctgggagaaatatcagtaacctcagatacacagatgacaccacccgtatggcagaaagcaaggaactaaagagcctcttgatgaaactgaaagaagatagtgaaaaagttggcttaaagctcaacattcagaaaactaagatcatggcatccggtcccattacttcatgacaaataaatagggaaacaatggaaacagtgaaagactttattgttttgggcttcaaaatccctgcagatggtgattgtagccatgaaattaaaagacacttactctgtggaagaaaagttatgaccaaccttagacagcatattaaaaagcagagacattactttagcaacaaagggtccatctagtcaaagctatggtttttctagtagtcatgtatggatgtaagaattggactataaagaaagctgagtactgaacaattgatgcttttgaactgtggtgttggagaagactcttgagaatcctttggcctgcaaggagatccaaccagtccatcctaaaggaaatcagtcctgaatatgcattggaaggactgatgctgaagctgaaactccaatactttggccacctgatgtgaggagccaactcacttgaaaagaccctgatgctgggaaagattgaaggtgggaggagaacgggcaacagaggatgagattgtcggatggcatcatcgacttgattgacatgagtttgagtaagctctgggagttggtgatggacagggaagcctggcatgctgtagtccatggcgtcacaaagagttggacatgactgagagactgaactgaactgaaagttattgctgttataattatcaatagtctacaacttgcctttttgaatttgtgtataataatctttcacatggttgttctggcataatgctgtgctttacaagtcttatttcttaatgattggcaaatgctgacctattgttttctgaatcatcagacacagctggtatattatgctttaattcacaaactctgcaggtaacagtggtttctattctattacatttgagtttctgtagactagtcacaacataatcaacagtttcctcaattctatttaagagggcatggaacatgtgtgctgcccaggaataggtagatattttaagtaacttaaatatttgaaaaagaaaattcaaactaattttgttaagttgctctttgatagaaagactaatatcttatgtagtaaagataattaatgtcaaagtttttgaaatggggattctctggtaatttcatgcatgcaaagattcaaatagtagagctcatgatcttaataccacagatattgtaggcattcaatgagaatattttactaataaatgtaggcatgagacatgcagtaacaacagtgtctgagattttatcttacctggtgactcagatggtaaagaatctgcctgcaatacaggagacccacattcgatctctgggatcgaatgggaagatcctctagagaaggaaatttctacccactccagtgttcctttctgaagaattccatggacgaagaaacctggtgggctacagtccatggagtcacaaagaatcagacttgactgagggactaacacctcacagacaaaatattaccccaaatttctgactgatagctctgccatgactttattaaggcagaaatagctagattaaatcagtgctatatttaagactctttgatgataagtggggcttcccaaatggcactagtggtaaagaaccttcctgccaatgctggagacataagatgcaggtttgatccctgggttgggaagatccctggaagagggcagggcaacccactccagcattcttatcggagaatccccatagacagaggaa

SEQ ID NO: 24691 - DNA, 1037 bp, Bovine  19866881435853
  misc_feature (1)..(1): n is a, c, g, or t
ncagcttatgcttcctccagcccagcatttctcatgatgtactctgcatataaggtaaataagcaggatgacaatatacagccttgatgtactccttttcctatttggaaccagtctgttgttccacgtccagttctaactgctgcttcctgagctgcatacaagtttctcaagaggcagatcaggtggtctggtattcccatctctttcagaattttccagagtttattgtgatcaccacagtcaaaggctttggcataatcaataaagcagaaatagatgtttttctggaactctcttgctttttcgatgatccagtgaatgttgggaatttggtctctggttcctctgccttttctaaaaccagcttgaacatctggaagttcatggatcacattttgctaaagcctggcttggagaatttaagcatcactttactagcatgtgagatgagtgcaattgtgtggtagtttgagcattctttggcattgcctttctttgggattggaatgaaaactgaccaaatgagatgtatatacttcttattttgtgtttttctgtattgtagagtcttgcagtttttcaaaaattgttagagctagtacataagttctagtgtaaaataaaatctctttaagagaaaaatatcaggtacattttaaccatatgtctttcaaagaatacagtgtttaaaatacaaacagcattctaaaagtatcataattttataggcttggggaaaaaaggctataacagaatgtcaaaatgcaggtctcaaattgtcatagaagtaaaatatgatggattattcctatcagtatactagaatctatattcttttactgaatatgtattttcaaagtccagcaacaaggctgccataaacttccccactgtttaaaagtgaacacatttcaactgagagcaaaaattttgcactatctgactttagatatgagaaattgaacagttattcttcagttagttgactgtataactgtaagggagatggcctggaaactagatattagataaat

SEQ ID NO: 24692 - DNA, 2325 bp, Bovine  19866881456198
  misc_feature (1)..(1): n is a, c, g, or t
natgagttgcattattctatagacttatcccattctacatgcaaaatgaatacaaataaatagataaaccaaatataaaatgtaaaattgggaaaatttatcacttccaaatataaatggcaagatcaggaaaaagagaacaaaatttgtgctggcaatagaagaatatagcaaataaagaaatctgtaactttatattttcaataagcattttagatgggctttgttaaggcaccgatgcactgaaatgagaagtgtgaattgtataatcatctccattcatatacgttgctgctacaggctagatatggtgttcatttatatatttttctttctcctgaaaatgtcagcattattttattcaagcaaaatcacagcattagttcaacaactaaagctacatctggctgatttacttgcaaaaaaaaaagtggttgcaatttattcatggatctgaaagtggtcaattagcctctgaaaaatgaactcttcaatcatgttagagatcattattgtcattgtcagagaatttgcactaaatgggcttcccaggtggcgctagtggtgaagaatccgcctgcagtgcaggagacatcatgagacacgagttcaatccctgagtgggaaagatcccctggagtggggcatggcaatccactccactattcttgctggagaatcccaggacagagaagactggcaggttacagcccatagggtcgcaaagagtcagacacggttgctgacagcacacgcacacacatgtgtgctaaatattagtggatacattgtgacaggagtggactcagtccagtcgctcagttgtgtccgactctttgtgaccccatgtactgcagcacaccaggccgccctgtccatggcaaaaacacccaaagcttgttcaaactcatgtccattgagtcagtgatgtcatccaaccatctcatcctctgtagtccccttctcctcctgccctcaatctttcccagcatcagggtcttttccaatgagtcggctcttgcatcaggtggccaaagtattggagtttcagcttcagcatcactccttccaatgaacacccaggactgatctcctttaggatggactggttggatctcctttcagtccaagggacgctcaagagccttcaatacagttcaaaagcatcaattcttcagtgctcagctttctttatagtccaactctcaaatccatacacgactactggaaaagtcatagctttgactagatggacctctgttggcaaagtgatgcctttactttttagtacactatctaggtttgtcacagcttttcttccaaagagcaagcatcttttagtttcatagctgcagtcaccatctgcagtgattttggagcccgagaaaataaaggctgccactatttccattttctccccatctattatgtcatgaagtgatgggaccagatgccatgatcatagtttcttgaatgatgagttttgagccagcgtttcactctccactttcaacttcatcagaggctctttgcttcctttttgcctctgccataagggtggtcttcatatttgaggttattgatacttcttgcaatcttgattccagcttatgattcagcatttctcatgatgtactctgcatataagttaaacaagcagggtgataaaaaacaccttgatatactcctttcctaattttgaactggttcattttccatgtctggttctaactgttgcttcttgacctccagacaggtttctcagaaggcaggtaaggtggtctggtattcccatctctttaagaattttccacagtttattgtgatccacacagtcaaaggctttagtgcagtcagtgaggcagaagtagatgtttttctggaactctcttgctttttctatgatccaacaaatgttggcaatgtgatctctggtccctctacctttcctaaatccagcttgtgtgtctggaagttcttggttcacgcactgttgaagcctcgcttgaaagattttgagcatcacctagagcctctagaaaggaccaaacctgttgacattcttacttcagacttccagtctccacaattgagagagaataaaattctgttgtttacttggctctgtttgtggtatttttgttacagaagtactaaaaaatgaatataccatctctataatgcttagggattgtggagtaatcccagagcatggcgtggcttggagcaaaatcaagttctcctatggatatactcccttctgtttcctttagacagttgctcttctagctctggctgtggttcctggctccttctgctccagta

SEQ ID NO: 24693 - DNA, 3067 bp, Bovine  19866880549475
  misc_feature (1)..(1): n is a, c, g, or t
ntaaccagtgaagcatggtaagagacttgagttgcatatagcttccatttgcccctctgttttctctttggggcagatagcttctctgactgtgaagatttaaaccaaggggaaaattttcaagtctcctgggtttcgttttcaggaagattgaggacatgatcagaaagtgctttcttttcactaacatgagggggtggggggctgtcagctttcatttttatgctggtagatatttttgatgtacagtttcattctcagtgcttcctgtttcagagtctgacaaagaggagaaaccgcagagtgctgtcatacccaaggaagtgaccccagcgctgtgctccctgatgagcagctacggcggcctctcggggtcagagagtgagccggaaggtgagcctggctccgggtggtaacagtgggtgtggctcgctccactgttgcctctgatgtacactgtgcatcagtagcatcctttcacgtgtatgtatctgaggacgagatgtgtcttgcacattcttaagttgagcctcaaattcctttctcatttgattccgaagttaacatgggatgaagggacgtgggagagatggagaactgtgttgctcctctaggagaaaggggcaaaaataacataatgaaagaagaggaaggggaagagatatccactagtgaaatcagagaaaattctaaaagataaagcaaaggaagttaatactccttcccactctcaagaacccttgtcttaacacgtttcgcaccttttgaagctggagaggggtcctttatgacaaagaggatggtaaaattccttacctgtatatggggcatcgctccttatagagcacatgtaccttaagctgtctccttcggagaacacgggaatcgtatgtgcttgtgttgcattagcctgtgtattttaaaggttgggagacatggaatccttttgatagtgtttctgagaagttaatgttattcaggatacatgttttaaccttaaaaggtgatgacaaactccccctccccccaaaaaaagcaatggtgataaaccaactcaatgtctggcatctcttctagggcctcctaacagggctacgagtaggcttggcagtatgggcaactcgagccaaggttcacaccagtaacccagcgttggtttcgtgaataaccgtgtgtcctgtcgcgcctctgaccctggctctgcatggtctttacatctgggcttcaccagccacgagagaattctgagtgtgtgtctcacatgcatcatcacagtaggggctctaccgaagacaggaatagagggtcttcaaagtgaaaatgtaggatgaaagggaggtttaaatgtaatgggatgaagatggcaggacttttaatgttgactaagctagagaaaatcaatgtttatgtagttggaaaatgctgaagaagaaagagttgggctttaatatgaaagttaaggtttagatctgggtatctataacatacaggtttttttttttcctctttttgaaaggccaagctttaccatgttaactggttaaaggctgcttgaattttgaaatataatctgctttgggtttatcagaggagtcctttacagatggttgcctcctcttcttttttttttttttttgaattttaagaaaaacagtatttagttccttactcttgtttctagtacactgatatgaagatgaagttattctttaaacacatattacgtttcctgcttatcttgtgtatttatgacaggtgatagcaaagaacactattaccagattactgaatcccataaaaacaagccatacaaatgctttcctctctcattcctaagataagatatttaatagttttatactcatgtcttcattttgagactgccactttgaggaggcagagaggaaactggaagggatcaagttttcagccctttattttatagacgctgaagcttcaagaggacacactggcaaaactagtatgtggcaaagctgacgtaaagcttaggtctaaaggagccaactgcattgccttccgttacatctttctttgtgtggcaataggtggtgcatagctattcttttgactttgtatgaattcagtttgactgattgtctaaaatgtcttgccttcaggaaaaagtccttgcttcacattcctaagccttaggaattattttatgtaatttgaatttgcttttattaagccatccaggtcactagcagatttctagcttgcagtgttactgggctatagattgggataggctattgacacagcaggactttgcaataagtgaaacaaggaaataaagtgagccttctctgaaccatgaaatagcatctctgttgtttttgttttagtctctaagtcatgtcctacttttgtgaccccatggactatagcctgctgggcttctctctccataggatctcacaggcaagaaaattggagtgggttgctatttgctactcaaggggatcctcctgacccagggatcgaacccacgtctcctggagctcctgcatttcaggcggattctttacagctgacccactgaggaagcctgtggttatcaaccattagtatggttattaaccgtgtactattttcagtatgatgtctcagggaatagggaggcctgaggaggaagagagagagaggagcatggcaggtagggggagcaggcagaacataacattgataagttgactgtcttatatggacatggttcatggtgaccccaaacagttataatagtagtatcaaagatcagagattacacatgcccataacataataacagtgaaagtttgagacattgagcaaaaatcatcagaatatgatgcagagacacgaacaaacagtgttggagaaatggtgctaacagacttgatcagtgttgccacagaccttcaatttgtacaaaatgctttgtctctgaagaccattaaatcaaagcacagtaaaacgaggtgttcctgtaatttaagaattttacagcagtatgcttaggttttcctcttccctccctttgtgctgtgctactcaggttttagttctg

SEQ ID NO: 24694 - DNA, 1263 bp, Bovine  19866880557629
  misc_feature (1)..(1): n is a, c, g, or t
nggattcctggaccactgtaagaatgaggataattagtgcctaaaacttactgccatgagaatcaataggaagccttgaaaagatagagatgctcaaaccaattcttcagagactctgacctaattagttcacagaaagatctggatctcagtacttgttaagtctcccaggtggttctaatatgctgccagtgttaagaactactgaatttgataagtcgtgtaatgagacatgtcttcatcttaatgttttacatctttataaatttacatcatcctcactttttcctttgggattcactatgtgtggaaatgcagacatttaaaattttatttaatgtaatcagatattattacaaacacactatcaaactattactcccatgacacaattcttctcagcaaaataggagaaactataaattagaatttttataggaatatagactgccaaacagtcatataaaatctaaattttgattcagcatgcccagaaaaacataaatcaggcaaaggtatcttttaatttttttcttgtgatttaaattataacactgtttttatgtcagggaaatgatgtgtagtcaattgtgtgctagcagaatgactcataccagagatagggaagggataatattaaatccacaaatctttcctgtccatcaaggcccatatttttgtagatgttttcattctagcttaagaaagaacatgtcttctgaatgaccaaatgcaaataaaatatagtacagccatgatttctcattttctaaatttataataactacttaagttacaagaagggttacaagtatatgcataaaaaactggagcatgcatatcctcggttctgaaacccaaagattatgctatttctaaaatgcatcattgctggcttgtattttccaatgcctattgagatagtcctgctttggaaaaacaatttctttgcctctgtaccttgagccttcttaagtatatcaggtcactggatctcaactgggattgatctttccttccaggggatatttgttacagattgagggcatttttgttgtcacaactgagagaaggaagttgctactagtttgtagtagatggaagtcagggtgctgctgaatattccacgatgcactgtgatatccccctccaacatgtagctagttcagttcagtagctcagttatgtctgactctttatgaccacatggactgcagcatgccaagcttcccctccatcacgagctcccagagcttgctcaaa

SEQ ID NO: 24695 - DNA, 2001 bp, Bovine  19866880582390
  misc_feature (1)..(1): n is a, c, g, or t
ntggaaaccataagctagggcagtatgtctaagcctaatcaaagcatcacagactgtgaactattattaacctcacatttcctcttaatctctgtgatttctgagcacttactttacacatagaagtaatatatctcctttcactctgatgaatggtgaaattccttcctttgacactactgttcatcaaatggtgattatccttcctatgtaaaaataacaaacttttaagaaagtgacctgctgtagcatatggcaatttggtaaaatagtatagttctttatagttttatctaaatagactatggataaatgtaataaacttatgtttgtgcatgttcagtcagagttatctctgactctttgagaccccaagcctgccaagcttctctgtccatgagaattttcaagaaaggttttactggagcaggttgctatttcctccttcaggggaccttcccaacccagggactttacccacatctcctgcatttcctgcattggtaagcagattctttatcactgagccaattaagaagtccataataaacctgtttttttgtgtgtgtaatttatatatactataacataaatatcaaaaattcctaaaattgataaaaatgaggtgaaattttgcacactttgtgtggcatagatgtggaacccaagtataagaatgaaaacaggaacttagtcttttatcttagaatttataatttgagtttataatttatcaatttaatgccacacattttgaacactagccctctcatttggtataaccagtatgatgtttttcttgagtattattgtgctgaataatattgtgctgaaataatatcataattgaaacaatgttatagaacacagaaaatatttttatgaaagcaaactcagtgtgaaagtaattatagctatctacttgaattatacattttattcaatcatatcacttcatttctgagtttatatttaattgaaaactattcattatgaagtattaatagttcttttatttgttctattcagtttttctttttagccatctactttattgcttttggttcactttataaataatgctgttttaactatgaacgttactgaaacatattatttgccataatttgcaatttcaagaacatgtttgctgctcctttctagaattgtatgtcttctttgagccttaggatatatttttaatttttaaatgtgattgttctatgctgctttataatattgtgtagtataaattaaattcaaagaagactggatcctgagttttaaacttataatataataactgcacagctgagaacaaaccaaattttgaggcaccgacataataggaaaatgaattgggtatcattgttaataaactcagccccactggaacaaatagtgaagaaatcccattcacatcacaaggtcttggaacaatacaaataatgcataatgagatcggtgcctaacattgaaataaaaagcattcaataaatttatattgaacaatctatgtgttttctgctgtacactaaacattgctgctgctgctgctaagtcacttcaaaggattcttaaacaaataaaatgctctttttactcttaacttactttctgtgtgatgacatattatctaatcttagaaatacaattatagttcttcctagttttcaaagaatattaaaatcttgaataaggccgtgactttaatgttttatccaatgagatatagtagctcatacaaaaggagaatcaatgtatttgcttctctcttgatccttcctttttctgagaaaaataatcatcatcaattgatatttgtcaacaaatgatatgtccaaacttttttgcttatttttaacaattttttaaaggaggttaaaaagccaagaaactgcacaactgttagattacttctaaacttatactagttattttaattaaacaggttgtagaataatggggaaaggggaaacctaccatttagttaccttgcag

SEQ ID NO: 24696 - DNA, 1272 bp, Bovine  19866880682236
  misc_feature (1)..(1): n is a, c, g, or t
nctggaaggtgggctccgggtataaaaacttaacattgtaagtaatgttgtctccatctccataacatattaaagcacatttggaaaggggatgatcatgttcagcaatatgtctccatttaaaattttgtgacagattcagtcatatacttccaactctgaaaattttaataagaatcagaatataccaaagtaaaactcaattatattcttgtgtcagatcatttatttcatgacatgattctgtgaaagcaaacaatgtaaatattagcctgaaacataaaaataatgatagctatgggaaaacaactctattttctaaatgaggaaattatatgttgagaacatcatgtttttagaggtataagaatacagcctaatgctattgcttatgtcacaccagaaaacaacaattctatcacaaatatgattaaggtctttattcttcacatgggatcctgaggctaagtgactcagacagtcaaacccatcacctgcagttgatttaacaaggacaatactaataaaggacttacattcatactgctcactttaaatacatgtctctagaggaactcacaggcagaactggattgataaatatttcaaatagcctttatctaggagttctgagagtttcttattgacaatatcaaaggctttagggaggtgctctgaataataaatgtgcaaatacagttatagaaaggtctttgaaggacaatgctttttaatttaatagatgggttataggatgaggtagtgagcagttagccagggaatctaactctgatgaaagagtgccaactctatgactcagaatgttaccttataagttattcagaatattctgagaagtgatccaaacatagaaatacctgaaatgtcaacgttgaccccatttacataaatcatatgccatgagtctctggatcttaatgcatactccaacaacacatacgctgagaccttctggagggaatagacactagcatctgattgaaaggatataatttcacatagttggatgttcattttaacaaaacttgatgcattggccctgaaaggttttagaaaaagcaggagaaaaatataataaaatcgaattaacttacaacctttattagcaacatattgcaaaatcatggtatagtataagtttgggaaaaaatttcctctcattacttaatcttccaacttatttaatcagccaactgtcaattcaaacaggcttatggaattcttcatgacaaggctctgtgtttggaaatg

SEQ ID NO: 24697 - DNA, 1081 bp, Bovine  19866880688639
  misc_feature (1)..(1): n is a, c, g, or t
nacagaaaggaaaatttctgtctttgtaagctctactgtaaagagagcttgaagactttaaacatttttaagtttttatttagttaagttttgtgcttctgagaaaaagcctacatttcaaatcaaattcattttgacatggctatatcagccacaccataggaattcacaaatgagtccacaattttttcaggtacagtgtggggacagacatttcaagaacatccctttacctgttttgggtaaaaaagtaaaactttcctcactaaatgagggctttttctattatcacaaataaagatatttgaattaataatgatagtatatataagcatgtatatgttaatataaatatcatataataagctttttttttataatttacagttcttggctgtttatatattatgttaacaaactgtgtacagcagctgtgtgccatatattgaagactttttttctaggtataaagttgttttgcaatgaaagtattctccctcccctttagataaactaatgattcctttaaaagcttaaaataacattatctactaactcacactgtgggttattggctaactgctaaacaaagtaacttatcaataaagggttttattaagaagctagtaaaaatgaagtacttgtctgtttgccaatgtcattggcatttaaaggataataagacatagagaggtaatcctataggttgcatgggaaaagaaaaagactagtatgtctttataaagctgctgcaggtacatgatttgaagtgttttcagtttctaatctctacaaagcagtggtatagaaatgaaaaaaatatatatatatatttttttttttctgtaaaagggcaactaatacatggctttttaatccttacaatctgttgcaattgttctactattatattaaaccagccatagatgatacataagcaaatggtttggttgtgattcagcaaaattctatttataaaaacaaatggccagctggatttgctccatgaattgtatttttccaagccctgaaataaaatattaagttattgcctacttaatgtgatgatgtagtacttata

SEQ ID NO: 24698 - DNA, 1944 bp, Bovine  19866880718742
  misc_feature (1)..(1): n is a, c, g, or t
nttgattctgtcctttcctacgtagagctgagaaaagccttacatttccttaagaactgatactttcttccataattacattcattaacttatcttctggttgtttgtgttaacctcaaaaacagatatttggaaacagttgcatccttaaaactgaccttgaaattaaaaaaaaaaatcattgcttatgtacattttcatagcaactagttagcccattttgtattgaaatagaacatattaatttgattgggaacacgtgtacatccatggcagatggatgttgatgtatggcaaaaccaatacaatattgtaaagtaaataaataaattaataataataataaataaataaataaatgtggcaaaaatttaccactgtatctaattggcctcccctataataaggcaaaacttgtgcttgttagagtatatttgccccataaaatatataaaaagtcagtggctcagaagaatacaaaggcaacaagaagagggcattgaatataatggtccaacaacctcatattttattctggtgtatactaatttattttttaaatgagaaaatttaaactattaaataattatgataattcatttgtcttaaagtggtttgtgggcatatctggttaaattttgagtttagcaaaattactcttttatatatcttcaacattatgcattatagaacaatgtaaatgtgttgttttcaagttacagaatctaaattttttcaggaaaattatttaaatgattactattaaaattacaagcatgtatatgactagtatggaggaagaattgattatccactccagtacactcacctggagaattccagggacagaggagcctgatgagcgtcagtccatggtgttacaaataactggacacacatgagtgactaatgcacacacacatgtaagcaataactacaggaacagaattaaacctcatattcatgttgaactttacgtttttctgtttctaatctttagtttgtttaatcattctcttgattttgatagtaaaagccctcttatataatcagtataattgactacacaggttgaaatcatactattattaaggaaatattattattcactcctaaaaataagcaaactgggatatatacattttacactgagaattttttttaaatatatgagcatattttcaactgcaatgcaaaacaggagatgaagaataacttgcagaaaataaagaacacccagtatagtaattatattattcaatgacagagaaattcaggagcagtggaaaatgtatgatactaggaaggatggtaattgctatggtatgctgagttctgtatatttatttcctcaaatgcaccaaataaaatatgatcaaactatcaaaaacaaagggcatgcattttaaagtggtttaagtcaacataagaaattttatgaagtcatccttatttatttttgtaacagaccttcaaattggcatatccacagagtgtgtcaagacaagaggaaaagatatttttttctgggcttccatatttatcaactaaaatgacttctactcttcaatctgccatctgttgtgctataaatctaacaagtttaaacatctttattttttgtgtaattatgatttctttgaagtgtggtttctgtttcaatgtcaaaaagtacattcaagaaatgtttttgtttatggtgtatttctgagtagttaatgattattttgcaaagataaaaaatatcatcctaaaattactttagtatattaagggatcctggatgaccaaaacaattttgaaaaagaacactgacttcctgattttagaacttactgcaaagcctagaatcaagtcgtcacatacatggtcaaaggatttttgacaagggtgacaatgtagggataagatggtcttttcaacagtgttgggaaagctagatat

SEQ ID NO: 24699 - DNA, 1977 bp, Bovine  19866880757769
  misc_feature (1)..(1): n is a, c, g, or t
naattgttttctctggtaaacttaatagggagtgcctgcaaatcattcttataaagtaatgccatgaggtttgtatatatcctacctgttgcataaattaattacactatactggaaacaatatattgatttatttttccatcaatatatcctgaagtctctttgcattttgtaagatgacagtgctgaccataaacaaggagtattttcctttcctgattactttatgctctaaatagtatattttattaagctcctggagagaagattactttttaatattactcttatagcatgtatgtgtattttgagtggtatatttttatctctttaataatacctatttacatttggccattttgtggttttcaattgcttttggtaataaggattcacagcaatatttttttgataatgaagagtcaagctgaaattaaaggcagtcatgaattagaactgagaaagttagtagccctcctattgagatgagtattaaaactaattttcttgcatttcaagatgtaatcattcagtctacacaaaattcagtcttttctcaataatgaacttataaaattttatattggggagatgtaaacaatttacctatttatctttatttagcaacaagatatctattttcaaaatttattcttagaagataaattcatatgttttaaaaatcacatcttataaatgttgtctgcttataaaggttgcctgccttataaaggattgattgatcctaccaatcaaagcagaaggatgtagcctggccaagtgaagtaaacaacacagacacacaggaagggcaatggttttgtaagatgagcagcttgcttggtggacgtcttattcaaccatccagcatccacagagataaacacactagagtcagaaacactattaggcagtgtcagtaaagtcacatagaataatgcaggtggtccactgtctctgacatgggttctgagttatgctggttgttttcattcaccactataagcaatcttctgctttttccaggattttggggaacacaaggttctgggttagaatctaatactgaaagtgcactcaagatagttggaaggtagaaaagaaatacaaaggactattccttggagacagtcacaagcagctatgtgaacaaatgttcagcttaccagagcttcagagtgagtttttcagaaccactggcttcatttcaaacactgacatgaatagcgaaaagaaaagtggggagatcaccactgaccctttcatttgcagaaacaaaatagcctgggcatgaatctcaaaacgtcttactgattttccaccaaattattgacttacatagcacatacatgtctctctaattagaatcgcactcatggcaaaaagtttaatgactggttactccattccactgctttcttctacctttggggtatgagttgcaaacatcagaaaagtatctagcatttccttcatttggtatgtgatgcagcagagtaacttccctcccttgatcagcgacaattctctccttttgaacaccgagaagcacagtccctggaaagcccagctaaaagtgaaaagggatttgtcttctcacatttgattcttcataaaaatgatgtcccttattagagctgtctgcaagcttcgatgtgtttaatgggagaggagaaacacatattagaatttctattcaataatatgttgattattctgaatttccatttgttctatgttttataattaatataatattctactagtatgtaacttatagaatgcaatataaatatacatatattatgaatgtaagccaataaatttttgctgctgttaatcacaattaatggtatttgaggacaatgacttaaattgtgtcacatgtagtcatctgggaaaaagaaaggtactgggttttaaaggggtttattcatatttttccttccataattccaaaagattatgatttagggg

SEQ ID NO: 24700 - DNA, 1219 bp, Bovine  19866881023141
  misc_feature (1)..(1): n is a, c, g, or t
ntccccaggaaggaaatcatcttattatctacaaaccaactcatgttcttggtcacagtcatatatctatgaaatgttccacatgatcttgtgcatgtaaactgagcacttaaatccccatgtctgcaatgtttacctgctagggtactagagcaaagcctgaaaaagaagataaaaattaaggtcttgaaattactttctgggatcatattctgccttctttggggcatatagctagaaaaataacaattatttacttgttattcttccagttcaacaccatccaggaatatcaagaatcagcagtttaaaatgtgcccttttcttctggccaataactagcctactgttaactcttcatttacaacaacataggctatatttaaaaaaataaaataaaataagagtacagttattggctatacaaatacagactggcagctgaggctgatagtagtaatgaacttgagaatgaaatacattgcggtgatttctttaatgttaatctaaacatgtaattatacacagctctaatttttttttctagcaaactttaaccagcatttgtttattcttaataatattcctcccagcaatctggagttcaatacaatttagacctaaaacctctaaaaactattgagtaaagaccatagaaattcaaacaatctttttaaagccaacccgagaagcagtgatcacttgtgcctgtctagtgtacaatttagaatgagcaattgttttggatcatgtagatatagactcaaccatgaaaatagcagtttcggtcaattgctctgagaaaatgaagaaatcccttgaaaagataaaagatgaagccagagtgctaggagcaatttgttaataattgctatgggacttgattggctcataaatgcttcactctgtcatatcaaccagttccttcagaggaagatacagacccataaaatagtttccatttactaataaagagctaggctggaaagacagaacatgattgataaaaagatgaagctatttattcacatttttccagttatgcagaacccttgccctctttcattgatttcagtgaggccaattccagtcctaagaattcttctgatatttgtgttctgactttctgcatagctccatccacaggtctgaatatttctggcagtcttctctgcagaatgcttcatgcttgggatttgaaggccatggcaaagatgag

SEQ ID NO: 24701 - DNA, 3078 bp, Bovine  19866881156908
  misc_feature (1)..(1): n is a, c, g, or t
nactgggttgagttccccgtgttatactgtaacttcgtactaactctctatattcaaagataaccttgaataaccaactgaatagtaaagaaaaatagcaaagtagaagaattcacactagttgattaaaaagcttttaagaaagctataccaattatgatcatgtggcatttgtgaaaaaaataaaggcagatcaaagagaaagttactatacaaatttactatacaaatgcagcagacccaattcctctattgacaacatttaaatatgtctggttttatctatttaatcattatgcctacaattctatgtaatacatttatgcttctctttcttcatttttcaacaatagttatatgctgctgctgctgttaagttgcttcagttgtgtccaactctgtgtgaccccatagacggcagcccaccaggctcctctgtccatgggattttccaggcaagagtctggagtgggttgccattgccttctccactagagttatataattctatatatatgtatatgtatatatatatatatatatatatatatgtatactctgttggttgcttggctttccacacaaagaactcaaaactgcaaaataatataactatggaactataaaatcttgtctgtaatactttccctttaaagaaagcacttgtcatctgtttctcaggttatatatagatctatctcattttttaatttcttcttatacattattttacaagagtcaaatgatttctttcttctgtccctccctacaccttgcaggtgtatcttgaatgtaatgaataatatgaagccatcagatcaaagaagcttagatcaaaccactaacttaagagccacataatcaaacaaaggcagatgacaggaaagtgcaggtcactttttgtatggaaagcaaaataaataaaagtgaaatttccgcccttccctctcttgtttctgaaaaaaataaccttcacaatggaccagaatgaagagggttttctggaaaccccagagatttaaattaaacagtctgctgcagcaaactccagctttttcttgcttggtttgtttcttgccatggattgcagtctttcaaccacagttcagctctgccagcctagccgtccttgctaattagtgaactaaaagaagaatttttagtaaatacgtcagaaattaaagaccttaactaagccaagaagaaagtgtgatttgaatcttaattactgctgtctatgatcttcactttcgcagagaaagattagatgtcttgacactactttggattaaaaaggaccctaaataaaaaagacaaaaatctagtaaaaatattgggtttctaacaattaacaaaattgattcaaattctaaatattccatctctgacatcatcccctaaataaattacaagtgctgaatctgaaaagaatgatttattctgcagtttcaacatcagggagtttttgacaagcactactaaaagggctcagaaaaggtgttttaacaaagagaattgttgattcagtgcagctgtgtttttaatctgtaacatctggcttgcctctcagtacagtctttctaaacatcaaaaagagtttctttttcttgtcttgattattacgtcaactcttaattagcaatacatttgtcttcctttcagtcaactaaaagatgtgggaagatcaagggaatgcagcagaccccttgtctattgtatcaatggccttctagttcccctgagagctctgtttgcctgtcctcacaggcacaatgggaccacaggcacatcagagacaactttcatctaattcagtgtgccttttctatcctgccttattctgttaagtattctgagtgtttgtagtaaaagcagctaaaatttattgaaatgctttacttccatagatacactgaaataaaatcagtagagtgttacttacatcctgtaatttttatttgcactaatttgtatggcacataattggcctaattatcttaatgctttgcaacagaaagaaaaatacatctaatatttcctcctgcaaagatgaatcagctttgctatgtctaaataattcaaagtaaagcaaagacttgacagatatctggttagaaggatcatcaagaaaatggcttatttaatatataaattcctcaaatgccagtctactttgttgaagcacagtaatagattattttagctttaccaaattaaaaattgtataacttaaaatatttaagaaaatattactttgggaaatcaaaattcaccacatatcaaagaagaattgagctttgaaaatgcaaattgtctacatatatttggaatctaaatgatttatcttattttatatagacatcaagcttgaattcaattacacaatttgcaagatataagttaaagcaaataaatggataacgaatgaaaagcccaagtgcagaattgcacaaaacaaagtaaatgtcacagaaagacatatttaaatatttttctaaggagaataatgtagaaaaataaaaaaaaatgagtattagttattcccatattttattcctgttttacatttttatgtaaagtttattcaataaagattaataaaattgaaataaactttaaattaaaatgcaggatctataatatgtatttgtcaatttaaattcaacattaaataaagttatttgttaataagaacaaaaatcaagtaaaaaattaaaatgtatatatctgtcttgaaggaaatccatctccccacttaggtgatttttccactgcacttgctctttcattttagtttctattagtaaattaaaaatgataataatcatagattttaaaatctaatctgtacaataacattaaaataaaatgtatacaaatatattcccctttgtgttactaatttactgacattctttgtacattttaaaaacataacattcttgatttttttttctattcacaatgaattgtgccatttaatttcacagcaacatcagttaatgtgcctgttaataaatgatacatattttaccaatacctcaagtcccctactttacccttctttccacatgaaga

SEQ ID NO: 24702 - DNA, 932 bp, Bovine  19866881325515
  misc_feature (1)..(1): n is a, c, g, or t
naaataattggagctctatttaaggcaattgatgtgttaatcagacttgtttgcttcaaataataaagctacaagttaaaccaattttgagactaattttgccaagagtcagaggcattatttgcctctatgtttcaacaaatgtcttcattaaaaaaaaaagaaataaataattaccttatttcacttgtctatttaaaataattcagtattgagcatgtacaaaaacattgaaacaaaaaactaactgtatacagttacaagaaattatttctaatattaggattttttaatggaaagagaaaattttacatatgctttgatctttggtttaggtaatactgagtaactctaatgaggttagttgacagatatttattgagtatcaataaatattgaacatcaaccttaaataatttgcctgtagagaaaaattcagtatttttttatcacttttacaattcattaatacttatttcctgaatgcaagagttgcttttcctttggttctgaaggtgaggcaatagttgttatatttgtagtgtttgcctgagagatcagtacaatctgactctctgcaaccccatggactgtagcccatcaggatcctctgtccttggaactttccaagcaagaatacaggagttggttgccatttccttctcccaatatttgttgtattgaaagaatgtcatcaattctgtcttttgtttgtgcttttactttcattaatatttattagggtataatttatttacagtgttgtgctagtttctattgtacaacaaagtgagtcatccatatgcatgcatgcatcccctctccctgggtttccttcccatttatgtcaccacagaacactgagtagaggtcctgatttaagctgacagataaaaagggataggatttaaggtgaggataaaaaaattctc

SEQ ID NO: 24703 - DNA, 770 bp, Bovine  19866880551065
  misc_feature (1)..(1): n is a, c, g, or t
nactgcataatactgctggactccaaattgtcaaacattacaaaacaagaaatgtttcaacaaccattcagcatgttttaaggacaaaatatatataatatacttgatattatatatgtattttatcacatactcagtaaagtatgccaaggtgattcatccatccaataaaattgaaaataaaaattttacatttctctacttgtcagtattcaggcttctgaaggtggatcttgaactcagaatggtcagtttttgaggaaagccacataatcggtgagtctggctaactgctgctctttggggatgggtggaacaggggcgggctctgataaggaaataaacctgttaaaggaaacatccagggcccctgcaactggcttcttgggcatgactatccttatggtggagtcggcttgccagccttgttcaaggatacctttcacagcctcctctacagggagtccaacaaaggctgcgaaatcgtcggcaatgatggaggtataggcttgggagaccagggcgaaggctcgtctccgggttgcatctctgagagcttccatgattggttggacggcctcagaccactgatgggcattgatggtgctgtagaccccggggaagtccctctgccagatctgctggccaactgaccagatccccccaagttccgagtttgcagattttatagcaggtggtattcttttccaaagatatcttgcattggtcatgtcattatggagtagatacaaagctagaagctgaccata

SEQ ID NO: 24704 - DNA, 830 bp, Bovine  19866880403744
  misc_feature (1)..(1): n is a, c, g, or t
ntggcctctggtctctggtgtagagagaacccttaagcccttggagcctcagtttttgctgttttgaatcaagggtggtgggtggcatggaggggaattgaaaatgatgttggaggaacatagacggtctcaaaggtctgttccagtcctaaaattctttaaaatcctttcatttccttaggtgttctataaataaactttttaaaggttaagcatattcattctctttccaatcctttgccttaagagttttgatggagtgccatggtgcctacctgcttcttttaactctatttgtttacacctggacatggccaagggtgggggactggaattcattgcctcggcaccggcaggttccccaccagactgcgggctgctataaatcactttactaggttctatttcctgcaaattccttttaggtagtgggggaagggtggccacagaattcaaaacagatttatcgaaaggcctttgagaataaactgcaagagatgacccagctgcagagctcagtgagggactctcagcgaaaaagactagtaattagtttcatttgtaggtgaaagaaggtctttgaagatgtctggcattaattataatggtggtcactgttgccatttccaaatcctgctttttaagatcagggactgtcagtttagagacggcttagcatctcctcttaggaggaagagagtacttaatgggggcgtaagtggtaaaagttggacatgcagagcatgggcaagattaaatagcatgtcaagtcccattcttagaaaactcgttcccgaaagtcaaattacaggctctctgcttttgtgtaa

SEQ ID NO: 24705 - DNA, 3196 bp, Bovine  19866880410068
  misc_feature (1)..(1): n is a, c, g, or t
nctgagcaagatcctcatttctcaacagacaacaggggtgtaaatggtttgagagcctgagtggatgcgtgctaggtcactttagttgtgtccgaccctatggatcatagcttgccaggctcctctgtccatgggattctccaggcaagaatactggagtgtgttgccatgccctccaccagcggatcttcccaacgcagggatcgaaccagcatctcttatgtctcctgctctggcaggtgggttctttaccacctgggaagcccatctgagaagccggagactcagtttctccagatttttgacttaagaatgatttaggtttgtttattctccagggacttgatccacttaccactatttattaataaaccatttcagtagacagagaattggagttttatattgaactgggggggcggtttccagagtgtgggtgcccgtagttgactgctgctgccatggcaaatatcctaaggaatacagcgccgttttcactttgatagaggtgaattactttgccagtatatgaaagagtatgcttggagtatcacagcgctttgtgtaaagggggaaaatacaacaattacggtgaattgggtagaatagctgtgttattgcagaacataagactttgattacacactgccaagattcatatcagcctagtggttgttgacagataaagtaacataaatgaaacccatttattattttttttctttactgagacctcaaggtaaagcagattttcagttcttgtagttactatgctgatagaacagagactgacagcaaaaatgtgccagtccagaaatataaattaagcttaggttcatatcaaaattccatttagtcttggaaaaggacctgctgttgggattatttttgatcctaaaataaatatattgtgcaattccacagtatacttggtctgtattaaccctttcctgtgagcaatattttcaatttttttttttttttgctttcagttgacaaagctttattttgcagtgtttgaggcaagttatcatcagagtaggttaccttttgctgaatgtaaattactggcaaccggatgatacacatttcagtctgcagaaagtgtgaaagtagattcggaaaattgatagcagaccttttactgtattacaaattcgtgtttccagtcgcagtttcattatctacctaaggacaaaagttaagtgggaaacgtgaagtgagaatttttcgtgtgtgctgttgagattgtagatgtgtcttgagtacaatttctggctgcggcatttgtaccttccttcctgttactcaagccctcctgtttcttctttgctttggtcctccctctctccctcttgtccttcctcccttccttccttcatcccttcattcttcctctctctttctcctttctttttaggcaactagcaaagcgaaaattttgctatagtttctctcaattaagacaatactaagttgcctatgaaattccagatcccacgacatggtatacgtcgtgatcgatatgcaagtgggtaaacagaggcatcggcaaactctaaacaccattataatccagcggtctcatttcttgagtatgtcctaaaaataattttgattacgttttcaaattagccttctaaagtctgcatttgaaaattttctcattaattttttagcaacagacagatagcatgaacttgtttcttgaattaccttttctgaccttttgccagatgataattacaaaaaaaggaaagcctggaagacttgtaaaaaaaaaaataagcttatcaagtagctaaaatggcccttctgtgctggtgtctatttcaaaattaacattttggttcatgtgcttctaataatcactgacccttacttcatgtactttccacaggaaatgaatacagcagaaattactttgacccactgatggatgaggaaataaacccaaggcagtgtgggatggaggtcagccaagagggtgagctagaattaagtatgtaatttttgtgtcagaatattcttccccattcatgaaaatgaggtgacaaagatcacacatgcagttccatttagatttttgcagcttacaatttaaatgggaagttttaaccactaacgatgtgatgggcagcgaaggtaatttctgatcaaggacagcaagctggtaacctagaggaagtggcagctggctttcatgtgacgctgctgtctgcagtttgctgcctttccagggcccgtgtcatgtatatgaggagcgttatcactttacaaatgccggctcagcccttcacgtttaaaaagagcattcctcaataaacttcatctagcatgtgagatttccatacccagggactagtggatttctttcactgaagccatggggccaccatttaagttttgaaccacaaaggtgtagggtaagaatgatttcttctcgcaccttggattctagctgtggttgtaaaataactatttagaattgctcattatgtgccaccgccctgcgtatttggtatttatgaaagcgttttagccatgatgattagtaatttctttgtacttacatttcgcgtatctatgagttagctgaagagaacatatcataaatatcatatcataaaatatgttcttttagcattcatacaagttgataagggtcttctcaggtggcgcagtggtaaagaatctgtctgccaatgcaggagacacaggagatgtgggtttgatccctgggtctggaagattccaggaggaggaaaatggcaacccactccagtattcttgcctggaaaagcccatagacagaggagcctggtgggctactagtccaaggggtcccgaagagctggacatgacagagcatacaaccatgccacaggttgataacagaattctctctggccaattagtgaagtggtttcatgaggttattgagctaatgacactgacaaatattactcagagtcatttgcaacccaaaagatcacatttcaccacggggctccagacaccgtatctgccgtctaggggaaggggaacatgtttgaggtatgttctaattcagtgactaaggtggtcatccaacttgacatgatgtttatgttcagttctatccagtgttaggacatccacataatgaccctttaatcctcttctaagaaccatgtttctatactattattatttt

SEQ ID NO: 24706 - DNA, 1345 bp, Bovine  19866880430500
  misc_feature (1)..(1): n is a, c, g, or t
ntttagattttcaaatcactgatatctcaaatacccacaagatttggaaaggaagtaagaataagcagtagaaagagataatttgtccagcagggcagcggcttttgaaaacggtataagcagcagatccaccttcacagattagcttttctataaaggagaggagggaaatggtattaatttgctgtttctcactccatggttagaaactcatgcctttcagtttgagtttctggttaagatgaatactcgtgatgaccacctagggattcctatgaaaatccaagaaaaactaattttgagagttatttggagctttattatgggtgtcagtttcctacttactcattatatctcctaagtgtctactgttggcattttaaaaaattaatgatttgtagtgttttttcaaggtattgttcaaatactttgaaaattattgtctttgaaagcttttcagtcaaatttctcatgcgttcatggtatggaaacattgtcttcaaatactatttatgcaaaatatattaataattattttaaataattttagctcacatccccccttatttttgttctaattactttgactaaggtttctaagagactattaattaataatgtgggaaacctgggttcgatccttgggttgggaagatcccctggagtagggcatggcaacccactctagtgttcttgtctggagaatccccatggaccgaggagcctggtgggctacagtccagggggtcacaaagagtcagacacaaccgagcaactaagcacaaatattgatactggacatttaaatcatagtttgagtttccttcattagtttatttttttgggggatttgggttttgttgtagttttgttttgatacttaatataatgaagactgatttaagacagcaatttttatcctctctctggtggctcagagagtagagtctgcctgcaattcaggatacacagaagacagttttgatccctgggtcaggaagacaccctggagaagggaatggcaaccactccagtattgttgcctggagaatcccatggacagaggagcctggtgggatacggtccatagggtcacatagagtcagacatgactgagtgacgaacactttcacttttttcataatgaagactttaagataatttttatcatcttaaaaagtagctttgtgtctttagttgccattaatttaaaaaatgtttgtaaatcaatcttataaaaaaagtatttgagtgaatttagtaaagtaggtggtaaaatatctgcctagattgcagaagactccagttcgattcctgggtggggaatatccactggagaagggat

SEQ ID NO: 24707 - DNA, 1625 bp, Bovine  19866880439392
  misc_feature (1)..(1): n is a, c, g, or t
naatcgatatttaataaagtggctgctaccacataacacgggcaattccccacgcagccggagtcgtgattaggcgcccctcactgcctgctacataactcaattgggttttgtgcactggcctggcacctgtgtccctcagcgcccagcctccaaggtaataggtttatgagccgatgaacagagttgataggttctaaatggattaactaggtgtctgcagcctggtgatgaatacatcaggccaaaaaaaaagaaagtctgcataagcaggcaagtgatacggagtgttgacagacattgtgtgtgtcctaagccccacagggtaaacactggctcggtgcctgtcattcaagtgttgtctctctctctctctctctctctcagagtaatgggcgaagatatcaggccgggctgcttaacaagcctgcgggagccaggacacagagccctgctcctgaaaaggcctccaccaggctccgctggatcaccagttatagccagcgtgagaatacacctccatattaatatgttttaatgtcccaagaatgacaactagatcgaaattcctgtttttgttattgtttagctactcagtctcatctgactcttctgcaaccccatggtctgtagcctgccaggctcctctgtccatggaattctccaggcaagaatactggagtgggttgccatttccttctccaggagatcttcccaacccagggattgaacctgggtatcctgcattgcagggggcttctttatcactgagccacctggaaagccccagccgctggtggcttagcagtacccacaacacagtaaatggtctgagtatttcctgagttagggaaagaacaggttgagtggcaggaaaatcatttcggtatgagagagatgtacctacccacaggcaacttcatctagcaaatcagtgtagccctttgaagtctgctgggaatcagtttgaatcctgacctgaccttgtactatttgtgtgacctagaataattaatttcctagagtgtcctcaactatacaatagaattcatattattctaataggtttccagtagaattatatagtgtgtgtaatgatcttgcactgcacatgatactttaccggtatttattaagtattgagcactgttatttgtaactaattcattatgtagacttaagaggcacgaatatgaagctctgacaagttggagtactgggcatagggttagcatgttggtagccatgaaaaccaagggagtagatgagattacctcagaaggcagaagttaggccagaagagtgatgaaaccagagaaccttgaagatggttaacagttaaatagcagcagaggaagtagggtccacagaaggccaacaagtatggtcagagtcaggatggctagaaggtaatagtattctggctgccaaggaaatgaggtactagctgttcatcaattcccaagttttctgatatcatctcagagcaggactgtcacatacggtggtacgggttgtatacggcacaactgtagggggaagtgttctatgtgaatagagccctcagagtgatacagtacacgtcctgcaaggccacagtcaggaccatctgctatcaggatttt

SEQ ID NO: 24708 - DNA, 1747 bp, Bovine  19866880449574
  misc_feature (1)..(1): n is a, c, g, or t
naaaaatgagttgaaagtgcaaagtccccacgtaccctttcatcccatctctagtttcttctgttattaatatcttacatttgggttacatttgtgcaatttatgagcaagtatagggcttccctgcttggtcagtaaagaatttgcctgcggggcaggagacccgggtttgatcctttggtcgggaagatcccctggagaagggaatagcaacccactccagtattcttgcctggagaatcctatggacagaggagccaggcggactagagtctacggagttgcaaaggatcggacacgactgagcgactaaagcaccaccattgatggttattaggtaaattcagtagtttacacagggttcactttttatcttgtatagaaaatcaactggaagtcctgccctatgtaggttgtgccgaattactgggacatagcggagtatgtcagagaaggcaatggcaccccactccagtacgcctgcctggaaaatcccatggacggaggagcttggtaggctgcagtccatggggtcgagaagagttggacacgactgaacgacttccctggagaaggaaatggcaacccactccagtgttcttgcctggagaatctcagggatgggggagcctggtgggctgcggtccatggggtcacacagagtcgaacacgactgaagcgacttagcagcagtagcagcagcagagtatgtcatagttttgttgacatttaggaaacggggcttgccatagtgggtatacctgatatgttttgaggtagtaacactaattggacaccctgctctctgtatggactttcttcaattgatcagagccaagttggtcaggatcttctccagaacacggcaaaaacaggcaggaattggctggtggaactagtaacaatttaatatcaaggaatgatttcatttaaaccttaatctcattttaatatagtaccattatataaaacataacacagaaaatgccaatagcttattattttaagataataagctttcaggttgttgtttcatggaaaatacaagctgagccaatgttctaaagaagaaaaaaaagtattttctttcttttcattttgattcatgaagttaagtctcataggtaggttagtgttcgcattagctaaagagaaaacattgaaagtgagataagaaaagacctgaaaagtgcatttggaactagcttgcccacgactatccatttttgtcttgaaaatctattaggattccacaattgtgtaaatttcacagttctttttattttataaaatagaaaatgattacaattttgtgtaatgtattgtacaggtttaataggattgcactcttgccaagtactgtagtaacaaataaaagcaatagaaaattgctgacacactaggaaactgctagttcaacacaaatgctttctgtagataaatctggcgtaatttccctatacatcttgactatgactttcaactctgctcacaggagagcagttgcacggtgctggcaggcgtccgtatgtctgcctttcctgtacattcacagcccagcagtgcagacatgttgcttacaaatatggcagaagccacccaaggcaactgagccacaatgccgactctgcagttgcgtgtcttccccaaaggtgtattgccaagaacctacagatgcatcatcccggggaaatggagacagtatcagaaggggacagtggcttctgagtctgcttcctggtcgagt

SEQ ID NO: 24709 - DNA, 1104 bp, Bovine  19866880464293
  misc_feature (1)..(1): n is a, c, g, or t
ntattttttaaaaagcaattttcccactgtagatttagaaaccaacagatctattttagccagcataatttcttattaactaatttaatctgtgcaaaattatataagaaagcaaacaagcctccatcaattttcttgcctttggatgtaacataatattttcaaaaatgaaccaaatagagtaattagcccccaggcagagcaaatggctctaatagccatctcccacatatttctatggtggaaagactgaaaatgaatacagaaatgtggcagcccatgggttaaagccctgcatgtaccctcttaagtaacagtttggaatattaatacctagggttaccttttcagaagttcaagataagagaagagaattatattttccccttaggctgccaaaatctctcttctgatgggctgcctgatttcaaccttccaggggtgcttccctggtggctcagtgataaataatctgcctgcaatgcaggagatctgagtttgatccctgggtggggaagatcccctggagaagagaatggcaacccactccagtatttttgcttggagaatcccatagatagaggagcctggtgggctatagtccatggggttgcaaagagttgggcatgacttactgactaaccaacaataacaatatgatttctacagtgcttgaaagtgaacagactttcttgcattgttaacagagggtcactttccgcactaattgtcccccagggagagaaccttgcctgtgtaagagatgacagagtgatcgatatgaaaataccaggggagtattgtttgaatagcattataggtgattctgaaatgctgctttgatggtggtgatgtgatggtgtcaggggatgtcactccctccacaattaagaaacactgaattaaataatatgactccctataagaagcattgactaatttgatgaaagtgattttgattcaatgtgtatattatattgtaaaatatagagaaaaaggcaaagcaattttccaggcgaagaggtgtccctgatggtaaaactaactcatccttccttattgcgggttatcactctctcctcttttttaaattccctattttct

SEQ ID NO: 24710 - DNA, 1761 bp, Bovine  19866880511047
  misc_feature (1)..(1): n is a, c, g, or t
ncttgttgcgagttcgttactatagtggatataaagtgcctactgtatagaaagagctcatcaatgtaagatgttaatactagatggcgtgtttttttttttcatcaaaattgtcacaaagtcaagattggtttatgaattcagagggacaaaaggcaagtggtctcatgcaaaactttctcccctgctgacataaatttgcaaaattagcagttcctatattttatgttttgaaaacattttattattaagaacttattcacacaatataaatctctcttctgaaaaccccagataaaagaaatgagttcatttttattcaagactgtaaaaaaaaaaaaaaaattcattcccacacatgctaccttgttcaagaggaaaagcttagacttggaggaaatgggcttctgcatttcttaggatgtctaatgaaatttattgatttatattccattctgatcactaattagagttaatgcaacttaatgacccagctcctctccaaactacttattgagatagggacgccctaagaagttgcggatggtgactgcagccatgaaattaaaagacccttaccccttggaagaaaagttatgaccaacctggacagcatattaaaaatcagagacattactttgccaacaaaggtccatctagtcaaagctatggcttttccagtagtcatgtatggatgtgagagttgaactataaagaaagtgagtgctgaagaattgatgctttcaaactgtggtgttggagaagactcttgagagtcccctggactgcacagagatccaataagtccatcctaaaggagatcagtcctgggtgttcactggaaggactgatgctgaagctgaaactccaatactttggccacctgacttgaagaactgactcactgggaaagaccctgatgctggaaaagattgaaggcaggaggagaaggggacgacagaagatgagatggttgggtagcatcactgattcaatgagagttggtgatggacagggaagcctggcatgctgctgtccatggagtcacaaagagtcagacacgactgagtgactgaactgaactgaagtgaagaagttgtgggtgcttatccatacaccccagtaagatactgaatattcatgccctgaagaccacaattactaggaatagagaattctggtgagtattcttggatacaggaaagcctattttttcagtaattgttgtactgaaaatcattccaacctgcttaacatacagatatggacatatatcttgatggtgctccataaatcttactgcccttaggaagatcagagaacatctagtctaatctctcatttgtagataaagaatctgagattcaggatggttaagtaagttttcaagctcccacggccacttcatagcaaggtagagttttaactcaagtttcctgaggctccttacattatgtttttgctttgatttttttttcagacctttttccagactactgcttaaaatgacatgaggttttattgtttttttggggggaggtggttggctattgtttgtttatttggggcggggagtcggggcagattgaccatatcatatggcatgtgggatttaagttccccaaccacggatagaacccatgccccctgcactgaaagtgtagtcttaacaccagactaccagggatgtcccttgatttttctttaaagattcctgatgttgaaaagtctctggtcctcaatcagggatttgaattatga

SEQ ID NO: 24711 - DNA, 1470 bp, Bovine  19866880551114
  misc_feature (1)..(1): n is a, c, g, or t
ntttccttcaaagaagacaggggtggatttcacttgttattatttaacatgtccagccctggcaaggtaagagtctggaaatgaaaaacaacatgggcagggtgtgtgaatcaggattgtccccacatgccagcatcctgaaggctaaccaccccgtcagaagaagccacaggaactcagctcacttctgttaataccttccatcaagttgaccccagtgatgggaaatgattcctccataggctataaatcattgcagccctcagatgggaacacacattgtctcaaatggagtgcctggctagagtgaaccaattaattctccgccaggaagactgtatacttattttgctttccagatcttcaaagagcggtgaaagaattaagtaacccccgaaatatttaaacgggcatcaacaaatgagcaaatcagacagactcgctcttcacagctgttctccgtccagtgcatatggcacaagggaagggacaagtcttgcctctcgtgtacgtgcttctgtgtctgtctgagtgcgcacgcgcagaagcctacgcgcgcacatgtgtgggaagggctttggaacaatttacaactgccggtcttctgatgaatgaaggtattagaagagcagatgtagggcatgaggctagaaagtgaaaagctaagcattgccttggagcgccaggaaatggggccagcatggtgaaaaccatcaagttgcctgggctgtgaatgttttaatgtacaataaagcactttgatagctgccttaaaaaaaaaaaaaactggtaatgtttgcaagtgtttcctgaaggcctcactgaaataccaccagcagctaacaaaggggaaagggttagtcgtcatcaataatacggggaaagttgctaaatgactctggcaaacagcacagtaagtgaaaagattggggtgcagtgtggggccactacaaggaacaccacctgatctggggaacgatgctcctcccatggggtaatgtggagtccagaaggcattgtttctcccccttaacctttgtaactgctgcaggagactttcgccatcagagttcagttagtcttaagttgttgctatttagtccctaagtcatgtctgactctgtcagacaccatggattgcagcacaccaggctttgctgtttttcactatctcctggagtttgctcaagctcagtcttcaattctgaccccttaattggcaacttacaccttccagaattatctgttggacaaagttaaaaaaaacaaacaaacaggcattcccatgcctgcccataaaatatgtcttacatctgagaagacttaacccaagaccctgaatagagagaaatcatagtttcttcctgatagtataggtccctgggtgcgaggaaggagtgtagagactgtatccccagtatctcacagaccgttcattgtttaagggagaatcacttttactccttagac

SEQ ID NO: 24712 - DNA, 1256 bp, Bovine  19866880552029
  misc_feature (1)..(1): n is a, c, g, or t
ngtgctgtcctccctggttgctgtccctttctggccgatttctctgctgaccttttggggttctcagacttcatctgcatgcccttttctgctctctttctcctttagcactcagtgtttccccagcagattaatgacagctaataatatctgatatatctggacattgccacataatgagttgcagtcccactgggtcccagaagtgtcaccactaacaaattcaccagacctgcgcataattagcatgtgaagggagtgatcccgcagtaaatctgtagaggaagatggatggcccaggagagaaaatataagggggggaaaagtccctccttatcacgcctcactaaatatatgtttcttggccggaatattttcttgataacaaactgtggccaggttacctttacagtaacattattcctgccatggctgataggcagaatttcattatgtcactgctaatgtttcaatatttctgcaaaatgtcaccatatgtaaattaagagaggttagggtttcccttgcaatttcctttaaagacgcacaggccccttttcacggtggcctcagtgctcacttcacacacccgggatggcctgggatatagtgacgaagcacagacactttgccctcaccttaccaagactaaatgaaacgacctacatggaaacgtagctttttcaccttcgaaagctgaatgaaaggacctacacgctcacagacactgctttcgcagctgcaaagacaacatacaccaggagaagaaaatccggaagaaggaaacccactgtgtccatagtctaattaccaacctggagatctataactcccgtttacatctgcctgttcccgagtggttcagtggtaaaaaaaatccacctgcgataaagaagacacaggagaagccgtgggttcgatccctgggtagggaagatcccctggaggagagcatggcaacccactccagtattcttgcctggagaatcccttggacagaggagcctggtgggctacagtccagggggtcgcacagggccggatacgactgaagcgactgagcacgcacgtctgcatggcagctgtaggatttgtctcagcaatcagaacaaaattcgagtgtttcagatcagggttagggttcttgtgtgtttggtgtggcttgagggccgtccttgatcttgcaaatccacgctagggtaaggtgtgcttcttgaaagataaaggtagggctctgagggagacactttaggaat

SEQ ID NO: 24713 - DNA, 1970 bp, Bovine  19866880552387
  misc_feature (1)..(1): n is a, c, g, or t
ntagactcaccaaatttgactaaaatgtaagattatggttctaggtaactgggcaacctttgagactcttggcaatgtagtgcatattttcagctcaaagtatccagtattttgcaatgggcatcatcctttccctttttaatggacagatcattgtatttgagagtaataggtacaggtgacagtaataggtgcaaacttgctttttatgttagctgtgtttttcaaaaaggtgtgtttcattctaatttctgccactcaagacttcctcaaggaagaaggggcacaacagagtacagcatccactgcagagcagaaaagatggaggctggatgggtggaaagaagggagtggatcaaagcttggaaaatattgccatgaagaataaatccagggaggacagacacttaagccccatacattggagccaccagaaaagaaaaagcatacagaaaaggggggaggatgaaacaaagggacattaaggtttgcaagtgagagctaagatttaagatattctataaacgtttattgaatggctgaaggaatgcgtacataatatcagagtcccttcactgagcttgagacagcagaggcgtaaggataggagagaaagaggggtcggaaggtgagcgttcagaggctcttacaggatgcaatcaggctgaaacaaccaagagttctccgggagctgtacagaaaaacagaacatgcagtatggcttttgcaaactcccaagaagttctgggcgatgttggctaccaagcgacacgtgtaagagtcatggtcacgctgtgcctctcagcatcaaccaggtggctggatggaaagggatgcagcgtgtagcaaactacttcacagctgtttttacgtgtggattctgaagctgccaaactacgtgaacggcacgttggccccgacggccgcacaagcgcagtgagcccccgactcgggcagacgcgctgcgttcctgcagtacccacggtggctgcagggcagctcacctcctcagagaatgcgggctgcggcagctgctggtgacggcgatagaatcagataggttctgccctgcagtttgtaagtgctgcctgcctttcaaaggcagagcctccaaacagtacaggagtgaacaagtttgcaaaggaaacgcacttgcagtctgaaaaccagagcagctggatatccaactgtgtgaagaaattcagagggctcttcctctcccttaaattgatattactcacccccgttttatagagtgaaagcatatgcttaattcctcaacaactcagaccaatttccacatcacagccatatacatggaatactcgattccacctaggtggtgactatgtgacttttttgcttgggtattccttaaggaggattataaaccaatggctctggaggtgacattttttaaataaaatgaaatgtgttgtaaatacaattgtgtatgacactatgtatgacattccaggtggcaggagtggtaaagaaaccgcctgccagtgcagatgtaagagacgtgggttcgatccctgggttcgaagatcccctggaggaaggcatggcaacccactccagtattcttgcctggagaaccccatggacagaggagcctggagggctacagtccatagcgtcgcaaacagctggacatgactaaagcgacttggcacacacacgcgtatgtaaagcacctaaaacaaacgctgcatgcccaccatccatttgtgacaatggcattaatctcctcatgctgatggtaattctattgtctccgtatcacagaggtgccttttcctggtgttactgtacttctttttgactctgctgtcattttgaacaggtaaacagactgctgctgctgctaagtcacttcagtcgtgtccgactctgtgcgaccccacagacggcagcccaccaggctccaccgtccctgggattctccaggcaagaacactggagtg

SEQ ID NO: 24714 - DNA, 3063 bp, Bovine  19866880637872
  misc_feature (1)..(1): n is a, c, g, or t
naaatgcccttactggtttgtgtccactcttctctctttcttaccttatactgttgcactcagggtctgatgcctatagtaacaatgcactctagagagtggacgtgcaaagaggcaagatctgaaaagagtttttttccttccagacagttttgtaacatcctggctaaaaattaatcactttgtcttacaatgaaaattaaaatgtcattgaaataactcaaaagagttctttagaacataaaatatccattaaaaacaacaatgtactttaacaatttgagttgatgagtcaaagtgtatgggttaattttttcttaaagttgcactctggtttcaaaactaaatgaaaattaaatttcagaaaatgtgcatttgatagaatatcaaaccaaagtttggataataattcaatacattctaaaattagaaagcttaaaaatgtacattaatgatgctaaatttgacatatggaatcagagacaccaagaatccaaggcatgaatatcgagtatttccacccccacttacaacagaggacagaaaaataacataaaatagcatcacttacaatgaatgcaaataaaataaattttattgtttcaagctgtaaatatttccagccatctcaaatggaaaaatttcacccatctatgatttattactgctgctactgctaagtcacttcagtcgtgtccgactctgtgtaaccccatagacgtcagcccaccaggctctcctgcccctgggattctccaggcaagaacactggagtgggttgatttattactactttttatacttgcttcttaccgtctgtagtccagcatttgttctgttgcacgcagtgatgacacttcaccgtgtcgttagctcctctatagcagggcactaagcctatacatcttgcgcctgtcccagcacataggatggtgtcagatctatagcatatatgtaaactcaagatttatatttaaaaaaaaaaaaaacagatcactttagtgaaacttagaaaattttaatcaaacaataaagtggagagaagttgaaatatttacatctaatatttaatgttatatctgtttaaacctaagatttattgaagtaccttttttacttcccttgcttcattttcataaaaccttattttgaattttatttaacatagaaatcacaacttataattctaaacttaaaaaataagatagtctcaatcctgggttctgggctagacttaatgtcaaagtttgtgaatatcttgtcctgaatcttttaactctgatattagttttgagccactacatttatttaaagtcagaggtacttcgtttcaagatatcagcattctattttcacgttagaaggaggagtgcaagagggatcaggacagaggagaagaaaaagaaggaagaagaaggagaaagaggaagagcaaggagaaggcaaaggtgaggagggagtttgggggaggaggatgcaaacagaaggaggaggagggaggaactaaagaaaaaagaaggaaggatgtgagggagggaggggagaggaaagaaggaaaggaaacaatagagggagcagtgttattgtcatttttctaccggaaacagaaaacccctggctttagattcttttttaatacagaagaatatttttatttgctcacattttggtggtggtaaatggggatgagggtgccagtgttctttggttacttattcactcattttcttttttttttttaataaaataaactagtaagacatcctgtctcagttattaataatttctgaaggggtttttgtttttactttttggtatcttatattcttgctgtatgtagaagaaaattagataaaatgtaacagcttgatttttaaagtattttttaaaatatctttgtgctatttgatgttctagtaccattcaagcagacattcttcagtgggccttgagctccctggtactcggatccaacatctggcatagagccagatgcagtcagggctcattgcatcttgtttgggttaaaccatttatttccagcttttcttttcaaagtcaatatatacatattttactcctgtgtaagaatcaatgagagtctctgattctataacttgttgttcagtttctaagtagtgtctgactctgcaatcccatggactgcagcacaccaggcttccctgtccactatctcctggagtttgctcaaattcatgtccattcagttagtgatgccatccaaccatctcatcctctgtcgcccccttctcctcctgccttcagtctttgccagcatcagggtcttttccaacaagtcactcatcacatcagtggccaaagtattgacgcttcagcttcagcatcagttcttcaaatgaatattcaggattgatgtcctttaggattgactggtttgagctccttgccctccaagggactttcaagagtcttctgcaacaccacaattcaaaagcatcaatcattcttcagcactcagccttctttacagtcaattctcacatcagattctataactaggatggtctgattttataactaggaggacacatttttttaaataattaaatcaaaatattctattctagatattttctgacaacataactattttcagccacaacttttctttgtaataatatttactgaactacaatttttagattaaccaaagatcttcagttacagagagttcatccttcatttaagtaatgaacagataatgcctttactagagattctccaaatatgagcagattagagttttactgggaggctccacttccactggcctagctccattggtacatgggttcaggctataaggatcagctaccatagtatgttaggctatgaaagagcagcaataaatttaatagaattgaaataattgaatgcatattccacagccacaataaaattaaattagaaaacaagagaatgtaattttggatatccacaaatattaggcaatatttggaaattaagcaacatacttctaaacaatccagggtcaacaaagattacaaagaaaattagaaa

SEQ ID NO: 24715 - DNA, 1818 bp, Bovine  19866880655672
  misc_feature (1)..(1): n is a, c, g, or t
ntatttagctattttctctgataaagtgctttgcaaacattttatccaattaggccaggcagatactggcaaggtaaatgttcttcttctgaccaacagattagctgcaaaggaaagtgatttcatgaagtcagaaggaacgcttcgataataagtgtgacaaaactgcatctctgcttcctgcgctggtgtcgttcagtctggagcactagtcgccctaagctcgcgtatagcttctctatcataaagcggccctacatttgcttatatttcactctaagaaaatttctcttggaaaaacagattcattctattgtaatattgcatccagtatttgttactacagagtatggaagaatatgctctttggggtgggggaagggaggattgtgagtttgggattagcatgtgcaaactagtatatataggatggataaacaacaaggtcctaatgcacagcagaaggaactatattcaatatcctgtaataaacctgtgtaatggggaaagactgtgaaaacgaatgtgtgtatgtataactgaggggcttcccaggaacctgcctgccaaggcaggaggcttaagagacccgggttcaatccctgagtcgggaagatccctggaggagggcatggcgacacactccagtattcttgcctggagaatcccatggacagaaggagcctggcgggctacagtccatagggtcacaaagagtcagacacggccgcagggatgtggcatgcacacatgtatgactgagtcactttgctgtacagcagaaattacaacattgtaaatcaactatacttcaatacactttttaaaaaaagaaaatagttttagtaaacggaaaaaaaaaggatgtcctaaagcagaaatacacatgttaaataaaagatattattttcaaaaaggtaaacggactttggttacctttgcttcaagatgtaactttatttttgaagtttgatttcattttctttttctactggaggataagttgtgtctgcctctgcccctccccgatgcctcccactcccattcaaagactgtcactggaaataacagccttaagagtttgggagtctctttggagtccttcaacatactcaatccctgttttctcattagaacattcatacttttgtgcctcagtgggaatgatcaattatttcaatgtcagtagtgatactattacccttaagatttagcaattttcaaagatcttttaacttaattagaggcattttttgtaaattgaattaaacctgttcaaagtacaatgtgttatgctaaaagtatactacccacttggccaaggagacagaattttagggggaaaaatctagttgaaaaatgctaacctccagataaatttgtgaagttttcttttttgagacagctttctaaatgttgggagaatgggtaacagttttgtccaaagcattttgttaaatgtgaatgtacagacacttttgtgaaagtatttcccccaatacttgaaaccgtgacaaaacaagagcagatttggacattttaataactttggttaaaaaaagaaagcagatgccattcataatttacatagattaatccaataaccagcccatgattatagtaactcatttttactaatgttatttctttccaaataagtgtttcttcatcttgacatatatatatatttttttaacctcgttttcttttaaacatgatgtcacagtgaactgacccaaagagtccctaccagtcaaaccattgaatgattcactgccatgtgcttatgaggcttctctccgctgccatttagaaaat

SEQ ID NO: 24716 - DNA, 1095 bp, Bovine  19866880687821
  misc_feature (1)..(1): n is a, c, g, or t
nctggcgtgctgcagtccatgtggttgcgaagagttggacacgacttagtgactgaacaacagcaaagaatatagagaaaagctcagcaagtggaagttttggctcttcccaaaccaagtaaaatcttgtttgataaagaatcttttgaaatttaacctttcagattttcatctgaagaatgagagagctaggaaaaaagtggtctttaagttacttctttgtgttaaatattatcttatcagcatgcatattaatgtttggaaatcatttggtagtagggagaagacaagacattctaaagtgatctaatcaatgattatataacaaccaactgaactcactagatacagtttctaggtcaatgatgatgagtctttgatttgatgctaagtttctacagctgttgaaagtcagaataaactaatttttgaggaacagaagatcatttcctaaatatagcttttctaagattataatatgtttatgttatcatcacttgaattcagcaatggagatgattgaaataaaatgtatattcaagatatttaaattcactatttaagatggtattgtttaaaatatgaaaatgtataaatatgccatatatgaacatccttcacataaatgagtatattttaagctatgtgatgctttttaaaaccagtcactatagaggttgaggaaaatgtaaggtgataattttattgatacataagatggcatcactgactcgatggacatgagtctgagtgaactctgggagttggtgatggacagggaggcctggcgtgctgtgactcacggggtcgcaaagagttggacacgactgagcgactgaactgaactgaactgaaatgaactgaattcctacaatcagagtaaattttcagaagacaaaaggatactgaattttatatcaggaatcagtatttgttaatatgttacaagttttactctatgctttaataagtaatactaagatttcttattgctcatctaaagatattttaaaaaataatcattgaaatattaaaaaaattacagatttcagatattttttgaaccagtataccagtataaggaaaataagttag

SEQ ID NO: 24717 - DNA, 799 bp, Bovine  19866880706030
  misc_feature (1)..(1): n is a, c, g, or t
ngggtaaagaatcccatctgccaatgccagagatgcagaagacatggattcgatccctgggttcgaaagatcacctggaggaggaaatggcaactccagtattcttgcctgggaaattccatggacagaggaagcctggtggcctatagtccatggcattgcaaagagtcaaacttgactaagcaactgagcacacaccatacatatattacagttactaagatttttcagaacccatgatgaaattccagacagaggggaaacatgtccaaagaattatccctattgaattatactatcggagaaggcaatggcaccccactccagtactcttgcctggaaaatcccatggatggaggagcctggtaggctgcagtccatggggtcgctaagagtcggacacaactgaacgacttcactttcacttttcactttcatgcattggagaaggaaatggcaacccactccagtgttcttgcctggagaatcccagggatggtggagcctgctgggctgccgtcatggggtcgcgcagagtcggacacgactgaagcgacttagcagcagtagcagcaattatactataaagcctcaaaaagttgtaaggatgtaaaattttctcaagaggatgcgtgtgtgtatgtgtgtgtggttgagtgtgcatatgtgtgtgcacgagtggttgactgtgggtaagatatttctgcctgctcctctgagctccatgaagaattgacttgtagaaacaggtcttcttgccatacaatgttaacatgttgttaagtctaatacaaaggca

SEQ ID NO: 24718 - DNA, 1136 bp, Bovine  19866880750509
  misc_feature (1)..(1): n is a, c, g, or t
ntaagaaatcatttgaaccttttatataagtctgctgattttctttgaagttaagttttgcaaaactgcaaatacttgatgttctaaattgagtttttaagtttttgtacaatcaaaaaatcttagatattaaatgcaatctatcccaacattcatcccaaagtagaatatctcttaccaatctttggctgaaaaaaatctggaggcttctttaccattttcagtgaagggaactcattatttcagaagaaatcttcttccatgaagccttatcctgtcctctctcctgtcacaatagtctggcatttataacataaggttaacttgtggttgtatgtatgtattatgacctagtcctctttctcaaatgcctccttgcaccctaaccttctcttcatttcgataatttgaagatttatctgatgtagagaaactatcttgaaacactagtttgtctcagaaaagcttattttttttttgtttaactatgtaatagatgtatagattttacatgttaccatttaatccatgttatagtctgataagaaaataccactgccccaatttttgaatgggggacctaaatttcagagaactgatcgatttaattaatcacatgactgtttagtagctcgtgtattcaaatccaaacctcgttgattccaaatcctttcctgtgcatggaactgaatttccataaaatttcctcagaaggtctttgttgttaagaataaggtataacaaaacaaattggttttacttacctactgtttaacttcttcagaattatttaggtgttaggtcaaaactgttcattgtctacaatttttatgactcagtttaatacacagggcttcccttgtggctcagccggtaaagaatctgcctgtaatgcaggagacctgggtttgatccctgggttgggaagatcccctggagaagggaaaggccacccgctccagtattctggcctggagaattccatggactggatagtccatgggggtcgcagagtcagacatgactgagcaactttcactttcactttagttcagttcagtcgctcagtcgtatctgactctttgcaacttccctgtccatcaccaaatcccagagttcacccaaactcatgtcca

SEQ ID NO: 24719 - DNA, 1289 bp, Bovine  19866880813985
  misc_feature (1)..(1): n is a, c, g, or t
nttggacgagaacttagtgactaaacagcaaacacaaaacccaaaacttgaccgtgagaaaactcagacaacacgcagggtgtgaactgcacagaacctagtgatgaggtgcgcatggaatgagggagagaaggtctttccaagtgactcatcggttttctcttgccaagttggaggcctgtttgtaccattctccagagccctggtcagctgatggaagcccatttttgtcaggaaagatcatggcttcatgaatttgtatattcatgacaaaatcgttatggagcaccatatactagaaactgctctatatattaaaaaaaaaaaaaattaaattcttattctagtaggactttcctcagatttgagtattctgcttattttccaaatagaagtcatttaaccccacgattaaattgttattctatggtaatatatttgtatccaaagttgatcacttccctttaaaaaatgtgtaatttactgcagctatacaaagtgtaagagaacaaccatccttttcagctttgtttgaacaattgtgtgacctaaaataatgccttatgtacagcctggtctggatcaacttcagtgaaactggaacataattgcatggtggtttcattaatttaagcacatacaatacttattattcatcagggactgaagttttaatcaatgatctattgcaaatattcaagaattctatttgtagacaagttcagattaatgacttatagaataatacagaaataacaagagatgttttcttcattcatctgtttgccaagacaatggagttaattcttcctttgaagtaagtgtaaggaaaaggagaggtttgacttgatctatgagttatatattatattcttgcaccatttttaatctcctgtagcaaggactagtattacttatgaagtttatttccattccaaaataatatgacttcctgccagcaacttttttcatcatcatcacatcaattacctacaaaccaaatttatcaagatcctgactcaaataagctaaggggaaaaaatcccccacatagtattgacaagacagcttgaaagtctgaacactgacttgatatttaataacaaggattattactacttgggatgcatggtaataatttatgaatataaaagaatccttattttttagagatacatattgaacaatcactctggattgtgactgcagccatgaaattaaaagatgctttctccttggaaggaaagctatgacaaagctaggcagcacattaaaaagcagagatatta

SEQ ID NO: 24720 - DNA, 1251 bp, Bovine  19866880825793
  misc_feature (1)..(1): n is a, c, g, or t
ncctgaaatggaatttatcattatttattgccaagttctttatttcgtagatgtgcaaaatgaagcagagatggacaaattgacttgttccaggtatagcacctaagaaacagcagaggttcaggtcttaccccctagcctgttgaggattctttcctctagagcacagggcctcccctcaaaaggcattaggaaataggccaccggatcttgctgcaaattgctgagacagaagatgtgatgaaagcaagcagaataatcactacaatgcaggtagcaaataaagttttctttaaaaatagaccaaggcgtccccattgtttgtacccatcattatatgacagtaacttagaagtgagaaattacaatcaccgtctcaatattgtttattttatccaagactgtgcaggaaagaaaatgaggagaaaaggaaaatagcatttctagctaaaaactcgattttacttgccaatcaaactgctgctccggcattttgtaattgtagaagttgtaagagacatgtctgaatagatcatcagacaggtaagttctgtgaatgaaaactaaagaagagcaaggccaatgtgtatgggtaggagagaagctgttactgtcccaaagaaaagcgcctgggattattcaatcctgcgttgtagaaaaaatgcaggctttgcagtcatgtgagccttgagctctgccctttttcagctacacacttcaactcatgtgacgagagcaatctcaggcagaagatgggacaaataattaataccatcctactcactgtcagcattaaataaagtcatatacttagaagtagtggcataaaataaatgtagagtaaaaggcaattatgattattttcatatattttaagaagaaaatttcaaatctgtataaactgtagtttaatgtttacctatgaacctaccactcagcttcagtgattaaaaatgtacggtcaatcttgtttcctccaaatctacattctgctccaccttcctgtatcatttggaagcaagtcctggatgttacttctcatctttagatgttgttcagttgctaacttgtgtctgactctttgcaattccatggactgcagcacaacaggcttccctgtccttcactgtctcccagagtttgctcaaactcatattcattgagtcggtgatgccatccaaccatctcattctctgtcactgccttctcctcctgccttcaatctctcccatcatcagggtcattttccag

SEQ ID NO: 24721 - DNA, 980 bp, Bovine  19866880929308
  misc_feature (1)..(1): n is a, c, g, or t
nttttctcccctaatgtttcatgattcagtatggaactgaaaatcttattttagaatttttaacttttgtggaagtaggttttgtggcaacagttataatatttcaatgatactgaccttttaatctgttttgggatctggtgtgaaagactagaggcaatactcttagaccattttttcaccagatcatttgtgctttctagtacttcctcagggtactgtggctatattttccacacctactgccctgtgttctgaacttggcttttagaagactgccccagttcccttaaaagggagacaggtgacactccaagaactatgaatactggtatccaatatgagaacactacataccatgagaggaacagtttcatactttaggaaagtgctttggaaaaggcagactatcatttgctctgctctaagttgaagactaataatacaagtttcacattccatgactacagagggaacttctgcctttattctgaatagaataatacaaaaacaaaacaaaaatttcttcaaatgcctgtgtctgctacaagtgcatatatttacttatttttcttggaggcttcctagatgtagtattagcagccaatatcccccatggatttgttttctaatctatcagggctgtgatacagtatgctgtttctgccactgatatgttgctcggagatttaataatgggtaaacaaacacaacatgtggtaattcatttcaaattaaaagtttattaaactccggcttgatggctttatggctatttgcaatgaaaggagtgaaccttagggaggggtaggcacgtggtatgttcatggctgcagagtttctatctgaaaaatatgtttatgatcttctacaagctgtcccacattgataggctccatatgtaacctgctggatccactgcagtccccagattctaaaaaggactttaatgttcacttatcggttcacgtgtgcatgcg

SEQ ID NO: 24722 - DNA, 1510 bp, Bovine  19866880977421
  misc_feature (1)..(1): n is a, c, g, or t
ntcccaccccttttaggctgtcacacagcaccagttttgagcttccatgtcacacagcaaattcctactgactattttacacatggtaatgtatatgtttcagggctactctctcagtttgtcccagcctctccctcaacagggtccgtaagtctgttctctgtgcatcaagaggagtgctttactaaggtctctgtgatgcccatgtcgcaagggttaaaatagaagagtttatatgaattggaaaatccttggggacacaatgtatcatgtcaaagacttccagaagattcaacaaggaaactcagaatcagactcaaaatcttctaaagttacatttaaacaatatgcatggtccctgtgcttacctaatgttaagttaaaaaattcatcagaccttactgacgctaatgcaggtaaagttcgtgtgggtagccataacaacataacgttaatgagaagatacaaaatgcactatatttttatacaaagtaggttagttaatcaaattgtgaattttttaaactgcatcctgttaactttttttagtagatcttttgcaagtgcatagcttgtcgcttataaatagacacatctcatcagaaggtaagtgtgaaatccttggttgggggtgagggatggaggagaatatgttgacaggactggtatttgagtatctaactagccactttctaagcacaccatatcccttcctaagcatttatgagacccactgggaaacaaagaaatttaattctagtcagcttatttactttttgacagccttaagaactttatttgaaatttccatcatggaacacccagtatttgattaggaatgcattagctgagcaaacatttctgtaaaaataaatataaatctgattatatttggtgggtctaaaaaagcactcaaattcttagactaaaacctaatgtttggtttcctttttgtttctttttctagtatcagtcccctaagaacacttgacttgtatctaggatttatacggagagaggaatttcaattcaattcaaaaaccccataaatacctcagtggaacaagatatttaatattctccacaaagttttatttttcctttatatagaaaaataaatttgtttcccactatctgaaggatataccctagacattttttctgaagtgatgatggatttatactgactcagaagcatcagatcatttatatatttatgttttgcccacaatgtttcaggtagtatattggttgctgctggcacaaagagcaaggcaagggtcttgccctcaagaatgtcaaaatctagaggaacaaaaagaaatgtgaaaagaaaagaaaagaaaacaaacttttaagatttgatattatatgtgcaaaatactgtaggaaaacagaggggaaaaatggttataattgtctgagggtggtgacagaaagcgtcatttaatctgagttttgagtactgagtatggtaaagcaattcaagctacattagaatggggataaa

SEQ ID NO: 24723 - DNA, 1599 bp, Bovine  19866880982965
  misc_feature (1)..(1): n is a, c, g, or t
naaataaacaggcttctgctcagtaataaaatatctattctgaactccatctccaggggtattttcttcttgcatcaagcaaattccaagttccaaagaagcatgaagacagttatcttttaaaggttttactataaatgtggactataatcagaactacccacgtcatataaattccaattcctgtgcaataaaaagattagtattgatttaatttgaaaatataaacttagctacagtttgacatatatgtatataaatcacacatatatgtgtacctatatatatatatatacatgaagatgatttaaaaactgtatatgacaactgatatttctctttggctttgtttttaagatcatagtaagcaatgggcagaggaaaactgctctgtgttagtatggtggtttggttaattgatagacatttctcccttgatctttttttatctctgaacttctgggatgtttgtttctaacttacccaataaatatattgttaaacttttgaaaggtcatttgagcatggagagattgatctcttccataaaatgaaaatgatagataaagacaaaagaaagaaataatgagagctttctgaagattcctcaaatgtttgtgctttaagacagacagacttatttacattttgctaagtactttcccccttgattctaaaatcatttctatttgaagtgaagtgtaatccatatgtttttgattcattaacacttaatttgttagcctccctttactagagtgctatatagcagccttttcatcttttttataagcttatgttcctcagacacaggaaatcaagtttttctaagagtaaacaagcttcaactcaaagggccatgagagagttaaagcacctattagctttgaactacttctgttcttagtatgcaaatttcttctttcccaatccctgtgaatctgatacatttgtcattaaactgagacacaaaacacggcttcctgttttctaacttactgaattttccaactatcttactctaatttctcttgatgataaagcagccaaccgctaacatattaatgaagaagtcattagtgatcattatttaattgccatattagtatttattcttattaataatgcaggagctacttatcttttaacaattatgtggtgggaaattaaatttcatgtaaagtgttaaacaatgtcattttcttttatcttcagaagtataatgttctttaccaggaaaatgaaaatcaaatactttttcacattttagtgttttttaagaaacaagttttccaatattgcttgcattagtacaggctttagtgaaactattcataaaatgcaactccatcagaatataaatagtatttctataaaatagtaaaatcgtctttgctattcctacttgttcctgttagatattttgttttatagggtgttctctggattttaacagtcacaaggctcagataaactagtatcgcaaaaatgtcaccacagcattgctgcttgttcagacaaatcatctgtttgactgtgaacacttgcattttggtagatcacagataattaaaaaaaataattcttaaaatctaagta

SEQ ID NO: 24724 - DNA, 578 bp, Bovine  19866881033676
  misc_feature (1)..(1): n is a, c, g, or t
ntaggaagcacatttcctattcttggtaaaataaagttattttaagaaatgtaacaggctcaagatatcatattaaatatgagtgcctcctcgctcatatttcatctttcatatgaaaacttctgtatcttcaaattgttcccttactattaaaatgatccaacagtacagtgactctacttttttgttttccggtatttcgtattgtaggaatgccttaatacttggatgacagttctgtatcactgagcttgtcaatgggataattctgttcccagaaagacaagaagtgaatttctccctgaattcagattattcagcccgtcagtcactatagctttgcaaacctcctgggttttgggagaaggggtgctggaatgtgtctctcaacccagaaaatgaactcaataaagatcctggtttgccaccaccaaggatccctgggagatcatttccaatcttattggttgtaaagagtttcctttgttcagcagcaaactgggagttaaaaagcaaggaagtaggaagttcctaaaaatttataggggctgtttagagtaaaggtgtggtagctgtgt

SEQ ID NO: 24725 - DNA, 987 bp, Bovine  19866881075701
  misc_feature (1)..(1): n is a, c, g, or t
nttctcctcctgcccccaatccctcccagcatcagagtctttttccaatgagtcaacttttcacatgaggtggccaaagtattggagtgggcattgtgctaaacatccccgaagttccttcctgctgcctttataccttccttccgggttgtctctggatattttgctgtccttttcttcatctcagtaggacacagcagggctttaagaaaggaaataaagactcttgtttattttagtttacttaagttacttcgcagcttcctttggtgggctcagtggtaaagaacctgcctgccagtgcaggagactagggttccagccctgggttgggaagatcccctggagaaggaaatggaaacccactccagcattcttgcctggggaaatcccatggacagaggaggctggcaggctacagtccacggggtctcaaagagtcagacacaacttagcaattgaacaacaaataatagtgatgcaaatcgtacggtagagagctcaaggtcacggacaataggaagtacaggctatgcgctgagaggaattagaaggagctaatgagctaagattttcccaaggagtggaagctgattaaacactgaaggatgactggaccacagataacagaagctcgggtagagagaagaacactgagaaagaaagcggtccctctgattttcttcggccaataggattcatcttctttgggaaccaattgtttattgattctctggggaccgcttcttgctgttacatgagcagtgacttcattatggtttgaagttcactccgtttcataggctggctgcacgtgttttcctcaatgctgtcttggcttttgcaaaaagtgcttcatttggtcacaagggggagggttttgtcccctgaacacttcctggcttttgctgtcagcctttgattgcttctaaaaccattccctgggcctgtaatacatccatgtcacttgtctacagaaagtttaaa

SEQ ID NO: 24726 - DNA, 1399 bp, Bovine  19866881205652
  misc_feature (1)..(1): n is a, c, g, or t
nctgcatcggcaggtggattcttaccattagcaccacctgggaaaccccttatggccctacatacgtgtaaatgttgtctttgatttaagacatctcatttaattgtatgccctttgacttgccccactgaatatgaacaaacctctctccagatgtagacagatcaaacagtggagatctaaaacatcccaataaccttctattcaagtcaacttcactactccgaaaattagtgaaacacaaattattgcactaggaaaatcatgttcattttgcataattgtgtgtgagcgaacctagagggagcataattctgtaatttgcaagtgaggaatggagggaagcaggtttctaggcatttgacgatttcagtgctattctaatgacgcacatcgtctgcacaaggatggagccataatgcagccttatcccacggagcatttcattagttgctatactggaaactttatttcattgaagaaaaatcctaaacgtggactaaacttagtctttcaggacaagtcaaacaagacataaaaagaatatggaataaaccactcgttcatgttgcatattaaaagagagattctcactgtggaattctatctacattcctcatcgattatattctaaaagaaatacataaattttcaagtgaagacttttttctcggagacataagaccaaacttggttggctacataaaattgtgtacagcatgaagcaattatgtatacatatatacatttgataattgattgaaataggaaattatgtcctttaggatacagtaacaagttagtttttctaataatttaatacattttcattccaagtggtttaagccaaccaatgagaccaagagataattcataaaagacactctttaagcagaaaagaccctagagtttaatatggatccattggcttcctaataggaagttgtggtattgcaatgtgataagaaataagtatttattcttcctctgtggcttctggcacaaaagcctctaaaacccttggacttgcctgggtgattagggtgagaggagcatcttttgttattcacaataagcccctttcaactataggtggtttatgctaataaggtgattcttggtggacctctggattgcccaggtgggggctggttgccaaaggaatcaattaagtgcttagaggtttggaactttagcccggtcccagggctctggggctgagagattggagattgggttaatcaccaatctctaataattcaatcaaccatcctttagtaatggaacttacataaaactcctaaaaaacaaagttcagaaggctttcaaatcggtgaacgcacagagttgctgggagagcggttggcccagagagggcatgcaagacccatgtccccac

SEQ ID NO: 24727 - DNA, 736 bp, Bovine  19866881235944
  misc_feature (1)..(1): n is a, c, g, or t
nggagtggcagagccgggtgcgctacgcttacatttactctgaaacccatctgccttttgttcatacagagttgcattggtaatattattaacatttgcatacaagggaaaaccttgaggctgttgctaaagacctgtgacttcctattacttaaaataacctgcatctttttcttgcatttgtttctattcccaggagctttgcaaaatgttttaaccagaagccaagttcttcctggtttccaagtgtgttttgtaaaaattgtgcaattgtggtgtgagaaacacatatttctgataacagaggcaagatgtaatgtttgaggggttaccacaattaactatgctcacgataacagaacttactctacaaagtatgtataaccacatgaggctctacatgaggtttccccaaattgcattatttctagctgaattaagcacaggtaattttgttcagaagtctgggtttttggcaatgtaacatagtttattacctttctcaaaattggttcaaatttacttaagtacttgttctgtactcctaatggttatgctaaagaaagaaacatccaggcatgatcattttacttacccaatttatctgtcggtaatcttctattgggcttccttggtagctcagggggtaaagaatccacctgcaatgcaggagacccatgtttaatccctgggttgaaagatccctggaagaggaaatgcagcccactccagtatt

SEQ ID NO: 24728 - DNA, 1643 bp, Bovine  19866881289292
  misc_feature (1)..(1): n is a, c, g, or t
ntatgacgttttcttttcacccccctagtgattattatgttagacgatgtacggactcctaggcggtttggggtaattaattaggttattcgtcaggaaaagcagagattccgggccagtggagagtggggctggacagaagcttctctccagtcttcaggaggcacaagcctgccagcgctgctgtgccggggggacaaaaccgccttgtggtgggtggtccacgggaacgtaatcggagatctgcagtgtgtccactacaatcaacaaaagggcacaatagctgctctgtagggaattggaggagaagaatttgtttaaataaattctgaggttgtcagaatgtgaaagccattctcagacgttctgtgcagtctaagggaacgcagatccggaatcctttactctcaggccaaagtcctgataaaaagacaagctgaacttgaactgtataagataaaataaaagcacagataatgttactgtcagtactttagtggcacaaaagaaactcttctatgagttacttcaaaatgtagacgtttatgactgtgaagttttttttcttatacagcacctccaacacaaaaatgagatggtcaaattgttattgcttgtgtgtgcatgtgctcagtcatgttcaactctttgtgaccccacagactgtagcctgcgggactcctctgcatgggattttcccaacaagaatcctggaatggcttgccatttccttctccaggggatcttcttgactcagggattgaacccgagtctcctgtgtctccttcattgcaggcagattctttaccactaagttaccagggatctacctattagctatttatttattctacatttcaatgacaactctaattatcaagtgtagaaatacctattggaaggagcaattgtggaataaaattgtcagtggcagtcagtctaaatttttattaatcaagtatagcatgtctattggttatttctggatgtttttctaccaaaaacatagtgctgtggacatggaaattattgtggaggtccctgggctcaagcctctaaagaaattaagtcctggctaaaccaaattatgtcctgagaaagtaagaatggaaattgtggcccagggcaaagcactccaagtcattaggttaatgatgctcactgccaccccgagatcactccctgggacattacaaagacattagttaatgatgctcactgccaccccgagatcgctccctgggacattacaaagagcatgaaggaccactgacagtattatgggcaagaacagaagtttccggaacgcaaaacttttttttgtttgttcgtttttctgccacggcaaaatcaattccttaacctaaaactattcttatagtttcgtgggagagcagccccattttccactgtgttgcttaagtctgcagtgagaaaaggccctgaaagttgagaacaaaagggaacaggcaatggggactttttcatattccatcatagctctcctctctattgttacaccgagtcttgttttgagactgtatctagagtaaaacattctccatttccctctgaagtaaggtggtcctcctagaggtaggaaaactggatgctgtaaactccggcagcctagggggtcacag

SEQ ID NO: 24729 - DNA, 927 bp, Bovine  19866881431642
  misc_feature (1)..(1): n is a, c, g, or t
ntaacgctgcattataattagctgtctcaggaagtgagggtattttcagttaactgaatgggtgacaattacttggattactgtcgtgcttaaaatgtcagtgttaaatgattgctttaagcacataataataaattctgcattcttaagtggcaaatacaacaaagccaaatacagagaatgtttttagtggaagcaaaacttgaacgaatacctgcaacacacatttttaaaacacaggaaacaaaggaggaatagcaatcaacaagcagacatggttctgatatttaccacttcacttaaaattaggaaaaggtcaaaatcccagagagacaaccagtttggggacacacccaccatttccccagtaaatgcataaggactgctgagaatttctacagaacctgaaaggcttcttcctgggaatctgttaattatggcatttatgaaaataacattggttaatttcacacctgccattaaatcctacatgatttcctgggatatgttgtgattacactgtagctctgcaaaccatattttccccatgtcagtgttaattgtacaggattaacaaatgacaagcgccattcgctcatactgctaactgttggtaacgtctctccttgtatccagcgtaggtttggtttccttttgaatcccccagtcccttgagcaagcataaactactcaacggtggcagtttttccttcctgcaaaccatgccacctggaaagcaataccatggagcaggaagttccatttaacctcaaaagacaggtcttgcctttgccaactcaagtctactttgttaggttggataatattcttttattcatcacctctagttcaaccaacactattttaggagagcagagaagaaatattcttgtctcttgtctctcctctttgttcgcggggaagaaa

SEQ ID NO: 24730 - DNA, 1225 bp, Bovine  19866881501809
  misc_feature (1)..(1): n is a, c, g, or t
nggtacataatggctcctttttagtctttgatttctgacactggaatcacccagcttcaatactgctatgaagactctaaagttgtagggccttttgtctgttcaaaatacaattggattcggaaaaagactgacatagtagatctcaacatcttttcaacacctttcctgaggacacgcctttttttttttaacaagatgccattattctgtacatctacaaatgcaaaccactgacatgcattgatacgctgtgtgaatgcttctttgatcctttgggaagtgctgtagtaaccagaaagcaaaagaaaagtgagaggagggaagccctgaggaatagtgctttataaatcagaattgccatgcaatttacagatgagttcactgggtaccatgttagaatatgaatgcatagcaacagaagtatcagagctcatcatttttataacaaaaatgtgctacgcaaagcgtttatctaaatggaacgtgttgggacttcccctgtggtccagtggctaagacgtctcactcccaaagtaggggcccaggttcaatccctggtcaaagaacttgatcctgtatgccgcaactaagacccaattcaaccaaataaataaatcaatcaataatttttaataaatgaaagaaatgtcgtatgttgataccccctacttctttggacatactgaagcagttacttccttcatttaaattactccctaatcatgtattggacttccctggtggcttagtgctgaagaatctgcctgcccatgcagaagactagagttccacccctgggtcaggaagatctcctggaaaaggaaatagcaacccactccaatagtcttgcctggaaaagctctcggacagaggagtttggaggactacagtccacagggtagcaaaagagtcagacacagcttagtgactaaaaaacaagaagaatcatgtattatatgccatgtttgcaactatattccaggccatttgatgagtgccattaaacccagtaatacaccaaagacaagttctacaacttctagaagaatataaaggggaaacagggagaggagccagcagttgatgccatttggttctaaaaataaaatgtccatctttcattaaatgcttgattggatttagtgaagttttctgtttgttttgtaccagccacaggaactgtttttgatatattagctttattaaataaaaattcccatag

SEQ ID NO: 24731 - DNA, 989 bp, Bovine  19866881620453
  misc_feature (1)..(1): n is a, c, g, or t
ncagcatacattgaagccatggtatatggtatatgtgtatttctaatggccactttcatcctgtagaaatgtgggctatctattgtcagtctcatcaaataaatgtcaagcatcccaaaggcagagaccacgtcttatctgttttatatctctgaaacaagcgatgcccaacacacaacagaagctcaataagagctctctaaaaagaaatacaacccctgcccaacattgctgagaccagtctgctccagcaacaacagactgcaaactgagaaatcagggacttagataactgtcctgattcataagacagaagtttggattaagttatccttaagatttctactcactctagaattttgccccttatttgtagacatcaatttaatctgcattatgagaaattggtagtggtaaagtgtccgcctgccagtgcagaagatgcaagaaacatgagttcaatccctggattgggaaggtcccatggagtaggaaatggcaactcactccagtattcttgcctgggaaatcccacagacagaggagcctggtgggctacagtccatgtggtcacaaaagagttggacgtgactgagcaactgagcacaacaatgagaaattaatattgagataacccctattataggtttttgatattgatacttattggaatcttcagtagctaaaggctagagaaaagcagctttagaaattctttacattcttttttccactaacaaaatcccattacaaacctgaaaatagagattgcacagccagtggtccaggtccaagcaaatcagatcttcagttttcctgaagctgtcgactttctgatcataatgtcctcggagaagcggacacttgaattttccttccaccacatccatgctgctatcatacaaagggaaggttgcccagcccacaacctggtggacataagtatatttcccatgaaggataaagagttcaatacaagaaagccatgc

SEQ ID NO: 24732 - DNA, 1048 bp, Bovine  19866881724498
  misc_feature (1)..(1): n is a, c, g, or t
ntttaaatgattcatagaatatgtattattattttaactcaagatttccttaagattctccatccatagcaagttcacaacaaataggtcagcttctcattacctttcttttctaacttggtagtaatttctgacattctagttcagtctgcaggtgcacgaactatgatttctttggaaatatggcttaaaagttagatgtatttcccccgggaaacaggctcagtagtcttgatggaaggtcagtttccagaaatgtctagctgtatgtggccacttgcagatgtttcaatacatgcacacacatgtatatattgatacagagactcaaaaattactctgaaggaatttaattagctctttaatttctgaatttcctcagagctatcaacacaaattactttttataataggtggctaaataaaacaactcagaattaaattggaaaaagtgttaatatattatgtattttgttgtgctaaattatgagaatatatgaccctctattttaagtcattacttaaaagttttcaaaaaaaagatatgcattaaggattactaaaacttgtcttgttataattggaagaatttaaattttatttcaatagctagatcatgtctctgaattcaacaaaggagaagagagtgaagttttgattgttttccttattacttatttagaaaatactataattattattgatggaaaattatttttggctaatattaaattgacacttgttatgagacaagtattgggcttccctgggggctcagatggtaaagaatctgcctgcaattcgagatacctggggtttgatccctgggttgggaagatcccctggaggagggcatggcaactcactccagtattcttgccggcaatcccatggacagaggagcctggcaggctacagtccatggcatctcaaagagtcagacaagacttagagagtaagcaagacacatgagacaaagtattacattctcccttttgattgctccatgaaactttgaaataggtattgtaagtaagtatcttatgcg

SEQ ID NO: 24733 - DNA, 999 bp, Bovine  19866881754658
  misc_feature (1)..(1): n is a, c, g, or t
nttgaattttaaaaaacagatcaaaatgaaatgtgtgaagtatggaagtcaactaatgtctgttgtcggctttaaagctagttaagatgatattcaccttaaactaatcagattcaaggtctctggccaacatttattagattctagaacatatactaggtcacctgggccattctaggtggcagaatgtggtagaataaagccgtaagcaaagggctctgccacacagagtgctcaagtgtcacatttttttcagattctgtgactcagtcacccgccaagcagcagatttgtgatgaataacacccaaattgatttttccataatggagtgtaaaagaaaaatggacaggttttgttgcaggtattttcatggggtactaaattggaggattagttgcaaacagcagtactgataaagtctgctgtccatcttgatggttgggtctttctattaaaatgacacataaataacctattatatcccccacccatggaaattcaaatgcacctgtcaacatgataaagcacttgcctggaggggagcattgtttacattttcactctattcttcagaaaaagtgagattctaattatttctcccactctaaattaatgctgactgtgatggttagcatatctctatattgttacatcttttggaaagttaaataatagagctgatcgatcatgtattatgcaacgtgtattttatgacagccttctcggagctcttagatctcctctctaaatgcttattttttctctaacttgtctgctttctgcctctctttctcttttctaccccatgagaaatctttgttgatacccagttaattccaaaatgtgaacttccaccttctttaccctgtttctttcccttgttgaaaaatacacttatgattttcagcccacagttacttgctttcaatgatctaagtcatttttaatctcttcctgggatattttctccatcgatctatcatgtcgaagacatatc

SEQ ID NO: 24734 - DNA, 692 bp, Bovine  19866882057429
  misc_feature (1)..(1): n is a, c, g, or t
nattaaaacttaaatgtttaatgcatatattaaaattttgtgtcatcattaacccagctgatgaattctctttgaaaaaaaaataatgggaaagatatatccagagagataatttttacaattagaataaaaatatgtaacttgaagtctggtgagataaaaatgtctaagtcggagttccaaaccccactttttttttttttttttttttgctcatgggaatcataccgccacttgttttcctattaaatgacatttcaaatcctttatcataaacataaatcacatctcctttcaagaaggcaaaggacaaactaaatttgagatctggcttgcatttctataccctacccaagactaaatagatgaacagttgctttatagattgtatctgaaggataaacaaagagagacagtagatgacaggaaacatgtcactcgaaactgacatctgccctttaattcacaagcatcatcctcaaccctgtcacttcggttgacatctgttacacatcctgatgcatgcctttctggaaaagtgcaattttatctgcagtcggttcgaaaaatgtatatatacatctatgtgtatgtttgtttaaaatgccttgctgcatctatagatatgacttcaccattattagtcttttaaaatgccgaaagaatgctattgttcaccagctgatccactg

SEQ ID NO: 24735 - DNA, 1851 bp, Bovine  19866880367521
  misc_feature (1)..(1): n is a, c, g, or t
naaaaagacaaccaggtagtcctggacagtcagaggaggggaaaaggtgaaattatattagggaagcttcaaacaggccggctgataaaaccctggcgttattcctctccaccctcttcataactgagatggcaggagaacagacaataatctagacagtgggaacaaatgagggaagagtttgtcagtgtatggaaattagaaaaattttaaattatgtttaaaattttcccactatttctgtatctatgtacaaaatatccacctctggatcctctgttgtgagccctgcctgaggtgggtcaattgtgttgtgttcttattgctcagttgctaagttgtgtccaactctgccacctagtggacagcagcacgccaagctcctctgatctctgtctcccagagtttgctcaaattcatgtctattgggttggtgatgctatctaaccatttcatcctctgccccattctcttcttttgcgttcagactttcccagcaccagggtcttttccaagaagttggttctttgtatcaaatgggcaaagtattggagcttcagcttcagcaacagtccttccaatgaatattcagggttgatttcctttaagaattgattgatttgatctccttgcaacccaagggcctctcaagaatctccaacaccacaatttgaaagcatcaattctttgtcactcagccttctttattgtccaactagttgtgttgtagcagcaatcaaacctgctgtgccctggtcaggcttagataaaatatccatggccaggctttatcacttcatttgctatcctctcaatgcttcctgtatacactgaaacctttccatccttacatttctgatttctaaagataagattctgtcttttatttccagactctctttactttgtctactcactcagtatcttcatgctaaaggcatctcttttacaattttatgtcagttttcaggcaaaaacataaagaaaattttccttagtgtggattaaaaagaaaatgatagactttggaaaaaaaatgtcttctactcaccaaattcccattcattcctggtggcttgcaaggtccatcgtgagccctacagcaaacagatgctattagaggaaatccctttcctttgagagagaaggcgctggaagaggtagttttcaaaagaactattcttacctgctgatccaaaagcgcccagaacatgggcaatgggatataaaggaacagtaccctggtcagtgccttcacatccataatgagctgcttctgcaaagaggaggaagaaggaataggctgaattggcaattaagaatttcttgcttggagtagaaatggcccagaacagtaagagaagaggtcaaataatagtaggagagaatcagtttggttattaggaaaaactctatggaggcatcagatgtttctgcagttcaacttactgggtatttctcagctgcccagtccagccagtgttctcgcttgggattgtccccagaatggttcttgaaacggctggaaatggcaaactagggcagagcatagatatcagaagagaggaaaaaaaacaaacaaaaaacccatcccctgccttttccatttcactgtatcttcccttagacacacatacttttgactgacttaatctaaccttttaatttcatcacacattgaatttcagaatatttgaaatacaatttcaacatatataactacatttcagaaaacttttgccagtttttaaaaatgattatattatttttagcttaaaggttaaatagaggcatcgagtgatgtttgatcaatcccactttctaaaagtcacagaagcagcgcagaggtca

SEQ ID NO: 24736 - DNA, 2364 bp, Bovine  19866880370444
  misc_feature (1)..(1): n is a, c, g, or t
natatagtgatattgtgtcctctgtattcctaaaaagtattaaaattgtttttagttttgaactttatacaagtgtatcatgctgtaatcttctgagacttacttttttggcttaatattatatcaataagatttgcctatatgactatgttttactacggttcatcatttgactgccgtataatagtccactgtgtgaatatatcacacttatgcactttcccactgatgggcatttggactgttgcagtaaatggcaatcctttccttcaagtttgctctaggactgtgcaggactcatgcaagagcttaagaaattctaaagaaacttgaaatggataactgcttttagcttcttgcacatttatttgcaaggccaaaaatgacataccctcagtattctatcatcctgctttcaagaagatgttctcctcaaagttaatgaaagttacatacatttaaaaaattagggctgtttcctcttgcttattttaccactgcaatgaaagaccagaggtagatcatttaaaggtagaatagagtggcttcatttttttccaggcttagcaacctaaatttctttcaaatgtttctgctaagggttatctcaaatattttctaaagagatagtacactcatatcccatggactttctctaactcttttatgtcattttttagagtatgctaacaaaacttggtaccatggttgagactgacctcaggttggggtgtaccacatcccagtcctcccatgacagatctcaggatgcgtttgctgccttttgcccataactccacactctagctgactcacatccacattctgtcatttaggtcctcctcatttttctaatacacatttgattgaacagtcctatccaaacttacatttgtatgttttaaatccccaaatatatcacagtgcaaccattaaaactgaatattatgttattattgaagaactattgcatcctgttaagttcattttggattttgttcctattttttaaggaccatgtctccctgtcaggaaatgccaggaaaattttaaggactgaataactggcctctctaactctgtacagaagactcatgagccattattaaaaaaaacaaatcctacaacatgccaccttccattgctcctgtgagaagatgctccactgttaatgacacctgctgctcttctggagaaagcctgtctcaaagtgataaactttccccaaataaatcacatctatgttcctataagcctgactttgaagctggaatatgcgacacatcctcccacatggtggaaacccattcagttgattctctgtaatgtggtaccccttaggcagaactgtgactgtataaagagcttcatatctatcaggctgggtgcagggcaatgtgaggtccttggatcagcagcagcagcagcatcacctgggaacttgttagaaatgcaagttcctggtcccatcccaatctactgaattagaaattctgtgggtgggacccagcaacctgtgttttaacaggccctcttggtgaatctattgtacacttaaatttgagaaacactgcataagctcaagtgaatagtctattctttgccctgaaaaatctgtttcctaaaatatgattttcagaatgaaactttccccccacaatactataatcacttcccccaactcctgtccatccccaccagcataacctaggaaaaccaaaatgcacaggaacaacaacagtttcccgttaattcattcttcagttttcttgaaatttttctcatgcaataattgctaacattttaagacactagtattccaggaaacataattcagaaatcattgctctcttgctagggtaactttctgaaatgcatccataagcagtacacatgttctgtgaactagagaaaatggccatttaccacagaatggccacttcttgccctttctcccaagaaatggaggggtttccattctatctggtttccattctcctctacctttccctgcagaatcttgggagctctatttttaaacctaaatctttcattattaaccattttaagatttgcaaaatttgaggtacatactcctcacagccagtacattaaccccagaagcccaggaaggcggaggaccctgttcacactgggccattagaagtcaccttcacaaacagtccctgtttagcatcattggtctcttctgctctctctcagagtccttccaggggctcagaaaggcctctcttccccaggaactgtaacagtcctgaacactccgaatccctggccatccagtatcctctagtgctctctgctggcccctgagccagtgaggggctcctgaagagctggtca

SEQ ID NO: 24737 - DNA, 1767 bp, Bovine  19866880418950
  misc_feature (1)..(1): n is a, c, g, or t
nttttttaaggattttaaagttgaaagaagcttcagtgactggcatgacccaggcatcttcaaaatgcagcccataacatttggaaccactcctattagaaagtcttatagaaagctgaaatcgccctgctaacacagaatccatctaactccctcatggactctctcttcagccattagaagacagctaacatgccctcttgaatcatttcttttccagacctagtagtctcggttttctaaataattatttcagggcatgattttcagaccctcaccactctggatgccctctgtctaatgttccctaatttatcatgactcctcttatggcatctaacactgggcacaattccttcaaatagtgtctgacttctgcagaggacagtaggctgtatatcaccacccttaatctgaacatcagagaccgttactgcacctcaagccttgacccatcttctgagagagaagagcactttctcttgaaacttataacttccagatgggatccagcacttctcctttgtctttctgatagctagaaaatgaaaatgaaagctacaattgttccagcaaaactggttttctgctcatgttctaatgagggttcacaaattagataacattctcacatttttttatgagtgcagaaaagctaagtgcagagttttgatgctgctgcttataaccgtcacacaatccatgaggacacatatcctctttgttgtaccctagaggacagagttgtgcaggtaccacatacatagctgagatcacgtaagagcttgccctgaagtaatatgtatatattaattgtattaaagaaagattggaggaggaaatggcaacccactccagtattcttgcctggaaaattccgtggacagaggagcctggcaggctatcgtccatggggttgcaaagaatcacacataactgagcaacagagcacacacgtgcacacacacacacacacacacaaagataggaaaatcagtttagcagtatagatgttttgtgtaatgaaaaattgtataatatgtcttcataacttttcaggtttaaaaataaacaaatgaaggaaatatgaagaaatattactaagagaaaatgtcacgttaaaagttagaccaggaactttgggaagctaactgatacagtgaagtataacagcttatatttctttccccctgccactgagttcaagtcatgaaacccacaatacaaagagagaacctgcgaaatcgttaggttttcttctctgggcactgatacagatcgagaacacttaccaagttctcactatgtgctgtgtcctgggagggcaaaacctatgtcatggaccctatttctctttgttcatttgcctgatttttatttaaaataatgttctttgaaaagtaatgcatgctcatttttaaaaatacaaagtataaaagagaccagaaaaagcacacgatgttaaaactcatcattctaccacccagaagtaaccactgtttgtgaacagcttcctacgcataatatgtgtttgcttgtttgtttatgaagatgagatcactcatttctctttccccttcaacctccagaaatgtcatagtttaaatttgtgactgcaaacctgaaactagttttaggttcctatgtgttaaaatcctaatctatttatattttcactgatccttttttttaaaatctctgtattactgttattaaaatacttcatatcagctacttcaaattctttactggatgatacagaaaaaa

SEQ ID NO: 24738 - DNA, 1564 bp, Bovine  19866880480430
  misc_feature (1)..(1): n is a, c, g, or t
ngtgtagaatctattattttactatgaagagcactgatattttatcagtcagttagcttggctgaactcaaacttttctaggcaatagttcaaatctttgttcagttgtgtagacttttacctggctgcttggagtctgcacacagttgcatagttttgaggtcagctagatatttgggcagaatttatatgaaaaatttttggttctcctctgtatctctcagttctgaattatctcgcttcattttgtatctcttgtagttactctgagctctgtttcacattctgtcgataaactccagttttctgtttaaggattctgtcttagtgaggccttccctgatgatgctatttaaaaattgcagagccactcatacctttctggtgcttcattttttttttttttttttttttaacacaactgttatttatcaacagttaacacagtatgtgttttaactttttttatttttattttaacgttttttgtttttagaatgtaagttctttgagagtctatatactttcttcttgatctgtgctatttcttcagttactagaaaagctcagattgatgcttaataaatacttgtattaatgaatgaatcaatgcattaattaatttcatttcctgtctcttgtatagtactcgaaaggcagtggatgaggaagaggaagcagttgaagagcgtcgaaatatgcgaactatttgggtgacaggcagaaaaggtttaagtgaaagggaagcagcaacccttatagtagaagaagccagaatgattctgcagcaggacttagttgaaatgggagtgcaatggaatctacattcctttctaaattctgatacacacttactgaccagcagtgagtccgaagtaaaagaacacaaatttatacctcaaactaagagttcttacaaaagattaacatcaaagaaaaaaagtgacacaatatttagtgattctgttaatcacttaccagataccatgcaagatttagataaaagtagagaacatacagattccttttattataaatttcaggatgggaatcaagagtgtcatcattccatctccagagggaaaaaacaggcttctttgagtattaaaaaaggaaagctaggaacttctctgaatgaggggaaagcaagcacttcgaaagttgttcggactctctcatcacggaaaacaaaaagagaagctttaaattttagttcagaaaaagtgagtacaatctctcaatcttggaaacatggtaagcatcgaaaacgatccagcgacagtaggcctgtgaaagacacaaagatgcgtagaatcaatttacaagaacggactatgtctaattctattcattgtgaagactcttttactttagatgagatgagtatggaatttagaagtccagagccatttgctaaaaatgtatctttccgtgctgagagaagatgtaacataataccatttgcatcacaaacagaacaaagttgttctaggaacaataaaatacctaatgatattcttggggaacacttgatcacaggatctcagagtaaacatgtgattca

SEQ ID NO: 24739 - DNA, 866 bp, Bovine  19866880506589
  misc_feature (1)..(1): n is a, c, g, or t
naaatatcagcaatctcagatatgctgatgataccactctactggcagaaagtgaagaggaactaaggagtctctagataaggatgaaagagggagagcaaaaaagctggcttaaagctcaacattcaaaaaactaagatcatggcatcggtcctatcacttcatggcaaacagaagggggagaagtggaaacagtgacagattttcttttcttgggctccaaaatcattgtagatggtgactgcagcaatgaaattaaaagacgcttgctccttagaaggaaagctatgacaggtaacctagaaagtgtattcaaaagcagagatatcactttgtcaacaaaggtctatatcgtcaaagctatggcttttccagtagtcctgtgagagttggaccataaagaaagctgagtgccaaagaatgatgcttttaaatcgtggtgctggagaagactcctgagagtcccttggacggcaaggagatcaaaccagtcaatcctaaaggaaaccagtcctgagtattcattggaaggcctgatgctgaagctgaagctccagtaatttggccacctgatgtgaagagccaactcattggaaaagatcctaatgctgggaaagactaagggcaggagaagagggcagcgaaagatgagatagttagatggcattaccaactcaatggacatgagtttgagcaaagtctgggagatagtggacagagaagcctggcatgctacagtccacggggtcacaaagagtcagatatgacttcccaatttgaacaacaacgaacaacaacagaaagggttaaaaagcagagattactatacctgagctgatgcagctcatgctgccaggagaggtttt

SEQ ID NO: 24740 - DNA, 1743 bp, Bovine  19866880520722
  misc_feature (1)..(1): n is a, c, g, or t
ntatcttatttacaattatatccccaatacctggaaaataactggcacatatttgttaaatttaagtggaaagtttttaatctttctaacttctagcacaggaaatgtactcaattttgtttgttggatgaaaaatagaaagaactagttaacactgaaggtacataaaacttgtcattaacacatattcttcctgagttgagtagcaaacaaatacttagaactttatgaacaaattgattcataatacagagatttaagaaatttcatcaaatctttgatttccacaacatgttgtcaagctgactacagctatcccccataatactgaatcattactgtcatgaaataagacaggaatacatggtattatttgactaaaagtttcaagtctctgaaaacctggaagagtcctgtgaggctttgtggtcaacactgcagtacagaattcatgactatcagtggagttataaattctacttgagataagtcttggcaaacaagctaatacacactgaaaataaagtgcctatttgttacgtatttctgttatgacataagtgaataaggatattacagtttaagagaaaataattcatgctgctgctgctgctaagtcgcttcagtcatgtccaactctgtgcgaccccatagacggcagcccaccaggctccccatgagcaatgataattaatacaaaccatcatgtctgccatttgcaacaacatgaatggacctgagtaaaataagtcatacagaaagacaaatactgtattttatcatttatatgtggaacctaaagaattaaacaaatgaatataactaaagataaacagactcacaaacaaagagaataaatcagtgattgaggataaggaggtgtgaggggcaagataacagtagaagattaattagtacaaactacaatgtataagtcagccataagaatatattgtacagaaaagggaaatagaaccattattttacaattacattaaatggagtataatctataaaaaactgaatcactatatacccaaatcactatataccccaaattaattcaatattgtaaatcatttatattttaattaattaaacccatatcattatggtgccacaaaaaagctgaaccatattcaaaatatacatcttaaattttagaaacatattcaaactaatatattttatatatatatgattattacatatatatgtgtgctgctgctaagttgcttcagtcatgtccaactctgtgcgaccccatagacagcagcccaccaggctcccctgtccctgggattctccaggcaagaatactggagtgggttgccatttccttctccaatgcatgaaggtgaaaagtgaaagtgaagtcgcttagtcatgtccaactctgagcgaccccatagacttcagcctaccgggctcctccatccatgggattttccaggcaagagtactggagtggggtgccatcgccttctccatatatatgtgtatatatatatgatttcttaagagaaatgtgtttaatggtaaagctcagcacactttacactaacactaggcatgaccaagagctaaagcagcagatatatatgagaaactaccacagagcctcacaaaataaagagatgagcaaggacaaccaaacagaaaagccctatggcctcagccagggcaaagcccagaatggcatagaagagctatatttaacagacaggttcctgaagcattaag

SEQ ID NO: 24741 - DNA, 990 bp, Bovine  19866880551506
  misc_feature (1)..(1): n is a, c, g, or t
nttttgagctttcttgaacttttcctcatgggaatgttagcactcctgattagcactagacccatggagagaccgatctgactttaggaaaactgagaccaggcctgatgacttttgtttcagcttcttgtctccttgaaacttgggaggtacagcagcacttgatgtatatttcccaactcagctccagtttttgctctccctgggtccctatggatagttctatctttgaggatggaagaggttgggatctgaaggcctcttctatctgtgaagctgcaggtgtctccttacctcctgctggatgaaatttgggatggggaacaaggatggcagattgtttcttgagagggttttaagtgcagagtgaatgttctggtacaggcttctcagaggcatcagagatgcctgagggatacagatacttgccaacttatgctcctgtcttgatactagttttcagttctttctgagcatcctcaagcagtaattttgcccaaagaggggcagggccaagcagtagccctagcacatgggagaagaggagagctgaagaggccaggcttccttgcctgggaggtgacaagagttgtctcctaggcatggtctttctaggagctgctctgtggcattttgtagaggagaaaaaacattcatgccataggaactcagctactgtttctgtatgaattgttactgagcatttccaatatatgaagaagtcatatgaggagcaatggtgactttcttatcctgaggcacttacagccaagagcatgaggaatctgaaatcaaagagaaaattcctaatcattcagaaaattcctctcattcttcactgattcaacaaatactaagcaccaaccatatgtcaggcactgatgtggtttattttttcacctggaatctaagaataaatctcaggcctttaagcaagctttgtgatggagacttttctagcccttcattttaagaatgttcttatcatgt

SEQ ID NO: 24742 - DNA, 1815 bp, Bovine  19866880556311
  misc_feature (1)..(1): n is a, c, g, or t
naactggggtttatatagttctcgctttctgagatggcccacactctgtcagtggaatgtgtttctcccagggttgttctagccttttgagacagaccgcgttctgtctacgtaatgtgtatctctctaaataaatccacttcttacctaaaaaaaagaaaagaacttgggcttaattttatatatataatatatatattgtatgtatgtatatatatataaagaataatttatagagaagtgacaggtgaaaagaaaaggtttttaggcttctaaggacagtgaactgtgggaaggtaagtatattggggaaagtaaatatgttggggaactaactaatgaaagatatgtgttatttgtgcaggttcgtcttagcataactttccatcttcatggccaaaccttgggaggaaaagtttgtgacagtcctcatttctcagatgtttctgcttttagtcagttaaaagacactctgggaagacttctttctgtgcttcgtcattctcttttgcccccagctcaaaacagtctttatgccaaagtggcatattccactacctttcaacttccccttgaaattgatctcaaaggcataactgtgtctctttgtttgccttagggacagtgattataggcagcagtcactcagataaatgttgattgagttaaatgaacaaaatcctttaaatgcttctttgaaatttttattttttcatagtttatagaattccatccagtgaatgaaccagaatttatttatataactcactgttgtaggatatgtgcttctctcgtgtctcaatggtaaagaatccacctgccagtgcaggagatgcaggttcaatccctgggtcaggaagatcccctggagtaagaaatggcaacccacttcggtgttcttgtttgggaagtcctatggacagaggaccctggtgggctatgacttaacgactaaacagcaacaacattgtaggacatacggtttgttttcaacttgttactattgtaatgctgtggagaaaatccttgaacataaatattgacatatgtatcagatttttccttaaggagtattagaaatggaattaattggttatgatttttaaggtgtttgatacatattttaaatatttctccagaaaaaaatttgatgcatatatccaaatatttcttcagaaatgttgtacacgcagcacatgaaaacttatttcatcatattctaactacactttaaaaatttttttgctctctgtacttatatgattactatcaaggttaagccttttttcatatacttcttgagtagatatatgattatgaaaattatgtgtacttaatgtttctgtcatagatctaaacgaacaaagatgttaatgaagctaagtagacagaaggaagaagaggaccacagattacagctgcaaattcaaaggcagagagccatgagactttcccgagaaatacggctgaatatgcttgaaatagttcatccaggtgtgtggcattatcagtttataagcataagattgatagggtagcttttgataaaccaaatttcatagctacctgatgagttaatttttaaatgtggacctttacccctgtttcagctttttcaggtaaatcttaatctcttcagtcaaaaaaaaagtcttatttttttctgattagacttactagttgatgatgagcaatctctccactaatttttcttaattttcagataaatcagtgaaacataaaattttatgcttaaagatagatgtctttgacataaagaaagaacccctgaacttaagtaagatgttagaatat

SEQ ID NO: 24743 - DNA, 1370 bp, Bovine  19866880572499
  misc_feature (1)..(1): n is a, c, g, or t
ncgcatgctctttgctgaaatattttccacttgtcaaacttggccggtccatcccttctttggttgtggctaacgcctctcgttcttcttgacttatctctaccacctccccattcatggctgacagagagcagcctgttaccaaaccagcatcctccccacccaccgctccatccatttcctcccagctggcttcaccattcataggaggttcctcttccgtgggttctctagtttctgggaaaagttctaccattttcagagacctaaaaaggaccttctggtcctgaagggccagggctgtgtccaagcattcctcatcgggggtctctttcatgatgttctcatgaagcgttgtttcagagtccacgtttggccaacggttccactccatggagcagcagaccacgctggcaggacacacttgcagatgcttggccagcttgtggcgggacatgaagagggggcagccatattcagagttgaggcatggaacctgctctaaagggcagagtagctcgtgctcagcctctttgcacatgtggaaggtagcaccgcaggacaggtggcagtttatcaccgggcaagagacactgggctccacaggcatgtggcagtgacggttgaagcatctctcacagtgtctgtgctgccctggcggaggcctgcgtgtcctaccctagagacaccaaaggcaggggaaagagaaaacaagtgactgctggaagataagtgtctgtgagtgtttaagttttaattgacttatttcctgtttatacatgctgattgtaggaaccttggaaaatacagaaagtcatagagaagaaagctggagaagaaaacggcaacccactccaatattgttgcctggaaaatcccatggatagaggagcctggtgggctacagtccaaggggtcactaagagttggacacgactgaatgagcaggcacagagaagaaagcaaaaacttcataataccacaaccagaaataacaactatcaatactctttattttccagtagtttattttatctatgtactagatgtgttgaaaataggggggaaaacacatacacacaggaaagtaggctacagaattgacaattggtatttttgagttgtggattattgaggatttatgcacatttaattgtctgaatacaatttttctgctttaacttgctattacgttatgtctaggctgttttataaattttcctttggaaacttttttcacagcggccatgtaacattccagagcaagtgttctgtcattcacatgatcaaccaccagggggcagggctggggaggacccaaggtgggtctggttttgttcacatctgcgtcctcagcacctgtcacaggg

SEQ ID NO: 24744 - DNA, 1631 bp, Bovine  19866880576361
  misc_feature (1)..(1): n is a, c, g, or t
ntgtaaatcatggttttattattggaaggtgagcaaaatgaagaactttcaccaagtttaaacccatgactaattttcttaagtttcacagatgttccaagaatatctggaaatgccaacttagaatcagaaggaataggtgtaggaggaatgagtccattatcacgaactatacagttttctttacaaggcaagagggaggtttcaccatgaatgacatcgttctgtagtgcctcaagattgcctcttactacaattttaggtgaaaatggaattccttgtacttgatttggctccgtatttgaaatcacttgtctgtcatttacctctgcattttctccattcaaaccaggcaagtctgtagcagttaattttggcttttcattttctagaggactggacacttggtctaaaatcctttgcagtcctggacttaaatcaaatgatgctcctgaccatagaaatgaattatcttgccttgtgccagttaacttggatttttgagaccttttatctttttcttctccaattacttctctttgggaatcatcattacctacagtcacttgatcactccgtttcagtatttttagagattctgcagtattatgtttctcctgcacaggaactatgtctacattgtccaaagctgcaaccatctggacagaatcgatttctgaaaatataatagactcatcactgaaacaagacaatggctgctgattatcttgattctcattcatatctggttttttaattatgccctctggttgtagacacagagaatcatcgaaatggactgatgttatttcagaaggaaggtgttctttttcttgtccatcaggtcgttgttcttctacaaggtagtcttcactgaaactgtcaaacagtaaactaccactcaaattcaaacttgtttcaggaactggcagacactctacttctgtatcagtaggaattctcttttgaggaatcacaggtataactggcttcatagtttcttgtgtttgataaccttgaagaaaactatttaattgggagtcagtaacagaaagttcactgcctttaaaacatgggccattttcccctactagtactggagaataaaaaattggcctttctggagtcagggtatcaacctcatgtgaatcagtgctttgcttcacaacatctacagtcttatgtttcaaatgatttgtcatttctagtgaatgctgttcgcctggaaaagcaacatgaggctctttctgaaaggagctcattgagctctgtttgtctaggttcttctgaatcatccctgttgccaggctggtatccttgggtccttcttggttggcatttgcagttgctatctgctgaattattttctctgactgagtatccaggtagaaactatcttcaagatcacagagatctaaacctaagtcagaaacacaattatttttagttctgtctgctgcataagcatctgttcttccttgtactctaggagtatttagaatattctcaggctggcctcttaatttaccaaatgctccacttggtagatgtacttcactgggtatctcaatgctgcttatgatatctcctgatgccttaagattacttgatttattttcctcaacattaaa

SEQ ID NO: 24745 - DNA, 3046 bp, Bovine  19866880604258
  misc_feature (1)..(1): n is a, c, g, or t
naaagctgagtgccgaagaattgatgcttttgaactgcagtgttggagaagactcttgagagtcacttggatggcaaggagatccaaccagtccatcctaaaggagagcagtcctggttgttctttggaaggaatgatgctaaagctgaaactccagtactttggccacctcatgcgaagagttgactccttggaaaagactctgatgctgggagggattgggggcaggaggaaaaggggatgacggaggatgagatggctagatggcatcaccgactcgatggacgtgagtttgagtgaattccaggagttggtgacggacagggaggcctggtgtgctgcgattcatggggtcgcaaagagtcggacacaactgagcgactgaactgagctgaaagaccctgcagacagttgaaactacaaaagattactgttaactaaagaaaaccaaattactgtttattaaagaaaagctatgacaaacctagatggtattaaaaagcagagaattacttgccaacaaaggtccatctagtcaaagctatggtttttctagtaggcatgtatggttgtgagagttggaccataaagaaggctgaacaccaaggcaactgatgcttttgagctgtggtgttggagaagactcttgagagtcccttggactgcaaggagatcaaaccagtcagtcctaaaggaaatcagtcctgaatattcattagaaagactgatgctgaagctgaagctccaatacttaggccacctgatgcaaaaaactgactcactggataagaccttgattctgggaaagattaaaggtgggaggagaaggggacaacagaggacgagatggttggatggcatcacggattcgatggacatgagtttgggcaagttctgggagatggtgaaggatagggaagcctggtgtgctgcagtccatggggttgcaaagaataggacatgactgagcaacctgaacaacaacaaagaaaaccagatatctcaagttaatgaattttctctgcacgagaagatttaagagtctgggctcattgttatgcatcttagctatctagggctagtgtcctgttctttcccttgctgagtccccttaagtgtgcctttgaggtgggtgcagtggctaaggacttggcagggggcagctcatttgtctccatcctgagttcccttagggctcacctgtggcttgatgtcaaggagcatagcaaagttcctgctggtcttgaagtctccactagaaagtgatgtgttttacttcttatattttgctggtcagaacagtcagccaaaccaagactgccttcaagagggaagggagggacagaaaatcttgtggattagtaatagaatgccacagggaccttccgtcatctcgtaccacctagttctttcagatttcttcctacttctgtggttgttcagacactaagttgtgtccaactctttgtgactccatgaactgcagtatgccgggcttccctgtccttcactatatcccagagttggctcaaattcatgtccattgagtctgttacgccatctaaccacctaaccatcctcttccacctccttcttttgccttctgtccttcccagtaacagggtctttttcaataagttggctgtttgcatcaggtggccagagtattggagctacagcttcagcatcagtccttccaatgaatattcagggttgatttcctttaggattgactggtttgatctacttgcagtccaaaagtcttctccaggaccacaatttgaaagcatcagttctttggtgctcagccttcttcatggtccaagtctcacatccgtgcatgactgctggaaaaaccatagctttgacttattgcttgggactaaatctttctgaattagctctgactcctcacctccccctaaagaatatctgaaaattcctccctccatgtctatgtcttacctttcccctatgagttaactcccacatctattatatgtaacccccagttttaagtactgtgggtaatgtagtgagtttctttttaaatcctcctttcaaaatccacataaaaatcaattttttccattaatcctttcttgatcccttcagtccataccaaattctccaaatttctttattataaacagatgcaactgcccatctgtttagggtacaaatgctattctacagcattcttctatgttttctagttaaatattttgcttccctgaccagactataaattctgagagagcagcacttttttttaaggacctccggaactctcaaagtcttgcaaaagagcaagcacagaacatttaatccttttttatttaaatgcctaagcagaaggaactgactcaaacttcaggaagcagttgtgaagacagagtggcaggaaatgacagaaaacctgaatacggaactgaaatagcagcttagagtttcttgctctgaagtggcagcagctagaaaggggtcgagtgtcttcgtgaggagctgagagagcaaacgcacagttgaaggtgggtactctgggcagtgggtatacgggagcacaggacaagggttgaaatgagacaatgctacctggctgttactccttgctgagaggtgaagtcattactagtagtcgtttaaccttttatggccagaaggccagcctggtggtgagtggttgtagataatgagcatgtgaggatggaaatagaaacaccggagcccagggaatgggattcagctgccatccaggtctcttggtttctgccgacaacctgcaattctctctaaggccccttgcttctaagcactgagttgggagaaggattactggaggtgaagacagtctctgcccttggagagcttatgggtctaacagagagacaaaacccacaggagacattgcaacagatcaggaagtagttgctaatgtacaccagtgctgagaaccaagcgccaaatgaagtcacggtgcttcgactagggctggtttctctgtttgtaggatcacagaatcccagagggtcagaaatacagggga

SEQ ID NO: 24746 - DNA, 791 bp, Bovine  19866880612697
  misc_feature (1)..(1): n is a, c, g, or t
nctcccttaacccatattctcacaggagcttaggaacagagctgggtgatctgactcccagtccctgtactttactgaggcagcctcataagtagatcctcgatcatgcctgatattcatggcaccaggcctcagccagttactctctaggctcccacctctaaaaagcacctttggcttccctattcccagccagtagctcaaggatgctaaattggctctgtgtcaggaacctttctgtttcaaaaatacatgaggatgagaggcttatgggagagtcaggctggggcctaagaggagcagtaagaaagaggacaggaccatcggtcctcactgcttccttattgctcatgaatatttcagaaacttctcttttccagttttatgtgtgaattccttttatggcagagctgccccagagccaggaccataggtcttatctacttgccccccatccagtactgtcaccccctcgggggaagcagaactgctcctggcagtgactggtcccgcagtccagctgactcggttcatacttccccagtgccctctttgcatctcgttaaccaatctaccccagatttccctttggctggtttccaaggggtttttcaaggagctggagaaggatggagttttcaagtgaaaaggaaaattggagagtctgagtgcctggctggagagactgtagatcttaggagtgattgtaagaggggctcctttaagagacagtaaagggtatgggagtctgagcaggaagggtgggccagctagcaagggtaccaaggtca

SEQ ID NO: 24747 - DNA, 3439 bp, Bovine  19866880616138
  misc_feature (1)..(1): n is a, c, g, or t
natccaccctcttccccatccaagagcttaacttgacaagtcctgccctctctgtgtaatctcctcttgtcaccaaatttctcaggacagactccccaggtgactcactttgaaagtgacctcatctgctcaagttcaaggatctttctttgtggcccacatttccttatctcaccagttcttctaaatgaaatctaaccacttgggagaaaccactttctcccagaacctgttaatcagcttacggacagtagacacatttatcgctggtgctgactgtgtccctagcccctgcctgttttgagtgccccacagacttagggattccgagaaagtatcctgggagagtttctctcatctcagtctttatattacagcaccgggagcagtgactcctacatgacctccttcccagaggagggaatagaaaggcaaggagctccatggcccaataccgagttctctgctatttcttgtctcttgaaggagcttattggcatctcagccaatcccatagcgatctacacagacaggctgtggcagcctctgttgtgggaaattcacatactgtaagtcagacgagaacgaatgcaacaccgcattgtttctgctacttaccttgtgtgactcctctgaccttcagtctccttattgttaaataacaatgatacctgccttctagggttgtgaggattcaaaagggaaatatatgcaaaggccccacacaccagacatccaataaaagttagttctcttttcctataagacagcaacctcagaacacaggcctgaaaccagactcggaccattgagcttcctgacattatagattaggttttgtttctaccttaaaagccaatttctgggtttcttttaatatccttcaaatggaccaaaatgataacagtggttatatctgggtgctcagatcagttttttcattttcctgaatttctcagatttcctacaaggtaatactttacttataccaccaggaaaaggaaatgctactttaaaaacacaaaaaaaatccttcctttaaagctgctgattctgctccatccgttcagtaagaaaagatctttgtggaataaactttcttcttttgtcttcaccaaatgttttagggcatgtcacaattctgttttattaataaaaggccaaattcaagcccaaagaaagatcactgttagaacaagatcttctgccttctctttcctttgtctaaaacagagactctcaaagtgtggcccctagaccagcagtgtgaacttctgagaaataaaaatcctcaggcccacgcaagaccgattaaatcagaaactccaaagatagagccggcaaccaagttttaacaagccctccaggagattcttaagtttgaggacccccgctccaacacctctctctcttctgatctgttcttttcaagtcatctctaggaagtggccttctctctcattgttccatgcaaaccactccctccagccacctcatgtccaagcaaggtcagagttgggggaaaatactgaagcagaggcctatcagggctgctgaggaaaggactccagtggacagacccatctgaagggggccttaggcagtctagaaggtgaacaggcataagtcttcccgcctggctctatggcttccctaagcatcattttctaaactgagcccaaagacctctgagcctgtgatgagaagggcatagagaagaacctgggagaatgcaaggttttgacgtggtcatgtgaaattgatatgtctggggcactaggcttccgtcccgccccatcccactgctcatctgtccccctcaccttcctggggacagcagcagcggttgggacagcaagggcagcggaggtagcagcagcagtactgggggcaacactggcaccagcacactccaatcagcaggagcaggaggagggctcccaggatgatgaagatcacgggtcagccagtctgcaggggggaagccaagcaagggtcgaactaaatcttcaggggcatgctttagcttgtaacatgctaaaggtctgatctacacagctcttgacctataagttaaggatgagcaatatacacgcagaattaaaaattcagctttggtaaagtacttcagaggctggctaccgaccacaataacctaggtttgcttgtttctgtttttttttccctttatgtaaaagtgtcccagtgggggtggccaaatagaaatctccaagagcacttacgcaggacgatgagcttcacttccttatctgggtctcctgacgtgtcccctggggcctcaatggtgcagtaatacactccatggtcccaccacatcacttcattaatcaccagatctgctcctgcagtgaaggaggggaaggtgccagcaattaaaggagagggcatgggtttctgatttctggtagcttcaggtccccagcattatacttccacatcctaaaagggcctctcatagttagagaaaggcctctattccttcctttgagattctcttcttcctctgaacagtataaaggtggtaaaactgaccacttagtgagctctaccaggtaccctgaaaggagttaggatacatcaccccacttccttccttccacaactctctaaatgggtgaggtagaggttaccagttacctcccaatgtctatcctccctttctctcatggtcgtagaatttttgctcatgtatcaatacatagctatccagaataaagtcactaattgtcatcctctcttacagatggacatggacatgtgacttggttctggtggacagaatataaacagaagtgtcacatgacggctctcaggaaccttcttgaaaacagtttgggaacatctttgctcttttcttcttcatttcttcctccactctgttatctggaaagcaaatgtgatggctaccatcttggaccgtaaggaaagagatgacattcttagtgagcaggaaggagcttgggttcctgaggaattaatggaacagagccaccacactagttctggtctgtctagccccaaatttacacctgtatgtgtgcgtgctcagttgctcagtcatgtctgactctctgtgaccccacagactgtgtagcccatcaggctcctctgtccatggaattttctaggcaagaatattgggtttccatttcctcttccaggggatcttcctaacccagagaccaaaccagagtctctgcctgcattgggaggcaggttctttaccactgagccaccaaggaagaaattaactttttattgtttaagtcactaatagttggggcttttgcttactcgaaatcaaatttaatcctgatacaaggggtaggattattagctgcatatcagatgaggaaactaagactagagggaactggaacatagagaggtaacaaagagaggtaggttcaaacttaag

SEQ ID NO: 24748 - DNA, 1497 bp, Bovine  19866880649275
  misc_feature (1)..(1): n is a, c, g, or t
nttttatggaagcacctagatattttgcatagttaaaaattcaaggaaaaaggagttttgacctgtagagaccaccccagtaggtaagagaatctggaaaaatcttaatttctctttgagaatgttcctttttactgcgttttgatgattattcttcagagtctctgctagatattttttaagtgatttattctgtaccattggtaaaccttgaattctgaataaagaacttgtttcctagaagtagttagaggcaggcagattcaaaaacattttttcagatttaagtaaccaagtgccttcaccttgccttgcaggtctgatctacctgcaaatgacacatttattagcttactcattatctgtatgaattacatgtactatttttgttaaactgtttctaaaaccaagtgaccagttctattcatgtttggtaaacaaataattttcatggtagagaagcaaagccctctagaaagagtctagaaagaggttgtctgttttttggtacagtttgtaatcaggagtttactcacaaagctcttctctgtcaaatgtttgtccacttccaccaaacaggcccttgagaaagcctctgttttgagcttctggtgtctctataggagtaaacaaatctcccagcatgtcctatatcaaatttaaagaaaaaagcattagactaaggataaattaatagatcaaaagataactggtggcatgttagagcacgtcatgcaaatgctgaaaaatctgttctccatatattttcgtggtagtttttgcttagtttctaattccctctctctctggcactttttcctccaccgtctttctttcctttcctttctccaagaactggcatcttaaaatattcacttttatgacctcttgtcttcttccttctacagttagaaagcataggaagctaatattcaccctaggattaatttacagattaatcctgattacagaattcacaggctttattaacatactaatcataatttacatttttatttacatactttatttacatactaatccggttatctatgtataacttgttctaacttttttctaacttaacttgctataaaatgttttaacttattttggtctttctgtatgtgttagtcgctcagttgagtccaactctttgcgaccccaaggagcctgccaggctcctccgtccatgggattctccaggcaagaatcctggagtgggctgccatttccttctccaggggatcttcccaacccagggatcaaacccaggtctcttgcaatgtgggcagaccaccaccatctgagctccagggaagcccttggtctttctaaagcagatgaaaatttgagaaccgtggatttggaggaacttcaatccagagtcagatctgtgagctagtatcagcttgtgtgtgaacttgcaggatgactgtcatcatcttccgccctcacctctactcctagacctatgcttttcctcccaaatccctt

SEQ ID NO: 24749 - DNA, 3382 bp, Bovine  19866880703512
  misc_feature (1)..(1): n is a, c, g, or t
ntctgagctggagtgatagtctgtgttgggagatcagggcaatatcagattgttggactaaacaagtgagagaagtgtaattgccttaaaagaaaaacaagcctaccttctaggtaaaagattcaaggaattagtctaaaatatgaagaatataagtgaggaagctaacagcagagaactttaacagaaaaagagagaagtcaagagagacttggaaattctgcatttgaaatgcagttgtcattggggatattacagtcctaaccacaggacagagatctgcttcagacagacttcagtcttccatttgcaaatgaggaaagtgaaatgcacagaagtcaaaggacatttttaaagtgccatgctaattaggattagaattaggtctagaacttctttcttacagtccgcattctttcagttttatgaacaagttaatgtggaaaaaggaaaggggaaagaaagaagttttaaattttatttctccataagaatataaaaagccagagacattttaaattagagtttaggaactgagaaggagtatgtgcaataggcagagacctactgtgacaaaggaagagacctaacataaagagggtcagctctgactagacaaaaaagatagggggaaggatatgctatagacccactcagagaaagaggaagtgtagaaaagacatccaaaagtatttggcaaaacacacttaagagagtgactttcagtgattgctatgatcaggagaccagactgacaggcacaggtcacaggtataaaccaacactagggactatgactaaaaatgttattctctcttaaaagcaacttggcatcaaaaatagcatctgagcatgtagttaaccttctcagtagatacttatagaaacagtaaaaagccagtatccatgtttaaaaagttgtttttcattgtgtatctattggctactttctcctacatgtagccctgaaggaagtttcacctctctcctgacacagtgagttccttgtacaaaagtcagggaccgtgggtgcccattttctcttaacaaagctaggattctgggacttcatatagaggaagtacctttaatatatgctgtgtactaaattcagaaaattgtggtttgaaggtctgagcaatgtttctaatgttacgggaaacttttcatcctgaagctaacttctgaagaaaaggaaaggagtttgaaatatttgtttgttcatgtttttgtcatcattgtctttggacatgtgagctcaccacacccccacacatccctaaagaacaagttattcatgttttctccaacccactttcctctgaaagagatacctattcattcctcaaagaattttgttattttaaaagcaaccacaatacccacaacaaaataaaagtcatcttcacacctgcccacacctaccctgcccacagtcttctgcctgtgttcatctgagggtgatatatttactaactgaaatgttttttgtgggcctcctatgtaccaggcactgttttaagtgctgtggataaaaaactataaatgaggctgttttctaagtgtttggaagaagatattagattcatatacacatagttattataagagagaatttgtcatgtgagggtgaaaaatacggagttcagagaatattagattaattctggttagtggtgaaaagtaaggggcagaggatattccattgcataggtggcatgtgaactgagccttaaagagtttggatgtggaaggctggggaagaaagagatttcatgaagtagaaactatgcaaacagacatggaaaagagatgttcctggctattattaggtaaatattagtatttggttcatctattggacattcttgaaagggagtaagtatgacagtaagagcagaaaggtaagttggatgagattagtagacaacgtgtaagtagaaatgtttagcagggtagtaatgtgaatgggagatttcttttaggaaaattaatttgacagtagtgcaaggattcaattatgaacaacgattatgggaaacaatgaaaacgtcacacatatccattataatagtccagttcagagcctaaagacaaccaaaactagagtagttgtgactcagtgttgaggtaggaggaatatgagacataatatagaaacagaattggtagaatttaaaagctgattggatgcagaagtatagggaagctaggagagaggataaggtggaatatccaggagatgaatgctaatgtgcagttacaatgcacacttggggcttgagtgataggttaagattatagagtttgaggagacatcagcatatagctaaaactgacacacagaacttgctaagggaaaatctggagaaagggaaaagggtaaaagttatacactggggaaatgcctacattcaggaaagagtgaagtaaacaaaaagcaaaaaaaaaaaaacagccaaatttggaagaatccaaaaaagtaaaagaaccagaaaaatacagtgttagagaagcccaggaagtttcaagaatataggagcaataaacagactaaaatgctcaacatgaataagaatttacaaaagatcactcagtttgatggcatcattaccagtgatcttagaaagaggaatttcaataggataaaaagatgacttatactattattgcacttaccataatctgttctgtattaaagctagttgaccatgagcaatgtgaagcaggtattatgtcttatctgcttatccctcacagttctttggacaaatagaagctgctcaataaacatttattatattaaaatcaatgaaattaaattgaatctaactggattatattgcactgcactatattattctgccctaagatgtcaccacccttatggcagaaagtgaagaagaactgccagtccaggttcaatgcacgatactggatgcttgcggctagtgcactgggacgacccagagggatggtatggggagggaggagggaggagggttcaggatggggagcacatgtttacctgtgatggattcattttgatatttggcaaaactaatacaattatgtaaagtttaaaaataaaataaaataaaataaaaagagcctcttgataaaagtgaaagaagagagtaaaaaagttggcttaaagctcaacattcagaaaacgaagatcatggcatctggtcccatcacttcatgcaaatagatggagaaacagtggaaacagtggctgactttattttggggggctccaaaatcactacagatggtgattgcagcatgaaattaaaagacgcttactccttggaagaaaagttatgaccaacctagacagcatattaaaaagcagagacattacttgtcaacaaaggtc

SEQ ID NO: 24750 - DNA, 1175 bp, Bovine  19866880728189
  misc_feature (1)..(1): n is a, c, g, or t
ntgtaagataacttattgtagattctggggtatatgaggtggatatcttgttggtggcattattctgcctatcatacagccaataccaagggtatccacaagcaagtgcagacattgctgaagttacagaacccacttttacagacatctcatatctatgtggctcggttccttagtacctcgcccttctccagtgatatcaaggctattctctttaaccaaatttgctggcacaggtgactacctgaccaaacgatgtttcctaccagtattctctgtcatattcttgagaggcttgttgtatgtactatgctctttcctgtggttttctgccctttaacactcatatctcaatctgaccatctcaaatgcaacagatagcttcttgaacatccttccagcactctcatatgtacagacacgtcccctttaactttctcatctagtctcctgaatttttctgactgcttcttaggggaagagacatttttacttgccttttctccatccctttgctttgtttcatttgtaagctagttgtgtgtgggttctcactcactaaatcacgaccagctctttgtgatcctatggactgtagctggccaggctcctctgtctgtgggacttttctcagacatttcctcttgcaggaaaccttcccaacccagggactgaactcgtatctcctgcgtcttctgcactggcaggtggatttttacaactgagccacctgggaagccagcataagctaatcattccattgcaaaagcaaatttaggaaacagcttatttccaagcagaaggttgcatctgcacatttacctaaatctaaatggcaatgagattgagagagaaatagaagttaaaaactctcgttttgaaaagtcaaagcctggacaaacataatacatctgtaacctgaccctgcgctgtgaattttacttttatatcacagaaatctctcagcacactctgtgctttggcagtttgaatggctctgccatatgctttgtgtcaatgtattaaaactggattatcacttccaaatttactgtttttggaatacaacaggatgaaatgaatggactactgatgtcatctatttattttcttaaaatctgtacctgcactcttaagatgctgaccagaagcattacttatcttgtgctttttac

SEQ ID NO: 24751 - DNA, 2534 bp, Bovine  19866880852195
  misc_feature (1)..(1): n is a, c, g, or t
natagggatccgcctgcctgttcctgggagtaagttgatactctgttcagggtcataagaaatctaaagccaaaaactatagaggtcttggccatggtcacatatctaattaaggcagtcaaagtgttggttgctcagttgtgtccaactctttgtgaccccagtgactgtatcctgccaggctcctctgtccatggaattctccaggcaagaatactggagtgagtagccaatcccttctccaggggatcttcccaacccagggattgaacctgggcctgcagcattataggcagattctttaccatctgagccaccagggaagcccatgtgaggcagtgtcaggattaaaactccatcctctgagcagtagctccatctccactttccacttgcaaaaacctacctgagaataagaaaactcaagtcctgtgacagagaacatgacctccccagctgtaacaagagcatattgtggtagctgccatgcgatggacattttgttggctggcatgtattccatcttccaggcctgaggaccctgattggttctcttagtgagggaaacaagaaatgggcttgttaggagtctcaagtaaatattcctggcctatgtcatttatgatcttacatccatctcctgattttattgtcattcttgttgtaccatgaagagattgagcactttctacacagtttcaggtttttgaaattccttttgataacactgcactcacttggctggcttcagtcaaccagataccattattgcagagcccttaaatggtagactattttaatactgtagtttggagtccaaacatttgacctactgcatattttgatcctggtcaacattttaaatgtaaaatggcatctgatatatgaaaaattatcagaaaagcatgtacttaaaaaagttaagtacaattaaaatatttctaacattttccatttaaatatcttactaaaattactttatcagagtaaattatttcttggtaacccttacattaaagattttcctgatcaatttttaaatacctgtatcaaataccacctgctattttgtcttctattttctggccattatttttaaactcaaacttacacataaaaattttgtcaaaaagatgctatattcctataaaattttggtcaaaaagaatcttttcagggtcaattttttgttatcaatgttaccaaatatacatgattcaacagtcttttttccctaaaactacttttactgtatgcaggttctcagctgtatttgattttactgtacaataattgtaatgaaatttttgaaattatatatttttataggagtaaaaccaagttattaggtagcaggtgttattaaatagtagatgtaatacacggatatgtcatgagattaaaaatagagataaaatatcaagttcaaaagtcctgaaataaaaagttcttgatgttgaaatgcctttgatttccttatttggaaatagagttgttgcagatataattagtcaagttataattaaatcattggtatgggccctaatctaatatgactgatgtcttcgtaagagtcagagtcactgcatttaaaatgcagtaagggaagtgttgctttcgttgatattgtgaacattactgggcatatatttgggttttcttagcctcagagaagaccatgacctgaggttgtaaataaaagtcacattcttaaatactcacagacaaatataataattaagtaaacaaagtagattgaatgggaatgatacaaactatggtaaactgtctaaagcatacagccactatagcaccagccaagtgacatggtaatactcgttacaaaattttctgatctaataacaaagaaatgttaggaatccagtttctttggtgaaattgcttgaattttaaatattgtcaattaataattattatcatttttgtcaagactgcaaccagacaaaacagaactacatgaggaactgggccctcagtacctctaatttatgatctctactctagatggttattagatcctcacattcagaaacaatatatatagcctctaacttgagcagtatactatagacagaacaaagaaaaactgaaataacaccaggaatgcaagtgttatgagttgagttgtgtccccctaaaactcatatgttgaattcaaacccccattacccacctgagaatgtgaccttatttggaaatagagttgttgcagatataattagtcaaattataatgaggtcacttgggtgggccctaattcaacatgactggtgtcttcataagagaaatttggacatagacaaacatacagggagaattccatgagaagatgaaagtgaagactggggtgattcttctatacaccaagcaacaccaaacattgccagaaaaccactaaaaactaaaggaagctaaatgaaatggattctttctcacagctctcagaaggaacctactctaccaacaccttggtcttggacttctggccttcatgactgtaagataataaattt

SEQ ID NO: 24752 - DNA, 1150 bp, Bovine  19866880854751
  misc_feature (1)..(1): n is a, c, g, or t
natactacatggcttctgagcctgtgtaattaaaaaaataaagatttcacctccaaccttcctttctcctttcactctctctcaacacttattcttggaacctagccactaggttgtgaggaaacctaggccacctggaagggctatgtgtactctaaccattagcaacaagagttctgagattttattttccttattgtttgtaaagtgaacactaaaatattagggatctaatactatactgggcttaggagggggcaagaggaaacagtgatatataagttatgaaggctaagtgtagaagcaaataaactttggtgatcaggatcttgctcctaccacatttaattacaataacacaaacacccaaactgcagctagaaaagaaatagatatataagtttccttactttcaaagggactgtacttccctagaaacaccttcctgctgagaagtgagcatcaattcagaagaacttgcctgctgctttggcttcctacatttcctcacttcactattggtttggcgacatcttagacatctatagtctggctatacataaaaaaacttcaacaggaagatgctgtgaagacctgaatttgaatcatcataactgtcaaagagaagaaaactccaattacatgtatttgaacttgttcctctgaataataaataataaatacttgttcctctgaataataaaaaatgtaaattctgttatacataggctcatgtacataaaatcattaaactatgttcttcccctagaaaaatccataattaaaaacatgtttttagaatattatggttagtttgcttgtcaattaaaatgaaagatttcacttaacatttattaataatttcttataaagggacattgcatacacatatattttacctctttcaatatcgtccatcggagatgctggggacatcttgtcttcggatggagaatgttttataagattaggagtcctagctgaatttcgcatttgttgctgctgctgttctattcgatactgaattttactgcttccttcaaacctgccattaagaatagcaaaaggtcaaaaccagtatgatgattgcaatataacaacaatttcaacttacaaagctgctaaaactgacagcttggtctttattctg

SEQ ID NO: 24753 - DNA, 1131 bp, Bovine  19866880865322
  misc_feature (1)..(1): n is a, c, g, or t
nataatataaattattattattaatatataactctatattaataagatacttaatgaactagaaacctatttcttgaccatattgaataagaaaatatattgtaataaattcatgactctgcctaacaaagaaataaaagctcacattaaactttgcttagcagttgggaaaaaaaaacaactgagtgattttggataaattacctacatgttccacacttttgtttccactgctatataatgaggatagcaaacatctcacagggttgttatgaatattaaatattctaatacacataaggtatgcagaatagtatctgacttatagtaaatgctcaattaaagaaaagctatcataaggtaacggtaatacactgaaccctttccttctcaagtttctgaatttttattcacatgattttgggggtgatggggattttttttgtctttgaggaaaggcagtataggaggtaaagagtaattaataaatgatgtaaagattaaaaggctgtcaagctctcaagcaaagctctattttctcaataaagttagggaagatcactgatcttttcggtcattatgttattacactatatggcatatttaacacacaatcttttgtgaggaagggagcaaattattcactgtaacctcatcgataaagtatcatatgccatctgttgagatatgaagatggctggattatatagtttttcccctgaattgttacctgttgtgacagagtttttatctgcatgctttaatgactttttcacaacacaggtattttgttttccatataccatcaataaaaatgttctttttaaaaatctcaagaaaagaaagaatatatgtattacctttgtagcaggcacttagtctcagtaaaatcaaaatttcctgatgggattcagccatcaacagtagtagctttgtagcagtacctcttatgactggactaggagttgataaaagtttgaaaacaacttcatctaaaattgaatgcaggattttcccttctattctgagtaaatcaccactaatagaataaaagaataaaaaatgtaccattactaaatgatggatcagtatcacaacaaattaaacaaaaaaggtgcagcaacttaatat

SEQ ID NO: 24754 - DNA, 4342 bp, Bovine  19866880935303
  misc_feature (1)..(1): n is a, c, g, or t
nattacctgctttgcttgttgcctcagattatccccaacagactctggctcaatcatcttccattcagctgcaatactcctgaaaacatcagctccagtgtttagcacttgaatgagacgacgatcgtgggataaatgagccaagatcctcagctcaagttgagaataatcagccgctaatattaaaccacctgaaacaaatgattttggaaaagttggcacaaagacaaaaccaacttttatagtactgaacaggatgacagaaattcagttccaacaaagaaccttgagatcatgcatccaaaagctaaaatcttgctcttaatttgactcagttcaattctgtaacatgtaagaatttttctgcttggctttcaaaggtatgtaatacatataaagctacctttgacctctgcccctcaaccactgtggtagtgctttcctcagtgttcctataacactgacataaatgtcagagaggttctttcatgcctcccccacgtaacacttagctactagggacaggatacttaatcttcctttgcattctacagaaatactcagctcctggtacctaacaggtcagaacaaatggatgttaattgaatgaatgaatgagtaaataaagaaactggttcctaatgtgtgcgcatcttaagggagcaggaaagtcgttcaacaaaaaacaagtcaggtggtctgtatgttcagaagagttattaaggggattcaaattatttatttatggactagaaatttatctatggcaaaaaacaaaataaagaaaagccaggttaaagaaaaattagaaaaatatttgcaaatgataccacaaaggactcattactatattacaaaaaaggtacaatcaagaacaaaatataaatgagcagttcacagaaataaaaacaaaagaaccttaagcatattaaagaatgcttaatttcattgacaataaaagaaatgctaattaaatctacaataataatttttttctacttatattgcaaaaatccagaggttggacagcacattctgtggcaaggctgtgaagaaagaaacattcatatattgttactgggaagtaaatggtaactgtgccccacccccccaaataactacacagcaagtttacaatagttataggagctaaacctattgcaagaaaagggaaatggaaaaaacatccgtaatgtaaattatggataaagtggtataaaattattagaagctagtctgtgatgtgatgcatattgtaaactccaaagtatctaagatacagaatttaaaagaaataaaacaataataaaaagtcatttacagtttttaaagaagaataaagaacagatagaacaaaatacaaatgacaagacaatagacttaaatccaaccatacatcaacacttactctagatagttaactaaacagtgtattcaactggcagatattttcaggttaaatccacatacatttaaattatcataatttttaaattttaaacaaaagcagtataaaatactgttgtgttaaacacaatcttattactaaagtaagaataaatacatactatgaaatattattcagccttaaaaaagaaaaatctgacacaaatgctataacatgaataaaccttgaagacatgctaagtgaaataagcctggcacaaaagtacaaatattatatgatttcatttatatgaagtatagagaatggtcaaattctagagagaatggtggttgccatggctgtgggagttagggggcagttatatttaatgggtacagattttcagttggggaaaatgaaaagttctggagatgaatggtggtaatggttgcaacacaacatgaatgtacttaataccatgtaactgaatactttaacacagttacaatggtaaaatgctggtaattcatacttaaaaagcaaaactgaaaactgtcaaatggcaatgacactatcatagacgtgattttagccttagaatataaacttctgacagaactaaataaattgagctgattaactgcactcacccagacctgccagatggcaaaagataaaagggcaaatatgtgtactaacagggctgatgctttgggagttagatcatgacttaaaaaggttttgatgatgagtgctaaggagaggtcagacagaagacagacagccttgagggctaccccatgcaacaggaagcagcagtggggagaactgcagaagaaacgaagagcaaaacaagttacagagagaccaaaaaaaaagtgcctttagaagtcaagggaggagaaaaactgaggaaacagagggttgacagaatgctaaatgctgtagagaaatcaaagagaatgaggactaacaaaattcactggattctacaaaaaggttgacaaagacagaggataacatgatttcagcaggatgctgagcaaacgccccagaagtttcccacagagcagatcatgaagacaattatgagtgacttacaaatccggcaataaaaaagggaaaaataggctccaccaaagagaggaaagaaggaggaaacaatgcattcttctgagtcttattcataatttgctttatcagtgctttgaaaaccattcctacagcaataagaagctcaaaaccatcatcagtcacctgacctgtgaaaggcacaaaggcatgtcgcatgctgaccgagaagggcattcctctgtctgaggctctctcttccacctttgtctggcgcccagcgttcatggcacagtccttctttcttcctcctctgttggtgcaaaaaacatccatcagttggacatgaggtagtctcaaacatatgaaaagggtctgagcttttcagtaagtcagtatttccatctaagaaatgtaaaagtcttatttgaaacccactttaaagcttaataagatactagaccttgttcagcaaacattcaattgaacaggacgtaaggtatttttctgtaataacctttcccacaaactgcttcactcaactcaataaatctgactgtatctaatataaatgatctgtgctttttcttcctttagtgaacatatggagatgtcaggaagggagatatttcagacattgctaaacttgtccctttaatatctaacaaagaagcatatagtgctggttgatataattagggacccaggatttcagctttttactgccaaccagtttcttcatagacagactcaggatttgaaatgggtagtgcttgaaatagaaatgtgtatgcctagaacagaaaattaaactaatttcattattttacccaataggctgtttttgagccattcatattcccaaaagtatattaacacaaataaagacatttgagccattcatattcccaaaaatatattaacacaaatgaagacaaataagcgtctacctgcccataggaagtaggccttttcctagagcttgggaaggtgggctttcctctactactgctggcatttttatctcaaaatctcttggtacattctgaatatttggctctataaaggttattcgtcctaaaattaagcagaatgaagacataaaattagaggggtaagggaggaggggaaatctgacatttattttaacataaatactgtgtctgaattatcctaaaatgcatgctctattatttttaaactaaagaacaatctcgatgtaagtgaatatatgaatcagctataatacagtgttttatattaacttctacagaaacaatcccatgataagaagtaatatgataaatcatactatttccacactaaaacaaataccagaaggtagcaccataaaacactagcagttaactaatgagtaaaagacaaaacaaatggatcttaggagaaatgactgtcgaagaatttaaaagccaggaatgcacaagacacagaaagatctgaagcagaagagcaactgagtcctgaataggaacaactggggccacaggagttaactaatgcaggagatggagtagcagtgaaggatggtgagcacagcattactttctaaataccacctggccagttttcctcctcctcctcctcatcacttatcataagaatcaatggtagacagcaccgacatggctagaaaccagaatcaggtggccaataaattttctaggaaacagaaaccaatttgatttaatgcttatggctttattttcccctaaatattttaaattttatttatctacttattggatgaattttccaaaaacacaagtgttgttcaaaaagtttgggtctaccagcttctgcatataattccatcttcttttgatgaatcagacattttaagtatctcagatacagttttactga

SEQ ID NO: 24755 - DNA, 930 bp, Bovine  19866881018422
  misc_feature (1)..(1): n is a, c, g, or t
ntggttctttcccctggctttgagtaattttctgcatgaatgtgctgatatgtactcagcttatttgagaagattcttaacagattctgagttctgtctctgtgctgctgtctaagtttttattagatgccaggatattggatggaggagcctggtaggctgcagtccatggggtcgcgaagagtcggacacgactgagtgacttcactttcacttttcactttcatgcattggagaaggaaatggcaacccactccagtgttcttgcctggagtatcccagggacgggggagcctggtgggctgccgtctatggggttgcacagagtcgggcacgactgaagtgacttagcagcagcagcaggatatagtcagttttactttgttccaagctacatacttttgtatttctataaatctttttgagcttcggcctggaagacagttaagttacttggaaacagtctgatcctttttggtcttgcttttaagtcttgttagttgggaccagagcagtgctcattctggagctacttgtaccccctcctgaggtactgcccttctgaatgttctttccaacgccctgtgaattatgaggtgttccagtctggcttgtgagcacaggcagtattccaggccctgtgtaaatgctgggcgctgttaccgctaatccttttgggtggttctttccctggctttgagtaattttctacataaatgtgctgataagtactcaactgaatatctgagagaattcttaagaggtctcagagtcctgtccttgtgttgctctctctttttgagcatgctgtcttgggaactccagctgccttggtttctctcaactgttagcactcatctcctcaacccagggggccttgtgggctttgcctgggtttcttctcccctgtcccaggcctaaaaactctct

SEQ ID NO: 24756 - DNA, 1286 bp, Bovine  19866881083138
  misc_feature (1)..(1): n is a, c, g, or t
ncatgcattgtgggcttaatcagctggattatcttgggctccagtaagggatgccctctatctaggtttatgactgccaccaacaaacagtttaaggtagaagataagagaaaggagtaagccaagtgttggcttttgagaaattgagcattgttctagtacttgttcttactgtctttcccaaatattcacattcagtcagctagttagagaacaagaaacttttgacaaatttggtatagaataaagagagaccagccccatcagatgtacaattacagttggcttagatgtcactctacataagagatcttttaatttgttttagcttacaccgtgttttactttttgactcgctagtattcttatccacaacgattttagttcttgggaaatgagacttaaatcaattctttaggcataaccctggggttgctagtaccctggttagtctttccttcctgggtctaatgctcagaagatatgacttttcctgcattgatagatagccttatttagcttctcaaagctgattttagaagcttctcttattcttctcaaataatgccttcatctggattcttcttttcttacttactggttttttcctctcattattctttcttccccctggccgtggtagcaccaacctgtctctccccatgtgactttgtttcttctaacttttccctctgctatgttgttatatttttaagttatccattttatacctgccccctcttttttaaagctctgagaccttaaacaaatcagcatcatgtagcttcatttccttcctctgttaaataaaagggttagattaaatgatttctaagtttcagcagctagtcacagcagctctttaactattgtttacccatgacagagcttgatagtctctggaaagtgtagttgaagaaatgatggcaatcctcagatacttgacagactgttatgtgaaagaaagtgtaaagttattctgtgtggttccaataagcagaataggttcattttggagggaggagtggtggtgaattcagttgggaggcatctggttcagtcgaaagaagagcttttgggggaaaaaaaaagactgttgaaatatgttaattcctcccctccttctgtctcttttatgatttttttgtccttcacttagcagctgtgttttcctgaattctgccctctagttcttcaaggcagtgggattatgagttttatgttaagttttagtcctgtatggcactgactgatttgccctcagactaaaaactataaaaatagga

SEQ ID NO: 24757 - DNA, 733 bp, Bovine  19866881083362
  misc_feature (1)..(1): n is a, c, g, or t
ncaggcccttgcacactgtcagtcccactgttctaatttggggaatggaggctgttgctaagtaaagcaaggcagctatgacaagaagtaaagattaagcctaaaggcctgtcctggagtcctagctccactactcacaaggtacttcattattttgagcctggtttcctcacctgtgaaatggggggaccctgcccgactggcctcggagaactgtgatgagggctggagccaggctgggggcgaggagcccctcctgaagcatcaagcttgccctgagcactcacagttccttccaactctataagaggtgtctcacggagcccagagggcaagcggtgcaaaacagggaccaggggccctccatggaggcatatgaggtggcctgtgtcagcctggatgaagagtccttactgcccattcccgaccctcagcaggaagccccaggctcaccaagcgcctcttcacactcccttttttcttgccgttcttgcctgagctgacatccagcgagcggtagctgggtggcttctcctcaggccagtttggggagcacgagcgacgatggcggcgggtctcccaactctggggctgcctctccttctcctcctcggagctccaggaactgaggccagagggcaggggaggggagtagctgtggggcctgcgcctctggtgcccctgagcgctttccttgaggctgggcctgcggggatctctctctgggtagcgg

SEQ ID NO: 24758 - DNA, 778 bp, Bovine  19866881130598
  misc_feature (1)..(1): n is a, c, g, or t
nattctgaaaattggcttattgttttaagtttgtcatctactaactcaaagtatttgtttctgtttaatgtgtaaggcagtgtagtactcagaagcactccagtggtatttttcatggtcgatccacttaattgattttgagtgaaaacttcttccgtgttctagacagtccttcagagtacatcactaaataaagtttcagaatacagcactttttaaagttgattattaatatatacatgtattattgacgtattcattcaacaaatgtttatcaagtgcatgtcccatgcatgaaactagaagagaaatggttcttgcctgtagaagatgttctcataggtgagtaggatatatgtgtacctacattatttaggtacaggatcttgattatataatttaaaagtggatatgtgtaataaatatctaattattaaaaaggctccctaattcggggacttgcttgtgtcagtttggtagttggtgctctggagaagacattttggagattctttgttgctgctggttggggagaatggcaatgtctgattctttaacttgtcatccctaacatccaaaaatctcaggacacaagtctacctgacattttgaaagtaatcaggtaatgatgctcatgtgttagcacattgtatctgaatgtttccttctcagaaattaagggtgctacagaggaagcttgaggagcatgaagaagccttgctgggccgcactcaggttgtggacctgctgcagcaggagctgaccgctgctgaacaga

SEQ ID NO: 24759 - DNA, 918 bp, Bovine  19866881332901
  misc_feature (1)..(1): n is a, c, g, or t
naagtctgtccacaatggttttgccaaggagttttgggaagaaacatttaactgccacctgcaggagggtgctaaaggcccattacccgtggacaccttcctgagaggtcacgaagaaggaggtgccaggttaagcaatagttccagtgccttccgacctctgtgcactggggaggagaacatcagcagcgtcgagactccttacatggattatacacatttacggatatcctacaacgtctacttagccgtctactccattgctcatgccctacaagatatatacacctgcatacctgggagagggctcttcaccaacggttcctgcgcagatatcaagaaggttgaagcttggcaggtacctccttctcttagatagcagttcactgtgtaataagcagagttggactgatccaagcaagacagattaaagtggttacctcaaaaagtcaatacctgaatgaggtcactggatgtagccttggagtcaaatatccttttcaaacatctgggcaactgacttctgaaaactgacagtaatttaatttgattctctgtttcaagccttgagctcagctatttgttaggctagtggttcaaaatacctggagtatggtccctaaatatctttaaatatcccaggacagatttagtactgggcggagtgtctttatagtgcttaaattaaagatattgttcccttgtagacaacaaatatttcttgagtacctattatatcccatatgctaaggggcataaaaccataaaattagtgtcactatgttcagccacctcttttgcctttatattactcacaatataatgtgttggaccccaagaaagtcaactaagcttaggacacaagtaaatcaagggcacagaagaaaaaaaaaaaaaaaaaactcttcttaaaaagat

SEQ ID NO: 24760 - DNA, 849 bp, Bovine  19866881404214
  misc_feature (1)..(1): n is a, c, g, or t
naaatggaggccccaaccacagcttacaagaagacaacacccatagaggctggtgagttttaattccctctctctgttctcctcaatctcctctgccttctcattctttttttcttcctagactacctactccaagcatttaactacctaggttagctgaggtagacttgacccctaccctcatcttcccagattctttctcctaaaaaaaaattaggttaggtggatatctgagtgacactggggaaaaaactgtatgtagagaacacagggatggggggagccatctgggaaggacacaaagggaaaggaactttggatgggggacagtgggtagatggtggtctgagggtatatagatttaagaaatgtggacaaggaaggatgcaggttaggggaccaagctttagaaggagtaagagcctgagatcacatggtctggctatgtgaaaatctaggctccagggctaccttatccttctctaagccccttgttccttcattaatacctctttacctccatttccatgagtcctgtcttgattttctcttcttctggatgtttaactgactcttcttctttccagtgctactcttctacttctgacccaagacaaccctaatttttttgactgtgtctgtagcttctagtggtgcccgtgggctgaaggcaaaatttgagtccatggcagaggaaaagaggaagcgggaggaagaggagaaggcacaacagatggccaggcagcaacaagagagaaaggccttggtaaagatgagccatgaggctcagcaaccagtggccactagggaagagccggcggcgccagccccattgcctaagaaaatctc

SEQ ID NO: 24761 - DNA, 1687 bp, Bovine  19866881405338
  misc_feature (1)..(1): n is a, c, g, or t
nctgaacgctgaaagaattgatgcttttgaactgtggtgtggagaagactcttgagagtcccttggactgcaaggagatccaaccagtccatcctaaaggagatcagtcccgggtgttcattggaaggaccgatgttgaagctgaaactccagtactttagccacctgatgcaaagagctaactcatttgaaaagatcttgatgttgggaaagattgagggcaggaagagaaggagatgacagaggataagatagttggatggcatcaccgactcaacggacatgggtttgggtggactccgggagttggtgatggaccaggaagcctggcgtgctgtggttcatggggttgcaaagagtcggacacgaccaagtgactgaactgaactgaaggagtgataatgaagagtgtgaaaggaagacaacaaatattaagtgattcttttaaatttttgcaggtagtgacaataagacaaagaagatagaaaaagaaaggttaataatatttttttgtttacagccataagatatttgccattatttctaggacaagactacctctgaagaagaatctgaaggcaagagatggaaatattgagggtacaaagataccaatgagagtgacctaggtgatggtgatacatatgtaaaaattcatccagttgtacatttaagcctttcagatttgtatactttatttaagttatacatcaataaaaacaaattcaaaataattaaaattacctcatgaaggattgagattgagggtacaaggagagatggccaaatttcctctgaaatagtcaggaagctattgtttaccaaatcccagagctatactttttacaaggcagtcatttaaaaaataaattaaaatactataaatacgaatcttttattctgtaactgaatgaagaccataccatggcttatgcttttttctgcatataatgccatccttctgtctggatggacctcggtgactactactacataaggagcacacatagacctcaggcacctgccatctctctcccaagaaactatttagtactgtgttggtggctgtagcactacattaggtgctgaataaatactttagaataatggatatatctagcccaaagtgagatagaaaccagtgtttactaaagaggattccttggaacactcggtctacaagataccctgaaaaaatattccacagtcaaacaagtttgggaaatgctacatattataaccttctctggagaaggcaatggcaccccactccaatattcttgcctggcaaatcccatggacagaggagcctggtagggtgcagtccatggggtcgctgagtccgacatgactgagtgacttcactttcactttcatgcattggataaggaaatggcaacccactccagtgttcttgcctggagaatcccagggacaggggagcctgatgggctgccgtctatggggtcgcacagagtcagacacgactgaagcgacttagcagcagcagcagcataaccttctcttggagattttataatattaattagcatgttaaacagagaaggcaatggcaacccactccagtgttcttgcctggagaatcccagggatgggggagcctagtgggctgccatctatggagtcgcacagagtcagacacgactaatcgacttagcagcagcag

SEQ ID NO: 24762 - DNA, 1639 bp, Bovine  19866881490476
  misc_feature (1)..(1): n is a, c, g, or t
nccaccataggcccatgtgaggagaggccacttagtcctgtcttttcctaccaaagctgttccaaaactggtgaccctgggtcagtctgctcttcagtcttcatcttagaaagatcagtttagtatcaggttttccatattttctcttatatgtatttcttcctacagtgggccgaattcattttcttttcctgcctcatgctggtggtctgcctgatcttctccatcatgggatactactatgttcctttaaagccagaggatgttcaggggtcagcaaataagcagacccccccccaatccaaggaaatatgatcaacctggaaaccaagaagacaaggctctaatggttccctagactctgcccagaccccagttcctgcctctggtcttggccatcaccatcttcaagcattttttactgcaacttggttggaagagagaagtagcatcacaatgaactgatctccttcacttttctctgatgatagaggcaattctaggactgggtttttcagtacattaaagcaaggtccctgagactttatgtcttcctatatgtcactaaactcagtaaaccttatgtggttttgctgcagctagcctggcatctccaaaaacacaaaatgtataattgagattgatctttgtggttatcaaagttctgtatgaattcttttacctgccatttagagcagatgaccccaccttttgaagtgctgatttagggccaaatttcagaataacagagaaatggtattttcaaatgtcttcattaacagtgtatttgttgtttataaggacttcaagaattggtatgtctggtgtgatctcatccagggcctgacttgtcagctattcaggctcactaagactgtagtaaatttttcagtacaaataataaaagacaaaatgatattttattaacacacaggataagatgtatctttctgataattacagtattttatctactaatcaaaaaacccctttctcagtattgataggtccttggaaaccaaattaaagacagtaaacatggttctgcaaaacagcaaagtataaactgtagaagtcctgatgaacaattcttgtacagtatacgcttttcttagggactataatgttttaactctagattatgcccacctgtggacaactgtatagacactaattatcattttccaaccctcattttcaatgttgttggcccacctttttcttattatattatcttattcattgctgctgctgctaagtcgctttagtcgtgttcgactctgtgcaaccccatagacggcagcgcaccaggctcccccgtccctgggattcgccaagcaagaacactggagcgggttgccatttccttgtccaatgcatgaaagtgaaaagtgaaagtgaagtcgctcagtcatgtccaaccctcagcgaccccatggactgcagcccaccaggctcctccgtccatgggattttccatgcaagagtcctggagtgggttgccattgccttctctgtatttattgctacaaatatttaataataacagtattttttatgaaaacaacttcctttcttactgggtatttccttcagcttcaaagtagggggatctgttttgatattttttcctgtttta

SEQ ID NO: 24763 - DNA, 820 bp, Bovine  19866881614938
  misc_feature (1)..(1): n is a, c, g, or t
natggagctggttctggttacagactttttacctcttgctgaggacacatcccccaatgtgggttattataagcacctgatacacatttgccaaagaattagagacctcttatctgtgatcaccgatgtgactgatctcagttctgtgtcagacttcactctttctatatgagagcaggggacaccttgttttaccatgagggccctctttcagcaccgcgggagcacagactgctgggtcacactcggctgcctttctccagccctgctcaccactgcccaccagctgcacaggttcttaccctccatctccctgacgacaggtgtgacttttgaagagtccatgcctcatttagctctggtaatggcttaattgagtcggaaaatgcaaggacaggagcgtgataaaaaaccagctgagttgggttcctgttagtcattggaaaaaactaccagggaagggacaagaaaggaaggatggactggagtggggaggagcagcatggggtgccgagcaaagtggggcagagagctcagacaaagcaaataaagaagattaataggagaggaaatggacattcattaatgttgtactatgagctccttgatgcagggtctgggacctggaggggttccgtgaatgactgaatgactatgtgtgtggagggcccagggcatgatacactgtcttagaagtttacaaaactattgcaaaaagagacagaagaagaaaaaatagaatgagagttgagggggggtgaaaattccaagttaaaaaatgacaagaaatgctcatttctctggttgagaatctcgtgag

SEQ ID NO: 24764 - DNA, 1115 bp, Bovine  19866881668777
  misc_feature (1)..(1): n is a, c, g, or t
nttgattttttttttctctagagttgcatttgggaactgcaatgggttggctgtggtggattttatacagaagactgtactgttaagcatggggaccattgacctgtatagatcaagtgacatataccaacgacaaccacggtctcctcgaaaaaacaagcagttcattgcaggtaggagataaaacaagatgattatgaacttatttagttcacctgttttttttcctttagatttcttgtcttctgtgatgctattcaaatgcacagcagtataaaatcagcataatttataatgccatgtaagtaaaattgggcagaaatatagcaagactctgaaagggtaaagaagttgtttaaacttcaatttgttattaatgttaggaagcatctcaatgttcttaaattgaattcctaagaaataacaaaataagacactattgaatataaaaatgctaagaaaactagtctcttttgttgaaaaaaactacttacaatggttgtgtgggataattttcttctaatatactatagctttaaaaatgtaacagttattcacccattataattttttaaattagctccattttttagctgtcattttttcttgttggatggtgactttcttggaggtattttcacaaatgcagtaaatgctaattaacattttacagtgctatgaaagatgatacttttcttgacaggacaattataaaggaaaatatataaagttattaaacaagccaaaatactttctacatgtaatatcaaactttgatatgccaagttatgcaatgttttactgaaatttcagtaaatatacaaatagttggctttgtaaacattgccaatattttgtatattttctgtccactgacatagtttagttggtaaaaaaaactggttgagctaaatggtttgcagctagacatgcatctacagtattacatattatattatacagtttctaaaattttctgtatttttaaaacaatcagttgaatattgacacttttactaaacataccaagcgaagactattacaaagttaaaaaaaaaaaaaagtacatgattgtaggttttattttttaaattgtaagtgtgccaaatttaaca

SEQ ID NO: 24765 - DNA, 1275 bp, Bovine  19866881753226
  misc_feature (1)..(1): n is a, c, g, or t
nactagtggccagaatgactgaaggttgggaaatattattccaaaatgttttgatagtaggactttcccatttagtcagtcttaatattttgattgctgagtacaaggaagaaaagaaaatttgaaaactacatggaaatatgaataatttgctgtgctctgataggtggggtaatttcatgtgttacaatacggaaaccaaaaagaccctttcaaattaaaaaccatagattgtaaaatccagaggaaaaccccaagtgaggcctattcgaataaaggatgaagtttccaaggtatgcacataaagtggctgaggggaagtaacgtgagtgagggcccaggacccacacaggttttgagaggccacagtggaaggtgaaggggtttacaaacctgtttgggggaagaatgatcatccacccagtgacggaaggaagatctttgtggaaaggtcaaagtgaggattggaaagtccaaaaggaaggtggaaaagcagtgatgaagactaaatagcagcagagcatgctatgtgccaggttatttacatgcaagacctcgtttgcttttcacaacaacagagcaaggaggctattactagtcacaattcatagatgagaagactgggagatattctataacttgcccagcgtccagtggatcaagccaagatttgaccttggactgaccaccagttccaaaaccggagctacttcccctggacctcttgcacccagtcaacaccaagcagttttcactttgtcactttcaatgtctgcagcctcatggggcaccaccagtctctacgagaagggggagccctgctcagaggcaggctgtctctcctctggactctaatgctgcagatgaagtggcacataattgtccccaaattgagcagaggttgttgtaaggcctgataaggtcagaaaaaagaagccatgtgctgggcaggattatatatgtgaagcctgtttctgcctaagcactgagtttggaaagatgcacgtggaattcacacacctttcatacttcttcttgtgactcttccccaaactcaatagtaccatccactaggacttccctggcggtccagtgcttaagactctgggctcccaaagcagagggcatgggttccatccctggtttgggaactaagatcccacctgccacctggtgtggccaaaacaaagagtaccatccacttccaggaatagtggaccaaggtaatagagacattctaggtgagcacaactaggattagattaagataatctg

SEQ ID NO: 24766 - DNA, 810 bp, Bovine  19866881756861
  misc_feature (1)..(1): n is a, c, g, or t
nattaggatttcctcccatctctggtattatttgattctatgaatgcttagcattgtattgccataatcaatgaaaaatttcacttaaacaagtatcaaagatccaatgccaatacgctaaagtttggtatttagggcacctatgagcacgaatgagttggtgccttgcatacaggtgctattccatctgctctgctatatcaaatgctatttcagaggtacagggccagagcaggaggagccattgatataattagatcttaaaggcatctgtgcctctagtggttaacttggctagtaacttctgactgatcatttgttttgtatccagtcattaaccaaactaggtcagaaagggcagtactttctgaaagaataactacagcttaatcattaatgtcacaagcagaaatgaagctggactctttgggtaaaggttgacgggagagaaacaggatgaggagtgtaacagaagctgagaaagaaacatggtcatagtctgagatagagtttagggaggaaagagtagagtttatcctggtcttatttgtcaatagattactcaagtaggtaatgtaagaattttatgagggatagaatcataggttctcatattctaaaataaaataatgcattctcctatttcctgacttcttttttggtttagtccttatttatcttatttctctctagccattctttccttttccatttgactgacaactaaatgggcgccatactggttttgttcttttacctctttgactttgcaaaaataataattatttaacaatcatggtctggatcctg

SEQ ID NO: 24767 - DNA, 896 bp, Bovine  19866881826976
  misc_feature (1)..(1): n is a, c, g, or t
ncctccttcttaaaaattccactcctcacattaaaactgtagctaaccagctcaagtcttatttgcaattgtttttcatcttaaaccagatgtgtgggaatctatttagggcacttttccaaaaaagctttactcacattgctgaagagtaggaagagcaacatcgtgttttactggaaaatttcttttaggtaccaacacatccgtgtggtggtgcacctttagaattttccagataaaggtgtgtgaagggaactgcaaaaattacacttctatggttctgcactaccaacttgaaaattgcaaatccaagttgacaaatgcatattttaaaggttcgcagaagtcttctgtgctttgcttttggttacagagatgacacagggaagtgagcctttgggtaatgcagtgcctcctccctcaaccctgctgtgaaatggaagctttaaaaaatccagtggtttttttttttttttttaaacaagcttagtcatattagctgtgctctgtatgccccagtctagtttattttattttgtagtgcccattttatttatactcatataaatattttgcataaaaaggtgctttcacagatttttgtgcttccctaaagttgaaatctgctgccgtttgttaaaatgtgttagttttgttatgtttatattctctcctctgcacacataggaaaaaatatatggaagtaactcttctagcaacttttacattttagaatattacctcattttatttcttctaactgaggttataaaggaaatgacaaatgtcaaatgctttgtcatttcagaaactgttgagaaagaaacaacagtttctcaaaatgtgtaagcacctattcttaagcaaggggccactttaaattcagagatcacaat

SEQ ID NO: 24768 - DNA, 1517 bp, Bovine  19866881967839
  misc_feature (1)..(1): n is a, c, g, or t
ntctacagcaaccatctaatcttgatggccatagacacatgcatctatatcatgtcagattcctgccccagtgagcaggtgacctcttcagggctgcatctctgtaactgtcccatggtgcctaacaagacattcagctttatctagattcaaaaccaagccttttgaatcccagtatgttacctttactaaaccatgatgcttgtatatgtttattttaaactttactttaaaaacacagtactataaaagatgttcaactaccagtaatgaagggaggattatttgcttacttctaaatttctctctggtgatcacagagagaagagtactcaattattttcttaagagccagataagtggataatatgcagcagaagcaatttatgtggcagagcacagagggcgttcatagacatagggtcatctttgagtaccacatgaaaaagcaagccaaagacttggttttgaatctatgcctcttgcttccctgggaaatgtgttctgacaccaatgctcctgatattctaggagagagaatcctagtacgagacaagcagaatgtgaagcttttttatgtgaagccccacaactcagaagagaccccagattcaagagaacagagaggcctgggtctccttgacatccaaacttcatggctgtcatcccatcggttgttttgttttctttatccttcacctacaatagagggaagtaaaaattagttacaggtgactagagggaactgataatcataaaatttgatcataagatatatccttggtaagatattgatgaatcagtcttcatactctaagataattagaaactaggccattcttcaacttaccatcatgctagaaatactttccccatcttctcgaatgatcagagtgtaccacattttctcctccacagaatgctcagtgtagacagacaccattgtgatatttcaattggaagtggaaattctggctttttgtcttcaagtggagtttggaatagtgtggcatattctgcagaatgaagagcctgttacattcaccttctactccaccttgaacactgcaatctcatagcaaaccagggcagttgacctcatcagatattttcaacattactctttaacttcataataccatttctggtaatctatcataggatgaattacaggcatgaataaagacttatgagtaaggatgttcataataggattacttataataattaaaataccaataaggaaatattttactaaactatgatatttccacagaatggagtattatgtatccattaacaccacatactcaaagtttatctaaggacacaggaaaatgcttttgatgcagtttatcttaagaaaaattcaaagtcaatacagcatatagtgtttcaatactttaaaaaaatttgtttattcatttatacaaaactgctatctataattcatctctgtgtgatggacttataggggattttatatctgttaacacactccctatttttaataataa

SEQ ID NO: 24769 - DNA, 2033 bp, Bovine  19866880391783
  misc_feature (1)..(1): n is a, c, g, or t
ntctcccctcctgcaaaatctcttatgatttccttacctatctggtacaggaacatgtgagtacccctagctgaatacatccctgtccattttcctcttctttagacccagacttcctaaccacaaacctcccaaatttgaaggctcagggtgagtgtgtttggctcagctgttttagtcccatagaggttctctgtcttgcatctagatttttcagttcagccgttactctgggcaccatggtcctagcaagtctaaaccaaaaaaggagtccctttaaggtgtttgaaattagatccccaagactcgcttgatgttcccatgttcattcttttgatttatgggtctcattactggggaaggctgaaatagctctcttctttctctccaccagtggcttcaaagcactgtatgcttggttacccaaatacattaaaactaatttaaatcatcttaagcaccagtgtgctcaacaaaccagaaaagactctggaatccaaaatatatggtcacattttatactgaataagatgcaaggtagcaaatccatcagcataatggtataggttgttatgggcacaagcaagacatttcttaaatgctgtactacctaatactgccttttaaagaggaaattaatgtcatccttcagctgaaaggcaaacttaacgacgatcacttataaggataactccaactgaccatgaatgtctacggctgtggaaggataaatgcttacatttatgtaaaccacagtataagtaacaagttggcaccattttccatttatccttaaagcactgtcacttcaacgcacacatatcatgttagtttctgtgttttatccctcgctacagtccacggggctgcaaagagttggacacaactgacgcgaccgagtctacgccacgaccagtaatgctgaagaagctgaacagttctatgaagaccttcaagaacttctagaactaacacccaaaaaagatgtccttttcattacaggggactggaatgcacaagtaggaagtcaagagatacctggagtaacaggcaaatttggccttggagtacagaataaagcagggcaaagactaacagagttttgccaagagaatgcactagtcatagcaaacaccctcttccaacaacacaacagaagactctacacatggacatcaccagatggtcaaaaccagactgattatattctttgcagccaaaaatggagaagctctatacagtcagcaaaaacaagaccggtagctgactgtggctcagatcatgaacttcttattgacaaattcagacttaaattgaagaaagtatggaaaaccactagaccattcaggtatgacctaaattaaatcccttacaattatatagttgaagtgacaaatagattcaagggattagacgtgatagagtgcctgaagaactatggaatgaggttcgtgacattgtacaggaggcagtgatcaagaacatccccaagaaaaagaaatgaagagaggcaaaatggctgtctgaggagcccttacaaatagctgagaaaagaagagaagcaaaaggcaaaggagaaagggaaaaatatatccatttgaatgcagagttccacagaatagcaaggagagataagaaagccttcttcagtgatcagtgcaaagaaatagagggaaacaatagaatgggaaagactagagacctcttcaagaaaattagagataccaagggaagtttatacacaaagatgggctcaataaaggacagaaatggtatggacctaacagaagcagaagatattaagaagaggtggcaagaatacacagaacaactatacaaaaaagatcttcaagacgcagataatcacaatggtgtgatcactctcctagaaccagacatcctggagtgagaagtcaagtgggccttaggaagcatcactacgaacaaagctagtgggaagtgatggaattccagttgagctatttcaaatcctaaaagatgatgctgtgaaagtgttgtactcaatatgccat

SEQ ID NO: 24770 - DNA, 1330 bp, Bovine  19866880431415
  misc_feature (1)..(1): n is a, c, g, or t
ntgaaggcatcatggcctttggaaatcacaccccaacagaaagtctattgttcttttgaggtgagactttctctcttagaaagaattcaagctctggggaaattttgacttactgtgtccttttcaaacctgtgaaaaatgtttatgctggggaccaataattttcactgaagccagagagtacctatcaacacgaaagcaagtccaaagccatcagaagactaaacaacacggaataaaataacattgacattctcactaagactgtcaggagtgatttagaatcagtttcatgatcaccataacaaattgtttcagagatttactaacattcaaaagtcaatgtttggaaattcttaatatgtaatctacccatagatgtatatttggactaaaataatgttgtatgttgtgtataaattttggttttgtcacacttgcaggttttttgggctgcataaggtcttagttgcagcacgctggatctgcattgttgtgagggcttctttccagttccctcaggcacttagttgcctcacggcatgaggaatcttagttccttgaccaggggttgaacccacatcccctgcttggaaggtggattcttaaccattggaccaccagggaagtcctccatacttgtagcttttaattggctggaatttattttatttttaaaaaacaatttgatgttaaaaatatcatggcaccaaataactacttcaaatgtattgtctttttaattaattttgtgggtgatgtttagacaaaaatctcaaacccacttataactgaagggttttggaaatgctttaatgcaatggattatttggggctcctattatttaactctggggatttatttctgttcttttatcaggttctccaaagtacttattatttgtgttggataaaccaattcagcagactgcatcctcaatgcatttgccagtgatgaaaactgcccttaatattctttcaggtctggatatctatctgtgtaagaccaataggtaagtatttctttaaactattgtagattatgtaagaaacttgccaaaataattatgagaggaaaaaccgaaagaaacatgccatggtattaacaagagttctttggatgattaaattgtggataatgatttttctttcctttttcattactgtcctattttaaatgatgaatgcatattgcctttgtaataaagaaactttacttttgaacaaacagttgtagacacaataatatccacacaaatgaaatggagatctcaggtacatatgcagggggatagaattctaaacagggacacagttacatctcctgatt

SEQ ID NO: 24771 - DNA, 2503 bp, Bovine  19866880436703
  misc_feature (1)..(1): n is a, c, g, or t
ngatcatgtgtagaagtacaggaagagatgttaatttagagaaagaagaaggaaataggagaaaaaaaattctgtgacactagggcatccagcggcaggtggcctcatcagcaatggaatcgaattcctgaaagcgctgaagccaaagtaaggtaatgactgtcatagatgttgtagactaaactcccagacagcgtctaggaaacatgccagaataacagcaaaggttgattgcctgtagctctaggattgcagaatttataaggtgaaatattacatctagtaagtattcaaggaatagtgttgaaattatattggccatattagaacttccaaagatagttttgtctatagcactatctctgttgcaagaaaagacaaataaaatctcttgaaagattcttccttcctaatggcagatatggtcttaatatataagtaaccataagtatgttcccacactcatatgaccttcatatggagacaaggggattgctccaaaagcctaaatcctttgctaaaatgagcagtagttattacaaactttcacactttaagttttaacaactaaggtgtcacagcatttgtaattctggcaacactcaagcttaatcttcctttgtctacagagacatgaaattttaaaagtactgtgattatattcactgagactccacagtagaatcaagattattgagttcaataagagaaatgacaaaactatgaaagatagttaatttatttgacaaatattgtaagtaagtgttaagtgttagtcactcagttgtgtccaactctttgcaaccccatggactataagcccaccaggtttctctgtccatggaattctctaggcaagaatactggagtggataggggattttccaggggatgttcctgacccagggattaaacctggggctcttgcattgcaggcagattctttaccatctgagccaccagggaagtcatgacaaatattgggttggctcaaaagttcatttaggtttttctgtaagattgtacagaaaaacccaaatgaattttgtggctaaccctatacttattgagtatctaccggacaccagataccaagcaaggtacacttgagtggctggtagaaaaatttggagacaagcagagagaaggataaattgacgaacaagacaaacataattcttgctcttcagttcagttgctcagtcatgtcctattctttgcaaccccatgaaccgcagcacaccaggcctccctgtccaccaccaactcccagagttcacccaaacccatgtccatcgagtcggtgaggccatccaaccatctcatcctctgtcatccccttctcctcctgccctcaatctttcccagcatcagggtcttttcaaattcttgctcttatactccagcaaagaattaaataagaaattaaagtatcctgtgaagggctggagcactaagagagtctaggagtcagacgagttttagccaggccaagtgtgggtaggatgatagcaattaagaaaagttaaaagatatttagaatgactgatgtattgaatggggcaagagatgagcctaaaaaggtcagtagcaatagctcatgaactgtattgttagctatattaaggagtttgggctttatcagaaaggtaatgagaatccattgttttaaaagtaagtaggagaatggtatgatcaaatttggattttttttaaagattcttccagctgcaatatggaggagaaattagtaaagactacactaatgaccagttcatagtcagttataactatctatgcaagagatataggttatctaaaacaatgtgtggcagtgaaaatggagagacgtgattggtcacagagcatattctgaaggtagatccaccaagatttgctgatctgttggctatggggaatgcggagaaaggaggaatcagggataatttccagatttccagctagacatctggttgggttacaggccatttccctgagactgagaaactaaggaacgggggaaggagtaggaagttcatggagagggcagcaaacaatgaatgcatttttgaatgtgtggagttagagatgtctgagacatcttaaggggaatgttgagttagcttctggatatctgttacatgtttaagtgctaagcatcagtggaaagggaaatttaaggggcaagagaaaaagaacttctataacaaggtctttggaaagacaacagtgatgggctgtgcccaggtggagggatttaccttggataaagcagaaggttgcctctttcaatgtaaaggcatggaagaggaaaaaacaggtacagatacaggtgtatgtgtccttttgatagcaggaagtcaaggaagttcctgtctagtgacttctatttactctaaaagaaggagacaaggtcatccgctagaaggtctgatggaagcagatctgaggtttacccagaggagaaaagaagcaaaagatctgtataagatcagaagaaaga

SEQ ID NO: 24772 - DNA, 750 bp, Bovine  19866880505636
  misc_feature (1)..(1): n is a, c, g, or t
ncaatcatccaggcacctgcatttattaatctttgccatgtaaatctgtttctatgaataagtgaccagagttgtagccccaatcagactgtgtaaacccacacacacaggtgatgtctgcagaccagtctcagggtgtagccgaggtttcaagtgtctgtgttcagactgtctccctatcctcagtggaggatagcttcacatagcaggtgcctacacctgggcagcttctcatctggaaaaaagacaacgatagagtaggggaaataatttttaattgtaaatgcagcaagcaacatcatgacagagaaatcttaaagggttttgaattaaattttgggatgctgatggaaaaatctgaattccagaggtaaaagctaagaaataattgggtttttgctgagaaggaaagaaaaaggaaaaaaacctcaatctctagctatctctctgtctcagaaattgaaggaaaatttagaagccaccaggcatcatatttctggagaaggcaatggcaacccactccagtactcttgcctggaaaatcccatggatagaggagcctggtaggctgcagtctatggggttgcacaaagtcggacacgactgaagcgacttagcagcagcagcagcatgtccatgggagcgcaaagagttggacgtgaccgagtgactttcacttcacttaattctgctaccatcactcctctattgtatttaccagttgaaatatgagaattagttaatatgaga

SEQ ID NO: 24773 - DNA, 2751 bp, Bovine  19866880552366
  misc_feature (1)..(1): n is a, c, g, or t
ntacccgtatgtaatgtgacatgcccttgagcaattctgaacagctctgtgcccacctgaatattcattggaaggattgatgccgaagctccaatactttggccacctgatgcaaggagctgtctcattggaagagaccctgatgctaggaaagattgacagcaagaggagaagggggtgacagaggatgcaatagttggatggcatcactgactcgatggacatgaatttgagcaaactcagggagatagtgaaggacagggaagcctggcatactacagtccctggggtcgcagagtcagacaggacttagtgaccgaacaacaatgtgcccaccagtaggtggcagcagagagcagtggccacaaccagctattgtggctcacagtcggcagttggagctgtgcaggctgaatatggaagctaactcttctggtagcgatccccatttgtctacagttggggttgatgaattccaaaggcagcttgcaaaacgattcctaatgtatgttgtctgtggtcatagagtgagacacacctgaaaaagagggcagtttttgcctgtttctttctggcccaccatgtctactgcaaggaccagaattgccttgagacaaaagctgtgagagcacatactcaatgtgtcttcgaaattactatctgcacattgcagagtactaatcctagtggctatcttagctctagactggtccatttcatggaatctcaacatctccacatgggtattcctgggcatctcaaactcatcatgttaagattggattccatttcttttccatttatttatttttttcataggaagtaggtgagaagcactagcttccttcaaagcagctcctgaaaccagaaatctggtgtcatcctagaatttttcccttttcctctgtcttactggcttcaaactgcttagagaatctatgtggaatatcagtgaattaaagaagctttgttgcctaattggaaaaaaaaaaattagtaaaaggcaaatctgggaaagacttttataatattcaaatgtctctcttagaagggaattgtgagcaaatggagggtggagatggtgattgggaagatggagagagagttctgaaaactgtagctccgaactgcaggagtttgagaacaaaaattcgaagagttgtttgactccagttgcctgattttgaaatgcagaagtcctctgacaggaaaccctgtgtagaaaatacagactacaccatcctgccattgtcagccccaggggctgagcaactggagcagaaggaagttgctttttttggtattgttttatttttgtcttaaagaaatatccttcttaatacgcatatgaaaatcttgaaagcttacaagagatggcaaccatactggatgatagaatcagagtctcaaaagatcttgataggctaaagtaaaaggacaaatgacaggaagtggaatgagtaggcacaaaggtaaaattctacatctgatgttaaaaaacccagttgcacatgttcagaaaggggagacatggcttaacaggagccccgtagttttcaaacttgctgttgatgttatgttagtcggggtatgctaatgactataattttaattcccaggacttcagtggttctaagatatcctatggaggaaaaagtggcaaagggatgatagtcctgcttcattcaattgattgcttctagcaggtttccagacattccaataatgtctgcccagtaaggggagtttcagctaatatctccttttaactaagttaaccctcatattggaaaaatggctttaaaaatatttcttcaaaaaagaaacaggtaatagaaagataacaacaaaatgaacttaaagaaaatggcagagcgaacctttctacttttagtacaaatcagctgcattatggtttaaaaaaaaaaaaaaaaaaagtaacgtttgtaattagaatagtcccatggctcaggggtaaagaatcagtgcaggagacacgggttcaatccctgggtcaagaagttctcctagaggagggtatagcaacccactccagtattcttgcctggaaaatcccatggacagaggagcctggtgggctacagttcaaagggttggacagcaaagagatggacatgactgagtgactgaacagatataagaaggaatccctccaaatctaaagttttcaagaaaaccacttgaaatatggatatacacccacttatattaatggacttctccattaatggtagttggttagcatattatgtcctgagatattaactagtaatactatgaattccagtgattagccatttaaaagctaagcattcagaacaggaagacaaacttcagtttttcagagatacttaaagttttacggaacaaacctggttcttgacaaatctcatgaaacctactaataattgcttagaagcctttcttgaggtctttcaatatacaattaatgaacaaaagtcacaaatcatcggcatctctagttcttcttgccacagtaaaaactgtttgaaataattataaaacaaaagaccaacaaactcaaaagcatttctttgtcagcacatttttagggaagtcacagaaacattgccgaacatacgaagaaacaaatattagaacagattggccatgcatttgggtgatagtacaaatgtttgtaacatgtctccacttatggtgcttgttagagtctatttcaatagttacattgccaaagaacttcttttt

SEQ ID NO: 24774 - DNA, 3468 bp, Bovine  19866880560851
  misc_feature (1)..(1): n is a, c, g, or t
naatttgcctgctgttgctccttgcaggggaattcttgagaactgtatggtgcaactataaattttataaaaagtcagcttttgaaactgtgcaataatgtttatgttggcaaaaatttttttccctctgctgttatgctgctactgtcgcttcagttgtgtccaactctgaagcatagacagcaccccaccaggctccactgtccctgggattctccaggcaagaacactggagtgggttgccatttccttcgccaatgcatgaaagtgaaaagtgaaagtgaagtctctcagtcgtgtccaactcttcttgactccatggactgcagcctaccaggctcctctgtccatgggattttccaggcaagagtactggagtggggcgccattgccttctccctgctgttatgctagcaattattttctcaacttctcatatcttctcagggaatgtatgttttatttatcttttttttttcaaggttaagaatcttacaaaaaagtataataattaagatttttgactctgcagtctcacaatggccattaattaattgtttatcttagataaattatttatcttaaccaaaatttagttctttatctgtaaaatctgtataacacacatcttacagaatattgtgaagtttcaatgagataatgtatgtaataagtatggttagtgctaggcactggaccagtgaatagtaaatagtaaataatgagtagctatcatattattatagtttctattgttttatctgattttttctcaatgaggaaatcctgccatgatctaaaaatgacaagaccttttctgggagaacacacaaaaagcttattatactagttattactggagagttgagatagaaaatggggaagagaataaagaaaattctactttttatcttatactctttcatttgtttaaagttttataacataaacaatattacttcttttttttaatcttagaatatttcctttattttagtgcatacctgattcaagtcctccccccaagacgtgagtatattaaaggctcagagaattcccactataaataaatgtgtaattttgttttaccttttattccaaatgtatttcaccataggatctagaattctgtcttcttggcataacatttacattttgaggactactagtgtactacagtgggagagggcaatggcaccccactccagtactcttgcctggaaaatcccatggacagaagagcctggtaggctgcagtccatggggtcgctaagagtcggacacgactgagcgacttcactttcacttttcactttcatgcattggaggaggaaatggcaacccactccagtgttcttgcctggagaatcccagggacgggggagtctagtgggctgccgtctatggggtcccacagagtcagacacgactgaagtgacttagcagcagcagcagtgtactacaggacatatttgaggaattgttctaggttgatatagactaaaacaatattccgagtaccatttcatgcttctttcatttctactcattatctttggtgatacttttttctggataaacttaaatataatattgagttttggggaggtttagatcttcctataaaagtaacttattcttcttttagagcacagtgaaagcatctgtatatttttgagagtaattacctgtcttatcaaaatattcaatgtttgatcactctgtaaaaggacttattgtggttttctctgtttttttttttcatttttattttacaaataatttgtagcaattacagaaaaattggaaaaatacatgccataaacaagaattacctatatagatattttattttttaatcatttttaaaattatagttaatttaaaactctctttagatgtctgatatatatgtgtgtgtgtgtatatatgtatgtgtatatatatatatagtgttagagttttcatacctgtgaaactttttccttgctttggagtcatttaagaaaaagtatctggtaaatggtatcattttgtaaaagaagcaataaaacttgaatatgtttataaacaatctttgaaccatacagatacataagcaaacaaggatcacaaaatttaagttaattgttgttttaataattatgctatatattgaattttattgtggtaagatgagtgggaaaacagtcttcctatataagtgatttaagaaaagttctcagaatatcaggaaatattttggatatgctgttggaagcttcagcagtaggaaagtgttagggaccaaatgtgctttttcatgttgtcacactcttgacttgagatcacatcaagaggagactgtggagacttcctcagggcatagaacacaattctgtattttatcggaagggacacaaatccttttggttgtctgaccaaatgcttcatttgcaagttcaaatctttcagaaaaaaataaaatacccagttaacaccctcttcttttaaaaagagaaaagcacagccgttggggtattttattgaacatgcagcaaatccagcccttttcttttgttgcacactctggatctagatgtaagcacccataacccctctctctgtaagcctttcccaggcactaagactctttgcatactccactgggacccgacaccacataaatcctgaattgcatttggcatttagttcatatagggatgggctaaattatatcaaaacaggttttctggtgcagtgatgatgatttgagccatgaaagacgtgttatcagcactgacagtttacattcctcaccagagaataaacacaagcccaagagttatatgctaatactgccctccaatccgtagttttagaacaagttgtactactgagagactaaagaactggggatatgtggagacaaacattttgtctgatttctttgcttcagactgtactgccaactctgggtggctaacccgtaaatgtccgcacctcattgggagggagtgacaggggtaggtcagagaggggatggatgaacttttgtagatctaaaaacatccccagagtggaacaccacaggccctgtatcagtagctttatctttcaaagaagagcagcccagactcagaactagaagtgcctttaaaataatgtggaccaaatcccccttgttacatatgaggaaattgaggcccagacagatgatatgagttacctaagggaataacagttctgatcaaataaaccacattctttggtattctgataattactgaatacttattataagattatttcttgagtatttaaaattgatacttgttgtgtctataaagacatataaatctttgtctatatatcaagtggttgggatttaaaagcctccattctgtttatttatttatttggtggtgaatttagtctcattgagcttccttgatagctcagttggtaaagaatctgcctgcaattcag

SEQ ID NO: 24775 - DNA, 867 bp, Bovine  19866880638968
  misc_feature (1)..(1): n is a, c, g, or t
ncgggagaaatgatttatttttgccctcccaaatcaaacattctaggaatccaaggtgaaaattggattttaactgctaccagcatttggagcatataaaatcggcaagtgttgagagttttgcttgatgaggagaagaacctaaaggggctgggacgagaatggtctacatgtgatgtgcactggtgtctgacataaatctgactgatcatactggaagtaaaccacaagcacgctttggcagctgattgcaaccgtggagacctctgtgttcttcacatatcattttgtttgcagtcttaacgcctggagcgttgttccatcttccttcttccttgcttcgtatttcaggtttaagccttctgttattaagctgaaggagcctgggaactacctgaatgcagccagtatgtgttgttcctccccgaggttctgcatttgtacatgtgttcactttctccccgcattgcccccctcccctcctcctgctcatcatacactatttttggagagaatacgacatcctgttgaaatcttgaaaacccacaaaaacctaaggacttcaaagctatgatgtaactccaacttcattagccgagctctgccttctctggttttgttttacaagttggacatgtagtcagagccttgttgggaatgctgcctgggtggacctggagggcaggcagtgcggtccctggaggcctgccagacaactggtatccactgtctgctgcccttctacgagtcaccacctgtcccaactttctgcccctgagtgctgctcaccagcctgggctagtttgctagtttccattgttttccccaggaccattgcttgcttgaatggactgaaactggtttgtt

SEQ ID NO: 24776 - DNA, 2143 bp, Bovine  19866880681265
  misc_feature (1)..(1): n is a, c, g, or t
nactgctctggccttgtttttctttaatgggagaaatatagctgtgagattggacatgtgtgtgtagaatgcttagcatagaacagtttcttcctgttctcattagcgctttttcggacaacaccgagaaggaagctgtcatgtgttaagtcagtagttctcatcgagagtacttttgggcgtttggtgccacaggacatttggcgatgtctggagatgtggtggtttgtcaggacctgggagactgctgctggcatctgtgcataggccagggctgtgctaaattattccgcaatgcccaagacaagccactaccataaagaattctctgatacaaagcatcagtagtgctgagcttgacaaacagtcagtcatgaaagtatagtattaaagtattgagcaaattaaaaaacatcactgtgcgtatcttaagttggataagatattattctgttgataagtagcaaatgaattttttcagttcttgatactttggctcctgaccaaagttagttttcctagtttctgtcaatatcagggattcttgtcaccaatttatttatgtatgttaagaagttatttgcattctaaacagtagaataaacaaatgcctagtgaatcattgctgagctcagcaaacagtatcatttgatacagttacaactgccacagaagactgaaagtattaacttgctagtttgatcaaaatacatttgattgatttactaatgttgattagctaatgctgacatgaaactgggtgacattatctgcttcatatggcacttagcccgcagtctaaatctggtaagctctttgatttttttaaacattaaaataaaatttctacttccctggaagaatattgtggatttctgaggcaagagaagagagttggaaattttgggtaattccgctgttttgtttctcattagacattgggcggcgtatcatgtttgagttagttgtacagaatggaagagactttgaggatatattttgtgtttattattgttggcttaaaagttgacctttttccctggatgtttcgtgacacatcaggtactcacttggtagggtagcagttgttgactttggtggtctgatgtttctccgaaggggctctgatgttgctcaatccttcactcttgcgattttgcgctcaactcctgggtgcagtctcaaaaatggtttctcgtagtggcactgatgatacttagtacttgagtttgttttaggtacaacacggcttttcatcacgatgctgtggggtgtaactattcttatgattcccctgttagagaggtcaagtgacttgtctgtggttgtaatatgacctagagggtggtggggccaggccagcttagtgaccttcactctcttctgaggagggagtctagttgatggtggtgtaccttgagtgggaaaatacagagagagatctgacatgaaccctaaaatgcaacagaaataatacatgaactgtagagcaccaccattttttatagctctgccaggacagggaagggacttactggtggaagaatttttttttccaaatgtattttttttctttaatttctcttttttaaaaataattttatttatttatttttggctgtgctcggccttcattgctgccccggcttgtctctagttgcagagaacaggggctgctctctagttgctgtgtgccggcctctccgtggcttctcttgctgtggaacatgggctctaggcaagcaggcttcagcgtctgtggtccacaggctcagtggttgcagcacatgggcttagttgcagcatggcatgtgaaatcttcctggaccaggaatcaaacctgtgtccccttcattgccaggtggattcttatccactgtgccaccagggaagtcctttttctttctttttaattggaggataattgctttacagtgttgtgttggcttcttccatacaacaacatgaatagccagaagtatatatatatatcccctccctctggagcctccctcccacctccaccccattccacccctctaggttgtggaaatagggttttaaaagccttgtgaagtcagtgtccctcccttttgctaagcagtgggggcagaccgggggaggtactgacttgcaatgactt

SEQ ID NO: 24777 - DNA, 1668 bp, Bovine  19866880736216
  misc_feature (1)..(1): n is a, c, g, or t
naaaatctcactaacttgctgatcactctttcctggatctttattaagatataaagatttaacactaattccttagttcctcactagtcatttcagtttcacagaagcctttgaggtgaaatgagaaaggaggctgtaggtgtgtttgtcagttctattaatattttcccttaatgtcacctagatctgctaatttatatatgctccttagattttctaactcttcattcacttctactattctgtaagaaattcttttgatagaattctttctgtttattaattgtctatatatagagtcaaagttggactcctactatctccataaattgttgtcgaaggtaggggatttaagctgaggtacagagaaattactaaccttggtattggcaaagggtgaaaaaaatagctgggctgggatttgaatacagacctttctggcttcatggttcaggcagcatctagggcaccaaccatctaggtagtatccctccagggtccccctagggtccccctagggtcccacaggcaggcagcaacacaattttgtggcctgttggctctgggctgagggttttggcgtacctggtgaaaacagagagagcatcccgtgaggaaggcagtcaggacagcactgaggatgaagcaaccacagggtgctctgggagggatttcatgaaatttcacagggggaagggaactactaaaggcatgcctaaaaatcacctgtgtgcctctcctccctttgtggtcttctctttaccatccccccacagcttaacacacactttctgactatgcttggctccctgggtctgctgcaggaaacttttggcctgttcagtgcagggctgcctgggaaatatgacgttattcttttaaggatcatggatctcttttcctaccactgtctctggtggggcatgaatttggaaaaacacagctgtattactttcttgggagaaggctaacgaaacagtataaggaaccatacagagaaaaatcatggtcagcatatccaagattgccttttgtgaactcgagggaaggattttgtccaaatggtttcaatgcttggacatctgatccctgtttttgatttggctgcaactgctctttgagattctcgcagtcaccctcctgtcacagatctttatcttctgatctacatttgacccttgggtagcccactgtggagcctaccttgcctggggcttagagcttgggacttgttcccttggatttcagaactacctggactagtctttccaacttccatgccccataacaattgcttggaaataacccaggtcagattcttggttatctcactaacccagaggagatgttgggttggataaacagttggtctcttggaacagggaggaaccaagggccaagtgctagagatgttgtgttctgtaacagtcatgttcaggtttgtctggatcaaattacattagttcaactaatcaggataggttgtcaaatacttgctatcctggagtcctgagctggccttttagaaatatataggtatcccagataaggttgctggccttagtaaataaaaatacatgatacctagttaatttgaatttcagataagcaatttttttttagcgtaagtttcaaatattgcatggaaagtttttttctagatttcat

SEQ ID NO: 24778 - DNA, 1177 bp, Bovine  19866880962460
  misc_feature (1)..(1): n is a, c, g, or t
nccaatagagattatacagtttaaaaacggcttcccacttctggcccagcatataaggaactcggaagtcgcactccctgctaatactttaaaagctgaacaaactgaaaaatcaagaactctgctaagatccatcagagaagttaggtaacagggaagccactacccctcaaactagagagacagacatttaagtgcagagaatcacaactcattggaacagaaaccccacaaggaggagtctcccaggaacctgtaaggggttaggaaaatctgaactataattggggagcctgtgacaaactctgagtcaaaaattccaggggacccatcacagagcgatccccttacttttataagtttttcttctgggagttctatctgttggtcacaatgaaagtcagataaaaataccctatgtttccagcagcaagagaagataaagaatctttttaaaatattccatggcattctgttcttaataaggcttgccttcaaaagatattatttcatcatacctgatcttactagagtctaaactaaggagaatgcaaattcaattcagtgagaaaaagttaatttacagtaaatggtgttgaaacaattaaacatctatgtgcaaaaaactgacattgatccatcatatgcaatataaaaactggctcaaaatgggtcataaacctaaatgtaaaacctaaaacttaaaaacaaaaacaaagaagatttttgtaattatggattagacattgcttatatatgacactaatagcacaatccataaaggaaaaaaaaataagttggatttcattaagtcaaacactttttaaaaacagaatcactgttaacagactggcaagagtagcattacatttaggaaaatatttgtaaatcctatctttgacaaattacctggatctggtaatattaataggaatttaaaaactcaattataaaaaatacaactaaaaaaggcaaaagatttaaataaacacttcagagaagattcatggatagtaaattagcacatgaaaaattgctcaacatcattagttaatcattagaataaatgcaaattgaaaacatgagattccactacatatctattaaaataactaaaacttaaatgactccttgtaaactaaaaataaatcaagaaattttaaatcagtctgctgat

SEQ ID NO: 24779 - DNA, 760 bp, Bovine  19866880983640
  misc_feature (1)..(1): n is a, c, g, or t
ntaactgtggctgacattggcagttgctttttaaactctgaagaaaaataatgaaaaatttgacatttattctcccaactgccattggatttataatgacatgctgacatttaatggttttaacacttgttacagatgatgtagcaatttgtatgctgatcattaggatctaactttttttgattcaaaattggttaaaactaattaaagtgtgacactcaagactttgcagaactatgaaagtcttaactattaaaagattccaagagggccaactcttagatataaaattccaagttttgcttacatcaagaattaaatagcaataaataacatcacctgtaattgcaagaagcttattgttttctaagacagtaagcaaatgctgtataagaaagagaacatcaaacttgtatcagtcaatacgtgaccttgggcaaaccatttgtctgttgatttcttcatctacaaaagggagactggtggctttgttacatatttcaaaatgccatgaacattaatgaagtaatatctgtaagacatagaatttgtgagaatatttctttttatgactcttgctaaattctctgctttgtaattcagctcctccattactgggcagcttattaaagctgcaattatgcagggcagttcttacttattttaagctaaaatctgtcttctgctaatttttatgcatttattgtagttttatcctctgaaaccatgctatctttaattcgtctactacatgttagca

SEQ ID NO: 24780 - DNA, 743 bp, Bovine  19866881081502
  misc_feature (1)..(1): n is a, c, g, or t
ntaattggatttgaatgaaaaaaaaaaaatgatccccagaagcataagctattttccagtaactgacagagatggtaggaggaaaaaaaaatcacttctaatagtttcacattgagcatcactctctgcctgaaacaactctgcagagtaacaaggcaacagagtaaatgatttataagtaaaaactgtaatacaagcaatgcattctatgtagagtcattctgagattattcaaggggaatcagtactgggacaatgggaaaggaagcaagctgttctcataaaatagaattctttattcacgtattgaaaaaaatgcctttgttcataaatgtttatcctctgatatcctccaaaaagaatttaaacagcttatgataagaagcaaaaataaaatgaaactgaaaatgattaacataggaataaaacaaaggccaaaataatgccagtctaatactcttaataaaataccactgtatcaacaccagggcaaaaatgagatacgaaatgactagcccttcagaataaggttcaggaaaagccaagctgagaggttcacaacacaagctgacaattcgtgatgtatcaacttgtctgtctacctgtgtgtgggttggtttccctcggtaaacagtacgctccactggtcaaagatctggtccatttcattcatcactggatacccagggcctggcataatgtctgggaaggtagaggtgtgtattcagttgatatttgttgag

SEQ ID NO: 24781 - DNA, 1566 bp, Bovine  19866881191396
  misc_feature (1)..(1): n is a, c, g, or t
ntgtccacctgcttgctgacttgccaggatgagctagaaataaacttagacttgttttaattctggttaaaattacgccctctttgggacttttcttgtggtccagtggttaagaatctgcctgccagttcaggggacatgggtttgatccctgatctgggaagatcccaacttgccacagagcaactaagctggtgcgcctcaacaactgaagcccatgtgcctagagcccatgatccactacaagagaagcctctgcagagaaaagcccatgcactgcaactagagagtagcccctactcactacaactaaagaaataccatgcatgtggcagcagacttggtactgccttaaataaattaattaaaaaaaaattactccctctttgccaagaaaactattgttaattcaggcatgcccactgagttggtacatttgacctccaatataaggcagatgaggatttcattgagaagaaaagaataatggcttttattgggagagttagtgtttgtaagggagtagtaacgtttgaggctgatggagtttatatgaaccagatgactttaatttgattccaaagaattgtatcagtaatccaggtgcagtgggctgggcttgtatgcactcagctttttttttttttttgccatgtaccatacagtactttggccacctcatgcgaagagttgactcattggaaaagactctgatgctgggagggattgggggcaggaggagaaggggacgacagaggatgagatggctggatggcatcactgacttgatggacgtgagtctcagtgaactccgggagttggtgatggacagggaggcctggcgtgctgcgattcatggggtcgcaaagagtcggacacgactgagcgactgatcctgatctgatctgatctgaccataccaggatgttgaatcttagttccctgactagggattgaacctatgcccactgcattgaagcgtggaaccttaactactggaccacgagcgaaggcccacttttcttccccatagaaagcagaaaaatcatgtattccaaaagatggcagaaataagaaattcatcctgacaaaagtataatatattaaatacactggtataattctggtgggacagattttccctctgaacatgttctcctactgactgcccccaccggagtctgtcatacaacagtttttaaccactgcttattcttatgttgtgagcagacaggagccatcttcaaatccacagattccaaggagagagtaacgttatttatcagaagaacaggcactttcaatcttggaagagggcataaacattttatagaagcagtacagtttagattaaataggcacatcattcatcaaaggtgtaaaaaagatgacaggaaaaaaataccacattgtaaaataagatattcagatgttgtgtgaacgtttaaggcagctgatggccaaagtgggtgtgttaaggaaggtagcttggatatggaggtgattttacatctagaggagttctcttcctgacctcagtgactgagcactggcaaacaaacaggt

SEQ ID NO: 24782 - DNA, 627 bp, Bovine  19866881232595
  misc_feature (1)..(1): n is a, c, g, or t
ntatctgttttgcaaaagagtggccttacttcagctactattttttttttctcttcttttcttgagaacaattttgcaagcttattctgacttgaaattatgatcgttatgttcatttcctcttctttaatgcatgccattgtatctcaaacttgcccaaccattggaatcaccagtaggggtgaaaaatggagattcttagattattcctctggaacagtgatcctttaggtctaacaggtttcctgaaaccagtgttttagcaaatgccccatgtggatcttaagatccagcaaattttggactcactggaatgtgactttgagtcttggcccttgctctcctcaccaacactatggtgtgtaataattgtgtgtctgtgtatgggagagtgaaatgcagtgaaacagcatgttaaaggtacagattatagtcattattcatagtatattcatatgtgtaagatgccatgtaagtgtgaaatgaaagaaatagtgatgttgttgtgaaacagtgtctcacctcttccatgaaacattctaatttatgatttttcaaagactccattataactcagagtctctgattcttgctttactagttcactgattaccaaagctatgtcat

SEQ ID NO: 24783 - DNA, 771 bp, Bovine  19866881280061
  misc_feature (1)..(1): n is a, c, g, or t
ntgtggttaatctcctgtatacaatgagttttttttaaaaaattcattttattggaagacaaggcagtgcagagcagtgagtctatttgaatgcaatagtgctttttaggtccagccaatttctgattctctgaggctaaattctattaggcattaaaactcaaatttcaggcaccttgcattgtgaacacaaggaacatctgtagcaaatgtctcatattataactactggatactgattactatcagaagaactaggcttataatgcttatgggctaaaatgaagaaagattaatttctaaaaacacctaagtatcttacttctatgtttgaactgaactggaaggatggtggatgatgctgataaaaacaacctgcaagttctcagtttgatctttttttccctccagagcgtttatagggttaccaatagacatgttaatgataagtactattaattgggcatctaccacattctaaacattttagatacattattctaatgtacatagtaatcctgaaagtcaatgtatcaccttaattttacagaagagaacaataaggctcatacagaagttaagcatcttgtcttgaagaagaaaaattaaaaatttatctccttctccttctgcctctgtaactcatcttgttccttgcaaagtctagatcatgtaggtctcagaaagtggggactcacaatactaagaactagagcttatctcactcactcttgtcctgctctttgcaattgccctagcccctgcaaacca

SEQ ID NO: 24784 - DNA, 1634 bp, Bovine  19866881409419
  misc_feature (1)..(1): n is a, c, g, or t
nctctgaccatagtagtttatttagggatgagcacaagacacaatacaggccaatgagactcaaattcaagatggatgtaactgttgggaaagagaagctttatactctttatactgagaattataactctgtgaatatcatcaatctggagctaccagaggccaccaaattgagagtcttcctgagaatacaaccagcacaaaatagagtcaaatagcaggagaatcacagacaaaattctgctgccatttgttgagctctaaatctaagaaagaattatgctgatgcacattgtaaattttcagtaatatgagctaatatattctttttaatactgattgatataaacttgtatttaggagttccataaagcctgtgacaagagacagtataattaagtagcctgggctcactgagcctataaccagggcttagcaacccgaatgaaaggcctatagttagaggctgaggactgagatggagacataaagtgagaagagcttaaaagcagtgactggaggaaaacaaaccagggtgtcagtagaacaagtcttgtggcagaagatgaaaacattagtctaaggcagaaacaatggaaagcaagaagagaacataatacagtcccttttaaaggaggacttggcaggtggccagtgcaataatgctctcggctccttcttcagatttatttcccaccactgctcctctctagctccctatttcaagtcatttccaacctttatggatgacccacatagaccttgtggagccattcctcagtgcctttgcgtatacacctttgtatccctaagcctaaatgtcctcttctttcactcagacttcaagacccagcctaaattttcctctgagaagccttgagaggtcccctctctaccttgtgatccagctccatgggaaggcctggacttctggaaggcacttccttgttttcactcacctataacacaagctcttttaataaagagaacttgtctaattcactttaacatccccatacaatatcttatccataatgcatacttcaaaaatatgaattgataaaatacaaatcgcatgacgaaacattaaaggtgagcatcaacaaaatagtaccataggttctacactttcatcaaccccaaataaaaggctaaaacaaaacaccatcataccagaaggtcaaataaatatattcagcatttactatagccatagcactagaaaagaaatttctctacattctagtccaacctctactcattcttaaatgcaaactagatcttcctacaatttccttattactctgcaccccataaagttgcctctatgccagatcaaggcattctctgtaagtcaagttaatcttaaaaatgcagcatgtgctcagctgtcagaatacttttgctttctgtcagcctcattatcttccttctctgtattagtaaacaactatagaagtgatgatcaaatatttgtatgtgtcattttgttattatatgtagctgagtttttattgaatagttttagtgatcacaatttgacataagaaaatgaaagttgcttcagattctttaaattgatcataaataaaaaagcaaatttttatttcaggcgaatacggactttttaaaac

SEQ ID NO: 24785 - DNA, 969 bp, Bovine  19866881653966
  misc_feature (1)..(1): n is a, c, g, or t
natagaggagcctagtgggctacagtccatggggccacaaaaagtcggacacaactgaaagactgagtacatacacatttatagactccatacagtgtgctgttctgctgtagacaatttatgcatcactagatacttcgggtcagaactctagggggccctgaatcccactcactgcagtctatggaagctcccagttagtggcatagagagaattctagtatgggtctttttccttcctccttcctgcctttccctttgcctttctactttcctttatatatttattgagctctctctatctcagtctgtcctgccagactacagaaagaccctgtctccttcttatttctcaaacttaatgcaatccctgcccttttctccctacatcccaagactcctggatataacttttataattctgtcacttttgacattataatagttaggacttaattcatttttttttttaatactgtaactctttcttattctggagtactagaacacaccactaattctcctacatcatttgacctgtgtcagaaactttctaagtagaagaaatgtgttgaagccacatgtcctctttgctaatgaaagtatcacatattaagttgaatttgccttgggatttgggtcactgctgaaaccaggccttgggacttgtaataactatagggagcaaggatttctgcttcattagtatttgagatgttccctttagaaaaggacatatgtttcttcataccataaaccttttcccaggaagggccctctaaggtcatttggtctgttgcatcaataagaccatgtcgcaggagcacagacaccctctagcatttgatctcagctcatttaaaggcctggagacatggacttgcctttgctccctgggcagtattagattcatggcttcatccttcatggttttaccaggttattacacaccatttctccttctaaaat

SEQ ID NO: 24786 - DNA, 1028 bp, Bovine  19866881934303
  misc_feature (1)..(1): n is a, c, g, or t
ntaaaaagcctatttctacagtaggtcaactcactgcactgaattcccatacttttccctttattttactaatcatcattattgaaacaacataaagaaaagattggtgcctcatctgtaaaagcttaaaagctagctagaggaaaccaaactgacataggcattcaggctcttgggcgggccacccaaggacgctgacacaatcaatcaaaatattcccttggaagcaacactgctctaaccacatgaatgacccgctcaaacacaattccaaagcacttggattccattaacttcaagttttgctattcatctaccaacaattaaaaaggaacaatctcctcaagatcctaataaattttccctacgtggctatgttaacagttttctcgattgagggctttacctaaatctattaggcctctgttttctaattagtaaatggaaatgatacccatcattctcaggatgaagagaaattctatgtgaaaatacctaaacctatgatgctactgtctggatcacaacaaactgtggaattcttaaacatacgggaatacccgaccaccttacctgcctcctgagaaacttgcatgcaggtcaagaagcaacagttagaaccggacacgaacaatggactggctcaaaattgggaaaggagtacatcaaggctgcatattgtcaccctgcttatttaactaatatgcagagaacatcatgagaaacgcctgctgggtgactcaccagctggaatcaagattgtcggaagaaatagcaacaactcaaatatgtggataataccaccctaatggcagaaaatgatgagaaactaaagagcctcttgatgaaggtgaaagaagagagtgaaaaggctggcttaaaactcattcaaataactaagatcatagcatcaagttccatcacttcatggcaaatacatggggaaaaaacagaaagagtgacagatttcactttcttgggctccaaaagcacttcggacaggactgcagccataaaattaaaaaatg

SEQ ID NO: 24787 - DNA, 1957 bp, Bovine  19866882003152
  misc_feature (1)..(1): n is a, c, g, or t
ncaaagagtcagacatgactgagcgacaaagcacagcacatgaatggctgctgtgcaaggcatacaaaccatataatgtaccgtttggtcagcgagtcttctcattgtttatatttgcgttaaaaaagaaaattgcagtctgtcgatgtgctagttctttcaagtactctatttctattttccactgtgaagacactgtccttttgtgcctttttaacgacggctgacttaacaaacagacttcttgcagtttagctttgtagaggtttggctagatacacgcagtttgatcatttaaatgcagccctgtgaggaataacaaactgcagttactcagcttcagtaagtgaagtgtggaactgtggaactgattgaaaaaatgaaagtagttgtgctatatcaagttgttagaagacagcttaatttgagtttggcagagatacagggctaacatctgctatcacatgtttgaagcacaaatatttccttccaggaaacaagtgacattgaaatttcattttcacacagcatttataggtgctctgacttcctatagtaaaagaatctttctgaaccaatgcatggggagaacattttaaatagtttttgaatttaaataatttgcagttttggagctatactatgatctgtaatctatcctagaacaagaagaatgttttgtatcaaatttaattgaaatcaaaatatagatgttcccattgattttgataagagagccaggtatgtagattgaaggagcaatctgatcaagtctctctggaaccttaggcagagttgttttttttttttcttggaacacgaaaggaggtagatgtttgtcacttagtttcttccatgaattgaagaaaggaatagaataatatgtaggcgtctaaaataaccaaaatcagcctcacattgctcagcaatgatatctttatgatggcgaaattggaagtagcctttgtagatttcgtcagactcactttgacttgcaataattataaagggagccacatatttggagggaataagggtgatattttccactctgagcagctgagttggtggcttgcaatattattggcacactgtttccaaagaaatgatacatttcagcatataaattcttgatttagcatagtgtcttagtagctcaaggataggttggaaaatcaaacctttatttctctggcgagtatttacaaagtggaaacatctgcttcaattgttgtgggacaatttatgctctttgtggggcagttaggaagccagggcatttttgtaaacctttccatgagttgacatttgataccttcctctgccagctcttcctaaactttctccgtggcccttgcagaccagccagaaattattctgactttcatgactgctttgtgtaaacctttgtaatcatcatggcccaaacgttgtaaaaactattttgctcatcagatcttttccagaactcatcagtgacccctttataaaaacctttgtccctgaagcatattaccagcgtcatgacagcctcaataaactatgtaggctcatggaagatgaactttgttgcatgtaaaatcatcatgctttaatatttccagctctgtttatttatttattttgagtaatcacatgagcaggaaaaaaacaaaaggtcagcatattcattttcatatcttgccaaaagctttctttttcatttaattctaaaagacaccagactcttaaatctatccctggctgtctttctgggacaaatagaccatttggttttccattggcttttggtcatgactcttttttccaaattctaaatggactcccgggaaagatacaatgaagtccttggcctgatgtaggtgaagctgtttcaggggccgcgtgtgtaagggcagtcctgcaccctaggggaaatatgatgggcattatgaagggggacgcttccaagagtcca

SEQ ID NO: 24788 - DNA, 1062 bp, Bovine  19866882059339
  misc_feature (1)..(1): n is a, c, g, or t
natcctgtgtggccgggagtgaacgagcacatgccggggcgcgtcttacctgtgcctggaagggggcatttctcacagtgcgggccccaggccttgcccacactacaacagcagagctgcttggtgaggtggacagacagagggtgcatacactgccttccggaactgaccagtcggtaacacggccctttctcttccgagatcacaggggtgtccgctgaagcaaagagataaggcctgatgtcacccaagaaatgacaaaaaccagtttgacatttcacataaatactaaaaggaaccttaaagtttgtattagaagccatacttcaggataaatctatctagatgtagggcattaccctacctgatgtagggtcagctgacctattgagtcttaggagtcaggatatcaaacatccctgttgttgcctggccccttcttccattttagctagtgttaaaaatcagttatatgatcctttaattagaacttaaaatttaaaaatatcagttatgtgtgcatgaatgaaaataaatcattgcaaccaaaataaacctgcctaaataaacctaattgtcaaaatcatgatttcatttgctgttttgtaattagccataatagaggttattttgggcttccctggtagctcagctggtaaagaatctcctgtagtgcaggagacctgggttcaatccctgggttgggaatataccctggagaagggaatggctacccattccagtattttggcctgcggaattccaagaactgtatagcccatggggttgcaaagagtcagacacgactgagcgacttttacacacacacacaggttattttaggatagcatctattgaatagccaagtaccatggaaaatcaggatttgaacataattgatacaagtcaactgttactcttctcacttggaggacagtgagagcctgcagggcctcatccagtctcatcctagaccagcgaccagaaatcggaggctgagagcagcttctgactggccctgccacacaagggccccctgtccagccagaaagcacaccagaa

SEQ ID NO: 24789 - DNA, 778 bp, Bovine  19866882059810
  misc_feature (1)..(1): n is a, c, g, or t
nctggaagaaaaagttggaggatttaaatatgcccagcgtttcggtacattccaccattcacagtggtccacaaaactagcaggcctcaacaaactaggctgagaggataatattcacagtctacgccacaaattggaacttagtttaaatgaataggtactgatctgtatacaaatatgggcaaactgaattttcgacacattggggctataaaaagctagactctcattcttccctgttatcttagctgactataaaaatatttcagctgcttgtccccgaaaagcgctctaagaatgtgcttgactttcctaaaggcaactcccagcaacaccctggcccctctacccaccccctcgctttgtgcgccagcagactgtttcaagttattgtggtcaaggcagagcagagcaaactcccatctgaaggaaaacctacatctgtcattttgtagaagagacacacacatgattttgatttgaagagctacttccattttcccacttgtctctcattaggagaataatgttctcttaaaggcgttcaacgttttggttgctatcccttgcaaagtgaaaagaaaagtaataatatttttagcaagttcaagttatcactttatctctcccctaaatatacctaccttactctcttttaaaggatacccacagattctattcagccagaaagtaggttaatactgtagccgtttaaaggtttcagataacaaaatgtcagataataaacactgcagcaaaccattgctcattttttaaa

SEQ ID NO: 24790 - DNA, 698 bp, Bovine  19866880412871
  misc_feature (1)..(1): n is a, c, g, or t
ntgcacaggcttcttctgtcgggacgtttgggttgtctttgcaccctttcgtctctgcggtacatgtacactgacttataagaagggagcagtaagggaactggaaattagcatacaaattcaagtcttaaatttgtggattttgtataaaggaccacattctttcactgccagaattctatccattagcagtagcgtattatgcatctaagctacaagattatttaaaaacaactatttcaaacattcatttgatttgtgtattaatattttattgttgccctaacacagatatatatctctgttgttatatattcttgtttcttggggaaaaaataactgtcaaaatgatggaactatatttgcttatgcttttcatttgttcaatgcatcaagctttccgactacccagtcagtaattttgcaatgtctcattattattcaaaattgtgaatctttggttctgcaaaatttcacatttttcttagtctaaaattactcaaaaaaatactgctactgctaagttgcttcagtgtccaactgtttgccaccttatgaaccatatgtccatgggattctccaggcaagaatactagactggattgccatttgttcctccaggggatcttcgtgacctaggggttgaatagaaaaaatgctctaccataccaatttaatgctttcttgaccatcttcaa

SEQ ID NO: 24791 - DNA, 3745 bp, Bovine  19866880553092
  misc_feature (1)..(1): n is a, c, g, or t
nttttaatcactttctgtaacagccacttgtaagtcagacctacttttttttccctttataaaatgtaattttattttttatatcttctttattaaaaatatacatcctacttctttattagattagcagacattaatactaggtatttaatatagaatatttcccagtttacatgaatctgaaatttatttaggttaatttttcttgtatttagaattgtttgattgtaagcacttacttttctttaggccaattaaattagaactcattcacaacttcaataatattatcagaaaaaaagcaaaagacgtaacattgaggtatacataaatccagacagacagagatcttattgttttctgcttgagatttaaaatatctctttaacaccctttttctttttcttgcttgaagttctaatttgcccaaggctgaagtctcaggcaaagattggctgtgtatttcaaggacatggaaagggttaacttcaagctttttcctaggccttttaacaagctagttgtttgtgtggatcacaataaacagtggaaaattctgaaagagataggaatacaagaccacctgacctgcctcttgagaaacctatatgcaggtcaggaagcaacagttagaactggacatggaaaaacagactggttcagataggaaaaggagtacgtcaaggctgcatattgtcagtctgcttatttaacttatatacagagtacatcatgagaaacactgggctggaagaagcacaagctggaatcaaaaatgccgggagaaatatcaataacctcagatatgcagatgacaccacccttatggcagaaagtgaagaggaacttaaaagcctcttgatgaaagtgaaagaggagagtggaaaagttggtttaaaactcaacactcagaaaactaagaaaactaagatcatagcatcaagtcccatcacttcatagaaatagatggggaaacagtggctgactttatttttctgggctccaaaatcattgcaggttgtgattgcagccatgaaattaaaagacatttactccttggaaggaaagttatgaccaacctagacagcatattaaaaagcagagacattacttcaccaatgaaggtccatctagtcaaggctatggtttttctagtggtcatatatcgatgtgagagctggactatcaagaaagctgagcacagaagaattgatgcttttgaactgttgtgttggagaagactcttgagagtcccttggactgcaaggagatccaaccagtccatcctaaaggagatcggtcctggatgttcattggagggactcatgttgcagctgaaactccaatactttggccacctgattcagagggctgactcgttgaaaagaccctgatgctgggaaagattgaaggcaggagaagaaggggacaacagaggataagatggttggatggcaccaccaactcaatggacatgggtttgggtggactccaggagttggtgatggacaaggaggcctggcatgctgcggtttatggggtcacaaagagtcggacacaactgagagaatgaaccgaactgaactgaaaaaagaattggttttgcagtttccgaaaagaaaaatttttctcattccatttagttatcagtcatgcactcacaatcattcagaggctattacaatgcctcccttctcccaagtccccaggtttccttaactgttgctcacttcctgggagctccaagtaggcgatccatctcctcttctatccattgggacctgactggggactggccctggagccttaccttatcctgtggccattcctggtgagttggtctgtccctccaatgagtccagtcagggctccaccaaccagagattgggaacaccggtccaaaagagaacctaaaataccatcaggtggcgtgccttcttgtttgtcttgtggttccttcgctccagcccagctgagccaccagtccaaaggctcaaggggccagcatgtttggaatctcactggggcccccagaaatattgcagaaaccagtcatcaagaaaccaagcaccacacatggagagttggagaactcaggcttattacaccagaaggcccagaggagttaacactctaagctctgagccccgaacaaaggggttacagagtttttataaacttactatagtggcaacactagctgctaatacgctggtctaaactaagggattttgtgtgtacgggaacagtagtcaagatggggaggggggatgcctgatttacacggacaggcatgattaagcaggtttgcaggggctggtcaattgcaaagagcaggacaaggggtgagtgagataagctccagttcctagtatattaagtcccccatgttgtgagactacggtgacctacgtgatcccagactttgcaaggaacaagctgagttacagaggcagaacgagcaggaggttatgtaaaattttaacttttcctcttcaacacctgctaactcatctgcaggccagggccatgcgtcctgtccaccttcagcttgtagactgctctgccctgctttagttcatggacttgttgagagggctgtctttatcataagactgtgaccttactgtatttgtcactcttgtacatctagtctttaacacctagaccatgcaaggtggttcagtagttcaagctgtgtatgtctcagagtcacctcaggagtctgaagatataaacacccagaggccctggtcctcccgcaagcctggccctctgatcctgttgctcctctcagagatgttgccatgagtcaacctctgagaacctcatgcaacgacaggcagtgaaatccagagctctgcagaatgttctagagcatcccacctctcttttgctttctctctctctgcaccgccacccttcccaacccctccccgtctttctctccttgagttattttcatacagttcttcatgatctgctctcttggcacattgagaagatttgtattctatgatgtttccaagtgtccaggtgtttggcatcttatattttaatatacagatgcttgatgggagctaggccttgcacacactccccaccaaggcatgcacggactatctgatgctttctaccggtttaaagtctcagcagtccctattggcatggtaattgtttatagagatccagcttgaaagaatccttgtgaacaaagtagagaagaattctaataaacaggctaggtttgccctgctggaattataggattgctctgtcttctaacaaaagagaatactggtgataataatatgaaaagaactatctaatatcaattcaggtagtctgtggtctctcacgattgtgtaattatctgaacagaaacagaacatccaaataggttctgactttgccaaacacacagccgtttccttctctggatcgataatcacaggaggggaaaagaacacctggaggaaccaaataattgttttagttcttcccaaatcccatctaccagatgaaattgatgctcaagagagtgatgaacatttgcttcacaacacaaaaatctcatatggagcacacagtggagatttatgaattaaaagtacaagttattagactcatggagctaaaaacattctgagcaattggagacatagagaagaaaagattgtgccaaaaacaattttgtgtatgataggggcaaattgtaaaattaggaactagacttttaaaaacc

SEQ ID NO: 24792 - DNA, 628 bp, Bovine  19866881815188
  misc_feature (1)..(1): n is a, c, g, or t
ntgtggtatttgcccaatacacagtggtgatggtgtggcccacgggacagactgatcgaaagcatctcacaaggatcacttggatcggttgtccccagatgtcatggaaacacattcatttaacaagtattagttacatcttacagatattatacaagaaatgtcaggagtaaacctttcaatggaaaatgatccttcgtggtatttttcaagcgttgatacttggtgatgaaacacagatgtgcggattgactggagacaggaagatggcacctttaacaaatcacagagatgggaatatggcatttttaataaatcataggaagagttatggcatttgaaatgaaaattgaagttcatctaaattactttattttccataaaatagagtaatgcctccctacttagttttatagccatgttatgaagtaggtacttcattatgatttcataaatcatgctatggaaatccttgccaccgtgccttgtaaatacacttttgatagacatgactgttctgtgaaggtttcactctgttaacattgatggttctgagctttgttcacatactggatgctttaggacaagataagggtgcatatattacatttctaattattttccaaaa

SEQ ID NO: 24793 - DNA, 1577 bp, Bovine  19866880129808
  misc_feature (1)..(1): n is a, c, g, or t
ngactgcagcctgaaattaaaagacgcttactctttggaaggaaatttatgaccaacctagatagcatattccaaagcagagacattactttgccaacaaaggttcgtctagtcaaggctatggtttttcctgtggtcatgtatggatgtgagagttggactgtgaagaaggctgagcgctgatgaattgatgcttttgaactgtggtgttggagaagactcttgagagtcccttggactgcaaggagatccaaccagtccattctgaaggagatcagccctgggatttctttggaaggaatgatgctaaagctgaaactccagtactttgggcacctcatgcgaagagttgactcattggaaaagactctgatgctgggagggattgggggcaggaggagaaggggacgacagaggatgagatggctggatggcatcactgacttgatggacgtgagtctgagtgaactccgggagttggtgatggacagggaggcctggtgtgctgcgattcatggggtcgcaaagagtcggacacgactgagcgaccgatctgatctgatcagtcctctgtctctccctaagaaatctctttatctccacttggtgtctgccttattgcttgagatgcattcttttctggatcagttatttctgtatgtctgcctatctgggtgtctcccagtcactagtgctccgggacaaggccttactgttccccatggtgccggcacaggactttgcctatggtagactgtgatctaagtgtctgtggttcatctgaaagcaggggcccaaaagcgggctggggacacacagccttcataagctgaagttgccttctgggggccatgtgaactgatgagcccctgccctgtgtgtgtgacagtcactcagtcatgttcaactgtttgtgaccccatggactgtagcctaccaggctcctctgtccatggagctctccaggcaagaatactggagtgggtagctattcccttctccaggggatcttcctgacccagggatagaactcaggtctcctgaattgcaggtagattctttaccatctaagtgccctatctatctgtatggtcatttccttgtcttctggattttctagggtaatccccaatttttaaatgttgacaaaaaatgccttttttttcactttacattggtgtgcaggccaaataaaatcaatttggctctcagatgcattaaaaacctctaaattaaagccccacaaatagcccgcatatgcccttgtcctttaaaaaatagtttctcaatgcatatgcctaattaaatgggccttggcaattgggtttctgtctttcaagtaagtgtgtcagaacatccacttcatgagtaggaaaaattttatgcagttgttttactcagaaccataacaataccaataaaatgtattttatgaagttggtgagagggttgtaatctggatgctgttttacagggtgcagaactgatccacgttgtaaatgccgttgacctccccctcgactgctcctttggtgacagatgtggagccacctccctttaagagtcccccctcaaag

SEQ ID NO: 24794 - DNA, 1711 bp, Bovine  19866880168491
  misc_feature (1)..(1): n is a, c, g, or t
naaaatgccttaagtaaccccacatgattccacctgcttctccaaaaagaattgatgaaaatgtgtcttgtagcttaacattctacttaaaagtagcttgggtcatggactgtgtaacaaaacctttcatttgtgccattaagcaatgcgtagaaagaaaacaatgggataaaggagcaacttaagatctcatgtacaagacatccatacgatcattctcaaactgctgtgaaagaaggctaaacgccgaagaattgatccttttgaactgtggtgttggagaagactcttgagagtcccttggactgcaaggagatccaaccagtccattctgaaggagatcagccctgggatttctttggaaggaatgatgctaaagctgaaactccagtactttggccacctcatgcgaagatttgactcattggaaagactctgatgctgggagggatttggggcaggaggagaaggggacgacagaggatgagatggctggatggcatcactaactcaatggacgtgagtctgagtgaactccaggagttggtgatggacagggaggcctggcgtgctgcgattcatggggtcacaaagagttggacacgactgagtgactgaactgaactggtgctcccactactaagtagaatgaagaaaccaggctaaaactacaacaaaagggatacaggttggaggtgagcaggaactttctagtacagtagcttcataatgtatagaagggaagttgggcagttgctttcactagaaatgcttttcaatcttttatacacaaagctgtttagaggtgggggtgacctagttagctgcccccaaaccttccaaccagaagggcctctgagtcctagaaaaagggtcaagtcactcttgggtgcctgagagtgctcagctgctggcttagaggcaaacatctgtcactttgaaggagtgatttagtgatatcaaatagaggggtgattaatcaagaaaacaagtgagcatttgacatcagagagagaaaaaaaaaaaacaaaacaaaacagcctaggagatgctttggggaaaatgggcacccaggcttggaatcccaaccaatggtgctttcagggatatttacagagcataacgtgttgcgagagagatcaatctgctgaacggctaaattaatatttaatttgctcaggaaaagtcaatcccctgggctattagggaaattagcaaaagccctaaactgaagctgtttttacctgagccaccagcgtgttctaaaagtcatcagtgtcattccctcatacccttgtgaactgatgtgtccatccccaccccactccaattctctcctctcacccctcttacttttcctctgcctccttctcttcttgtcatagaacccttcctttaaacaaaacctgatatagatgcccagtaaaacaaaaggctgtctgaacagaggtgaggtctgaagccccatcctctgactgttcctgtacttcccccacctgcatgtcccctgagagatccttggagcacagcttgcaactcctagacagtggcccccgagcctctctaagcagcagaacccatcaaggtgtggactgtaaaaaacatctgtggccctactcatccctaccgatttatgatcctcagggtgagctgtaggggccagaggatattaggttgggatccttgtgatcctggcacaggttcagagtgc

SEQ ID NO: 24795 - DNA, 1330 bp, Bovine  19866880378164
  misc_feature (1)..(1): n is a, c, g, or t
ncattccattatttttaaatgttccatatttctctacatactcacacaatacttacacagttgtaaatcaaaactcattgtcttacaaattaaattttcccagtcattttcccactgatgggaaaataattgtctaagtatttatcatactctaaatcatattctaaaattataaatccattatattagactttctaaatgcttcaaataccttaagaaataaacaaacttcaaatatcacagtcattttaaaactgattattagatttctattaaaaccatttactaaaatgctagtacctgaatttatttattttgctagtgtttaccctaattctttattctaatatctcactgaaactttcttcctaggatttgcaatgattgcaaaggtttagtttttttttctttttccataaaaaccatctgtgtttctagttttctcagtgtagactgcttgtaacaaaagatgcttctagcaaattcagcttcaaacttggtaaagtctcatttacttcacagtgttaatataggttatgtctggggagtgtcagtgagaagaaaaagaggagaaactttaaattttactgtatatatttatgtattgttggagtttttaataaagcatttactacctttgtagtaataaatatgattttacccattggagtttatttgacagagaactggctaaaaggaatggactattgagcttttattcaattaataaatacaattttaagtgctctgaatagtaaaaactaaagcacccatggtaaacaatgttaatttttttgtgtgtggttccttctagtcttttatttctctgtagtatctattccattttgctcaattagaaccataatctatatttacttttctcatcctacttttaattttagcttaccatcatgtcacaagcactttctcactttaaatattcttgggaaacaaagggcttgtaacagctgcacgattctctatcatgaagacacaccattattctctgagtcatcttccttttgttggcaaagaattgattcaaatctgggaagtacaggaaagatcaccccattgagtttcttgttttccagatgggaaaactgcattccctgaagctagtaacttgtccaaggatgaccagctggtccagggctcggctgggacgcggcactcccaggcccagacccctgctcttgctctcaccacacgctgccttcctgggcctctgcaaggcactttctgcaacctaactgccgggcactgcctacattctttctaaatgacattttgtcatttggggcccattattcctgcctgtcaagctcat

SEQ ID NO: 24796 - DNA, 2895 bp, Bovine  19866880383586
  misc_feature (1)..(1): n is a, c, g, or t
ncttagaatctgtgagtgcaacatgtaaacagctgagccaagagctaatggaaaaatatggagagctgaagaagatggaagtgcacaacaatgagtacagggctgagatcaagaaggtgagaggtgcaaacccctccgtgtttgtagactgagcagtgggttgggaggttatagtagttaattttaatgagaggaaaatgtcatccagaggccatgtgatgctcatgagtagagtgcctgtaaggtgcttaggagaatgtctgtgtcattctcagggatgccgtttaagtattttcaagataattaaaggctgccccctttgaactttacaactttattttaaatatgtcttgatgaaaaattttctaaaagataacacaccttcttgcttgcatgaacacatgaacatattaactgagctggcatttagtattttcttactggctgaaggtggtgatggatgtgtgttctcttctgtactatgggtagttatatcctcattggcatttgaagtttgtggaatttgtctctgtgttagtggccctagctgtcctgtttgttgagtcatttctttttattacttctttgagattacttctagctcctttctttttctctttctgttatcttctgtggaccaggaaaccatataagcaaattttgagatttgcaaccagaaagagtgaaggtaacgaatgctgtcctctagactatgtgtgcttcggctcgttgatgctggttctcagcatttgagtcagccgtctctcactgtttggagatctaataaataattgtgggcataaccacctgaccttcagtacagatatgcagcttggtaaattgctaatctttcgcagatttaattagggaaaaatttatgatttgaggcaaggtaaaaattactctattattaatattatatttttctgtctaacatgtcttttctcaatttgtaatgctttctatttttttgcagttgaaagaacagattttacaggctgaacagagttacagttctgtactagaaggaatgaagatggagatctcccagctaactcgagagttacatcagcgagatatcactattgcttccaccaaaagttcttcctctgacatggaaaagcgactcaaagcagagatacaaaaggcagaagaaaaagcagtcgagcataaggtgaaacttgaacaaaaattttctttatttgaagtttgtttttgaaggttcaatttattaaaggtataatttgcatagtgtttagttcagtacatttttattaacccccttctttaggctggttaacaagtggtctagtgaagattggcaggagttaagagtagctcagacaagtgaaagggctgtttctgtggtgagtggtgacggttacctgttcactgtggcaggtgggacaagtggtaaggggtgagatgggaaagcagggcttagctcctgaaaggcccacctgccctgtgtgggggttttcatgttatcttgggatctgtagagaatgggttaaacaggagcaaaaagtgtctgtggttgtatggagaataagaaggaggcagagagaccactcagatgctgtcacagtagtgagatggtggcctgagcactgcgcaggggagacccagggaaatggatcattctggagatacttgcctggtaagactgactagactttgtatttgactggacagggagagtgagttagacagagttagggaaggatatcactaggatttcagtttgggcaactgattagagagaggtgctctttaatgaaatacaaaaaagataaggagcaggtttggggaggataatgaatttgtatgaatattacacaaaatggggaagctggcagatgggcactggtttgagataaaagctggactttcatatggaaatatctaagttccacagaaggcctggagtgcaagattaaaatcaaggtaagacatttagccgtggaagtttttacatgaagttggcatttgaaaccccaagagacttagatattgtaaggagaaggcatagagtgtgaagaggagagacttgaacccaacttaggaaactactcatttagagtaaaaaggtgccagaatgatgtaaaaaggaaagagacaataaggaagaaaaccagatagttttcagaaaagaagcaggaagccaaggaaggcaggaatcttcaagtaggaataagctacttgaaaggagtgcagattacaagatgctggaggcagaggccaggaagaggagttgccagggagtcaccagtgcctggattgatctgtttagaataatactcttaattgcatgcatacaaattcatgttgaaacacctcttcaaaaaatgttttagaaagtatttgtatatatgaatgaagaatgtaacttcacctaatgaaaattatatatagaaaaaatttttaagatggatttgatttattcattacatttatttctttttttctacttttcccttctcaggagatgttgggtcagctggaatcactcaagttagaaaatcgtcatctttctgaaatggtgatgaaattggaattgggtttacatgaggtacatatatagaaacttgctttttctgctatacaagccttaaaagaaattactttgtaaatactgatattgtagagaaagctaagatcaaactatgaaataatccttttgcaaaaactttctcaaaaagaagacagtgataggagtgagcaaaatatgactcttcagcaactggaagatttaaaaaaatactatatgtgataaaaatgcatgtaaaatagaatatatataaagggtttagcatagtgtctggcatttagtagatatataataaatatttaatgctggtattattactgtaattactattttcacagtctttt

SEQ ID NO: 24797 - DNA, 1245 bp, Bovine  19866880402714
  misc_feature (1)..(1): n is a, c, g, or t
naggctctttagttcttcttcactttctgccacaagggtggtgtcatctgcatatctgaggttattgatatttctcctggcaatcttgatttcagcttgtgcttcctgcagcccagcatttctcgtgatgtactctgtatataaagttaaataagcagggtgacaatatacagccttgacgtactccttttcctatttggaaccagtctgttgttccatgtcctaatgaagttccttgttgcacatatttttgataacttaatggaagatattctcaagataaatttcagtagaatttttggattaaacttttccctatttttaaggcttctgataaaattcccagttgccattcaggcatgctatactggtgtacccttcatatcctggctgcccataagtgaccttgattgtttccagcaatgctcattgtaattctttttaatctgtgttattctgacagcagaaaatgatgtcttatttatttaattttagattttttaaatttgattgccagttgaactaaatatttgtatttcttctgttgtgaattgcctgtttttatactttatccgtttttatattgatttgaaggatatgaacctttgtcatatatatttcatttttcctaaatttgtaattagatttagaacagtatttttgcagcaaaccttaaaatttttatgtagttcagtctatcaggttttctcttaagtgcttttcccttcagttcctcctttgaaagttcttcctcactctaaagttatataaatattcatctgtattttaccatattacttttatggctcaatttttcatttaaatattagtttagtagggattcattttggggatttggtataaagtagggatttaatttgttttccagtagctgacttgtgtcttttcctcatagcctgagtaattcactctttcctcccgactggaaaggccctcttcaccacaactcacgctcttttctgctctcagatctgctctgtgtcaccaagatatctgaagccaccttttcaacctgcgagcagcctgctttctctcttcgatattatcttattattttccgtgatgcgtctaggatctcttttttgctgactttgcctggtgagcccatctgtctgtatacacaggcctttatcttcagctcagtaacattttattccattatatctctcatttctcttctgcttcatttgttgtggattctattttaggagtcttcattatcta

SEQ ID NO: 24798 - DNA, 745 bp, Bovine  19866880428873
  misc_feature (1)..(1): n is a, c, g, or t
nagccgggtcccagggtggctgtagaagcagtgctgtgagaggagcgacagctgaggtcttgatagtggttggggtggtggggggcagggatggtgctgggaatggagtactccagctctgactcttgctggccttgcaatcttggacagaagaccacctttctaagccttggtttactcatctgtaaaatgaggacagtaagagtaccgatcaaatatgactgttgtgaggcataacccacgtgagaatgaccatgtacgtggcctggcagggtgcctgacgtgaggttagcactcagcgaaagtgatgacaaccagggtgatgatgatgacagcagcggattctgtggcccaaggacttcattgctctatcccaggacacggccagcctctcactgtttaccatgggatgtggggaggaaaggttgctccagcatccccggggcagagagggccctgctctccacagtctgtgctctgaccccactctctctggccaggacagcagatctgggcacacaggagctgggggagaggggacaggtagtggcggaaccttaccttggttgtcgtaggaagtgatgacctgggtctgctgggcatgctgcttctccaccaggtttcctattgagggaagacaagaggggcatgcagtgaccatggggcccagagtaggatggaattttccctgggcagagcagagagttgccaggctgggtatcaacacgtgtgaatcagtagaatc

SEQ ID NO: 24799 - DNA, 1781 bp, Bovine  19866880431337
  misc_feature (1)..(1): n is a, c, g, or t
nacagcagttccgcttaagtgacagttgcagctcccaaccccaggagaagcccgggtgagccaccatcagaacagggggcctgggtggaggtcctgggaacagagtggtgtggatataccctggctgagagagctcctctcccttgtgtccacaggaaacgtgcttacagcaaagaagctgtgtacagtgataagctccagcattacagcacgggccgaggtgagtagaaatcctgagccactcaccacctgagctccggagtcaaaaggcaagtgcttgagggctccttataggcagactggcccgtccccactgcgagccccctcccagccaccagtgcccagaggctgggtccccagggaccaaggctgtccaccccatctgtgtccacccatcatgggcacttattggatgcctggcaggtagattatcttcctcactgataagcccatagaggacacggaatgcagggagattggttttagcaagtcaatgaatcctgaaatcagactcagtggaaaaagatggagggttctctattaacatcttctgccttatcttatccaatggggcggctggggaatgtgttaaccaaattcacagataagccagagaacttgaacggagggaattaaaaagataacagagcccaagaggccaaagtgttgggatatctcccaagtgttttcttttaagcaatgtctttaaaagtttttcactcattatctactctctttttttcaaaacctatatataatatttttataactaaaatttccctttatcgacttgtgatgttaagtcctgtgtcagaattcttctttgaagtgtgtcatgacagcactgcagggtctgcagaggtccccactggtcagctgggttatttcctgcctccaggaagcagaatgcttaaatcctcatagcagacatgctgtttctaaataactcctttcaaattccatggacacactcagaaacctgccccggcgctgtgtgctctgccctctctgtctccagcttccttcgtgagctgcatctcacctcagtgctgctgtggctgtaccagcgccctctccctgctccctgggtggtgagcatggaaaacaggctctgtctacacacaccataggcaggccttctctgggtggttctgggagtggacatggggtccgaggtaaaagttctcacccgaggtgaccccaggcaagagagtgatgcaggggtggccacatagcagtttcgccatggaggagtttgtattagagtgagggcaaggctggggctctgcaaaggttgctctgtagatatggcttttttccccagggttttcaatccaagaccaagaacctaccaagggtctgtaaaggactaagcccctggcacctgggttgctgttttaagtcatgatggggatggggctgtggactgggcaccggctgagaccctgaggctctctcagggtggtccagctgacacccatgttcaacaacacaaactggggtcgggggagggagattgggagagcagcccccttctaaggctacagacacagctcctgcaacactccaggtccatctgtccctctttctctcccccagcaggccacctgggcctccattttaaccagacgtcactggttttagagggaaatcctaatgtgttctctctcctgtcctcacattctgattttgcacctcaaagcaaaatcttcagatactttcacttaatataaactgatgcatttcccttccaggcaggtcttagcttcctaaggacacag

SEQ ID NO: 24800 - DNA, 2701 bp, Bovine  19866880434717
  misc_feature (1)..(1): n is a, c, g, or t
nggcacgcttttcttaggctgcctttccgtcctaccttactgcccactgacctgcaggcacttcttgggatcacctcccagataatcccagtagggatcaccacctacttgctttcacgtcttgtcttaagttgttgcttctgaagaaacctcaagtgagactgcctgaacatgctggtcagggttgttaggcatccatgcggtttgctcgttcttgctctttacttgttctccagaccaaaggagaaagagatgagcctctagttctatttttccctttgtccactgctattaaagtaaaatttccattctctctccaccgctgccccagggattaagacattctatcataaagatgaggattttctttgttcaaagttcaatcaatagattccagagtcaacattgtcatccccaagttttcaaagagcattttgattgatgtctagcacacttggagtgcttttatttcatgactgggaataatccaaatttcagaaaaagtaattcctctgggtggggtacctggctttaaaaacatttccgctttgagttcttggctgcatcttccttctccatctggattagactctggcctgacctggtgactagggcaacattcatttggggtcaccgtagagccaccagaactttttggatgggaaatgtcattgtgtgataatttataatatataaattatcataatatatgtatatatatttatacacatataaattgtgttttcaaggctgggagttgctgagaaggagctgcagtggggagtgtgtgctgagaggacaaagctcagggaacctaaggttaccttagccacagccacggcacgggggcttttccccacctgcctgccctgatgacctgcctcttttaggaaccagacaatagcagcggaaagggaaaacgactgctcttcccaaggctgccatgccagactgttctgttcagcctttgaagcccacctcccatctcaccacccccaggaaatccctttccatgcttgcctaatgacacgtccaacatggtgaaaaatgacgttgtgatgaatccatttgtttcttgggttccatttcctgtttttttcccctctcttctacttttcgaatgtattttttctgcaatgacaattctctattttgtccccgtgcgcacctatttatcttgccgctgtaaacatcagtgacaaagtccatattcctttatgtatttctcattcaccattttattcacttttcatacttcactgtgtctgaaggcatgggggttcaattaccatttcttctttcattccacctcatttattctgtgtagactttacaattttctctctcagtattttctatgctcttctcttcacgttttctgttctggttactggcttggcactcctatcttgaggtttttctaatatccattcctttttttgtttttaatccatcctcatacctcttccagccctggacactgctgtcagttataaccttaacggtggcctccactcaggaaagttgtcaagttgataaatattgatatctgccctgccattttaccaccacttttctgctaatgcatttggttggcatcaatcagcttctttgccttctatgagcgcctggtgtgggaactggtcccgatctgtcacttataagtaatctgctccacatttcatcaagagctcaaacacagaaaatatggaggagaggtagaggacagagaaccaggctagcatggcccagagggaagggagacagggagatccaacaaggaaaagtgaggcagctggacgtgtaggagaggcgcccccaacccagccagaccattactgctggggacagcagccagtgcttaatgactgctgtgtcctctttgggatgttaaccctgcttatctcctccaaaaaggctccccagggatgaagatctacattgaccccttcacttacgaggaccccaacgaagctgtccgggagtttgcgaaggagattgatgtctcttttgtgaaaatcgaagaggtcatcggagcaggtatggctcttcttccctcccctcctttctgccctcttggtgtctagacatcctctttcaccactctgggtgatgtctatcatctttctcccccaaaggtgcatctaagccatctacaatatgtgtctaaggatcttctgggaccttgttcatggtgtccaagcttatttggtgttgcagagaagtcaactctggttttaaaagattcagaaatagctctggaagtggaacaccaaatgcaaataaagagagagaaatagggtgataagttgggaaatgcacttctcttttcagaagctgaacttagtatcccaagcactgactccaatatctccatggcctcgggccaaagtttattcccacacttccagttttccttttctgatatacatggatttggagacagactatgatgaactaaagaaggaccactatttctagaagaaaactcacccatatccatattttctacaaaagatccatgatagggatggtaatataagacagacttccctcccaagaaatgcgtgttctcatctacattggaatacaaacccagcccagcaaagaataactgtctgagatgctatcgggacactctacctaaaggctggtctagcattttcatcttcctttaatagatcaatagttgagtcagttg

SEQ ID NO: 24801 - DNA, 858 bp, Bovine  19866880465226
  misc_feature (1)..(1): n is a, c, g, or t
nacatgcataccccatcctgcaaacaccccaaatcctgaactgttttgactccccctgtcccttgtcttctctggtgctataactgaatgctgcataatcctggatgaaggaatgcccaccaatgagagtcactataaaaccatgcttctatgttcaacaaataaatatttataagctgttgacagtttggagccctgtgatccatatctataaacaatggccatcaaaataaaaactgaaatgttaaaattcactaccctagatttaggtactgaaactgtaatacactaatactgtaaaactgtaatacaactgcaaacagagttgctgtttcctgattcgattttgacaatttgttttgaaatagccactctttactaaggcagttattcctagtttgaaaggatttgaatttcttcaaagaagccattaaaatgaagttcaaattttcacccatcaaattagtaaatctaattctgtcataaaacatattcctaaacatcaattagcatatcagtggttaggaaattaaaataccagtacaacatattaatagaaactgtgtcagttaacatttgtatcttcccagacatggggaactagaatagcaggtaaagaactataactttcagtggaaaaggaaaagaccctcactcagttcagctactgccaggcaggagtcccgctcggccctattttaagaaagctaaaacagtgaaaaagggaactaaaaataagcatccgcacaaaaggttctctcctcagaggagcaccagcagtctctgtgtggttcctaggcccaggaagctgcacgctcccttaggcccaacttgatggcagcaccaccagcttaaaaa

SEQ ID NO: 24802 - DNA, 1823 bp, Bovine  19866880471253
  misc_feature (1)..(1): n is a, c, g, or t
ntccctgtgctatacagtaggaccttgttgtttatctatttatgagttctttttctgcctattaactctaaaaatttcttccttctattacatagatcttttcccattcaatcaaaacccacatctttagccacaaggatagctggcatatatatgctgatccaagcaatatagcctctctccttcttgaatgttgactaccataattattcattcatttcagaataaagattacgggtgggatagtctggtgcgaagaggatgggcctgggttgggcagatcaccctcgacttttggctttctgaatttccttcgcccacgtgtaaagtggggacctggccaccctggtcattgtgggttattgtgaggctgaattgagacgacatgttcttgcttggagaatcccagggacgggggacctggtgggctgccgtctatggggtcgcacagagtcggacaagactgaagcgacttagcagcagcagcagcagcagagggggggcgtcctcgggatctgtgattttcctgctgctgggcaaggacagggatccgactgtgcaccgacaccgctcaggagcggctttagacctggtggaatgcttggtggaatgcggcgggctataaataaagaaaataaggtgaaaatggagacttcgacgggagtctggctccctgtgattccgctgcggtgccggcagggagcgttttttcggagcactgtggccggagtgcttccctccctgccccctccccatcctcggattaaaaacaaacagaaaaactttcccgaattttcccattccactgtggcctggctgcgaatgctgaaattccagcccgtgtttgttgtcacccgcgggcccgtttccacggttacccagattccagattcctgcgctggccccaggcccgccacaatgcatccctcaaagtctccttggcagaggagagacattcctcctctctgccgcacgccagggccaagagaggcgctctcctcctcccctcagctctgcctcacccccatcgtgtgtgatgtgcgtgttctaggtgattctgttcagagtcagttttggggggtaagcaccatgtaatagtttcctccacttctcttttcctcattgaaactaggaattactttcttagaccaaaccttacacccttggcaagcactccagatggttctcattaaaattccaattcctttttttatttttgcaattcctttacccccattctcctcacccttctatcccaaaaataaacaccaggtggagaacagatgaagggtcctgtgacaaggaaggagtcctcaggtcctcttcctaccagtggccacctctgcccttcctggggttgactggcataaataggcactggggtgggatatattttaagttaaatacaggctctctagggcttccctgggagaaggcaatggcaccccactccagtactcttgcctggaaaatctcatggatggaggagcctggtaggctgcagtccatggggctgctgagagtcagacatgactgagcaactccactttcacttttcactttcatgcattggaaaaggaaatggcaacccactccagtgttcttgcctggagaatcccagggacgggggagcctggtaggctgccgtccatggggtcacacagagtcggacattactgaagtgacttagcagcagcggcagggcttctctggtagctcagctggtaaagaatctgcctgcaatgcaagagaccccagtttcattcctgggtgggggaagatcccctggagaagggataggctacccactccagtattcttag

SEQ ID NO: 24803 - DNA, 1931 bp, Bovine  19866880540036
  misc_feature (1)..(1): n is a, c, g, or t
ntttgagcaccaagtcagggaataagcatgaacgccccaccctgtgcctgggaagggctccctgagggcttggggctggagggggtgagactggcctgggttgagccaggagaacccgttcattccattgtgaccttgccaggctcatcatgggcaaaacgaaaggttggcgttaaatgatctctaggggttgattctccactgacaggctgaggagaagctgggagggctgtggggaatgcctggggcagaataaagatgaaaaaatcccctcagcggtaagcttctgccatgcttgactatgatgtgaggatattttattacctggcagcagtgtgcaagatgagttggacaaagcagtcgtaatgtagagcattattgttaataatccataactctcacgcaaaaatgtggaactagtcattctagctgctggttgctggtcaggtgacccacaaccacctcaggcctccaaagattgctgactgtacacactccgtgcaaaacactctacaggggatcatatcccctgtacgatataatatcccatgtcatatcatttagaaatgcaataaatactacaacataataaattatgatgctctaaaaataaagctcactggccacccctcgatgttctcatagtaggaagagaatgaatatgtgaatcatgacaaaaatgctagtgatcagcacagctcttgggcttccctggtggctcagatggtaaagaacccacctgcaatgcaggagacctgggtttgatccctgggttggcaagatcccttggagtagggcatagcaacccactccagtattcttgcctggagaatccccatggacagaggaacttggcgggctcgtaaagagctggacacaattgagaaactaagcatagctctttcaggaaacccaaagggggaggaatttgctggaaagatctgagagagcactgaagaaaaggcagaggatgagaaacacttccacctcttaaggaaccccgaccagccatcctagagcccaaaatatcagccaaggagatgtgtctagtaacctcaggctgcagagtcttggtttttacttttgacagtgtggaaaacctcagcgccaggggtaatgctgcggagacgatggatccagactgtgactgtcactttaaacagcagggtgctcagggctggtgcactgggatgaccctgggggatgggatgggggaggtggcggagggggttcaagatggggaacacatgtacacccatggctgattcatgttaatgtacggcaaaaaccattacaatattgtaaagtaattagcctccaattaaaaaaaaaaaacaaaaaccagcgacaatccgggccccggcagcaggatggctgagcggcctggggtggacggtacaccccacacatcagcccctgaccacagtgggcttccttagctctgaccacttctccctggatgtcgggaccacatgggaaagagggagggtggaaaggacgagagctgtgggagaggtagcgaagcatgcactgttttcctctcttgagaaaaacactgtgatttctaatagtaaaattaggaagcatggtttcattacctttaagtccaatggccagtttaactgggcaaacacatgaattagaatttttttagggcctgcagttcccaaaatggtccccaagaaggtcacagaaaacaaatttatggttcccaaaggggaggaggggggaaatcaagtaggaatttgggattaaaacatacacactactatacataaaatagataaccaacaaggtcctaccgtatagcacagggaattatattcaatatcttaaaataatctataatggaagagaatgtaaaaatgaatatatacatatatatacatgtataactgaatcattttgctgtacacctaaactaacaccac

SEQ ID NO: 24804 - DNA, 2953 bp, Bovine  19866880540132
  misc_feature (1)..(1): n is a, c, g, or t
ntttgagatttttcccttgccagcctgccctcattgtttcagtggttcttaggaaaggattccagagcctattcttcaaaacagactgtggcttgtttcccctcctcctgagtggagtgccaacagggtggaatatctccttccagtcccaagaagtcctaaggcaggaggaaagaagagttcttacaccattcttcaggtctccaactccatcatgttcgagatactccctcacacacacacacacacacacacacacacacacacacaagctgattcttcatggtgagtctctgatatagccatctggactctgatgctttgtaattaggaatttttttttatagctttaattatttcctctgttctcttttcttttttatatacaatgaatcattctgctcctgagagaggaaaaataaaaagatttttgaaagttatagctctaatttcaatagaaagagatggggctttgaggaatatgagcatttgttgtattttctgagtccatttttcatccccactggttaatgaagatgttatttctctcttgcatttcggttgctaactttctgacaagtgtgtttttcagttatggctggttgtatgcctcttggttcatccctcttttgtatactttatgaaatattcagttcttcttgataggatgaggcttgattctcccctggctgtgattaattgtgttcgcattttgggacctaatttatgtttatacaattcctctagtgtttccattttcttttctaattatccattttcctccatctttttccctgaaattagtactgaattagcttgcctctgattacagtcttggacgcatcccaaagaatattgttggacagctccccattatcatttcattccatgaattctttgttttgtttttgcaataaagctttattaactctccgtgaaccctccttttcatttgctcagtcatttctgatgggaagtcacaccaggctacgaccgggtgttaaggcagtcactcccacattctctgctgctgtctgccaagtcaagtcaagctctttttaaatagtcagaattctagggattaaaaataagatctatgcctgtgttgaagggccagtttcaattatttatttatttactattctggtgtggacatctgttgaggtagctctgccgatggacaagaacccatctctatcctttgcccggtctcctggcctgcatgtctttcctgctttataatgacagatcccttctgacccggctttatagatgactggcactcagtctctgccagtaggtctctccagtggccccattagtctgaggcaggtggggccccaggtgaagctgctctggaatgaggtacctctcatcatcatccaccaagacacctttatctcaagtcagcctgtttacagactagggtccgtaatttgcttcttggtaggctctcttttctgacaattcatcaccccatctgcctgcacacctctacatgcccctcccaccacacgcaaactacatacaacattctactatgtacatgctacacacccaatatgcccatgtacctgtgaaacacatgcccactgcctcttcccatgaacctgtgggacctctgcctccctgggagatgctattttctgcattagggatgttggcacaagggctctgggtgactgttaacaaaagacccttccacaggcagcaaaggcttggctactctcaaaatgttttgaccagggtccctctgcaacccttgacctgccaaggtgagtgcagaaatggtgctgttccagtgatgaacaactctacgccccttaactgcaccccaagtccagaacccttggctatggaattctcacaccaccccttcctctcacagataaagcaataacatctcttccttcttgaaagcaggacccagaagcccaattccaacctgcctaaccttcctaagaggacaccgcagagattctccgcagcactgtgagcctcaccgctcgatcctgcagcccagatgctcatcgctgcagtctcggcctgcaagcgccggctggtgctccgagggcccaggaagatgaatctaggctgagcagcgatgtgaaccttgctgtctggccttgtgggccctggtgatgggccctcgatgctgtgtcctctgaagtgatggagacttggctgtgtgaagggcaactgtagcctccaggaagaacctctggtggggtgggacggcatgctgccccacccttagcagccctgcccggaacctttctgaccagtggcaagaggaatgaacaaagaaagcagaaccagcctttaccacccgtgggccgaaccaggccagcgccgctgctgagcggacaaaccggccctgctggcctcctcaccaaagcccctctgtaggcccaagagactgttcatgattaaaatgtcactgaggtgtcctgaagaaacacgctaccacagaaggctggagcaaagcagccaggtctgtccgcacactcccctccctgccccccaactttccccagtcagtccttcagcagctgcagggcagcaatgtccctgtcacctctgcttctgtgtttactgtctggccagctgcaaaggggccagttcagaccaaagcaaaatgtttcctcccacaaggtctcttccagccatggagcaaaaggcacagttgcaaaaagctgagagcaaagcgtggagcgccatgtctgggaagccccagtgtttggggtggatacaaagggacaggatcccaggatgctcagagatgtcccttggggtatgcggactttttccatcctcatttatatcacttccctaccaactggatcctctgtgtgtgtgtggtaagtcacttcagtcgtgtctgactctttgtgaccctacagactgtagcccgccaggctcctctgtccatgggattctccaggcaagaata

SEQ ID NO: 24805 - DNA, 1937 bp, Bovine  19866880553235
  misc_feature (1)..(1): n is a, c, g, or t
ntttcaggagtctgttcctagtgcaactctgatgagccaatctgccatcatagcccctttgtgctttatttggactagctggacaagctgggacttgtttgtgagctggaaacctctgtaaatagagtacgaatctcagaatggcaggaccgtggctcactggagatgtgaggcctggctggagtttctgaactctttggagggagacagcccagggtctgccagacacaagaagcagaaaagaatcagcttggttctcctctaacatcctaggtctcatatccagtctctaagaatcgcagctgccacacaactgctccagggtctgcctaacttttcaggcccctttatatttaacactttagccagtgcttgtgaagccctagaaaaataaacaaaatggaacaaaaataacctctcagaggctgggattcccccattccttttgggtctactgcgaggcctaaatgagcaggttcttaatgtgcccagggtttatttacaaaattgatccactttctcttcaccttggaaggggctgaccagactctgacccacttcctagggacctgagtcgctagagcaggtggctactcatctgtacctgggtctgactgccaattagcagctcgagatagtcacacatggtggttgaaactgccctggagggtacaggttaatgatgctcagagagagtaaatggaattgatggctgttcagccctctctcaccctgggctggagcagtgctgagagtcctcagagatgctgctggcaaggtcaggtactcctggcacatggaaagtgttgccacaagagggctggtaggggtcctcctattccatagacctcctcataggctcaagtatctggagtaggccttcctttccccaaggagcatgccagaatgaatatatgtacccacagagggagggatagtttcactgagggcagtcgctaatccttggatggcagacaagcagcccctataatgcccttgtccttagagggctcagggcagacaccctgaattgatgcctgcactcttgcttgctgagctaaactctggccatggttcctctcaaatgagccttctaagtagtactatcatcaatcacagttggtagcagaaatggaatccatttgccatccttgcattaatcttttatcggagattaacttgtctgattggccagggatttccaatagcaacaaaatttggcctgcagaggctagggtctcaaggaaatgggccacagaaggggaggttttcattatgttgatgggtcactgagggaatgatcgagcagtctggggactccgaggctccgtgagaatgtagtttaggagagctgtgtgagtgaggcccctccaggcttaggacagccctcttcttgttcctgttctgcagtgtctggatggttgacagctttgtaccttttgctccatggcagcacaaagttctggcaaatgtctctcatttgtacatcttattcccagatgaccaggttcaattctttactacatagctatcaattgctgaacatatgtatcctttgaaatttcaggacattgccctgaaatgtgggaggacactttccctcctgccatctctgtccccagatgacaacgtttaagagtgttggaccttgattacaaaagggcacccaggcagacgattcaaggtggacttggggacagctacacgtgtgtgtgtgcacgtgtgtgctggggagggggccgatcacagaccctcagccatgtcagcatgtgtctggaagagtaactgaggtgggggtagtctatatttgtgaagaattgaggcttcctgggaagagggagtcaggcagctgttagcctcaggaacaaaccccctgcttgtagaggaattttcccttgggtctgtccccagctcagtgtccccaggacacatgtaag

SEQ ID NO: 24806 - DNA, 1367 bp, Bovine  19866880588238
  misc_feature (1)..(1): n is a, c, g, or t
nccaggcaggccttagaatacagaacaccaatttcggcaactttcaccttatttttcttttcacaggcttttgttctgactcccggtccttatctcatttccaaatatgatttgattatcatcctgtgaggtctgttctgttggcgcctttttgacctgtacagcccagaagagggtgaagagacctctccttgtggggcgtgacctcctccgcgcagggtgtccctgcagctttgaagcctcactgcacagcctccctttctggtgggatgagaccacatctttcaccttgcagctctcaaagttactcttccagggagaggaggaagaaaaggagaagcagggggagtagaagtgagagaccacaggcactggggaggctttggtagtgagctcagtgccggaagatggggctgcagccacagtgtttccagggccctaaatggtagctataaagagggccctttccttccactgtaagggctgctctgcagcctcctggttgtcacacgctcccactttctgctggacccatgaccaaactcaggatctgaagagatcacataacaattaaaaaatattgattagattttcagaaggcaaaccattaagatatttccaacaggataaaaggcctataggaaagagtaagccttccttcactgctaaccctgggtctcatgacctctcagagtattgctcttactggctccatggaaccttctagagacagtctatgaatcaggcacgccctcagttccttctgccgtgtcactgtccatggtgctgctggtcttcctctgtttcctctcccctccttgtcctctgcccgccccctgccgccatgtccccttcttctttgagataatttatcttgtaggtggctccataccaagactcataaacctgcctcattctaaagggttgcatagaattctactgtgtggatgtataataacttattcaacaaataccctattaatatttctttggttgtttctactcttttttattttaccattaaaacatgctgcacaaaagatttgaaagcagagactcaaacagatattcatgcaaaaatgtttataacagtatttattcacctgtacaggagccaaaaggcagaaacaacccacatgtccttcaggagatgaatagataaacaaatatggtatatccataaaatggataataatccagtcataaaaaggaatgaaatgttgatacatacgacaacatggatggagcttgaaaacagtatgttgagtgaaggacacatgtttatgattccatttgtgtgaattatgtagaataggcaaattcatagagataaaagagaatagaggttggggggtagggaaagggga

SEQ ID NO: 24807 - DNA, 1771 bp, Bovine  19866880588677
  misc_feature (1)..(1): n is a, c, g, or t
ncagcagcagcagcacggcatcagtctagatttggatataaatcattctacaacaattctgcagacctgtcttttctcttccacaattttgtccaaactaggctccttcccctaaagctcaggaaatggaaccaatctccccatactgaatctccatcctttatatttcttgatggaatcattgtttggtaaatgcttttggcttggcactgggatcaaatgttggttttccaggctgagaagtgatccaaagactttcccagaaagtcttaaaacttgggctctgctttctggccagctctgggcaccttgggtatattactctatatatgagcctcattcaagttttctgaaaaatgggaaagaggattgaaaggagcagggttttctaggtaagggggagaagcagacaccattgtgacattaaaagaaattttcgggtagcaccagacaccaaactaaatcatactgaatgacttagaaagaaatgcagctctttctaacttcctttccatccttttgattaccttaaagaagaaagtcttagtttgagtctgacttttcaataacacctctttaaaccttgatactcaaaaaccagaaaaccagctttagattttagctaaagcttaatatttttctcattcgattcattttaacagttgccttccattgactgcatattttccgtgttctagattgatttaaactttcttttacaaatgagtgcacttaggcttttaaaaggtgaatcaacaataatacaatggtgaactgacaataataaactcctggcaaaaattcatcatggtggttggtatgtgaacgacagaaatggagatgctgggctctgtggccctctgcatctggactcctggctaggaaacccgatcacgaccataatcacagctatcacaaggggataagatcctccctttccaccagccagagaagagccctgtctccagcactcagcccccagcccccagcccccagcccccagtggactcacctggtgcatggcaagcagatcgccccctgatggccagggatgacaatgccaactccggggggttagttacctccactgacacagtggtttttaattcctaaggtttccagcctctctttgttctttaataactttactatcagctaccaactatccctaccccactatctggctgattctccattaagagaagagcaaatataaatttggaagaaggaaaatgaattattcagaacagctaatttcacctgggccattgtcttaagaaactgcttgaagagcagcttgaaaattgttcttaactcatgatgtacaaatatccctcagaaagatcaatggagacagaaggttctcctccacgaagcaccagccttcccaaggccaccctcagctggggtgtgagcagctgacacacccagtacggccctcacctgcgctgggaggacctgtgctcacatccacacaagggcagaggtggggaggggctggccttccctcagctgccaccccaccccctgactcaactgcaccctggcagcactgagagctgaggcatgggtgagggggcactcctactgctgaagggagggagaaaggcccagagcgctgggtcctgcctgaaccctgcctggctgggtgacactgtccggctgggcacagcctccccagggtccccaggtgaaggggaggctgcaggcccccctccaatagagccacacctcctctcccacacaggaaagcacatgtgagtgaggggca

SEQ ID NO: 24808 - DNA, 2587 bp, Bovine  19866880590843
  misc_feature (1)..(1): n is a, c, g, or t
ntgcagggctgcccgcttagacacaatgggccctgtgtggtctcacacaggcctaaagggaaggctggcgatgtagcccaaatagccaaggggctcccctgacccccacctacactctgaggcccagggaacacaaacacatcaggcctttcctgggccccatgttattctcagtgccctggtgctggtgcaaagctggtgaagctggtaagcaggggtaccagccacagcttttacagccagatccccaaacccagtgaccccaatactaccctcttcagcacatgcctccccatcccatggggcatgggctctgcagccagagggcagcagcctccagcagccaggcctggggcccacagcacctctgctgggctggacacagggacattctgggttaaccaacaacaaatgtctgtataagggccctggtcagggatggggacccatggtggcctgtggaatggggcgggggggagagggttatggactcacgcacacgcatgcccgacagcccgtcctgttcatgagtgtggctccagcagcctctgctacggaaagcacaggtcctcttgggccagggcggcatggcttcattcttcaaaactatggctgaagaatcaccggtttgagaacaacagtggtgctgggtagtggtctctctcatcaacagtctcgcttgccaccaaggagggtcccctcttgtgaagccaccaagaactgaaggcaagagtctctcctcacatccagagaagcttgggaagaggtcaacaagcagctcaaacatgactgagcaactcactttcacccttcgagttttccccagggccaaggtcagggacagcatttcagaacagaggcagggcccccacacacctgtgctattacgtactcatcgtcctgatggatcaggaccacagggtccacctttcacagtgaaaggatttcaacagtgttcttgcccaagtggaggtggaggctctgtgccaggcccgcccttgggagactgttcccttgtggggcccagcctgtcccctccccacgcccctacacttatcctgcatggcatgccactcccatctggctcctcagtggaggaggggatttggaattcaaggactggcagctgctctccaacaaaagagaagccctgagcaagtgagactatacacaggcgcaaggaaaagtggagactgaaagtcttcattttaggcacaaaatgccaaacagcccctctgtcttctgcctgattccttatctacattcttttccttttatctcagctccctttcccattccagcgtctatatttcctgatccttcaagctggccagacaccctcaaatccacgtgcacctctcctacgtctgaaaataccccatagccagagaactgagaagaaaagtgtgtctcacccatcctggctggggagctctggccctccacagcatcaaatatctgtaggcagaacccaaaccagccagatggtgtcagcgggtacaggcaaggtaggcctgggaggctcctctctgcccaggcatgatggtcagcagccccgggcacacccaggtcatcaggcactggggggcctttaaccagacctgtagcagagctcctgcccaagccctcacctcctcctgacccagcttcccaccccagcaccaacacgggtgccttccagcagcaaggagagagaagagacccacccaggaccgttgtggtccagggacatcctttatctctctgctccagcacgctgatggtgccggcctggctgagtgcccactgctcagtgcttcacctgtttgcatttttgtggggagagtcaaagacccattaaaatggagaagcctggcattttgcagtctcctagcactgaattctaagggagattagatccgtttgccctggccattttgacagccctgtgagttggcgccaagggcacacaggtaagaatcatgcataataagccagctgcctccgctcctcatccacaggaggaaagagggctcctcacttgctgggggatgcgggcacctgggggcatcaatcaccctggagaagagaggggaggagaggttgcacgcccatgcaaaatgactctctgcagccctaatgaaggccggcgatggatggtggcctgggctcgttaatcagaaggaacatgctgccgtctgcctctccttccagccctcctgtgcccgcatcctggattgatctgtggcacagtaactctcagatgtcactgccccctgccaggggcaccagggggaggactctagtagggacttgggggatgtgccagagaaaaaaggagtgggggctggcaggcaggccctggccttctcctggacatatcctggaccagcctggggctgatgactcccaaggggccaccagagctaacacacccccttggggcctcttcacagagtgcctcccaccagatacacagacatcctcttccaggggtctgtatccttggcatggccatgggaggggggtgctgccccacagcaccactctcctggcctccagccttcatgcccagcccaccttcctctctccagacagccagactcca

SEQ ID NO: 24809 - DNA, 1399 bp, Bovine  19866880700563
  misc_feature (1)..(1): n is a, c, g, or t
ncacttcttgaaatatgtgaaacatctcctgggcagctcttttcctgaaaaatgtgtgctggtgtattggcatttggatggtgagaacccataatcacttcattgtccacacatccttcaagaagtccagtgattaaaatgagtatcagtccttgttctctcaaaaccattcgtcaacctcaggcagataagagtgaagagcagagttgcttttccttttcttcttcttctttttctggttgcttatgattttgtaagtgtgagggggacagatgctgcagctgttgagggcagagaccatatcttctttctccatccctaacatgtagcatggggctcgccttgcctgggtgcccaacacctcagtgctattgaataaataaacagtcgactttggaccagtaatttgaacccatggatggagcacaagatattgccaaggtctgagtgagttcctgtcagaaaatgaagggtagaaataaatttgaagggtagaaatacccaaggcctaaagcagtctgtcctcacctagttaatacgaagagcgaggtcgacgtctaaatgcttaatcattaagacagccaagagcagctgtagacgttctcccttggtttgcctataagcactgacgtcaggaatgaaaagtgctacaagacagtaaacaggagagaatgatgaatggaagcatattaaaatggggaagaagatgagcatgggagagcttgctggcatcagcttgatggcatctgagctctctattaatgagctattggaggagatgaaagcctcattgattccactcacagtactgaagttgacaggtgtcccaagcacaaaccaagagagtgatgtggagtgggagacccagacttggaaaactacagcctatgaccaactacctgtttttgcaaataaagttttattggatcccagccatgcccatattctatcgtcatctatctattgcccatggctgcttcctgctataaaggtacagttgagtagttgcaacagagactatggcctgtaagcctaaaatatttactagctggtcctcacagaaaaatgatgttgagtcctagtttagaagaagtggcacaggaagaaggaatgatgagttctatttctttgggttgaatccaggacatctactgggctgagttctgtttgtatcttctaaagaccaggattccacacccctgtggaacaggcaggcaaatgattctggctataagtatttgggttgaaaattaagatacactgtcttatttccgaggccaacaacattgcatcaacattgcatccagtctttcattgaactcagaaatatactgaaatataataaaaatatctacagttccaattctgggttccctagctgggcccagaggttaagggt

SEQ ID NO: 24810 - DNA, 817 bp, Bovine  19866880712295
  misc_feature (1)..(1): n is a, c, g, or t
naatgggatcctgtatcatcaactcgtctctctcactctcctacatcttcattctctcccatatgcccaataacttactagacatatgtgcctaataatcttacagctctcaaacatagcagattcaaagccaaatttactatgcttccccaaacttgctgtctcctttactctaggtctcaataattgcaagcagaggcacagccagccagggaccagaacccctggggcagtatacagagcgaactgcaaataaggttaaaggccctaattgtagtctgagggcagggaccagaccagcactggagagcctcagtgtggcagggggtgagggcagaaggtagagaaatgggcttgtgaatggagctgggtagcatcagaggcatgtggtgaaaggggttgagcaggatttctgagaagcccaaccctttggccagcagcagcctggaacactaaaaagtgtgaaggcacgacgcctgccctctgctgcctccctttttgagggactgcctaaacatgaaaggcattccaaagcagttctcttctccctcaggaatcttcagaatataaaattttaaattgtagtttctggggttagaaactgcttattattaaagggcagttttttatattttggcatgccatcaatctatatggactctcactagccaataatcctttgaagaaacagatctgctctaaagctaacatttataatctactggaacaaagaaaatctgaaaatcagttgtttatcagaacaaagaatgagccaaaatacttcataaaagaaatgagaaaaaaatataaatatttg

SEQ ID NO: 24811 - DNA, 716 bp, Bovine  19866880717974
  misc_feature (1)..(1): n is a, c, g, or t
natgacaggtattcgattcccaaattctcagtaggggccaagaatgtattggttcatcaagcagagcacatttctggaagcgctctcaccatttgggaatcaaataataattgcaataccaacaccttgactttctaatgcattttttcaagctaaagggtttcaacacattcccccaccaaacccattcttagattcatcttctttgtaggcttctgaaatagtgaaggcgctagttttatttcttccattttgcagaggaagaaattcagattctcaactcagaagctgagtgacttacataaacaaagcatactggaggcaaaggagagatagcagacctttcactctggggctccaatcacttgagtacacagcttcagaaacatcacttcttggatccaggccctgagccggatgctagatatacagcacggggtaagtcagagcccccattctcaaggaacatcagcgttatgaaagatgctgacagtaacgacaaaataacatgattaacgggaaaagagaggcatgtatagaagtggggagaaaagagacagtcccctctcatattggttgggagagaggacaggtcttttggagatgacagttttgaagcatgaataggagtttactaggtagataaaatgaaagaaggcattcaaacaaagaaaacggcgtgtgcaaaggcatggtgattgggaaagggtcaagga

SEQ ID NO: 24812 - DNA, 2234 bp, Bovine  19866880719767
  misc_feature (1)..(1): n is a, c, g, or t
ncttttttttttttaagctcagaaatatgccaagaaaatgaaatagaataaaggggaagagagagagagagcaaagtgcctttaatttgaatagctgtttcccatgtgaaaaagcgacagttcattgcaaaatatttatcttcattacggttggtatcattatggatggagaagctgtacaaactaatgggaaaatctctctaggaggcctgaatccagatgcaccgagtctccaccttgccttagacctgctcggtgagcacggcctttaatttctgggtacccccagctgacccacgggtacagccagaaagaatagtggtgttggctggactgtctgcaccgaagtgggatcggtccttcaggtcagggtgtgaggcctggtagttgggactgcttcttgcttgcctgtgtgtgttgctggggccctgcttagtaaaggagcgtgccaagtagggagaagataggtggatgactgtaagggcgagtatgtgttagaggaataggtgggccattgactccattttagccattcatttcaccaaaagggtgagtgtagtccggagagggactcacacccctcagcagcagagctggcctggggctcagcccctttcttcccaggaacctctctgtcactatgctgacgaaggttgtaaaacaaactagaatgtgctcccgcagctgattttgctattcagaataaaaggagtttacaaaaatcagagtgtcatttaccatgacgaatgtttcagaggctcaggttagcagctgtgggaggtgtaattcatgtgaaaatcaagtcttaggtgtttaccgccccagccaacagtgaaggtacagagctggtcttactccccacccatcccatttcacagatgagcccactgtggcccaaagaggcagcagcaggtctcacccacgacctcacaggcagcaaggatttaggaactggttctggaaccctggtgtttggggtcaactcttagggtgaattttgctggcccatggccacctctggggacacctgggccgcgtgttgaatgtgtagccctgagcaggcggagccaggactcagctgggttttcctgtgcccaagtgggttgattaacacaggaggtgctgagaacagccctgactttgaggaatccctcgaggggagccgagtgcgtcttcccaagcttattagctggtctcagaactttacagccacacctcataaattggcacagtgtggcatttggctgtccgcggggaagagaaggcggggtgatttagagctgccgcatgcaggtttccggtctatgtcagtgcacggagagcttttgaagggtggaggcctttatgagttgttttctgctttcacactccaccaccttaagcccaggtttactgctctgaggttgtaaagatgccgaggaagggagcctgggccaggctttgcctgcaattgcctcagatggtacctgctaatctggacaaagatagcatcatgaatgtgagatgggagacactgctcaccctgtcttggggcgtggccagggctccagcatgcacacccctcccaaccgcagaaaggaggcatccaggccctgccctcccgcctcctctcccccaggcgactggcctcccctgtcacgcgtccatctatcctgtgctctgctgacacctccttctgactcaggctctgcttcccttcccccagggagtgctgcggctttgaaatgatggtctttaatcatttcttaagtgaccagcccagaaatcatttcttagtgccatacacacaaattaaatcataaatccacactgggccttgcctgggtaggacggaagtatagcctgatttggagcagagaggagacctctgcaggagacaggaatcagcctgtgcctggagggaaggccagcttggtgaaaagggaaactcatcttacgtctgagcgggcactgctctaacaaaattccacagactgaggggtctaagtaacacacatgtatttctcccaagtctggaggttgggaagtcaaagatcaaggtactagaagattcggtgtctggagaagttccgtttcctggacagtgtgttgttttctgattaagtcctcacatgctctttctttgttacctggaaggggggcgatttggggtagagagagagaaacagagagagagagacatcatgggggccccactctcagacctagtctaagccccatacttcccaaaggca

SEQ ID NO: 24813 - DNA, 1307 bp, Bovine  19866880734839
  misc_feature (1)..(1): n is a, c, g, or t
ntacagtccatggggtcacagagttggacacatcggaagtgacttcactttcacttttcgtataaagtatggtcctgttaaaaatatatctaggacaggaaactatagtcagaactatggtttttccagtagtcatgtatagtttttccaggatatgagagttggaccataaagaaggctgagtgctgaagaatcgatgcttttgaattgtggtgttgaagaagactcttgacagtcccttgaactgcaaggagatcaaaccagtcaattttaaaagaaatcaacacggaatattcattggaaggactgatgctgaagctctaattctttggccacatgatgccaagagccgactcattggaaaagagcctgatgctgggaaagactgaaggcaaaaggagaaaggggtggcagaggatgtaatggttagatagaatcactgacttgatggtcatgaatttgaacaaactttgggacatagtagaggacagaggagtctggtgtgctgtagtccatggggtcggaaagagttggacatgatttatcgattgaacaacaaatggaaactctaagtgcatatgtcaagatgttaattgctttctcttttattttctctcttatggccttctttttgtttgtctgtgcttttgtttttggttaacagtaatacttatataattaaagatatttcaaaaaacaaaagaattgtagcagagcacaggctgtacagtcagcccctttctcgatgctggcaagagggctgagccaggattaccactcccactttctagatgaggaggctgagctcagtgaggtggggggactcgaagaaaagtacccactggggcttggtggaaccagcccttgcatgctgccctcctgggattttaatcaccaacagccctgtgtgctgggtctcttgcctcccagcttcttccaaacagaaacctcttagcctttcttcttcttggccagccgttcctgcattgacctacctcttccactgatgctttctcaactgagagcataactgtaggaagaaaacctgcaagaaatatctgggtgggatatggctggccctctctgggcttgtgagggactgagtaagggaatgagaaagtatttccagtgtcatgtttttctctctggcacagacacaccccacagattggcatgaatcataagtaattctctgaggcccccgtctgtctggaaatgcctggtagtatttcccagagttcagaagccatcagtccttcatgccagcaaacttgcttattcctcacgcagccgcaaacctctgaccg

SEQ ID NO: 24814 - DNA, 1324 bp, Bovine  19866880752365
  misc_feature (1)..(1): n is a, c, g, or t
ncatctcttgagaaattgaagggcatctgagaaaagacctctagacccctgaccccagtgaattatcaccttgccatctgaccactagatagtttgatctatccatcaacaagccccaggcactcaccttgaagtatgaacatctttcagtgctacacactaaaatatgaatagatggcctggaatctcagaaatgatttttaagccagcaaatgagatagtaaacttacaaacaggaagcacatccagaagaaaaagaagcaaagcagagaactgaaggaaatgtctaaaattaaattaaataccctcagggagatgggaaggtattatactcatgaaaaaagaataggatgctatgaaaagaaataggttttataaaacaaaaagaaaagaaaaaaatcagtaaaatgattgtgtgatgaaattaaagaaatcacctacacaggagaacaacagcaaaaatatagagatgaaaaataggaaaaagattattttacaaataaaaaagaagatccgtccaggaggtctcattcatatttgactaatgagtgttttaaaaaaaagatagctaataaaatggactgaaagaaatgattaaaaaataaaaacactaggataaatttcaccagaatactccagcaatgagtgttaagaaaaacaaaagcatgaaatttcagaatcccaggatataagaagatactaaaaacatccaatgagggaaatcaaacaaaagagaatacaaaataaggaaactcaggatgtcactggaacactccaacagcagcactaacatgtagaagaagtcaactcaatgtcttcaagtgattttttaacctagaattcatacccagtcaatcaatcaagtacaagagcagaatgatcttctcagacatggagtggatacaaaacatttacctcccaggcaatttaaaacaaaaaaaaaaaggaatttctgaaggatgcactgaagttaaaaaagacagtaaagcaatacagggaagacataagactcaggaaacacaggaagcgatggatgaaagcagtgaagtcctaagacagacgccaactgtgcagcaggactgaagagcaaggtttcagcaggagaatggaggatttcaggaaggatgtgggaaatcatttgaattttctgagctgaggaaaaataatattcattatcacaggatcaatttgattttgtgaaaaaacatagatattccatagaaaattaaatgaaaaaaacgaggaaactattaatcccaaattttataaaaagcaaacaagagagaaaataaccatgtaacttgatatagcactgaaaaatgat

SEQ ID NO: 24815 - DNA, 1289 bp, Bovine  19866880814137
  misc_feature (1)..(1): n is a, c, g, or t
nccaattgtagcaggcaggtattatcatccatattttactgatgagaaagctgaggctgcaggaggttaactgccttgtcgaggtcaagataccggggctcaagcctgatctgtctgcagcgcctctgttcctatgactcagtcctgcacgggctacagacatgcataaacaggaaagagcacagaaagatgggggctcaggttctgtgtccatccctggggtgttggcagatggggccggtgctaccaccacttctgttgttataaaaagccgaggtcctggacaacccccaacctgacagccggccctacagaagcttgagctgggcatggtctccctgaaaacttgtttattgcccatgtggttgtctgaagaaagagttgtctgtcctctctcaatctttcaggccctcagaaggtaggctcaaattaccgagcacatccacctgttgtcctgggctgggaggggctggagagctcaggtgacccagcacacgcctgacctgggctggggtcagcagtgtccttggcaggctgaggggctggccagccgggagccttacagtcaggggcgccagcgggctcccatggccagagtccggatgggggccagtgggggtggctctgggccctcaagcttccccttatgtcctcctggcccccactacccacccaagacagagcacaggctcctctctgagacggctcaaccccagcagtggtgagggcagctcccagcaccggaaaaggtcagaccaatgcaaggaacagcagctacaaaagctgccaatgctggtgacgactgcttaggtaccaggatccctactcagggctccctcttcattgtctctggtgacttcccaacacactgagtgagtgaaacactgtcatgcacattattttagggttggaaaaaaccaaagtgacttgacaatctgcacacagctggcacagcatgtcttgcttgctacatctagcaggaagttcattttctcagccatgacactgaagtgcctcccccaaagtaaaggattggggcaagtcggttttatttcacttcccttcagtaaatgatggcacaacaccaatgttggggaaagtgtcaaccatgtgcaacctactggatactattctggtgctctcatgaccaagtcctgcagactacagctcagaaaggtcaggtgacccaccccaggtcacacagctctctttgctttcacagaacaaactttgatcccccaggagaagttctcgaggagcgtgaggactcattttctgacaccctccat

SEQ ID NO: 24816 - DNA, 1037 bp, Bovine  19866880861359
  misc_feature (1)..(1): n is a, c, g, or t
nattattacctgtctgctgcagcctcttgacttttagcccctctggaatgcattgtgtctccatcagctcatccgtttccacagttgtcttgcttgttttcccagtggtcatgtatggatgtgagagttgggctataaagaaagctgagcgcagaagaattgatgtttttgaactgtggtgttggagaagactcttgagagtcccttggactgcaaggaggtccaaccagtccatcctaaaggaaataagttctgggtgttcattggaaggactgatgctgaagctgaaactccaatactttggccatctcatgtgaagagttgactcatttgaaaagactttgatgctgggagggattgggggcaggaggagaaggggacaacagaggatgagatggttggatggcatcacagactcaatggacatgggtttgggtggactctggatgttggtgatggacagggaggcctggcatcctgcggttcatggggtcgcaaggagttggacacgactgagagactgaactgaactgagctgaacttggttgttttcagactctcttgggtataagaagaccttagggaagggaggaagatgactcagggaaactgttcttcatttgctttggagctgaatcagtaatggtaatggatatttactgcattctctggttagtagagatcctgggtgtctgagtcagatattgacagaataggaattaccacgtatcttcctacctatttctttaaagcaagttctttctatagaagagaatttggcatatgtcatacatgtgcttgataggtttttctccacccagcttcatcagccttataaggcttgtcagttccttctacatcctggcaattaggttgtctgtcagtgttcattcaccttgttactctgagtcttcatatttgtctgtatttgctgaggcattttccagagaaataaggagaaactttgtggaagctactagccagaggccattttttacagaaagtcccacaatacatttcaggtctgtcttcccagg

SEQ ID NO: 24817 - DNA, 994 bp, Bovine  19866880900068
  misc_feature (1)..(1): n is a, c, g, or t
ncagagaagtggtctccaggcatccacccagtggattatccaactactgtactagatggaaaggtctctgaaggttgatgctaggtgttgccctctctgcattttcttctccctggtactgagcacaggccttccacatagacacatgcattggctgcctggaggtggtggcacatgcgcaggccttgaaggataggcaaaagctgacgcagaaatgggagggtgaggcaaagggaaaagagtgccccaagcctcggagagaacaggaacagcacttgtctggggaacttggaaggagaggcgacctggcagtagaggctgcccggcacacacagcattcatggggccacagcaggaagtgggctggagtactcaggtgtgtctgactgtatacatggggccaaatggatctccaatccctgccttcatgggcccagtgccagcagtaacagcctgtgcagagggaacacttagctgtgtcatacagtcgcatcactcttagtgacacttgctgaaattgatgaacgctgcaggcaccatgacatagacgagactgtaacttccagtgctattaagctgctcaggcagtagcagcagcaagcctagaacacatcaatcagcagggaagttgttaaagatgcagggtcagggtcaggggcacttagccttggtggaatggggagatcactggtcagaactgaaggatgacaaacagaagagcagtgtcccaagggggaggggcaggcacttagatccttgtccctgatggcgcctatccctagggaacagccgggcacagcacagccaagaccaggtttggggagggagactggactggggatcagagcctctcagcagggaattcagggctgcattctgcagtcctggcccaagtcagtgtttaggtggtgggatagtgtgaagcaaacctaggggttttctatgatctaggccagtgattctcaacctgggtctctagaccagaaccaccagc

SEQ ID NO: 24818 - DNA, 4229 bp, Bovine  19866880908607
  misc_feature (1)..(1): n is a, c, g, or t
ncatttaaagtacacatctgggtatgtcattctctgctcaaaccccacatgaggtcaagtccaagccttcggcatggcactgggccctgggcactggcccccatctgcttctcagatgtgtttcttgtcatccctgtttatacttaagctcctcctacccagaagtgccctgggttgcagtggggaccacaactaccccatgtcactctacacacaatgtcctccaccccctcatccccttcccgaaacattcttgctgtttctttatgagtggaccaggtgacatgttcttagagatggtttttttttttttttttttggacactgcatccctacacccttactcaggccaggtcttgggctcttcctagtttccataacttattgggatttatctctgtgaggctatttgcaacgttgttcaaatggttttcacatttatgcatctgtgtgctactggaaggcaagggtatgtatatccagagcctcgcatagtcttggcatctaccagatgctcaatcagggtttaatgaaagaacagattgaactagaatggctattgctctgtgttagccactacatgccaggcacccctctaaggactcttaatgtatgaattcatttaaattccacaacaaccttatgaagtgggcaccacagctgcccccattttacagatgaggacactgaggcacaaatgaggctaaataacttgcccaaagttggcacagctagattcaagcccaactttagggactgacccgtacccaccacagtgtgttgtttcttcagcccagctgtcacccatccctgacttccaccccacatccccctatgctgggaatgccagtgccccatcacctgctccaccttactcgggacccagctaagaccctagctttgcacatgctcagcccaccctgagctccctggcctgacaatgaaattgccttttacacgtgctgttcattggaacaaagctctgcatccccagagctcattcggggcccagaacaagttgccttgcaacccctcaaagtgaattggtgacctacaggtccacccgacagaggccattaagaaatcccaccatcaatagtcatgcccctacatacgatctttttttttgtggggaatgtgttcgcttactcaaaaggaaaaagagacctatgttttaatgactttcatttatttggtatggttatagttcttattgtgctgctacttcttagctatatcttatttgatctccctgcttccctggacagagttcaggacaggttggccccaattcactgaagagacaactgaacatcagccgcgctgggtaatgctgaggccctccccagctcactgggacctgtttgctggctctaagtttccactggttcccaatgattctgacactctctggccacaagccgaccccaggacagtgtcattcggccggcaggcggctgagaaagccctgcttgtaggtatctcagtgcggcccaggggcctgtccctggggttaggacttaaatgtatttgcagagcacaacttggttcacaagtgtatggatgctttttaaaagtatttatttatttatttttggctccatcgggtctttgttgcaggacgcgggatattggttgctgcactcagagtctcttattgtcccacctaggcttctcttgtggctcaaaggcttctctgcagttggagagttcacacttgccccaaggcatgtgggattttagctccctgaccagggttcgaacccttgtcccctgcattgaaaggcagattcttaaccactggaacaccagggatgtcccaatatgtatgtttttaaaagagaaaactgccttggtaattacaaacacagtgggaagcctcagggaaagcgctactcagatgtgactggatgtagagatggagtcttaaagaggtgctgagatagagtgaggtggttctggtgagtcctgatgtgactgagtgtagagatggagcgtttaaagaggtagctgagatagagtgaggccattctggtgggtcctgatccgataggaccagtgccctcacaagggaggaagagataccagtgatgtgcttacatggggaaaaggccatatgaggacacagcagaaaggtggccacctgcaacccacagagattggcctcaggagcaatgaatcttgccaacactctgatggtggactttagcctccagaactgtgagaaaacagatttttgcagtttacacccctcaccccctgcccccggtttctggcattttgttctggcggccctagcaaaccaattatgtttgtttagttgctcaattgtgtccaactctttgcgactgtctggactgtagcccgccaggcttctctgtccatggaacttcccaggcaagaatactggagtgggttgccatttccctctccaggggatcttactgccccaggaatcaaaaccaggtcttctgcattggcaggcggattctttatcactgaaccaccagggaagcccagctgttttgttacagttgtctgaatgtgcttctcttcttgggatgaggtgactgggtggcagagaggtcagagaccaacaacctattggtgggaaggaccccagcctatgaatcagtctcactgattatcgcttgactagctgtgtaaccataagccagttacttaatctgtctaaacctcagtttcctcctttatgaataatatacacatatattttaaagctctgttgaatcctgtgaccatatatttacacttcagttttttaatagtcctaattttgttgacactgttaagcttgcccaaacactggccattgagaaacaggctccataactcatgctgaagtcaccctttgaggggctgtgcactgtcccacatactgatgaagcgagagctctgggtaatgtccagtctagggtaacaagcagacttgactgggcctcagtttcctcatctgcgcgatgagtatgtgaagacataggactgtttccttcccgccccctaaatgccatcaattcccgatgggagagggtaggagatttctggctcagtgatgctatgagatattcacgtttcagactgagagggtctgcagccccccacccatctccttctattgaaaagcttaaatacaaaagcccgtttggttcctttgcaggaccagggctggtggctcgacaaagagatctaaaagaggctggaactgccagctcacaggagaggtggcaggagttttacaaggacttgagcgagtgcctttgaaactttctgctattcaagtctgtttaaagctcgcttctgaagcctgatagctttcaactcgggtgtcttaattcttctctcctgccccgggggctgagcccagaagagctttgcaggacagcggcacttgtgagtgaagccccaggacaggtggtgcttgggacaggagcctgggaacacgcgggggcgggccttggagaaggaggaggttcaaggatggggagagctggtagggggaagggcagggagctagaccctctggggcccaggtcctgaacgaggccttctggttttgaaggcagaacaggaaaggacatattttgaggcagatatcatgaaaagggggctgaagaggggatggaattagcctcccgtggctgtacaaataacatgtcctgtgctctgtggcaccttgtaaactgtgaagtgagggatagttaccctgcccctttggagatgactcgcaaacacgtggccaacaggaatgctggccaagcacagatgggaaggccagaggctgctgcaggtcaattaaggaggagactttcatttcggggtacatgtggccctgggaggcctgtggaggggcttcatggagtctgagtcacatgcaaaagcatggtcattttgacagagataaggactacagctttcattagatcctcaaataaatctgaccctcagaaggttcagaagctctaacttggggtgaaatacagtgaatgttaagctaaaacctgctcgaatgcttttcagtggtagggtggtcatgacgttaaggcaggagaaggtgggctctgggaaactgggtttatccatcactcctgggggagagtgctccacggaccaggggctgatgctggctctgggccagaaatatccccgagagaaggcaggaaacacaaaacagtagtcttggaccacctgtttggtgagccgggcatttg

SEQ ID NO: 24819 - DNA, 1773 bp, Bovine  19866880964899
  misc_feature (1)..(1): n is a, c, g, or t
ncatgcttgtgacagggcaggattcatgaagcatttttactgaggtcttgcaaatagcattcaagaattccccacccatctgaccagggataaacatccatctcttttgaaatcagtgcacagctagcattgggcaggcattggggatcgccctaggtggacttctattggtcatggccaggcttgtctcacaccacattcatcattaacgcccatattggccagtgcctgtcttagacatgtctgtttgctcggacggatgagactcagaccacaagctccctgtggtgaatgccatcgctgtctgactcattgtcacagcagatagcctagcctcagccacaggccactgtttctcatagtcagaaaaattacatttaccaagcacttattccatgccaggtgtggggtaaatcctttaatcatattatcttgctgcatcctgtggcatcctctggttatcactcaaaaagcagccttgggcggaggggcagagacagtactgttagggagagtgaccattcacccctcccatcctttggagatggccccccacacacaccctgattccagttacctcctcttgtccttgaacttcaacttcatcctctcccctgactctactttctctacctaaatttgcataagtcatagccacttaaaacccaaacatggtcacctggcatatctttctctatgttgaatgtcccctcttcactctccagccaagcttccccaaagtggagtcacacatcatacaggctctcctctctccgtgttcaaccacctgcagtctggtttctcccccactcctctttcatgcctgcccccccttttttttggacaggggtagggtggtgtggggggttccctacttgacaaatccagagaatttggtccttacttcctaacatactttgtggtcactggccagaacatggggacccaacacacagttcgtcagcggcatctcctttcctcagatcttttccttcctctgtatctctatcacctcacaaaaatgggttccaccaattttccttccctaaagcaaagcctctaatcaatccttcaatcgctttccatatctcccatctattctcatccaccagggtgtgcctttcaaaatgtacatgggatcatatcattctctgctcaaataccagttatttaaaagtttaccctcctttccatgtccttcaagtccccatatggacttgctgctcttgatttcatctctgggtcatactgtgaccaacaggaagttcctgccacgtcctgtgcacactgaactcacttcacatccctaagcctctgcactgcattctctcctttgtccggaattcttctccttctatctactcgaggaactcttgctcacccttccagatccagcacattttcactaggagacttccctgatgctcacagtcacacacctcccctctgggcttctataagctcatttctggctgtgtaactcagaatcgtatggaggtgagagttggaccatgaagaaggctgaatgccgaagaattgatgcttttgaactttggtgttggagaagactcttgagagtcccttgggacagcaaggagttcacaccagtcctaaaggaaatgaaacctgaatattcattggaaggactgatgctgaagctgaagctgcagtacttttggccgtctgatgtgaagagccgacttattggaaaagaccctgatgctgagaaagactgaaggcaggagaaggggatgacagaggatgagatggggg

SEQ ID NO: 24820 - DNA, 1749 bp, Bovine  19866880970164
  misc_feature (1)..(1): n is a, c, g, or t
nctttggctgagtactgctcagagcatgcataaagaagctacacagaacagagcaaaaataaaaggttaacagagggtaacacttcacaggttctggagtatcacctactcacatctgccagagtcacaggagcaagtacaaagaaaggtcttgactcagaaatacttagacctacactgagcctgctcctgtcctatctaacaagtctaaatacctagacctgaaaagatcaaactgtttccaagtaacttaactgagtaccagaataaaacctaaaaatatttacagaaatataaaaatatccaggacccaacaggataaaattcataatgcctgtgtctattcataaactatcaggcatgcaaaaaagcaaaacagatcaactgaaaccaacgcagaactggcagatgttagaatcagctgacatgaaaacgactgtaactgtgcccccacaaaaagtcaagaagagacatggaagacatgaaaagacccaaatcaaatttctagagatgaaaaaatacactggctagggttaacagcagattagcatttcagaagattagaaatctgttttccagcttttaattattttgccagaatctctgttgaatattttatatccttcagctgtagtgtggaccagcagtctgctgagagacagctgcgtgccaagccacaaggtagccttagtgaagcagggcactagagaatgtgatgggcacagtgaccacatggtttatacacggcatagagctatggaagccaagacggggacatctcacccagggagcagggttcaggggagagagttgggaaaattaggcgacttcaaaggaagccattataactaatttatttaaacgtccatttgcaagttgactccaatatccttttggataataactaagtgggcaaagggaaatgatcaaaagaatgagaactccagtaaggcacaagatggtgaagtaaaaaaaaaaagtatgattcattcactaactcattcactgaattttaactgaacagtacctgactatgtgccaggtactgtttcaggtgctggggatatagagtaaaacagtataaaagggtcgcctggtgggctgccgtctatggggtcgcacagagtcggatacgactgaagcgactcagcagaggcagcagcagctattcaaacagaattaagtttcctacagagggagatagaaacaacaaaagtcaaagtgttagcctctcagtcgtgtctgagtctttgggaccccctgggctgtagctcgcaggctcctctgtccatggaattctccaggcaagaatattggaatgggtagtcccttctctagaggatcttcctgacccagggattcaacccaggtctctggcactgcaagcagactcttcaccatctgagccaccagagaatcccacctaaaagaaaacaaagtgacagaaccgagtggcactgagggtcagccctagagaggcaaagctctctgaggaaggaacactaagctgagatacagaaggctccagccccgaaaagatctgcgataagtacataaggcagagcaagagttgactgcagaccctagggtgagaagagcttggcaccaaaggaactaaacggtggtgtggtggggagcagcgacaagagaagaaacaggtggcaggcaagagtctccatataaacattaatttataaagcaggacgacggaagcctagatacatgatatttatgaatcactgttaattt

SEQ ID NO: 24821 - DNA, 1424 bp, Bovine  19866880988053
  misc_feature (1)..(1): n is a, c, g, or t
ntactgggtaggatatactttgctggcacatgaaggccgtctgaaagcacactacagggcgctggaccatccagaagcacatggtagaaccccagcctgccgagggcacagttcaacaaacaagtcagctctatttccagtcggcttcaatgccaaggttaagttagtttcaatgaacgagttcccatattccaagtctttaaaggaaaatgagctctttttggtgggccttcaaggacaagccccaagttcaggttggggttcctctttccagagccttctgagccaccttggtcagctctccccttgagcacagcgctgggtcttttcatttaccttttttaaaaaatgttttctcagtggtaaaagtatcacatgatacaaaacatagtattttaaccatatttaactggaccattcagtggcactaagtacattcacattgttgtgcaaatttcaccatcaaccattgcctgaatttttcaccttcttaaactgaaactctgtccacatgaagcactaactccccactccctgtcctccacacccccagtccttgacatctaccaatgtactgactctatgaatttgactattctaggtatctcgtataagtggaatcaatatttgtccacacctaatgtatattggaatgcatttttaaggttaatttaatatatgtcctacaaacagattgtcccttcttttatagtgagtacatggcaatacttgcctcattgattggcactaacgtacttctttggttcaggctccctttactatcctgacccctactgtgatcccgttcctgtcctggagcttcctcctgagccctgagacgcccacagccatgttgtcacttctacagcatttgtctctcacacccggatactcagacaatgattcatttctcccaaaggggcagcaagcagaatttggaaaggacttgctccccggaacctgctgtgcatggaacacattccccccttccaagtgctactcactccagccacagaattagccttcagctctctgggttttccttgttgtcaattttcaatttagtctccaaattattcacctgacagagaaatgatctcccctccaaactctcttcatctgtagtgatacctccatccctggaggcattgcttcatacataccaataacttggagaataaactgagctcgactgctccaagcagagagctctgctgaatgcaaaccctcccccctaagacttgtgtccagcatcctccaagcagtgttcacataaggctgatctcatggtacctgagcgtgctatcacccataaaatactccagtgcttccactcctttgaagactcactgtgtgttgggcagtggttctcaaacctggggtttagtaaagccagagactaggccccatccccagagtttcta

SEQ ID NO: 24822 - DNA, 1316 bp, Bovine  19866880990127
  misc_feature (1)..(1): n is a, c, g, or t
nttcagaattgcagcctctccccagctggcctcctacattatagcattctgtatcccttctcctctgatccatttttttcccactgtacttgacatttttaacataccttataatttatatatttactatgtctaagtctcagaatcccgccactagaaaataagctctgtgaagacagaaaatgttaatctgtactctctagaacctagaatgattactggcatatgacagatgcccagtaaatacttgtttaaatagttaattacgtggatctgggccatgatcctaagttgggaggaagtgaagatgcatgtgatagttgagtcaggatcaaaaattatttccacttaattgacaaataggccaaattcgacaccatgaaggcacatgtaaatccctgtagtccaagcaaaaagccaactctatagacaaaagatgaggagcataccatgggaaaacctaaaggttatattgactgtggtttcaaaatccaatcacaggtatgtgtttttgaagcaaaggcttctggtcctatgaatagatgcatagtacacagatcatggtagatattagttttactctaatctttgctgttcaaacagcagtgagagaattggattcacctcagggccttatgcctaaagagatttagataacaagccccatttggaagacagccacctcaggtggcagcatatcatgggagaaatttccataggatctggtcattcttttcagcaggaaaaactcaggggagacctaactagtttctttagctatttgacaagccattctgtgaaagagggaacattctgtattacttcagttggcagaactgagaccagtgggaagttccaagacatatttcagataaggataaggaagacgtgcacattggtgagagatatgcaggcatggagcagcaactcctggagtcagtgagcctcctacccccagggatgcagcagggctggcagagaataattgataaggggattcagaactgcatcaattcaggtcctccattcacagatgccacgatgaaaccagatataccaaagatttactggggaagtggggtggaggccagaggaggctgggagagctatcagaccacagtgaagatctgatccctctaaaggagagagggaaggaagaagaattgagtgggaagagctttagacagacatgagttgcagggaagtgttgggaagtccaatggggcatgtttgagcataagtcacccatcggaagagttaagaatggacctgccatcgcatccccaccactttcagtcatgggtggagcagcaagg

SEQ ID NO: 24823 - DNA, 1618 bp, Bovine  19866881003331
  misc_feature (1)..(1): n is a, c, g, or t
nattgcggggaaagcattctgggcagattgggaggtggttaaggtttgagtgagaaattgaaacttggagtgtgtcagactcagtgtgtttgcggggacctccttccggtggaggaggtgcactcaggaaggagtagagggagtgccagtttgctcccctccttcagttgaccgaggggcataaccaatcttgcatgaggaacagagtcttcaacaattagtgccaccattgttaaacttttcaattgttggattttttcctgaataaaaaaatgtgtaacattttgataacagctgttttatttttccttacttatttttgtgtagaaaattacttttgcagaaccacatgcctaatgatgtgtcccatacatattagtgagataatgcatgtgagtgcattgtatgccatctcacagacagtagatgctcaataaatgggagctcctcacactgtttatgcttcctgtatttcacaggaggaccctggggcagagggagaggctgctttgtccaaggtttgtgttccgaaataactagactaacccagggtatcttggctcctcccacttttccctcagtcagagcatctcagtgcctggaccatgctctacttacataacccacagcactttagggagcagctggggctggactgattgggaaaatgtgtttttggcagcacggtccagggtccacttgatgtaaccagtgtgggtgggcaatgtccaaacacagtggctttggcgaggtggagcaaggcacacattcattcactgacaagctgtctgtaaccatggaggagggagggcagccaggtaagaaacttatgggaaagaagacacgcttcaggttggcaggaggtgggacagcaacagctctcgtttactgggaaggtccacaagccagacgtggtgcatgcacttcttctgaccaaccagccctctgaggcacatgtgttatcccagtgtccaggaaaacatcttaacatttaattctggggccaggaagtaacgtaccagtcattcatccagcaaatgtttgttgagctgcatctgtctactcaaacgtcgtcagcactgggaatgctatggcaaccacaagagacagagttcttatctcagagcagcagagacaggcagacacacagccatccacacatacagctacaccttgtgatatgagctgagaaggaaagtaagagcatgcactggaagatagtaatatgaacgtgctaattatgggttggggagggaactgcttatagggacactcctctatgaggaggtgacatttaagtggagatttgaggcaagtgggtgttgactgtgggggagaagcagagaagagcctgtatcagggccctgaggcaggaaaggcttggccagggagggaattgaaaggtcatcaggcactgtgccttcagcatggagtacaagacgaagtagcataacgtgatcccctggggccctgtgggccaagctgaggagattggcactttcccttaatgcaataggaggccagtagagtgctttaagccagccagtgacatgactggatttatgtcttacaaggatggctctaacttcccttagagaagggatttcagaggggagca

SEQ ID NO: 24824 - DNA, 950 bp, Bovine  19866881023521
  misc_feature (1)..(1): n is a, c, g, or t
nttaaggtagaaatataatacaaactatatactttctaataaatacacacaaaaaataaaagaagcaggttaaatttactttaatataatttaacacagtatattcatcatttcaacatgtaatcaacataaaaattacaagatatttttacattttttatccttaattcttaaagaatggcataaatttcagtatattttataccaaaataacatttcaatttggactagtcacatatcaagtgctcactagccacaggtagctaatgggtaccatgttggagagctcaattccatagtgtctggttgtaagcctggttttgttgaaatggccaaacggtggtaactagcttggaccacaaggcaggtgaagccagaaggacctgatgttcttgatggtgtggggtggctggattgcagttgaggactgagatccacaatgaggctgaagggtaatgatgagtgggagaagagaagggatgggctggaagcctgggaggtcctgatccaagagggcaatttccagggttggagatcacagaagtggggcagtggctgatgctgtggctgtaaaaaggaggtgcagataaggactgcttgcttgaggaactggaggaactttcaggacactgcttttaaggtctttgaaaccatccatggtagtcaaccttttgttgacttttaagtcaattcttaactctaatttttcaaaagaaagatttccaaaggtgagaagtgacaaatgcaaatttaaccagcatgcattctattgcattattgagtccttggtgtaggtgttgaaaaaagcacacatttcacattgacctccttgaaaaatacttgtggattttacattaataaggaccctttggttctcactctccaattaactgtgtgatcatctcacagtattttgatctggactgtatttcttgttataatgattagca

SEQ ID NO: 24825 - DNA, 1596 bp, Bovine  19866881055904
  misc_feature (1)..(1): n is a, c, g, or t
ngacaagatttccgggaagttgctttcattgggttttctaagaaagcaacactggtgttctcaagatcgtacagtgcttctgcccattcacccacctacccatccatccgtctgtccatccatccttccaaggatggtccttgagccctagctgaatgtgcagagcgctgggtccatgctagcctgagtatacatctttgtttttgtaccaggcacaggaaaagccctcagaatccagctcactctcacaggtgaaaccctacctctccatggtctcaaatgcccatcacctgataccttcactcctgggaggaggcctgggtgcagactaacgggttggatgtggctgcagctttgctcctgcacggaagtggcccaagtgtcagccccacagacagacaaaaggggcatagacgcctccagacttaccagcttggtttgtggtgatgttgacagagacgtgctgtgggggaaagggactcttgctggagaccccattgacagcctggatgtcaaaggtatacggggtatgggcccacaggctgctgatggagacgcggcactcagtcaggcccagctgcctgggcacgaactccacgttgtcgtcacagcgggagcagctccggcggtctgcccggcacttcttacagatgatgttgtaggtcacgtcatcccgcccacccgtctcccgaggagggtgccactccagaatgatggatgtctcattgacgatggagatgacattgcggggacctgatgggacacctgcagggagacaaagaaaggcccagtgaggctgagtggaagcttggccagcttctctccatccctctttggtgtgatcccaccctcctcacatacacatatctcctctcttccctcaactccagtcaaccatgtcccaatcctttctgagaaaaaatgacagatggagatgacaacctgttgccagctccccttttagtcatcccagtgaggcttttcttctctgaatcatgtctgccaagggagaggaggatggaggtcttggatacaagcccttttgttctcaggactcagctgcatcctccaggcagctttagcatcagtgacatgtatgtatattggactcttattggattccatgtctcttcttaacttgtggagaactcaagtgttggaggacaggactcaacatattcaggcatcttgcatacagtttcacacaacctgggatctgtgtggtatgtgcatggcagtgggagtgtttctctgcaggatgggcttccagaacacctggagaaatgaatattcacattgtacaagctgtggttcaagaagccatgttgggtaggagattcacacagccactatttcttaccccataatacaagaagagcatagcggtttgtcccagacactctgctagctaccagagctggtcttaagctgatacggcactccaaacattggtggtcagatcttttcatggaaaacaagagatctgaacagaccgtctctcctacaaaccagtcaggctcactgggactcaaggagggcagcctctttcctccggacagctccataccatggctgctgttcacacacctgcaaagg

SEQ ID NO: 24826 - DNA, 2344 bp, Bovine  19866881152667
  misc_feature (1)..(1): n is a, c, g, or t
ngcccaccttggcattcgtttcttctgggtctgctaacccccatggccctgaggcagtgtggtttgcagtgggtctgagtccaccccgaatgtcagtgcaagcatgccagccaaagagaacattgcactccctgctggtggtaagtcaagtgagggtaggtgaccccaacccagccaatctaagtgaatgtgatggaacagttgatgttgggaagtgggaagggggttccttatatgctaagcctataaagatgtaagccatcatggaggttctgggaccattttagtggcttatgagaagaacctgcctgaaaatgaagtaaacatagaaagaggaaagcaagatgagagccagattgagtcctgatgatatcatttgacccccgtgtctaaaaccagagtccaggacttctcatttacatgagcaaaggatatattctctatttttttgcacacttgagttggtttttgtatcacttgggttgataatataccccaaccttaagaaagaatgatttcccttctcttttatttaacacttggccttacataaaagacctaggttatttctaatgtacatcaaattcttgctgtgtgactttgaacaagtcctatccatgtgtcctcatgaaaacagggcatggggccccatcacccaggtcctttcccaccctgaagttatatacttttactagtatacaattctaccttcatactcacacttagatacaaaactgttttcttcaagagtatgggttgaaacattaaaataacactttcaaaagtttaatcaaatttcagatgaggaaaaccacacaaggtctctttgctttagcaaaatatagaaccacaatcatggtggagacgtgtcatccgctagtttctggtgccaggaaacttctactcccttctccccttctaatgagtaccacttagccttttaatccgtgaaatccgtcagaggtgggagagatgtaacagtttaacaatcttcagaggcttaaaaacagaactgtagtcactttatctgtagactctgggtaccccattcacagcccttaggtgactctctgtcaccccagatgccaagtcagacacctgcccaccagttcccatcctcctctcgctcctgcctacttgagcatcctaggcgtatcacttaatctctccaccctcagtttcctcttctgtaaaacggggataacagtcgtacctctttccaagtgctgtcataaagactgagtgagtaaacagtgcctgcagcgcagtgcatgccgtgggtcctcagtcgtgtccaactctttgagatgccatggactgccctccaggctcctctgtccatagaattttccaggcaagaatattggagtgggctgccatttcctactccagaggatcttctcaacccagggatcaaacctgagtctcttgcgtctcctggatcgacaagcagatgctttaccctgtaccacctgggaagccacatatagttggcacagtataaatgttcacgctcatcttcatcgtcattcttctggatggactccttggtgcagatggatggctggatgaacaaatgggttaatgtgaaggatcaaaatagttcatattgtgtcagttattagtagatacatagtgatgagggtattctagagatataaaagtagcaattcagaagggacaaatcacacagcctgctcccctctctgctgttcctccctgctcttgagccccccacaaaacccttcttttcagagcttttgctgttgacttccggaaccagaatgtctagttaatgatgattttgcagctcttaatgcaaatttgctcttctgagtgtctaatatgaactatttccaatacaagtgcagacccactccccaattacatctgttttagcaaagagatgcccagagtgaccagctgaccccagaactcaatcctccgtgggcactcagaaataaaaggatttgggaaccaattctcctaaactgttcttaaatgaaaccaactgatgactcagaaaggccatttattgagcataataggagttagattagaccagagccccaggatcaggcatgactcagagaattccctcccaaaagatgtcaccctgagcccccaaaaggctactggctggctgggtcagctgattgccacccccacaggtggcttcagagagggctgaggggtccagtagggctgggtgggtactccagcaagatttgtttgcaagctgggtgactttgggcaaatctctaacttctctgagcctcagtttcttcggttttaaagtaaggctgtggcactcggcccagggtagctgtgaggaattgactga

SEQ ID NO: 24827 - DNA, 781 bp, Bovine  19866881161865
  misc_feature (1)..(1): n is a, c, g, or t
ntggataactctaagcctttgtcttcccatatgggaagtgggagatacatccccatcagagttaagttgtgatcatgtatggttaattcttattagttatgacagttatttttattaagtctccgggaacactgagctagtgaatgctgagccgtgcccctaggggaaatatgtgcgtttatgttcctgagacccctgggtcacaatatttcatcaattgatcaacacataaccttgttttatgtgcatatctatttaaagacatcctaatttctatttcttataaataatgaattatatgtaccttctatataataaaacactagctgagaaggatttaacatttccttgactctgggtaacatgaccataaatttctttggctttcagccttacaatattttccactatgctttaaaagaaaaaaaaaaaatgagcatattatgaatccaccagtacagcctgtttccacagtatcatcatgcacttcgatgttacttgagtactttccagaactttgatgcatatacatcagtgaatttcctcttcctggatgtaccatattgttgattcattaacactgaactcacaccaacagcactatatcatgcctgaatgaagcttctctcacacatgtattttttctgtaaaccacagccttcttgcactacacaactgcagcactatacctgggggctactttatacagtgaaatcaccaacaaaaagcagagaaatacaaaaaagtgtcactaaatagactgcaaaaaacaccctgttta

SEQ ID NO: 24828 - DNA, 1651 bp, Bovine  19866881178608
  misc_feature (1)..(1): n is a, c, g, or t
nggaggtagctgagaaagacttgccccaagggaattaggcttggctattgggtcagcatggcctgtggagaacacataggttgagtgatgtgagaagatgccatgtctcgggattaaagtgatgagtaggcagatgacgtcacacaccatcccccaggtggcttggggtcattcagtagagccttagcatcaggacacctgagatctgtacctgactctgccatgagctgcgtcctcctagcagacctcttcccctcagccgtaggctctgcagaggagccccagggttcttatcactgacatttacagtcctaagtaacttcactgtccagtaattcttctgacgcaccatttttttcttttttgaccttcagaaactttaatggacaccaggacggctactgcagagctgggctggaccgccaatcccgcatcaggggtgagtgtcagaccgtctgtcctcctgtcctgatgagcagtcatgggagcagggcctgacttgcccctctgggatgtggattacaggtgtgaatggctttgtccgtggcccatccgcagagaggcagcagcaggtggccagggcctgtgtgggactggggccagtggctgccagtagttgggtgttcaggtcagtggtgatggggaggacagagatccggatgcccctggggctgaagaggggccagggcacgaggcagagctcgagttcagaaaggctgaggctctctttgacctggtactgccttagagcaatgttctggatcatttgttcagtgttatgcacctggtcagaatctgtagctgcaaagatgaatactcttgaggagctcatgacctcccgtgggatccagcacatgcatgaatgagctgaaatgtatccctcctgggtggcagtggggagactgacagccaggtgtgggcacagaactggaagtgagacactttagagggagacaagaagcctttaaaaaaaaaaagtgcacgcaagctgggctttggagagtgagtaggagtttgacagacagtaaatagggagtctggaaagatgttccaagtaggaggaatagctggttaaaaggagtgggagtcatgaaacgacgtaagaacaagagtctgtgcgtctggaccatgggagggtgtgaatagtgctgaggtggggctgggctgtggattgggcagtgcacagcatggggaactgggactgacctgctgagttagccatgtggctttctcctataggtaaaggatggatcttgtcacacttgctgacacgactgtagggaacagttgacagaaggctctttcagctgtcttggatgggtcagaagcatcagattaaaatgggatactcaggacagttggagcaaagctaagcaggaggccttggtagcatttggcagtgagtgaagacattggggtggggaaaaggcagagggaggaggtgggatgggattcacatctcaggctcgagtggctggctctctgtgaggcttaatcacgaaaggaggggacaggaggagtgcatggactcttcatccccgcgagggggtgaggcaggggcagggttagcctggatcttctctttaaccctacaccttctctctcctccctgcctttggtcacctccagcctgcagcctcaggccactctg

SEQ ID NO: 24829 - DNA, 1063 bp, Bovine  19866881263226
  misc_feature (1)..(1): n is a, c, g, or t
ntggtagtcctgcaggtgagagaaaattggcttcatgaaatagcactattagaaacagagttttcctacatgaaggctgacaatcactacaagccaatcaggactatgaacatacctctatttttccagttaacctctcaatttcagaccgatcttccctgtgatttttggcatttcctctgaagtctcttacatgttttttctgtagcttttcatagcttctcttcagtctgcttaactgtaaacacagttatttctagacttaaaatttaagaatgtgtaaacagtgctgataaaacaaactggcattatgaaagcacaagtagagctaactaccatcccagaaaatagagagcacgttagataaaatacaaaactcaaaactacataaagtaaacaccagaaaaaaaaaagtcaaataaaaaataaagaaaaagtttaataaataaaacaaaagtctaattttttattataatatacaatagccctgcacttagggacccccacaacccatcctcacaataaaagcaacaaataaacactctttttcttttctccaggcctgtggttcttgaagcattccccagtggaacacctgatattcactatgcaggaaaggaatgcttcggaattgaataaaacgtattttttgccaatctgaagaaaacaattcagttaactggtagaattttcttacctttctaatctatcccaaaatgcttctgaaacctttgaatcttccattatttaaaatctactgactcaactcaaaaataaaacatttaacgtaagcttttggtatcagcatttcatggtattatacaaaaatagctctatttctttcagatactcaaccaagaaacatattttagaatcactgttgtaggtaatatcaaatatataaaaggcaaaattctgggtttaagaatagagaaagatttctaccccaatatcttccatggaatatatacatccactttataaagtagaaaccagctcattaacaaaattctcaaggctgaagagacagaattatacaatatataatagaattaaaatctta

SEQ ID NO: 24830 - DNA, 1552 bp, Bovine  19866881284494
  misc_feature (1)..(1): n is a, c, g, or t
ngttcttacagagccagttagcggagctcctgcccagacagcacagggctctgtggtcccagctccagggacagcggggctaggcattgcctgagccgcgggggtgggagaggctgggtgttctgtgctccaggtgtccctgcaaagtcaagagccactaatggaaataaccaccggggcatgatttttcaagccctgattccaatcacagacctgtcatccaagaagaatattggaggggaaattccatttctttgtaaaccaaacgttcccccacggaagccaaaggcttgtggaaacagttctgattggaaagagttgagcatacattgttctggcttcttgagctagcggatgcaacactcattgtttactgagtgatgagtttatagcacagagagatcctgtccacacatggcaatgacctttcttgcttccatggacaagacactcagctcacaggaggaggctgggatgcatctggttcgtgtgaacagacagatgtgagtcctggcaggtggcgaagctgggcatgacttactacagggcagaggaatcccagagggcaagaaggggctccagacccctcccagagaatagcgcagaggccgatgatccatacgcccttctactgctgcagccagtccacacattggaaacattaaaggacagagaaaacgagagggtggcagacccgctgggctgagcactcaacacagggtcaggcagcgcagctcttgatcttcctggtcggctacgtgtgcctgtgaccactggcccctggcactttctcttctaagcacgtctaagtgataaactcagtgaatcttcacgaggggatggagtcctagtactatatctgttttatattggtggaagccgaggctcagagcagttaggtaactcgcccaaggtcacacagctagcaaatgccactgagatttttgccatctcactgcacgcctccctggccctcctgcctttgctctctgccttgttcatatagtaagatggtgaccagccaactcttccgtggcctaccctagcatacctttccccaaagtggatgcttctgtgctctaatgaggctgcacctcataggagaaggaatgttcaggacccccaccacctatggaggctcagcaggctcgcttggaggtctggccagtgggcttggggccagaattcagacttgggcgggtgggctgttttatttgaagggaccccaagcaagaagtagcatgggggtgtgagtccttctgggtaaaaacgcttatcctgatcaccgctttgttcaccgtgtctagcaccattcctggtcttaggagcttcagaaacaattgttaagggaatgatccaagaacagccgtctggcaaagcttggaaagcaggctgctgcatcctagaatgtcaggttctcggggctctggggggagaccggagctggggcttggacccagccaggtgccacagcaggagttctaattctgaataactgtttttttttttttgtaacagttttgtgtcattctaagttgggtctaccacagaa

SEQ ID NO: 24831 - DNA, 1315 bp, Bovine  19866881347003
  misc_feature (1)..(1): n is a, c, g, or t
ngatttatctccagcacagagaaaataaatgatctggaaagttctaggctgcccgtggacagagaaagggtgacgactggtgagcctgacggtatgtccctgaacggtcaggtcctgttcagttcacatgaccagggagggtccatgagccagccttcctgggtctgaggagagcaggcaggagcggggccagggggcctacctgctgcagacgatggagatggccaccagggacaccacaaacaccacccccagctgccgctgagccagcgatcaggggcagctgctcccgcagctcggacttgtaatcatctagcagagagagaggtattagaagcttcctgtctgccctctgcatggggctgctactcagcgatgccaccaaggacatcagagtgatagacagatagagtttctatacttcagagctgtaagcctgacccaaaccaagagtaatctttaagtcacacacactcacaaaagtaaccccaaacaaataatgtcaacaataaaagcaagataacagtgacagagaacctcacaactaagagctgatgacattggccccagagcagaggtaactctttctccatgcactcatgaggaaggcctctcaaaggtctgccagccatgctaaggatacgtctaacagggggcatggaaaccactgctgaagtaccttctaaggcacaaagttgctgagatgtagccagtcaacagattcactgagcagaggcttaagagcatctgcagccacccagtaccacatccagtgctgcggagaatgaagacacgtcgagaaacagcccagaactctaaagctcacactcaggaagaatagggtcccggcttccgccagtgttagaaacacatgggggagtggctgcctgcggatcacagaggtggacagagctctctcaaacgtggctttaccacggggaagcttagtgatcttagacaaagcatctagtctttgactctcagattccttatctgttaattttttaaattaaatcatgtgacacatatttcagtgtctgatgtatcacagatgccccaaatacaaattctcttctccttaatccatacaaaccactcggcccaggggcctattgttattattgtggttcttctctcacttggtgtcaaggagccatcacaaaatttcaggacggaggcagatgggggtcaagctatgtatgtcctattacaactggggctgccagatacagcgagtgaaaatatgggatgatcagttacatatgaatttcatgtaaacaacaaataaggttttaatctaactgtgacccaaata

SEQ ID NO: 24832 - DNA, 1032 bp, Bovine  19866881364844
  misc_feature (1)..(1): n is a, c, g, or t
ncacgtgagcagcctggtagaaagacgccattttcccagggaacaatttcccttcagtggttctggtagggaaaccttcagggtcccccctccaaccacggggggccgccatccgagggtcagggtggtgggggcaggtctgagccccctacacagaggaaaaggcagctgccacccagctctgcagacggttcccctttctgtctggattggcaccttgggatgtattgacatttgggatgaattagatgcccatcatggtgaaagagagctaaataaaccctctccttacagttctgccactctttctggagagacattaatcagacattcagctgaaaatatttacaacgtccttccgtggtggtaacaatatacaacaacatacacagatggaatgggggcttccgggcctccagtgagcagagcctcatgtgtatttgataaggcaaattcaagaaccttccaagcagggaagaaccagcgcggccgtgcagtcactgcctggtgcagccttccgtggctcacagagctcccgaaacccaggagccacagcccagagtcgctccacgaatccaggtcctcccaggtaaaggccaggagttggaggtcagcccactgcagcccaagcctctccctcagccttcatgaggggctgggatcactggaagaaggctgagatgcgtggcatcagggggtgatggtccccattcagcaaaggttgtctgagtcgctcccacaggcaggtgggcactgtgcaggaaccagagacagagcagaggaaaacagacaccctggccctcaaggactttgcagacaagtgggaagacagaaattaatcaaataaccacgcagctaaatctgcaattacggcctcgctgagcggcaggaaggggaatcccagggacagttgtgaacactgaataaaatgacaggtctgtgaagcctggtgcacagctgacacttcttgctttcccagccccggctgatggaggcacagcgaccagcccctttcacacacacacacacaca

SEQ ID NO: 24833 - DNA, 1518 bp, Bovine  19866881373494
  misc_feature (1)..(1): n is a, c, g, or t
ngtgggcccctgtctgagggaatcagttcgcctcccttccccttcctgtctgacctgggaggccggtgggccaggcttttgcatcctttttggggtccggcccagagtttggctggtgaccttaggaactcatctcccaagggattggcctgccatagggcttgtggcacctggacagtcttcgaggtggggaccctgcacagtgacaccaggtgaggaagggggcagcccagttcctcctccagcaggtggctctcctggctcctggggagatgccgggccttgtcctgatccttttccatttgaatcagccaggaacagctgacctgcccgcctgatccctcactagggcttgtgttggcaggcagaggggagcagaaggccagctgggagggagattgtgggcagatggaggtgctgctggcactggggagggtgtgcatgtgggcagtgtggagaggtcttggcctgggtctcactgcagggctccagggagtagggggactagtggcctttgtggtgccctgggaggcctgggcacatggcctggcagaactattcttccctgagcttctgtgcggatgctgccgtggtcacaggaagttcctcagcaccttcgagctctcatttccacattttataatatgtggataataaccacctctcaacatggtgatgagctcatgttgctgagagggcttgaaacaccatagatcactacacctaagtgagaagattattatgtttacttatttttattccacttctcaagtacttatttttcgtccaggtctttaatgcactttttaaaaaagacttccaaatggaacaggtcaggcaagtgaccacagggcttcttttgagtctttgtcatctcctgctgcagaggagaccattgcctctgccctctaactagcctcccagcaccaggcctggccgcctctgtgccgtcgtcctccacacagcccctggagggagcgttgggaaactgctcctgtggtctcgtcgtctttctgctccaaacctttcaggtcataactcacataagatatgtagcctgagttctatacaaggcaagcagctaggtgggagaaggatgaggcacagtcctgtccccgggctcacagtctggggctgctctgccactgagggaaaggatcctggctcccaagtcttctggtgtggacccctgcccatcatcctcacccccctgcctccccaagctccaggtgaaactcccagcaggtgcagttctcagacacacccaggctggtgctgggttccctgccctttcttcttcctcccttcctcttcatttgccagtttcctgcccagccttcacgattcagcctttggaagcttgcaagagatagaaatgccactcaaaatagcttcaaggaaaaggaagtgttttgattcacagaactgaagagctttgtgcaggtgctcagacagcaccaggacttgatctctcctatcttgtggctctcttgtcttccctggaagcttcattcttag

SEQ ID NO: 24834 - DNA, 1191 bp, Bovine  19866881442353
  misc_feature (1)..(1): n is a, c, g, or t
nggtggcaccagcatagcctctccctgagtgaccctgagcagtgtgatagggacacagtccatcaaccattcatccatccatcatttaccaagggcctcccttgtgccaggtcctgggctggattctgggggaccctcagagaccctcaccctgcccagagtcagaagtgattcagtgtcagttgcatccttgctcatgggcacaagaggtgcttatgagatgtgacacggggcccaaccgtgcctatcaattcttgatgacaccgcggcgggcctctacatctttgtcatgtgtcaccgcccccatgattactgtgatcactgatcatcatcatgcaaataccaggaaacgcggctgaagcgcctacatcatccccggtgttgagaagcctgaggaatcctgcatctgtcatctacattcagaaatgagccaaagtcatgacctatggcatgcacataccagtgaaatgcagcacagaccagtggatctgggaagcctctcaagaggcggagcaggagaggggtgatggaacgcctgggtgccctactgctgggcccagcctgaggccaggcatcctgagcagtgccacaccagccctcagaggacagcctgtgatgaggaatcacacctttccccttaggaaggaaactccaaaagacgcctgtaataagaccaccctggagaagcaggatacttgggggtctctgcctgatttctgccaccaccaccacagaggcccaggtccttctacaatgctgggcaggggcagggcatggaccctcccttcaaacccaggagtatggcagagacaggcctggcacttacagacaacacacaggaaacaagcacagggtgacacaacccggatgacctggactgtggtttcctgcagaggctcacacattctcacggcagggaccactctgcaaggttctggctctgatctaggaatgcatttcctccctgataactgacagccatcctcgttgagaaggtcatggacccctgccccacctctaggaatgagacccagcaggtaccaaccctctctgcataccacagcaaccacaggggtcaggtgagagtcggggagaagctcccctggaacctccaatcaaccatacacatggaaaggggcccaaaacagaaaacccaatcacacacacacacacacacaaaacagactaaag

SEQ ID NO: 24835 - DNA, 1188 bp, Bovine  19866880139212
  misc_feature (1)..(1): n is a, c, g, or t
ntgcctggaaaatcccatggatggaggagcctggtaggctgcagtccatggggtcgctaagagtcgggcacgactgagcgacttcactttcacttttcactttcatgcattggagaaggcaatggcaacccactccagtgttcttgcctggagaatcccagggatgggggagcctggtgggctgctgtctatggggtggcacagagtcggacacgactgaagcgacttagcagcagcagcagcagcaaaaaattaaaagttaaaaaaaaaaaaaagaagaagaaagggtgaggaaaacaaagcctaggaaaacaagacctttcaaaaacgaaattactcaaagcttctttaaaacccgccaccagtgggaacgtgacattgtaattatataaccggtgagtgtaattaggcgcttcctttctgtccccacccacttctcccaggctttgggtttgggagaaggtggaagggggttcctgagagcctccagactctccgagtaacgccccacattctcctgcccttataaacttcctcaaaaaataggatttggatctgtctggagccaaaccctagagcttcccgtctatcaattaatatttacagggccttcacaatgagctcagccggcgcataaaagacaacagtcctgtagactgttattaggccagaggagaacaagcacctcgccttccctttcacaaggtggttggaagctgggtggttgtgtctgggtcaaaatgtatatccagacactcatcctccagacatttacagagagctggatgtcgcaggcgctgttctaggctctggaggtgcggcagtgagccacagaaacaccctcccgagaggagtggagggtggcccagagaagcttggggcagaagctggaggccgatgcccacccgcggagcccccatgctgtgtctggagcgaccagcctgctagagcgtagtctgtgcatttcatgcctccctttctgaaatccactctctgggctcagacatctgcagcttcaaggccagtgggcaaaggggtctgagtttagacatgagacgtgcgtcatctccatggaggaatcagatgcttcttggagctccagatctctgacctaaatgaaagatttggtctacagccgcaaattcatagcccagacttgagagcacacctgaatgtccagtacagatg

SEQ ID NO: 24836 - DNA, 1544 bp, Bovine  19866880234487
  misc_feature (1)..(1): n is a, c, g, or t
nattcttcgatgctcagctttctttatagtccactctcacatccatacctgaccactggtaaaaccatagccttgactagacggacctttgttggcaaagtaatgtctctgctttttaatatgctatctaggttggtcataactttccttccaaggagtaagcgtcttttaatttcatggctgcaatcaccatctgcactgattttggagcccaaaaaaataaagtctgacactgtttccactgtttccccatctatttcccatgaagtgatgggaccggatgccatgatctttcgttttctgaatgttgagcttaaagcccactttttcactctcctctttcactttcatcaagaggcttttgagttcctcttcactttctgccctaagggtggtgtcatctgcataccctgaggttattgatatttctcccggcaatcttgattccagcttgtatttcttccagcccagcgtttctcatgatgtactctgcatataagttaaataagcagggtgacaacattttggcatagacctcactttatcttagaagcctgccatgatgcccagaaatgagctagacatcttacagatgtgcaggcacaggaatctgctgacattctcctacagcgcccactgcactatattgtaattctatgcttattggttattttctccctctagatatgaattccttgaaggcagaattgtatctttaacctttggatcatctacatatgtcatgaaagacattctaggaaaaaagtattaaagtaataattatatgaatgtacataattttctaaatggtgtatttcagttttgatgaggatacatagtttgatcaagattttgacataaattcatgacagaagtagaaataaaagtggcctaacccctggtggttcagcagtaaagaatctgcctggaatgcaggagatgcaggagacacgggtcaatccctgggtcgggaagatcccctggaggaggaaatggtaacccactccagtattcttgccatggaagtcccatggacagaggagcctggtgagctactgtccatggggtcccaaaagagtcgggcacaacttactgacaaaacaacaactgaaaaaaaaaaaaagagagagagaaaaaagaatagaagcaggaataagactagggaagacggaggctggggagagttaaccgaagttgctctgatggagaccctgaacctctgccagtccctgagaagcttgctgttgttgttcttaaggctccatttcattaagaccaggagttgggcaaggtgccctcctgattgctgggccaacatgctgctctgttattgctaccattgagaaggaaagggaaaaaacatatttggcatcatggcttagacaaatttacatttcattgtggaagattcctgtttgttcaactcgactcagttccaatctgtttcagtcaaataactttttatccttcttccacattttgtaggagaggaaggaaaagagaggagcaagagagagagatggagatagaaaatgagagagaga

SEQ ID NO: 24837 - DNA, 3543 bp, Bovine  19866880370201
  misc_feature (1)..(1): n is a, c, g, or t
ngctttctggagttaactaaacattagatttcccatatggggaagactcgtgtgtgtgtgtgttgtgtgtgtgtgtgtgtgtgtgtatgtgtgttagcacacactatgaatgttacaaagttacatgcgagcagtggtatactgcttgttctgtccggatgtgtgcatgtagataacatgcaatataaaataatcattgtgacttggtcatttatatccagactctatttctttcaacagaagcttgtctgatagccttctgcgtgagaaatgaggctgaagcctgtaaagacgtggattcgtaggaacggggttatagttaacactttgtaaatgtatttcatagacatgtgcaaagtttaacatctgtaggttttctcagcaatgaaccatagatgcctgaaagctctctcaatttggcatcacatagaaaatgtcctctttttttgctctgcattgagagtttctttcccaggcctgtgttttccagacagtactgattcctctggaaacaacaggatttttaacatggctgctctaagagaaacctgcttaatatggtagggaatcagtaacatttgaagaataaaggaatgatggaattgtatcctgggctgtaggtaatggtcacctctatatttatttacacacggaggcactcttttgggtagaatattcacagagttattgtaccagcagtctggactcaacgggcaaattctttcaatgtctcatttatcagtaacttaaatgtagttaatcagtcaattggtattaggtaatgcaggagaccacctgcaaagcaggagattcgggttcaatcactgggtcggggaagatcccctggagcagggtatggcaacccactccggtattcctgtctggaaaatcccatggacagaggaacctgatgggctacagtccatgctgctgctgctaagtagcttcagtcgtatccaactctgtgcaaccccatagacagcagcccaccaggctcctctgtccctgggattctccaggcaagagtactggagtgggctgccattttcttctccagctacagtccatggggtcgcgttaggaggacatgaccaagcaattaaaccaccgccacgtacatatcacaaatctttctatcctccaaactttctttgtatgtctctcctaatcatctatgtaatcaatatatattgagggggataaaattaaagacttcattttctctgtgattacaggtttgaaatatgtctgcagtataaggatgtgggtaccaagtttgggaacaatttaatttccctcctgaaactatccctaactcttgaaaggagactggatgggccagcagagtgatagcacagtggtcaatggttgttattcacataaggtgcaagggggagtgggatttcctggtggtccagtggttaagacttcacacttccactgcaggagccatgggtttgatccctggtcaggaaactaagaccccacgtgctgtagcgagcagccgaaaaaaaaaagttgcagggggagatagcacactattgagcaccacccacgagctgagctgtaatctacagcagggttgtagtaagcatttttgcccaaattgggcaaatcaattgccagtgacgtctggccccagacatctgcctctaacagacttatgggggcgtggggacccagggctcagacacatgcattgttcactgtttacttcctctgcttattagccttgtgggtgagggcagcattaagcactggcccgtcgccttctagaactacgtggcaaaatgcagaacacactgtctcgtgtttggggctttaagagcctctgaggtgacctggtgctggggagaatttgagagcagaatggcttataaccatcgctcttggctaataattacactaatcttttcgagggaggttttgtgtgcatgcatgttccccctttcctcaatccccgagtcgagaacaatagaggaactgtgcttctgcactattccatgagataggtcaggggacagggtgcagaaggtctgcggtgaacgacccgccaggcatttgcccggagccatctcgaaggaacctgagactcgggcagtaggctttggccaaaccaaagggaaagagttcagcagctgagccttttgaacagcagctgttttggcggtcagcagatcccatgccctttggggagacctcaggagcaagtgcaaggcttgctggaagagaggagagggtgtgtgtgtgtgtgtgtgtgtaaggggggatggcaaacatgcttacccttaatgtcaagttgtcagctctatgagttaaaataatctacaaggctattcttcaacgaggacatgccctctgatgtagcaaatgttatttaaatattgtgatgagagtactcctaataatttagaaagtaagtactaagtaaatactcacgcctagagttcagaacaacaagccaagggttatgagacccaagggcaggtaaatctcccagaacatctttcacagtgtgcgggaatgtcccatcttctccccgaaaccgggcacacggtcccgtcaaacatcttgcatttgccacttgttttgtgaatttccacaggacggctgggcattgcagaagcaggctgcccacgtatcagctgggagaagcatggaggtttgctttaaattaatctgtattggagtatagctgctttacaaccttgggttactttctgctgtacagcaaaatgaatcaaccatttcttgttgtcactatttagttgctaagttgtatctctttgtgactccatggactgcagcacgccaggtttcccagtccttcacaaccatataagttcacatgacatggactgccctgggggctcagacagtaaagaatctgcctgcattgcaggagacctgggttcgatccctgtcttgggatgagcccctggaggaggaaatggcaacccactccaggactcttgcctagagaatcccatggacagaggagcctggcgggcttgggctacctccctgctcaggttaccacggaacttcgggtggagttccctgccctgtacaggatgtcctcattagctatctatcttacacatagtgtcaacagagtgcatgggtcaatcccaagtgcagaggattttaacgctcctctgcctctctgccctgggtttcccagttacccactttcgggggtgttttcatctctccccgtctgctccctgttcggcagctgctgggtttaggaccgaggaagctggtgtggctggtggggagaggacgttgctagtgtaacctggcagggctgcacgctgctggcgttgaagtgcagtgaaaacgagaggcgggggggaagtttccacggcggcggcaggacaaggtaacctagctggtggctttgatgcgggatgcccttggggagctgcttgatctgaatcagactgagagccgggcaaggacacagtttctcctctctcagaccccgggagttctccagcctacctttttccggctccccacgagcatttccaaattgaa

SEQ ID NO: 24838 - DNA, 1475 bp, Bovine  19866880473662
  misc_feature (1)..(1): n is a, c, g, or t
ntaaattaatgaagagcaacgggacttcccctggcggtccaggggttaagactctgcctcccaaggcacagggtacaggttccatccccagtcggggagctaggatcccacgtacccatggctaaaaacccacagcatgaagcagaagcaacattgtgacaaattcaatagactttaaaaaatggtccacatcccaaaaagaaaaaaaaaaaaagaacaaagggagagaacttgctgaaattcctactctgctctcttccgggtggttgcgagagttgattaaaatgacaatgtttatttttgcggttgtttctggcatctaaagtgtgacgattaataggttctcggcttctagaagcagcgagcagacttatctttaactgcgctgtgcatatgtacaaataagtgttgctttttctggtatgcgtgtgtgtgtgtgtacctgggcccatgcttcctggctggcatatgtatttatgcacaaatatgtgcaggactataaataaaaaccacaaatgaatgccttagagggaagcatgagggctgccctttctgcttgctgccgtcagcgaggcaggcgcctctgcttaggcagtggagtcaggaagagcagatgcgggaggggctggtggaggctgctggggctctgggggcttctgttggcccagtgggtgagtcttcctggtgctgactttaaagatgaaccctggttttgaggctccaaagtcatacagtatggcctcaaagacagactctggtaatcctccacaggtcttcctacggacagcgtttgtctgggtctaagaccatgtgaagacttccgggaaggtagactgggagggaccccttgtaagcagaaacagtaaggaatggaggggtctaggccttcgcagtccagtggttacgactctgtgcttccaacgcagggggcatgggttcgacccctgatctgggaactaacatcacacatgctgtggggtgccgcttggagaattccatggacagaggagcccggcgggctgcagtccactgggttggcaaaaagtcagacaggactgatcgactaactaacactttcacttttccttttgtgtgtgtgtgtgtgtgtgtgtgtgtgtgtgtgtgtgtataactgactcgctttgctgtacacctgaaattaacacaacattgtaaatcagctatactacaataaaagttaattaaaaacaaaaacagtaaatcaactctactccaataaattttttttaatttagcatagaaaaaataaaaaaagcaaatcttaaatgtacagctcagtgaatttttctgtatacctccatggaaccaccattcgagtcaagaaatggaatatttccagccttctggaaggtaccgccttgtcacctctcagtcagtaatgctccctccctccttctcttagccattctatggttaatcgtactgttcaggtggcaaaaggcaaggcttacagt

SEQ ID NO: 24839 - DNA, 1459 bp, Bovine  19866880487489
  misc_feature (1)..(1): n is a, c, g, or t
natacatgagtatgtatatcacatacatacgtgtaaacaaggacaagagaagagctttggtaattttattgcatacgattctgtttactcctatgaacttcatgctctgagcactgtctcctgtcagtacagaattttttataaacagttttaagggtttggtggtaaagcacttcgtgggcacagcataatgtttctctcaggattatacaagaaggctgttttcaatttttcgctattataaacaagctacaatgagcatccttgtcccaagcctgtagaatttgtgaggatgaaaagggatgatccatgtaaagtttcaaatataagagtgataaacattcaaaacgttatcctttccaactctctggtttcacctacttttctccttctctaattttaatgtattttccccctaagcagtgacatttgattttcttgggcttcagaatcactgcagatgatgactgcagtcatgaaattaaaagacacgtgctccttggaagaaaaactgtgacaaacgtcgtgtgcgtacttgctaacttgctttggttatgtctgactctttgcaactcgatggactgtaacccaccaggctcctctgcccgtgggattccccaggcaagaatactggagtgggttgccatgccctcttccaggggatcttcctgacccagggactgaacccacatcttctgtgactcttgcattgcaggttgattctttaccatttagccattaggggagcccaatattcatgtatgcacacatatatctgaaagtcaacaatattctaaatggctaataggttcatgagtgatatttattttcttcttcacacttttcaaggtttcccccaatttttacaatgagcctaattactttatcaggtagtcaaaatatttcatggaaatagtttatttacaatatgcttttcatgcatatctctgaacacctattcttccccattataatgctgtcatcagtgggattcagcagttcacgtagagattttttgctcagttatcccaccctcgtgagccaatctccttgagtctgtgcggtgttccagatctagatgtgactttccattcatctttgcagctttggccacctccctgcccaaagctctggccctggggccaagtccctccgtctctttccagcccaccattgccagctctggccctggggccgagtccctctgtctctttccagccaaccattgctagcctccttcctgcatctttacctggtgctgctgagttcttagactgctcatggccaagccaggataaaacaacagcctctggcgtccttctggccagtttgtagctacgaggaggagcagcagccgctggcggaaaacatgtcaaatagccctggctcctatgggaatcacagaggtaagcgttctcaccccttttagccacctttcacatttgattatttttttcga

SEQ ID NO: 24840 - DNA, 1106 bp, Bovine  19866880516540
  misc_feature (1)..(1): n is a, c, g, or t
nctgaaggtgggcggaagttgtgtgtgcagatggctctctttctgactccatgtctcagaagtgttgacacctaaaggcacagctttgagaaatgctctgtttagaaagggttggcaggtggcctagactgtgttcccatcagctagaatgtcttagaaaagtcgatcagattgaaattctggccttcccctttctgtggaccctcatcccctcactcccctgcctcccatttatgctgggggcatgactcactttttctctgtgaccccttgacaatttagatttacatctttaacattcttttctttttaaggtccaatgtaaggcatttgcaggaatcaatatgggtccaatgcctaaaaaaaaaaaatcctaaattatagtagtagaggtaaacagttgtatgggacttccctggtggctcagacagtaaagactctgtccacaaagtgggagacctgggttcaatccctgggtcaggaagatcccctagagaaggaaaggctacccactccagtatccttgcctggaaaatcccggggactgcaaataataaaacttttatagcagtggtttcaaaatgcaagacatttaattgcctcacatggaagtctggaggatagtcgtgcagggctaattcagtgctgaataatgtccccaaattcatgctcccttctacctttctacactgccctagcttaatttgttggcctttaacccccatggatattgtcacgtggtcacaaaacagcttctgcagctccaggcattatatctgcattcaaggcaagaggaacaaagaaattaatagtactagctgtatctgtcccttctatcaggacaacaaaagccaatcttaaaatatagatcagagctgacaattattttcagggaaggccaatgcaatctaaggttagttccaaattctgggttcattcatgttgctggaactttttctctcctcccttccattcgtgtagagggaaccctaggctctgggtcggggctaagttttcctcctttccgctttgttgtcgatcagttgctcagtcatgtccaactctttgccacaccatggaccgcagtacaccaggcttttcctgtc

SEQ ID NO: 24841 - DNA, 884 bp, Bovine  19866880528863
  misc_feature (1)..(1): n is a, c, g, or t
ntctcccgcattgcaggcggattcttcaccagttgagccacaggggaagcccaagaatactggagtgggtagcctatctgttccccagcagatcttccgacccaggaattgaactgggctctcctgcttgtaggcagattctttaccaactgagctatcaaggaagcccagaagtagaagttggtttaaaccaacaaatatttatgtgctgagcaccagagtcacttttcgctggggattctggacaagtgacagctgtgtccatcttagccttgatgcctaaataagacagctcatggtgccctggtaatggcatgtccccgggggtctaggtgtgtgctgtgctcagccccagggagctcctgaagccagagttgaatccagtcctctccttgacttttgagaggacccagcacaggatgcagagctctgcagatacctcagcgccctgcggagccacactgagcaaagaggctcccctctaagcctgtaggctcctcgctgtctgaccccaaccatctaccctcgattcaaattacaagtaggattggaagccaagagccagccaaatgcatcatggttcccgctaaggagataaaccaagctgccagccagcagggcttggctacaaaagcccatgaagctgcaaacttatcccgagaaggtgatttgggggggtttgtttctacatgcagcctctctccctgcagatgctacgtgtttcttcaagtgcttttatacgcgtagatgagcgctgttgttgggcgatgtcttctgtgaagctgtaagttgcatgcaactggctaatctcactggcttcatttaagataagggcaccaccattgggtttgggcttcattaagtttaactagcctggttctctc

SEQ ID NO: 24842 - DNA, 1386 bp, Bovine  19866880554024
  misc_feature (1)..(1): n is a, c, g, or t
nccgatgctcagggcccctgaccctggggctaacttcccgcccacttctcgtgactcatacctttcatcacgtctcagaagagaggcgcctgtcacctccttctccctgaggctggaagggccttgggcagaatctgagctggaacccagagcagccggcaccaggaaccacccctgagcaattcatgaagctgggcgctctgcttccagccgagtcctggacctttcctgcttcccagccccgttccgcccttcctgctcgaagccttccaaagaggaaggaagcctttctcgcttcttttgcctctgtcctctttgagacatgattctgaaggacgctgaggattctttgcttcggagggaagaggtctgtgtttttcgctggcagtgtgcagcacgaacgggcaggctcagcgctggccttgaaatgcagaccaccggcgtctcgcctccctccgcgggggctgacccttttcctgcgaggcttccggagagggtcttcgctcaaaacccaaccagagcccttgccaatgtgcttgggggaggaaagcttacttgacatcagccttccagtgcattcctgtaattacagctcaatgctaaagcgctaaatggttattattatgaagccagggtgtttgctgccaaggcgataggaaagacaccaacacgaggtttagggaaatcaagggtttttactggatttgagactaaggaggggaggcgagaacaagagatggagacctttagtcatgtatgcaaaggcgccttagactggtgacagcagagatgtagaatgtacaaatacaggttcaggtacccattttcaaggattctggaatatataggcagcttcaatgttgaaatgtatgcttccacaaactcttcgtggaattttcacccaaagacgtctagtgaaatctgggtcgctcctccccaaaaggagctcttggcctgtggtcagatcattctcgattccagcccacactttccctgttggcgcctgcatcgctgcctggcgtttccaaccctgggaatgttgaacccaggacaagggctagcacacaggaatgggagacgggggacagcgtggagaacggagaagggggcgtgggaaggatggggaaaggactgggagctgaaatcaagctcggagggaagctgaggccgaaccagttgaggttgtttttcctaagagggaccatccgagcagcaggagggagatgtgttctaaccgccgagatgcctggagtttctgtttgcgccgctgctccccttagcttcctgtgagcggattcatctcatggtggggagcaagcaggcgctgatgagctaatgttcccaggaactcggaaggagggcccgcctttcctgccagggcagcgt

SEQ ID NO: 24843 - DNA, 2744 bp, Bovine  19866880567597
  misc_feature (1)..(1): n is a, c, g, or t
ntaaagaatctgcctgcagtgcaggggacccaggctcaatccctgggttgggaagatccccttgagaagggaatggcaacccacaccagtattcttgcctggagaattccatggacagaggatcctggcgggctacagtccctgaggttgcaaagagtcaggcatgactgagcgactaacgctttcaatggagacgcacacatagagaacagacttacggacgcagtgggcggcggcgggtagggagaaagtgggatgaatgagagggcagcttggaaacatggaaaatagatagccagtgggaatttgctctgtgactcagggaactcaaattggggctctgtgacaacctagaggggtgggatgggatgggaggtgggagggaggctcacgagggaggggacatatgtatgtatacctatgactgatctgtgatctatggcagaagccagcacaatgttataatgatccttcaattaaaaataaattaacgaaaagaaaaaaaacaggagtgagttagtgaacgctgactcccaccccagctggggttggtgcccggccctcctgctgcagaagcccatgatctttcctagccagtccccggagggggagcaccgtttatttttgtattgtgtgtattttgtctggtcaactgattccttgtttcactgagaaacttatattcgtgtgtgtgctgtgctgagtcgctcagtggtgtccgactctttgtgaccccgtggactgtagcccgccaggctcctctgtccatggaattctccaggcaagaatactggagtgggttgccatgccctccgccaggggatcttccctgcccagggatcaaacccaggtctcctgcattgcagacagattctttaccgtctgagcccccagagaagcccccacttacatcagtagtcagctctagtttatgtgctggataattttttaaaagagcttttttgaaaagctttttgatctttggagatctacagatttatttccatatgaactggttattttgtataaagtacagtcttaaaatagaaaaaaaaaattatctttactccccaagggtcagtagacattggctgggagcacggtagtctgaattattagaaggaaggactctgaggaaaggggaagcaactgtagaaccccactgtttcagcttttaaaaggagagttgccttgaaagctttgtgtttcaaaagtgaccaacggtggatgtttcagagcctcttgaagagtgcttgtcccaataagctgataccaggtcccctgccctgtgtcttaaaggtactggattgcagctttgcttgaggcgccctggaggaccctggttcattccatctctcatagcactgcttccagcatccccagcccttaatctctccgcccatcatttatagatctcacctcctacccaaatagaagtagaggagcgaatgtttaagacggttcgagaagcctctgtggatactccctggtcatcgaggaatatcccgggtatgttcccatctcaaaaaaataccccagaattcatcctgcaatcttttgttctcacaggctgagcatttttaggcctgcggaggggagtttattttggtatctaggactccttctccctcttgatggaaaggcaagacgtgtaaaataagacatatatgtgggagggtggatagagcatttgcctttgaaattgggttatttacagtgagacaggaagataaatgtaaagactgtgccagcacaggctgtaggccaattgtctgggacagccggcctcgcaggcgtctgtagttacagtattaactgaggacaggaaggacttcccgctggctcctcgggcacactcagagcctgaaccgcagctcccaggcgtgtgtaggcagggcagggtacgtgtccatcagattccagctgggtgcccaggcccttgtgcccgcattcctgtccagtgaattcctaaaacccaactcagtggacgtgagtttgagtaaactccgggagttggtgatggacagggaggcctggcgtactgcagtccatggggttgcaaagagttggacacgactgagcgactgaactgaactgaaggttgtaccacgagacctcagcatgtgctcaggcccctgtgaggctgtttccagacttcttgtaggtttctggtcttttgccccatcatgacccctgggtgatgtgacaagttagagaagatgaatatttagcgatctgaaggacgagctttgaccagtccgaagaaacttgtttttgagcatagaagagcatttctagtcaagctaatatattgttatagtgtatataactgtcagccaattcccaggtggctcagtggcagagaacccacctgccaatgcaggagacgtgggttcaatccctgggtctggaagatcccctggagaaggaaatggcagcccaatccggtgttctcacctggagaattctagggacagaggagcctggcgagctacagtccttggggttgcaaagggtcggacttgactgagtacacacgtacagtgaacatctgttgccccttgggatcccagtctgacccgggcgcctcttgtctctgaatgtccgtctcccatccctttgcaggccagcctgctgccttttagaagttgttgctccctttgctgtgctctgtagttctctggatccactgtcttgtcccggtcacctttccctactgtctgagctgcagactatgtacgtcg

SEQ ID NO: 24844 - DNA, 2768 bp, Bovine  19866880577611
  misc_feature (1)..(1): n is a, c, g, or t
nggagtggatgactgttggaactgggtgatgggtacgtggggtttgtgacgcccttctatttacctgagtgtaggttcaaaacccttcacgagaaaaggtaaacaaaaccaacctgcaaagagaaaagagtaaagaatgaacctaccagcgttgggacttacacaggcatcgtaaggcggccgatcagacccagccgtgcttgtaaatggtactggctttgctttttttttagtccagacagcacaaaggtgagtcagtgcctgcccatgctggacagtgagccactcgtcattttcggttaggatccagaccagcagaccgtcactcacaaagtatgtctgctatagtacagagttacgtcacacagtagagaccagggggactctaaaggaagttgctaaactcgggatatactgtaatcaaggctgtgaaactgaaaagtgaaaaagtcgctcagtcgtgtctgactctttgcgaccccatagacaatgcagtccatggaattctccaggccagaacactggagtgggtagcctttcccttctccaggggatctttccaacccagggatcgaacccaggtctcccgcattgcaggcagattctttaccagctgagccacaagggaagcccaatcaaggatgcagggatgatttttaaaaagacatcacacagagaacaggctcgtggctgccaagggcaagggggcgtcagggagggatgcagtgagagtttgggcttagcagatgcaaactatgatatctagagcaaataaacaaagttctactgtacggagcagagaaccatacgaaataccctgtgatgagctacagtggaaaagaagatgaggaagaagcatcttattcttgatccaggaagatcccacatgaagcagagcaacaaagcctgtgtgccccaactactgagcctgtgctctagagtcggggagctgcagctacagaagccatgccctgcaagtgaagagtgtccccccaccccactgcccctaggaaaaaagcccctgaaagcaacgaagacccagcacagccaaaaacaaaataaattaaaaaaaaaaattttttttttaaaagacgtcacaaagacattaagtagaaggaagggcaggtcggctagctagaacagctgacaaaaatcccttttcatcacctggtcctctcaggtaaagcagcgaaggagcctgaaggacttcgctattatttctgtagagatttttgagaaagcagcggctccattcctaactggcacattggaatcctaacgcactaatggaatttgccgcatctttgctgttactgttcgtagcggatcgaggcgaccattagagagggaataccaaaaatcaccagttcaatactttggccacctgatgcgaagagctgactcatttgaaaagacccctgatgctgggaaagattgagggcaggaggagaaggggatgacagagaatgagatggttggatggcatcaccaactcaatggacatgagtttgagtgaactccgggagttggtgatggacagggaggcctggcgtgctgcagttcatggggtcgcaaagagtcggacacgaaatgagcaactgaactgaactgatacctgaatcataacaccttgacatccgaatgcacaggtcgtagcttctctgctgattggcacaatgctgaccttcttctcgacttatttaagcatctgatatcctgagctggctcaagttccctctacatctgccaacaatatctgaacgaagaatggtattgacctaagcatgaggcatggtcaaggagcaggacatcgagggttcatgggtcatatctccaggggccagacagctgggatcagcctccctgacctcctccctctagaggagggagaccatgaacgctgaactggcagtgggaggaacctgggtgtagggggtggtggccgccctgggcagagaagggagtgttttcgggggagccttgtaccctacttatttgctgcacttttccaaaccacaaagccctgctaggagctcccctgccaaggctgattgcaatctgccacgctatctgcattgtcatcaatcgtgcagacacgaggttggtgctgtgaattccaagggtgctccgttggggaatcgtgccttttcccaaagccaggttgtctgggcatctaggtacttttctccatcagtgccggggttgtcaggtgcatctctgttaacttccctctctcctttccaactggccccaattctcctcagtcctaacctcaactcattactgcccggggcggggcgggggggcggggaggtggtttgcagaaactaacgcctgtggctggtaatttttatttgggccagcccaaacttaattctgttatttcactaacactttgcaggttattacactccatagttacactgacacacctgtgaagacttctgcagcgcccggagtttcattttcactttccgtatcagaatcaatcactaaggtttcttgtctttttgttggtctcatattcatgccgtctgaatcagaactatactctgaagatctgtcaccatctgagacactagtacatatgtcactgggaccatcgaagaaagtagctgcacaaaatttaccgaaaaattcttcactcagaatttctcgatgtgtcattttttttaattttaccgtattacacttgcgcttatacatagggttggaacaaaaaccaaacagagcaaaatgtgaatgataacgacaatcgttaagttgta

SEQ ID NO: 24845 - DNA, 1880 bp, Bovine  19866880581434
  misc_feature (1)..(1): n is a, c, g, or t
nccaccagggaagcctcattagtgagactgcctactcttttttttatgtgaaatctaggaaacccagcgtttattttcctcttgcagcacacttcaattcgcttgtcacatttccagtgcttctgtgctggacagtgttgccctagagaggaagtttaagtgattaaatttggggggagggaactattcatcgtagacagaaataaaaaaaatgagcttaaggacttaggtggacagatttcatcagcaaatgcccttgactggctgtcagcgcagtgcttccatctccccagacagggcctgttcgcaggaatccattggctgctgggctcccctcccctgacccctttgtcgtccactctattcgcttttgtttcaaccgaatgagcacacaaaaaagcctgcattccgccgggcagtcttattcaaacgtggcatggctgcgttttctcaattaatcaggagcctgcccccccacccccctgcccctttctcctccacgtttttctcttctcggcatcttaatcagggtccagctggactccagcttccaggagaatttcgagggcccgacagacacttgcccaggtaaataaaaaccagcttgggtccctttttcctcctgcatgaataagatgtatcagaagacttttccttagaagagatgaagggagagagaagcagtcatgctggtgaacgacgtagggctgaaagcagaactttggagagacaggctgtgtcctttgggtgagacggggcagggagagggagtccaggagggaggggatatgtgcgtacacctggctgatccccttggtgatacagtggaaacaacgcagcgttgtaaagcagctgtactccagaaaacaaacccaaaagagcaaagcaaaattttaaacacggtaagggcttcccaggtggtgctggtggtagagaacccgcctgccagtgcaggagacataagagacgcaggttcgatccctgggtctgggaagatcccctggaggagggcatggcaagccactcccaatattcttgcctggagaagcccacagacagagacctgaacagctacagaccatgggtcacgaagagtcagacacgacgtagccaccgagcatgctcgcgcgcgcacccaacatcctacaaggcacagggcagcgtccttccataaagagttacccagcctaacaggtcaggagcaccaaggttgagaaaccctgtgttggagcatctttcctttgaattttagagacttttcacctaaaaagaaccttcttttgacttacagaaggcactgggaggggttggctacacctgtgcatatatatgactgaattactaccgtgttgatccgttcacacctgctggggctttgtgggcagctagttgagaataagacctggatccaggaggtgtctgggccggggacaagccaggtggggatgagagctgagcggccacacaaactaaatgtcacaacttttctagttttctaagagagtgggtgcttccctgggcaaggtcccagttctttctcaccaaagccttctgctctatgagcaaaaccccagtcaagtccagctggggatccattagctgcatctctgaaggtagaataatggatcggcttttcctgacactgtaagtaggatgctttgcatagatcaggcaaaggtgagccctccaccttcccattgctcttagaagggccagaggcagccagaaacgtttcatggcagtccctgtagggaaagagaacgagggaaaaaaggagaagaatgctcaacctactggtctgtcaaacccgtggtatgacttgaccttcaggtctacctcatgttggctggactctttttgcctggccacctggtctcaat

SEQ ID NO: 24846 - DNA, 5243 bp, Bovine  19866880589013
  misc_feature (1)..(1): n is a, c, g, or t
naacgagtaggagaaaggagaaagaaagaaatctttctaaataggaaaaagtataggaattcagagtcttcccccatggctcagtgggtaaagaatccacctgccacataggagacatgggagaaaaactgatcaaatttcaaaaaaaatgttgtttcatcatcattatcattagaattttagttagaaataaatacccaaaagataaaaaagaagaaaatagataaaattttaaaagtaatttttctgaagatgtgtgaaggaatgataatagagatcagaaaatattcagcactaaatgtaaaactctaaagcaacaatacatgaaagtactataattatacccttgaaacactagtggaaaataagttgtataaacataaaaataaatagctatataagtgtaaagcaagaagtcaataaaataataaaaaatgtaatacaaaatattctcaaatagtagctttttgaaaagaaaaactaatgaattagagaaaccactgacaagactgatcaaaaaaaccaaataaattaaaataagaaatattaagaattaaaaaggaaaatacagtagtgattttcataatatacataaaaagaatgtattatgaataacagtttaagcttggaaagtttagagaaaatagataatatactagaaaaatatattttaccaaatttaactcaataagaaatagaaaacattaactaattgtaaacattaacagtattgaatcatatagttaaaattttaatcccagagaagaaggaaggaaagaagaaagggggaattagagagttaggggaaaaaagaaagaaggaaagaaaaagaagaaaggagtcaaagtaaataaagctccaggaattgatggggaaataaataatacttacatataaattgttctagggatctgaattagagcaaatgctttcaaatcaacgtgtggaccagtacaacactgtgttgtagtaatatagtccataaagattctatggactggtgattatagtaataattgtagtaatgtagtccataaagattctatggactggtgattatagtaataattgtagtaatgtagtccataaagattctatgcactggtgattatagtaataattgtagtaatgtagtccataaagattctatggactggtgattatagtaataattgtagtaagtgtagtccataaagattctatggactggtgattatagtaataattgtagtaatgtagtccataaagattctatggactggtgattatagtaataattgtagtaatgtagtccataaagattctatggactggtgattatagtaataattgtagtaatgtagtccataaagatgctatggactggtgattatagtaataattgttgtaatgtagtccataaagattctatggactggtgattatagtaataattgtagtaatgtagtccataaagatgctatggagtggtgattatagtaataattgtagcagtgtagtccataaggtttttactgagagtttccctggtggctcagatggtaaagcgtctgcctgcaatgcaggagacctgggttcgatccctgggtcaagaagatcccctgcagaaggaaatggcaacccactccagtattcttgcctggaaaactgcacagacagaggaacctggtaggctacagtccatgggggttgcaaagagtcagacaggactgaagtgactttgaacgcgtgtaccactatgtataaaataaacagcaaggatttactgtatagcacaggacaactatattcagtatcttttaggaagagaagtggaaaatatatttgtataactgaatcagtttgctatatacctgaaactaacaccatattgtgaatcaactatacttaagtaacacaaacgcccagtgaagtaaatctttatgtgctgacctggaagcttcttcaagacattctgttaagtaacaaggtccaaagcagtatgataacttcagtaatgatcataacgatcagactgggtattaggaataaacgtgggggaaactcgtaaaaatttaaaaaataaaagaggtgatggtggaactgagcttcgaatttttcaactaagggagctttttccctcgcctcgtttgctctgcctgctgggccctccaccccagctcccagcccctgctggtcacaggctgtgctgtgcggtttgaggatcccgggggttgggggcggtgggggctgggagtgaaggcagcctgggagcagcagcctcggctccagagtcagccccccgggatgagctcggaggtgagcctgaggaatggacggaagccgcgggcccacgggtgacctggctgggagcacgggttatgaatcacccccagcctttgctcctggctctggaggagtggctcacacattcccaagggagccagtgtctgggagacgtgacgtcgtccctgggagaggagtttcaaccacattggcctcacagggactggttcccatgggtaacacccagctcctcagcctgaaaaatcccaggctaaggagatggggctctgactttcttgtgtgtgcgtatgtgtggtgtgtgcgtgcgtgtgtgtgtttgcattttaaaatacctgtctcacctattatgggacctcatcattagctactgacgacccgagttcaatccctggcttggggaagatcccctgaaggagagcatgacagcccactccagtgttcttgcctggagaaccccatggactgcagctcaccaggctcctctgtccacggggttgcaaagagtcagacacgactgagtgaacagccgctgtgtccgtggaggctggtgaggacccccatcttaaggatcacaaggaggactcggctctgacagagagcccgcctgtctgtagccgtcccaacatttttctcaaagactctccctccgcaaaatcctgctccaaacccatgatttgcaagaaacattcccgatttgaccatggtgtctcctcattggcccacatgctcgaatcgtgtggttagagggagctggcaaactttaattgatttcagaaaggaccgaccagccctagacagctgcttatttctcccagcaacagccttagagccctggcaccttctagataagtcagtccctcaggccttcttctgcatggatgcttcgtaagagaagaagcagacatcacagcagcttctctttccaccaccttctgtctctctcttctgaaaaaacatttatttggctgagccaggtcttagttgcagcatgtgggatctagttccctgaccaggaaccgaaccctggtcctcagcattaggagcacggaccaccagggaagtcccatccactgccttttctcttacaaacctgactcccaaacaatcagataggagatagcccttctcttcacactggtaccggtcattgctgaattaacactgttttatactttcataaaatctttatttctgctcacctgtgataccttcctgttgaaaagcctgtagctttccccaaccttccagggtaacaagaactggaaacctttaaggtagagcatctcttgaggatatgtacatactaagttgctctagtcgtgtccaactctgcgacgccatggactgtagcccaccaggctcctctgtccatgggactttctaggcaagaatactggaatgggtgaccatgcccttctccaggggatcttcctgacccagggattaaatccacatctcttatatcccctgcttgacaagctggttctttaccgctagtgccacctggaaagggaaccaagaagagggggaattcagtgcatgcctccttacgaatccagtgaagacacagcgcacagtgctggggtttgcgtgggggtcaaccacgtggcgtgtgaactgggggcaagacttggctggggaagccaactcatccatgatgcttgcgggctcactggtttgcaggcctcactagtacacactacgtatttaaagcaaagcaaagcttccagaaagcaataacttgagcttacaacttcatatttagaaactccttgagtccagccgtttcctgtgtcatgtgctggtagcccacatgggcgcctatggtggtgcaccccagcatgtgtgcatgtgtgtgtgtgtgtctctcagtcgtgtctgactctttgctatcttgtggactgtagcccaccagactcctctgtccatggaattctctagcaagaatactgaagtggggaaccattcccttctcctggggatcttcctcacccagggattgaacctgggtctcctgcactgcaggcagattctttactgtctgagccaccagggaagcccccatcccagccgagttggtaggaatttccaggcaacacccctaaccccccaccatctcctcttgttcttgatgagcaggtgtgccttgggggcctgcagttcctcagaagcagcgagagggtgtttgtccctgggatgctgagctcacacctaggggcagggatgtgagttgtttgtctcgccccctggagggcagaggggcagagaagggggcccccggtgggcacagccatcacggaaacgaccagcgctcacacgccgtggctgtccttggcttgtggaacattccctgaagcactggatttcttccccctcgtctcagactttgttttctgtttcctttctgccacgctccttctgaaaacgagagtgtcgtggagccaggctccccgtggggggcagtttgcagagcgtctggagtgtgggaagcagagggccgggtttcctttcaggccgtggctcagctgttttctagtttatcctgtcttgggtaccaaaccctggccaagtctctcattttccaagcttgctgctttctgaactgctgtcagggattaaggcttgaatacaggtgggtttcttccccctccggtccctgtcacctggacattaccatggcgataatcctcccctgaaacaaaaataaaaggcagaaccggttggacagaaagtgcggccacaaacctccattgagactgagccatccggagcctgggggctgccaggagctccttcaggacgggtcctgaggagcaggaggcagaggctggctggcacaggggaagggtcagccggccatcagactgccctggagggaagagcttcagctcggttccttcgtgggtttggtgggggtacgttgctctgcagcccggcagtcctgtctggcctcccca

SEQ ID NO: 24847 - DNA, 2227 bp, Bovine  19866880668698
  misc_feature (1)..(1): n is a, c, g, or t
nccctggccagggaactagattcctcatgccacaactaaagttcccgagtgctgcaatgaagtcccagcacagccaaataagtcaaataaataaatattaaaaaaaaaaaaaagaatttggaggaagttaggcaccaggagaaaataaagtttccaacttaaacttggactttttcccccctttgaaagaagagaaaatgcctcacccaactggttaataaaattagaattccagatctttccgggtgccttgatagatccctttagaggaaactgctcccctgaagccaacagtgctcagaaattacaaccggtttcagcaattaagagaagtaaaacattaaaaagcatgaggcaaagtacatttgcatgctaatggccccttctgtagggctgggaagctgtgttttacaacaaagcagataactttcccactagagcaatattaacccctgggttctcactccagcttcttggacccactcgtaacgtctgggattcttctggccccgggtgggcaagatatgggttaactctgcatatcaatccatctgctatggcctaattctctctggcttgggtaggagaagaaagagaaagagaattagaagttctgaatgtgtttgggaggagcgggaggaagatagaaagatgcaccaggggtgggaaaaagcgcttccatagaaagcacgctggaacggcaggcgggacgcggacttaagtccagctcccctccccctggcgatgtgacgtcagacaccacggtactgaaatcctcggggactcagtttgttcatggagtggggtggaatgaggattggatgaggtaatgacggtgactctctgccgctggtgacgatcgtggttatggtaaggggctggcaggtggtatttgtggtgtttcaggaggaacgttacaaaggccttttgggtacaaccctgtgaggaagtgctgtggctttactgaagatgaaaagcagtccttgctgctccatacagagtgtatgaaccttagaataagggcagattatggataaagactccttttctttctttccagggtggaaaccacctcggtctctgattccatcaaagacggcagccctcaagactacaccatccgcctccaggaatcaggccctcaagactacaccacccgcctccaggaatcaggccctcaagactacaccatccgcctccaggaatcaggccctcaagactacaccatccgcctccaggaatcaggccctcaagactacaccatccgcctccaggaatcaggccctcaagactacaccatccgcctccaggaatcaggccctcaagactataccatccgcctccaggaatcaggccctcaagactacaccatccgcctccaggaatcaggagaatcgggatggtggagttcaaggatgtgcgctcatctcctgcgagaacaccaaaatcgcaactaactgctgaacaactaccgacaggaggctgttggaacgcacccagaaaagataccccacgtcaaggacaaaggaaaagccgcagtgagatggtaggaggggtgcaatcgtgttaaaatcaaaccctgtgcccaccgagactctgagagggcacaaacgagaccttgtgtgcaccaggaccaagggaaaggagcagtgaccaccgcccccccaaaaaaaaagacggagtcagacctgcctgtgagtgtttgacggtctcctgcggaggcgtgggtgagcagtggcccgccgtggggaccattggcgcagcaactcctattagaagacgtgatagcacctatggcttgggtttgggagctggatggatctggatttgagatccacttgctttgaaactgcccggctgtgttcctttgaataaacatcttaacctctccatgccccagtttcccactgtaatgaggatgataaaaatctcactcatttttatgtggaggttctgccagtcagcactcaatgtgcccattattaagggtcagttcttgcttctcttttaaaaatacatttttcccccttgcctttccccatgacacaatgaggaagcaatgcccaaagggtgtcctctcttagattccaagctaattcattgaaatcaagttaaaaaaaaaaaaaaagaggaaagagcagtttctattcacccaccagcatcctcgtcactcccactgctgatgggaaagagaggccgccggaaggaagcgaaagttcatcaagga

SEQ ID NO: 24848 - DNA, 1642 bp, Bovine  19866880837394
  misc_feature (1)..(1): n is a, c, g, or t
nagtacttgggaagcttcagatgtgtcagtatcagtcaactaatggaagccatgtgtttgcagaatgggaaagaaaaaacctggcatcttaaggatctagacatgtctcactgtaaatgggtctaaagtagagacttttttgaggccttttctcggtagatctttggccaccctgctgtttaacagttgataatgctattcaaataaccctgctccaaaacaggaatggccctttctccaagggccaaggaagcagccgagatttattgagtaccggttttattgttcagtcgctaagttgtgtctgactctctgcaattccatggattgcagtactccaggcttccctgtccttcactatattgagtttgctcaaactcatatccattggggttggtgatgccatccagcaatgtcatcttctgttatccccttctcctgccttcaatctttcccagcattcgtggtcttttccattgagtcagttctttgcatcacgtgaccaaggtattggcgcttcagcttcagcctcagtccttccagtgaatattcaatgatttcctttaggatcgactgatctgctctccttgctgtccaggtaatctctgatcatcattatagtaagaaattgcagtgcgtattgggtcctgtgcaatttcttactataatgatgatcacacagattgcatctgctgttacgaatttagtgcatatacctaataagagctctgtcttcactggatttatttaatcctgaccctaggtggggaggtaggtgttatcatcttcatttatggaaaggacacacttctaattgagtaacatttctgctggtggagaagaagtgcaggggaagaatcagtacagttttatatgctccctcatgggacagcagattggaaagatggaggtgatctcccctggtggttgtgagttcgatccctgctctgggaagatcccacaggcccggggcagctatgtctgcgccccgcagctactgaagccctctcgccctggagcccatgctccacaataggcccctgcagtgagaaagccacacactcgaggaagccctctcacagcaatgaagacccagcacagccagaaataagtaaatatatacagaaataaaatttttcaaagaaattatgattctaattttatagctcagagagctgagatttcgagaattggattgaattttccaaggacatgtggctggttaaatgacagtggagggatcttagcacgacatttaaaatagtctggttggtcttctgtgctttaccacagggcagtttctgtgatgaggaggatttgatgtcctgatagacagatgagacacacacttcatgaacccctgtaacagcatagacataaggagaaggaagggcttcctgggtgtgtagaggtaaagaactgcctgccaatgcaggagattcaggagatgtggatttgatacctgcgtcggggaagacccccccagagaaggaaatggcaacccactccagtattcttacctggaaaattccaagggacagagggagccctggcaggctgtacaggtccatggggtcacgaagagttgattgcaaatgagcaccaacacgcgacgatagggaagcagtttggaaagaattca

SEQ ID NO: 24849 - DNA, 1398 bp, Bovine  19866880852169
  misc_feature (1)..(1): n is a, c, g, or t
ncgactctaagctggtagggaattgactgcaacataaagcatatttagtggatctcaacattaaacacaagtacctcttcacaccgggctttcctgggggctcggtggtaaaaaaaaatctgcctgccaaagtaggaggtgcgtgttccatctctggtctgggaagatcccttaagaaggaaatggcaacccactccagtattcctgcctggggaatcccatggacacaggggcctggtgggctatagtccatggtgtcacagtccatgattaggaaccaaacaacaataacaacctctttacacactctgtgctcaggaattctgttcaggtagaaaatcaagagtagcctttagatctctacttataacaatgaggtgtctcccttggtctttggtttctacgtggttcaaccaatatgtgctcagaaatgagaggtggttgtgactgacaccctttcccttctcccgtgtctctgggtttctccaagggttcttttgtcttaggagacgggacaggttgagctggttgtctccagcttcttgaaagaattcccagatcagagtgaatgtccctgccaggtggttggaacaggaagaatttctagagcagccttcatgttgggtctagttcccaccactaattaaaatttgtaggtaatgggttactaatttgttggttccttttatcatgttattgccttctcaggactcagaggatgtgtgtgtgtgtgtgtgtgtgtgtgttgctcagtcgtgtctgactctttgcgaccccatggacggtagcccgacaggcttctctgtccatgagattctctagacaagtatactgcagtggattgccatttcctcctccaggggatcttcctgacccagcaatcaaacctggatctcctgcaatgcaagcagatttttactgtctaagccaccagggatgccgatgttattgtataaataaaaagtaagtaaatgtcgctcagtcgtttccgactctttgcgaccccatggactgtagcctaccaggttcctccgtccatgggattttccaggcaagaatactggagtgggttgtcatttccttctccaggagatcttcccaacccagggatcaaacccaggtctcccgcgttgtaggcagacgctttaccatctgagccaccagggaagtcagctctggtctaattggggagtaggagtctagcaatgatcttcagaatcatctaccttggttctctttctctgatccagtgtcctgggtggcagagttcaaaagggcctttcatcttgggtccctagacagtggaaatctgagctaaactgaactgagctatccttaaatttaagtggaagatagcaacacttcccttcccatagggaaattcataattcaatgcca

SEQ ID NO: 24850 - DNA, 2245 bp, Bovine  19866880866044
  misc_feature (1)..(1): n is a, c, g, or t
naacatagttatctgtctttggaacagaaatcaattatctatatgacaggtgtgtggaaatcatttattataacttcataccacatagctcagtggtaaagaatctgcctgtcaaagcaggagatgcaagagatgcaggttccatccctgggtcagggagatcccctggagaaggaaatggcaactcgttccaatatttttctttggaaaattccatggacagagaagcctggtgggctacacagtccatgggggtcatgaaagcatctgactcgactgagcatgcatgcatgcagttagtatctcaaccttccttcctccaaacttatccatccagcagcttgttccaaggtgacctgcttgagaaggtgtgagttcccccttaaagacgaagtaaaacggtagtgtgtgtccacggcagatgatggctttgttctgcagtgggacagctgatgacacttcattcctgaaagggacaactctcccaggagcttggagacacctcagcgtgggaggcagggagctctatttaggatggaagatcggaccaggcgatgacctccccacccagctgaggcttccagccagtgccaggcgtgaggatggaggtccggtcaccgggcagtcctgggcgcatggtctctccgcttttaaaatagcccagcaatccggccccggaacctgaaatgcgaaggctcggttaaacccagactctgcaattccctcttccccacaggccaaacaaggactaattttaaacaaaccaccatgaccgagcacgggggaaaagcccggttcgcgcagcgatttgagcggcgacgctgcacgccccacccggactgtttacttctacggaacctctcggggatggaacaccgggctggggcttgggacgtgtccatccttccctgaaattcccttttcaggttaagattaggaaatccttccccacaccggtccccaccgagccagaagctgctgccttcctcccttctggttgttttcattaggaactcacgtctggattcctataatagactagccaaaaaaacagtcctgctaaaaattgtctacataggtgttgaagtcatgggtttttatgtcagtgaaacagagaaacagagaaacagaagaaataggacattatatatacatgtgtatgtatttatgtatataaaatccatatttattattgattaatatataattaatatataatgtgtaaatatatgtgttgtaaatatatatatttgaatatatatgtattattatatgtattatattccttatttatgtttatatatttctagacatactttgaagaaggaaatgccaacccactccagtgttcttgcctggagaatcccagggacaggggaggctggtgggctgccgtctctggggtcgcacagagtcggacacgactgaagcgacttagcagcttagcaacagaccattcatgtttaaaataaccagtgatatgttagagattgagtcttcctttttatcttttttacctgcccattttttcttaatttctcatctctaattttcttttcttacatttttctgagctactttttttaagaaaaataactagcattttgagatataaatataaaccttttgattttcctaaaagaagcagctcacttttgcaatacaaaatacaacataacaatatttgtgcaagggctatgttaagattagaataccatcttctgaattgcaccaaagcatgagaaatttgacaggtcaatattcacatccagtttcttgccccctgaaaatgcaatttatttatttattcacatccaatttcttaccccctgaaaatgcaatttatttatttattcacatccagtttcttgccccctgaaaatgcaatttatttatttatttatttattaatttttaattactttttaagtattcctcattttattgttttcacaatggttgctctaggtactataatataaaaatgcaatttatcacattttattgatatcagcatttactacttccagtgaaatgtagaaatcttatttctaattaggttcctttaccttccacacttgcaaaaatagctgtcttaagaatttcctcaacagattttgggcaccacatcagatgaagctataattcttgtttcaactatcaaatatgatttgagaatcttggaaggtgtggagaaagggcaaccctctcacactgttcgtgggaatgtaaactggaacagcca

SEQ ID NO: 24851 - DNA, 1050 bp, Bovine  19866880913807
  misc_feature (1)..(1): n is a, c, g, or t
ngcatgtgcagtcttacctccctgaccaggtgttgacccttcccccccctgtggaggaagtcaaagtcttacccactggactgccatgagtcccgcaccaacagtcttgttttcagcaaaatgaggttttgcattctcacaagatgcaatggcttatacacctggttcatatgcggaagtctactggcctggcctgcatagtccgttgccgccgtgtgctggctttgcttgtgtccaatgggcctggatacagaagactctgtagcctgggtgatggtggtgaaacagagcagatatttctcttgttcctgacagtagttaaaatgtcaagagtcacatgggtttgaagcttctggtagtttaatttggggacaaatgtccttgatagttaaaggcagtgccaattgttttcttttttaaaaaatttaaatttatttatttttaattggaggataattgctttacaataatgtgttgatttctgctatattatcaacatgaatcagccacaggtagccagtagttttcagtgtttctaaagtgctagatccctcagctgtggttcctaaaccccaaaacaccgaagtctagtatagttccatgtgggcagatgatagaataaaaatcaatacattcattgtagattgaactgaaagcctttgatttgaaattcaaaagcactcattaaaagcatcattctggttatccttatttgcctagtgagaattacttcatgcattacacatggccagttatttagttttctttaaaatcaattgtgaaaaagaatatcctggtttatagtttgaacaaccttctttggaaatgtatcttgtattggccttttgtagtatttttttttctttgtaactgggggatctcatggtttaacattttatttccccccttaaaactagcttattattgctgatgaattggccttccaaattgttaagtcaaccttaccctctcttccttccagacatcagtcaaaatggattaaattttcccagtgaaaatttccagttacagttctgtatatccagtctt

SEQ ID NO: 24852 - DNA, 1236 bp, Bovine  19866880922488
  misc_feature (1)..(1): n is a, c, g, or t
ntctgggttccctccagcctataaacctcgtgtactaatgtcccgactcttgcaaactcgttgagaaataagctttaggaagcttccagatgttccgcttgcagggcggtatttctctgcctctgtctccaggggtccactcacgaggcccagcagcctgcctgcccaggtgaaatctgagggccaagaggcaccgcccgggggtgggcggggagacgccatttcccgcaggaccacactcaaccaccgtgttcatctgctccacccttgcaaagacacgacctcctacaccccgtgtgttcttgcaccaccccacgccccgtttctttcactctccccggtgagccctgcatccctggagtatgattcatgctgtgcgaacacctccgagcgacaacagagaagcaagtccgcgactcccaaacgagtaagctttgtcctctgtgagcatccaccgcacctctccctttttaaaactctcattggacagcccctgtaatggagcccgggacccaacaacacggggcggctcttccacgtgagatgctaagtcaacaccggcagagacgtcttaggagcctgaccggccagaagaacaagggaatggcgttcgtgacctgtcaaggcccccgcggtgctggtggcctctgatctctaggaagctaactgccaacgggcagccttgtacacacacagccacgcacacacccttccccacacgcacacccccgagggattctttgcacaaggtgacgcggtgtccctttgatgctcgccggacgtgttcccattgggcaaaaaccagacctcaataaaaccgggcattatcaagaggccgctggtgggcgattgcgcccgcctgttatctccgtggccctgggcggggcgctctgtggttctccacggaaaagcattaacttctaggtggatcaaagacccttccgaaccggccgacccggatctcttgtttatccacaggggattgttccccaagatggactttaagataactgggaccccagtcccagactcctctgtcctctgcttatctgtcacccagtatgtccctcgggggccgcctaacggccaatcacaagggccttctgctctcccacttttccaggtggcccatttaacaacagagtaggggactggccctgctgcaagctggggacctgggggcagagagacacctactttggggggcaatctctccataatcacaccagggagggg

SEQ ID NO: 24853 - DNA, 1157 bp, Bovine  19866880933512
  misc_feature (1)..(1): n is a, c, g, or t
ncagaggaaaacgctgagcacgcagagggcaggttcgactgccttgtgctggtaccccaaagctgctccagccaccttttgagaattgaaaatccgaaagcaagtactcagggctccttggactgctctccttggctcccgccctctctcctggctccagcctctccccggagctgggcagtggccgctcctggcctgggaggaggaacgtcctctgagtcagggctcagtgagtagctgttgcttcacccccagtccccgagggcttggagagccgacccgctttctccacaggaaactgtagagctggggccagtgcagcggactagtttgatgtgaattagccaaaaaacaacaacagcagcaacccacaagtccagactggacttgtttgaaaacaacccatactcccaaccagccctctctcgtctgggcagcactgtgcccagtgtctgcctttgtgtcaggggaggaagcagaggctggtcccccaaacctagacatgggggcttggctcccagcagcccgcaacgacggatccgtagaaagacgtgggctgcagcaccagccctgaagtgaatcccccgctgaaaggagagcaaacagagagctgggccaaggctggatgtgggagggagcctctgggccctcctgcccccgtggacacccatgctggagtccagaaaggggagcgagggagcttcccttctaaacatggcaaagcatctctgaggagggaaagggctcttgcagacatgccaggaaggcagcgtttggagctactgctggcagggccagggagtgggctggggctgtctactcccccaccctctggctcactgggaaccccgtgcgtctctgacatcatggatgaaaatcaggccgggctttccaatattggggccgtcccgccccactcagccccgccagctggaccctcccaaaacgggatctcttttgtcagctgccttttatagaactataaaaaccaaaagttcaagtaagaagctttagaccagtcttcaaagcaggcaggctctgtctcccatgctcttcctgcctattttcttacctcgaggctccccattcaaggctgctcagttgctggcttccgtctcaggctcataaagatcctacaaccccaaagtcacgttaat

SEQ ID NO: 24854 - DNA, 868 bp, Bovine  19866881019516
  misc_feature (1)..(1): n is a, c, g, or t
ncctcatgctggtcctgtgcatacgtttgacttgcgtgctgggagacttagctggtcaaggtccccgaggcatctctcggggagtagagctcacctagccagctgtaggctcctctgtcttctgacacggagaggtgtgcagaggtggcctgaaccaccctctgacaccaaccctgccttgtggcttgacttcctggggctcctcccagccctcttcagggagggcggccgacttgaagggaaccgatgggtcatctcatcgctccagcccgtggccagtaagcctcccagaagagaaacaaggggtgggggaagatcccttgcgtgctaagccagctccaccaagcaggtagggctgggcagccctgcggggagcacccagccccttcccacctgcaggctcatcaaacacctcaacaagcagcccgagtgggaagccggtgatgtcactgcctcgcctgaacaatcgggcctttcacagcaggatgataacaatcgccaccgtgtgtaagggcctgccacacaagaacacacacgctcatcactcctgggaggatctgaaagccgaggtgcagcagggcttgtcaggaatatgccggtctcctttcataatcagccggccagagaacatagcccgaagagccggtctgcgggctgcaaggaggctcacttgccagttttcagagaaacccgtgactctctccaccatttccccaggaggcctcgcctgcaaccgcagaaataacctcttttgttgttcagtcgctaagtcgtgtctgactcttcatgaccccatggactgcagcccacgaggcacctccctccatgggattctccgggcaagaatactggagcggattgccatttc

SEQ ID NO: 24855 - DNA, 1790 bp, Bovine  19866881050394
  misc_feature (1)..(1): n is a, c, g, or t
nctgtcggaggaggagaatggtttggagcgaaaaggggctgctgggatttctgcttctcagtgtcttttcttgcattttgcataaaacatggccgattcgataacctgctggtctatctcacttcccactggtactctctgtctgcggagaactcatcttttggggaggaatcaagattagaatcctctggttcaaacttggtctgtatgcgaacacgtttcatctgtgcagcagacactggtgtttaagactcagtcgtgtacagcctgtggggaaaaggttgtgatgctggtttgaggaaagaggaagctgatgcttgctttcagaagcgtgggctggacagatgctccggagacttggagcggagattccctgagcatcttgttgtcctttccactgtttctagctggtctcctgagcatccagattagaaaccagctgggctcagccttcatttctggcaatttatcattgttgttcagtcactaagtcgtgtctgactctttgtgaccccatggactgcagcacgacaggctcctctgtcctccactatctcccaggctttgctcacattcgtgttcattgagtcggtgatgctatctaaccaattataggcaactatttctgtataattggttggggaaaaatgaaaagatggggataaatgagaaggtgggtaaaagtgattgcacaggtactatcattaaaaatcttacggacataaaaagtataataagaaaatgttctgaacaactgcacaccaaaaattttacaattcagaagtagataaattccatgaaataacaagttataaaaaaaaaaaaaagtgattgcacaggactgtctccagagagggtacagaacgggtgcagaagacttcgagagaaggacaaagctcagttagtttagttgcacattttttgcgatgtttcctgagctcagatcattctcagggcagccaggggatctagtgggggcaagaacaatgacaaactcaaatgttatgactcctgtctccaggaggcatccagtatgtcctaacagcgacacagagccctttaaaaaatcagtgcatgttcattccagaaacacttcccaagtgtctaaagagaggtctagctcagtgccacacagcttcccaaatggacccactcaagggcaacttcaagtcttcacccatcgtggaggctgtgctgatttctcagctgacgcccttgcctgtccagtttttcgcaaagaaatgccactttggggacctgatttttttttaaagtaacacatctgtgccacatacttggacactgccctctgccttcaccgcctgggtcggacactcgtcagtctttttctaagtctgtggccacgaaggtttccatggatggtataaagtgctttgtgtattggaaactgtgaatcaaaaggtagaggaataaaaaaaaaaaaaaaaagaggagagagagaaagaaagaaaagctaaccctcaagctcacccaaatcctaaacctcagactcttggaagaaggaaccagtggtataaaacataaaacagtcccagactgcaaacagaccgtcagcagggagccctttctgaagagagtggagatgcggccactgtggaggcttggcatccgcaccgaggcatggagagcctttttctaagtttctgaaagcaaggcaccttcttcctacctgccccccgacagctgcccgcaacaccctcaaaccccactgcctcccaggaggctggtcctcttccctggggtctcctgactgatcctcccccacccaa

SEQ ID NO: 24856 - DNA, 1536 bp, Bovine  19866881072162
  misc_feature (1)..(1): n is a, c, g, or t
naattagcattcctgtaaaatggcctgttattatagcagatttctgctaacaattacctggcagtatagaaagagatctgactcctttaggctcctggtgggttttcccttctctctctctctctcttttttccccctgtggagccttaaaaaagaaaaaaaagtgtagacttcgacaggcccagtgtatttctgtccatgacatcaagggagatttactggacaagtcattatttcatatggatgtgcgagcgtgtctgtgagtccgtgtgtccgtgtatgcgtgttcttcgagaaaacaaaatgggggtaatttctttccttttgtgatcacgttttctcttcttgagaactgaattgtaggaaaaaatgtaaggagttgctgaattttagaaaacagaatggtagggatggtttgctttcacaaacgcattcagttttgtttttttttttaatctgatttgagcaaatgccttgaaggtaatcggtgctcaacagatatttgttgaaaagaattgcacctgctctgcttgatgtgttttcgtgaaagaagtcccgagcgtgcgctggaactactgagggaggagtaaaaatcttattgatgatttgtgaaataggagagttctgaagattcagaggcaacaaagcttaaccaggtggtcagcacaggaggttacacctcaaaactaattttggggacttccctggtggtgcagtggttaagacttcaccttccaatgtggggtgtgtgggttcaacctctggtcagggagctaggatcccacatgcattgcagccaaaaacccaaaaaacattaaaaaaacccctaatttttgccaacacaatgcaacccccgtataggtctcagtaaatagttctggatccaagaccactgtgaacactgtgtttctgtgaatacgtggtgtgaccttctgagaaacactttgcttctcgaggaggctgctttcttgtgttaaatgagaacttgtctgagtttccatagatattttttcttttttaatttgtttttaattggaggaaattttcttcaccgtgttgtgctggtttctgccgtacaacaacgcaagtcagccgtaattatacacctgtcccgtccctctccagcctccagcatctcaccctccaggtcatctcagcgcaccgagctgagctccccgtgttaaagagtacttctcagcagctgtctatttacacatgggaggaagctgcttccacttgagcttactagggattttgacctctgaggtaagagctgggtttaaaaagctgttccaaaccaaacagctggcattattagcattgttattccattagatctttttgcgtgatagaggagccgggggtggaattggtgggtgatctaaatgccccagcctagcgagaggtaagatgctctgtacatatctcttgtaacccaacagacctccagagctcagtggacaactaaacagaaaattccccgaataccaggagattgggttgtttggggaggaggaagctcccttagacttaagc

SEQ ID NO: 24857 - DNA, 1136 bp, Bovine  19866881106170
  misc_feature (1)..(1): n is a, c, g, or t
nttgctgttcccgtctcattcccactgtcccgtgttccgtgcctggataatctttgcgggttgcgtttgtatatgttgtgtctaaattaggctggttggaaaaaatccttcgtaggtgtgattttttttttccctctccctctcagcccagattccctcataaaggtgcattgacttccaatgtccttgtcccaccttatttccaagtgctaatctctgcagctccctggggagggaggcgtggccattgtccctggtggtgactgattaaaggtacttctgtaaacttgcctgtccaggcagagtgaccccaggattctcaacttaagagttggagcctgtggctctcctgcaaagaatcgaatggtctgcccttctggaaaccagaccacttacagtctgagcccagctgggccaccgctgccctctctggaaaggtcactagagcctgtccgaactccccctccttcgtaatagcataggggctgctgaatttcctgggtctgatgttctctgattctggaacatttggcaagaaaagaccatcctcgctctccttccagaacacaaaacaaaaaatgccaacataagaggctcagaggctttgaacatccattcaagaagatgtttatttaacattggctaaaaatgtactactttacctttgaaaaaaaaaattaaatgacttggagaacttcaaagcctttcctctcccctctgctttccaggaggagaaatatttttcaaagtcatttgaattttaaagaggagggccccagaagcccttgggatggagatctgtgagtcagtcaattatttttcagaaagtggttttatgcacagcttgaaacggagacccttcccctgtcccgtgtcgttccccacttcctttcctatttttaatttctcacttcaaccctgtacatgtgctgagaaacttaatccatttgtttctgattcatttacacttaactcatcaaaatgctatttagggagagtatttcgagtccgggaggtgccaaatcctaggagcaggaaattgtgtcttgtgcagaggaactgactgcagacctaggctgctctgactctgctcctgagccagaccccagagcgaatctctgtgtccggtgcctctg

SEQ ID NO: 24858 - DNA, 981 bp, Bovine  19866881198813
  misc_feature (1)..(1): n is a, c, g, or t
ncctgccagtgcgggggcatgtgagcgcagtccttgactggggaagattcctacgcctcagggcagctgagcccgtgagccacagaaagagagtaactgagactagagactgcctgcacccagcagaatacaaataaacacagattgtgaacaataaaaggaggtaacgggcaggcagtcgagcagagaggagaggcaagagctctcatcccaggtgaaggaggtcccagtaggcgcagacgcgggctagagggccaggtacgccggccccagagctggggactggctgccgtctctgctcggggttggggggaccggcgcggaggggagatgcgttcaggttgaacttgaaagtgcaggacacagaaagcgttttgtcccctgcggagagcgccccattttccactcaggtccaatttgcgtgccacagccctgagtctgcgatctttctctcaatggatgcttatgttctggccaggaagggcagcccttgccaaacgttatggtttggaagggtccttcacaggggtggaaaaccgagttaattcaattaaggcccggggtcctgggctttgaaccagccacagtctcgattttatgagaggatgaaaagttaattatttgccgagtttgagcaaagtccactgtgaaaaacccctttccaaaagaggcatttgcctgtcaacttccctgtggaaaattaaggcaatttgaaccagggtcataaggagaccctaggagctgggtgatcagacgggggttcggggctcccccatccccaccttgcctctcttcatctcatgtctgaaagggaggctggagggtgactgcaaggtcaccgaagcttatgtttacttccacaggctatttggaaaaacagaaaagaaaacccaagttgaattcagaaagtcaagtttttagggtgcgcttttatcagtgagtgtgctaaggcattttcgggttgtgtcaaactctttgcca

SEQ ID NO: 24859 - DNA, 1292 bp, Bovine  19866881221745
  misc_feature (1)..(1): n is a, c, g, or t
nagtctactcaaactcatgtccattgagtcagtgatgccatccaaccatctcatcctgtcatccctttctcctcccgccttcaatctttcccaacataatggtcttttccaatgagtcagttctttgcattacatggccaaagtattggggcttcggcttcagcatcagtccttcccaaatgaatattcagggctgatttcctttacaatggactggttggatctccttgcaggccaagggattctcaagtcatctctaacaccacagttcaaaagcatcacttcttcggtgctcagctttctttatagtccaactctcacatccatacatgactactggaaaaaaccatagttttgactagttgggcctttgttggcaaaaaaaaaggttcatcttagagtcccagttaaataagaaaacaagatataaaatccattgctggaaaacctgaatgaatttcttttagtgtattgctaatgacctctccctgaagattcaattcccagtggcttcctggatccagttttcaggcacatgtaattctggtacttgatgtttggaggtcagttactggcctttactctggaacaaagaggggatgtaacaaccattgcccaccctgttaatacacgctgcagcctatcgtccccaccttgccaagctatttccagaggggagcatctttagtaaagtgcagttggtcatgacttcacaaatatttctactgaattgttaccaagaaaacttttgccttatgaatttttttgttttattactctgctaaaacaaacacactccaaaaagacatgtggtcttccacttcactcagatgctatgcctcaggccccatctctctgtctcttttcttctaaagagaaaacataagaaatgccaagttataatacacggccttttccaggtgcatatggtattttcagtccttcgtcttactctggttgggttagctggatttctgatttgaaaagccttcaagtgccctcccccaccccttttaaattggagtgtaattgctttatgatgttgggttagtttctgctgcacaacacagtgaatcagctgtaaggatacatggatccccctctcttgggtctccccaccccgttcccctcatctaggtcgtcacagagcaccgagctgagctccccctgcttgaagcaggttcccactggctatctgttttacacaccctagtgtgtgtttgtactttggccacctgatgcgaagaacgactcatttaaaagacccgatgcgggaaagaccgagggcagga

SEQ ID NO: 24860 - DNA, 581 bp, Bovine  19866881245149
  misc_feature (1)..(1): n is a, c, g, or t
nggggcggggtggggggggcggggggcggcgcggctgggagggagaccaggccgggtgggggcggggcggctttcacctgatctgggcctcggggatgatgtcatccataatcacgtagaccatggcgccagccgcaaaggccatcgcgtagggcaggatgggctcggccagcaccaccgcgaaggcgccgaagaccccggccagaggctccaccatgccgctgagctgcccgtacctaggagagaacagacgcgtcccctcggggaggctcgggcagacaccccgcgtgctccgcgggctgcctcggctctgcaaaaggtgtgcattgtcctccacgtcagatcctgcatcgctgggcaaaaccacctcattgtgtgtcgtttctattaacaccacctctgtctgttttcccaactccctattattacacagtcaccgtaggcaccccctcccaggtttattttagagttttaagtttcccacattgtcttcttaaaataacagccttattgagatagaattctcctaccgaatggggcacccactgagtgtgtacagttcagggttttcagtgtattca

SEQ ID NO: 24861 - DNA, 2416 bp, Bovine  19866881294987
  misc_feature (1)..(1): n is a, c, g, or t
nacagagacgttcttttcgccgttctcttttccttcccttttatcccagattactgaatgtcatcccctccgctacatagcaggaccttcttgttgtcctctgcaacggtctctcacacctcacgcaccacccaaaccagccctaaacggaacccaacatcagaggcccaccagcctctcacagcctacttcacacactcacatagtaggtattcgggaaacttcaccgaatttcactaaacctgctgcaaataaaacaaagccacgtctgccctaagacgaaaggcctgggccctcaggatgcatgttaactctttcatgctctccagaccccacacgtgtcactcgagattaatgagcaccgtgtccccaacgtccccagggtcagcctactggaatggaaacaggaatgagcaaggaacagcctcagaaggtcagaaatccccaaaatgacggcgaaacacacaaacaaaaagcagaaacgggagtcattttgtctggtagctgactcggagaggagcgaggttttctccttgtcgcagaacaaaccgtgatctgagttcggagcttttcaaactgaaagccagcaaacgcatctaattaaatgatacagtaaagccctgtgcactttctagaagttgccagaattctagaagggtgcccaagttgatgtggaagggagaatgcactgattttttttaatcccagatcttattaacaatgacccattactgtccacatgctaaatgccagacccaacacggtgctttacagttaccagcacacccaatgctcttacagtcctcacctaaggacccctgtcatccctgttctgcaggaggaaaaaccgagagcttgcagcgaggtgagggcagagagaagatttagagggccagctgactcgaagcgcacagccctaacattacacggactctctgatccagagaggctctgctgcacggtgtgcggagcccgggtggccgacgaggaatcggctccaggacttgttccatttctgacccaaaggatggaagggccacagcacttggcaggatcacggaggggtggagggctgcccaggagggccccttccccacacagccaccccagaccccagcagctccagaccctgaagctcccgtggctcctgcccagcccagcagggagggaggcccgatggtgtccatgaacatccaaacgagctcccctaggaggcagcgggaagtctccgtagcagcaggccagtgacggggagatcagaagctcaggtcaagacttgaggaccaggttaagcctagcccagatgtccccagcagctgccccatttgtcctttgcaggagtcctcaccctgagcagagaacaagagtgaattctggaatctcacgtccatcatgctaagtacaagaagccggacgcaaaaggccacggagcacgcgaccgttggcacacaatatccagacctggcgaatccagagagatgggaagtagattcaaggttgccagggtccacgaggaaggaggcagggagggagggtcgtgactgctaacgggtgcggggcttccttccacggtccttccggaagctcctggaacagacggtggtgaaggccgcacgacatcgtgaacgtccttaaggccactgacccgtacactttaaaatgatcacaagggtgcatctgatgttataagccttctgtcatcgttatgggggaaaaagggtgaatctctaaagaaccgctgaactcaatcaagtgtgaggccaaaagcacagagccaggtctgaggctctccgaggtttagaactggacgttcccctaaagaccctccagtttatgaagttgctgtttagagagagggtggagtgggcagggagggaaggaagaggcagggaaggcagccaggccccagagccagagagctgaccggctgagctgcagcccggggagccccttccccagcccactgcaggctcaggcagccccaagaccccgcagcccgccccccaccgcctccacctggcaggcgtcgccgcgactttcttggggccgggagcccagtgtccttggtccagatcacagacccaacaccagtttatctgcagtgggcaaacagggcggcagcaagcggcggaactctgacaatatttaatgactcgggggtaggggcggctttgcaggatgcaggaaggcaggcagaaaactccaggggaaattccgtgggggggcagataaaaggggaccgtaaagcaatcttgacaggttaacagacaggtaatattccaacggtgttgacttaaccaggctagcgctgcatgtggccccgatcaagccgggcgcaagagcctgggcagctgagggcttcacggaaacaaagatccagtcagagaaaaccaaacaacagccagtcagaggctgg

SEQ ID NO: 24862 - DNA, 975 bp, Bovine  19866881316633
  misc_feature (1)..(1): n is a, c, g, or t
ncagctagacccatatagggtgtgccaagccctggagggggagggtgggggaccgattgtcccgagtttccaggtctggctggagacgaatggagctgagaatccaggagcatctgtttgagactctcagctcccttataggcaacttgggaggtggatgaattcgggataagggagggaaatgtgaaaacccaaataaacatctgaacttgtaggtggcacttattcagattaccccaaattctctggcctggggagagctgatgcacattgatgcagataagggatcttacagcaagattgtgtttatgggctttcattcttggcagcttaaagcacatagaaacggtgaggtttgctctctttctgaaaatccctggtctctgtaaattcatcaagcaagagacacttctttcctagggttccccgaaacaaagagcaaggaaggaggctggagcctcatttccccttaagctagggacccctgagtcccagaatggtcaggtctctgtccccatctcccagtcaacagacccgcctctctgcagagccaattttgaaagtccctgaaatttctgaagccgtcactgaacatgaacacacatctgacctctgagttgatttcatcacccagctggcccctgtctgaacccctgcctccatggagaattcttgaaatccatcctattctccacctgcagctgttttctgggatttgaaaaaaaaaaatgatatggcatttttaaagtctccccaatggccctgctctgatctcctgttcccaccaagactctttcaactccagtttttcagctgtgttatctggtcatttcagctcaaccacagtgcatggtgtctaacccttgaaaaccaagcatgcccccacatgccagagagcagaatgaaggtggcaggagaggaaactgagtcagtacagcatcaaaaatcagccgtgagctgcagtggatcaatgaa

SEQ ID NO: 24863 - DNA, 1381 bp, Bovine  19866881326224
  misc_feature (1)..(1): n is a, c, g, or t
naatattcaggattgatttctttaggagggactggtttgatctccttgcagcccaagggactctcaagagtcttctccagcaccgcagttcaaaagcatcagtcttcagcacttaaccttcctttggagaaagaaatggcaacccactccagtgttctggcctggagaatcccagggaagggggagcctggtgggctgaagtctatggggtcacacagagtcagatatgactgaagcaacttagcagtagcagcagcaaccttctttatggttcaactctcacatctgtacatgactacttgaaaaaccatagctttgactatatggacctttgtctgcaaagtggtgtctctgctttttaatacactgtctaggcttgccatagcttttatgttcctgtcccttatttgaggaccaggtaaggcttgatagcttcgagttgaaagaggtttctaagtgaaagccttttaaaggacttattcgcggtttcctgggcagagggtgatggtgctgaggccagtgggagaaatccacattccttcctgcccatccctccccttgtccactccggtcatgtctcctcccttccccatgtaacagtggctgtcacagaaaagccttccacaaatattagctcagcctggacctggcctcagtacatctccctcccagggtcatcccaggcgctggggaggccagccctcctgtgcctggcaccctgcagagactgatagaattccagagccgggagcaactttaaaattcatatcgttcaacctctcctcctgggagccgggacagggtgccccatcccctggccccaggccccctccgtttctccatcatcatctgtatccttttcacccccttcagtatataaagagctattttaggtgcccctgagcttctccacagtggaagttgaacaaaactaccgtgggtgggacaaatccacaaccttaatcttggctcttgaagtgagagctgcttgaatacatcgtgctgtttatgcaaatcccatgcaaatcagggtgactggattaactgggaaagaaaaaaaaataccatagtgtgtctgagccttcctagcactccgtgttggctccagaaaagatgaattttttttttcaagtgctgttttctgttagaaacttctcttctgccctgggagccttagccagtatcccaagttggctctttccatccaccgaactcttgtgtgaacagggaggtttgttttaggctctgtcaacggagccttgttggaagttgccacaccttaagcaggcttgccaatgtctcggtgggggttgagcgtggggaagtggctggcaggaccagggcgtagggaaggcccagtccagggagttgctcagccaga

SEQ ID NO: 24864 - DNA, 2130 bp, Bovine  19866881400135
  misc_feature (1)..(1): n is a, c, g, or t
nctctatacggaagagagccaaggagtatgcgtgcggcaacatggtggaaaaggaaaaccatatacttggtctcaattccttctgctaatgaaatcttaagttgatgtttagatcactcagtgcaagaatggaatgcaggggcctccctgttctacgccgggcaagcgtgacgcagccatcactgaacaccccacggggagcttcgtacccatggtccatgggaggcttgtggtcagtgtcaagcatcacagaggccctgtgtgtgaagaccatccgtctcacagcttcatccttccagcctcaattctgtgctccattgccacaaagaaccagtaattccttaaagaaaatccaacatcccgtaacaaatggcaaatgtggctcttgagaaagaggacttatttatgtttctgtagaaaataataatggtgccgagacagagttctttcccagacgccttagtaaattgtgccttccaagggcagacagctaaatcttgtggtggaggccaggtggcattggtgccaccgtggaaaccacgtgtttctgtaaagggggctgatctcatgagtttatttctctgcccaggatccagcgacagggctctcaagtgacttcactgcaatcagtattgctgactaatgcctgtatcaacacctacgccgccaccactagagctttggcgattttacgtttagtttgatttctccagacagaacttttccacatcattggaactaattgaggtaatggagaaattattctggtgccagaacactccgactttcttttgcccacttcccccaccttggtattgaaagacaacaatgctccagtctctccatgtttctttacagcaaaaaaaaaaaaaaaaagggaggggggagttggtgaggtcgctcttgcacccagccggctcttggacaattagggctggaaaatacactctgagctccatctttcttggcttcccaagtctgcacactctggcactgtggctgtgccattctcctgagatgcttctcaggggagatttgggaatccctcttctaattctccagactgaccacaagaaatgtccccacctttgctaaagcaactagcagatggagacaaacatttatgagaacatactccaccttaattacaagcattgtctgccaatgtttatagcgtctcagggagtttggaggtaagcccgagctggctgaagatggttttgattatgggggtttgtatcaaaggtgggacggggctctttgcccactcctcgcccctcctccatggtctttactcgagaaggttgacccagccattttttaagatggcatgacgtactgagaagcccctgggtttgccccatgtcaacagttaggggctcagcgagcatttgggggttttaattttggtggaccacagtgaacctctccactgagggccctgacggatttggatttagggggtccctggcagcgtgggagtgtagggtgggcttccaacagttcgcagaggcctccgcttggcccttgaaatggtagttcatatgcaggagtggcagggcagttacagatgagtgggaagtgtgcacattcatttgaggtcggaggaaagactctagcaaattctgaataatgataaccctacaaataatgtttagcttgcctattacccctatgttcctttatttctgctttttcctactctctccagttactagtcttccacactatcccttattgatctgcccactgaggagggtcacagaaataatgcgatttgagcaacagattgcaaatgtgtccgagttactcctggccagcactccaggcagcgctggggaagcagtggcccttgcagctcggagctgaaatgggtgttttgcattacttgctggattttatttcgccacatcacctctgaccccttttgcaaagttaattgagagttggcctttttcaaattgactgcaggaaattgacctttgtgttcacgctatgttaggaaagggctggatgaagagcaagtcaggaggcaaaatggaaataatctggccctcatagtcacagtcatgctccagcaccacgtgaaatgagcacagatgccttggtgcaatcctgtaggcgacggat

SEQ ID NO: 24865 - DNA, 1232 bp, Bovine  19866881421410
  misc_feature (1)..(1): n is a, c, g, or t
ngtgtttgcatgttgctgtacaagcagccttggaagagcatccctcctcattgtatgtgtgtggggtctggccccacaggctccaacatgatgcaggtctgtgcagaaattcttcaggctgtaaagatgctagggcgttggaggggccctcgcagggagctggatcctgaaggctggcgtcacccacgttcaccttctcggtttggattgcacacaggtgcacgtctggaggagcagaacacggacacgtcttctgttgacacagatgcgtgatcagctcccagcggggcagtcggagtccacgtcagaacaccgtgcttcgttacagactatccagcggccagagttgatggtgtttctagaggaccccttctttccagtgtgtccggaccatagatggggccccacaaaacccaagtcctgttgatgaagtgaaccttttctgttgagaacaaaacagctcatgatgaaacaaaaataatacagccactggaaacaatggaaaatagactgtgggatgtgtgtgtgtgtgtgtgtgtgtgtgtgtcacacgtttgtataaaataagagccaagaagaaaatttctgcatcttagctagacagactaagagctaaaaactcttggggtggtgttgtctggagagtgaaggagttggctggaagacttcctgacattcctttgacctctagggtcccgtaaaatatcaggggcgtgtaaactgggccgaagtgtgtgctttctgtctgaagtctcctggataaccttcgaggtcagctcagatgctgtagactcggaactcccctcccccaattcccttccctttccagacacgggctttatctgggataaggcagcggaacttggtagtggtagcgggggagagagaaggaggttgcgccagccacagtttgggggtgctctcgacaagtgagaacaaccagaaggcaaattacaggttcttcccaggtgagtgaaagccaggctttcgggagcgcatgccatcctgaagttgttgcttcttgtcagaggatcagggctttatctcttctgctgaaagacaggcttaagcatctcatctaaccctgctcatcttgtttggtggccccggcggggggcgggggtgtacggaggtcatcacctactagggtagagatgagcacgcaagcatctggaaaagactctgtcactgcacacctgtcgagataaagacccaacctcctgcacgtgtgt

SEQ ID NO: 24866 - DNA, 787 bp, Bovine  19866882236431
  misc_feature (1)..(1): n is a, c, g, or t
nttaccccccaaaatagactttggtatatatagaagagtgagcttatgattaaatttggcattcaaaattataggagaaagaatcatgaaataaagctgggacatctttctctgtgcattctctgtctatcatttcttctacaaccaccatgctgttttgattacaatctattataatagctcttttaaaaaaatgtcttggctacttgcaccatttctgtttccagatgaatgttagattcactttttcagaggtcttttagcctatattattagggtttttattaaaatcatttatatcataatatagtatcagaagaatgtgtatctttatactatctgatcttctgaccaggaacagctatccaaacattattgtgtatcttttaaggaaatgtttagtatctatcctgctgctgctgctgctgctaagttgcttcagtagtgtccgactatgtgcgaaccccatagacagcagcccaccaggctccccgtccctgggattttccaggcaagagtactggagtggggtgccattgccttctccctaattagggtcaaaaaaattcttaatgtcttatttgaattgagaatcttgaaaacatttttactgaattgatgttctattagcagtttactagcattttcatgcgtgatttttacatcaataatcatttgtgagttttcttctataaaaagtacaattctttaataagtctttgttttctctcctccatatcagccatcttactttttggcttttctcactctctttattttctcttca

SEQ ID NO: 24867 - DNA, 1552 bp, Bovine  19866880397466
  misc_feature (1)..(1): n is a, c, g, or t
ngagaattcctggactgtatagtgcatggggttgcaaagagtcagatacgactgagagactttcactttcactgatatcacatgttctttgggcttccgttgtggctcagttggtaaagaatctgcctgcaatgggggagaccttggttcgattcctgggttgggaagatccgctggagaagggaaaggctacccactccagtgttctggcctgtagaatcccatggactatagtggattccaggctctatggacagagaaagcctggtggtctacagtccatgtggtctcaaagagtcagacacaactgagtgactttcacatcacatcatgtctataagtgagctccaggtcccaagcatttaaaatcagtattattttcttctccacgtttaatgccatgtcagacattccattatctcctggcagggcccatggctgattttcttccagcctttctgtgagaggagggaagactcatactacctgacaagttctccatactaccatatcagtacttaacgatgacagaagatcaagaaagtagatttattattgaatgttcctacttatttttagtcaagtgcagtatattttactgttccccgtggatgattcataaccatgtctcagcaggcaaactcaagttgggaatctaaataattcactagagacttttaaatcagtgtggacaggatatctactttttggtttctttttaatgtttttttttttgactatctagtttctctgtacagtcactgtattatccttaaaaaataagtattgttcatcatctgttttacatggtccctatgaagaattaggtaatttgtgaaaagaaagacttgatttaagaataaaaaaaaataacctagagcttagaagttgtttgttctatattttatgatttcttgtatattaagtggtataaatgccacccatttggttttacagaatttagatggcattgaggcttcccttgtggctcaggtggtaagaatctgcctgcaatgcaggagacctgggttcagtccctgggttgggaagatcccctggagaagggaatggcaacccattccagtattcttgcctggagaatcccacagacagagaagtctggcgggctacagttcatgggggtcacaaagagtcggacatgactgagtggctgacacttcagacggcatcgggccccgggacaactaatgtagaaggtgggctcctcttccatccccacacccgataggacctgattgaacctggcatctcacttgtcactggggttttgattgtcatctttgtgttaggcttgccttttcccagggagaaaattcttgtgtgtttcctgacatcttcttctaaaagtaaaagcattttactctagcaacattcaattgctgctgctaagttgcttcagtcgtgtccgactctgtgcgaccccagagacggcagcccaccaggctcccccgaccctgggattctccaggcaagaacactggagtgggttgccatttccttctggcctccatcaactaaaactaaatttaga

SEQ ID NO: 24868 - DNA, 2377 bp, Bovine  19866880427449
  misc_feature (1)..(1): n is a, c, g, or t
ncttgaacatctgggaagttcatggttcacgtactgttgaagcctggcttggagaattttgagcactactttgctagcatgtgagatgagtgcaattgtgtggtagtttgaacattctttggcattgcctttccttgggattggaatgaaaactgaccttttccagtcctgtggccactgctgagttttccaaattgaggccttacaaacagctatgaaaagaagagaagcaaaaggcaaaggagaaaaggaaagatatatccacttgaatgtggagttccaaaaaatagcaaggagagagaagaaagccttcctcaatgatcagtttaaagaaatagaggaaaacaatagaatgggaaagtctagagatctcttcaagaaaattagagataccaagggaacttttcatgcaaagataatagaaattttaacatgttataaatcaactaatcttcaataatatactttttaaaaaatatatatgtattccaaatatcaagaagtagagagcaaaaagtaagttgaaatcacttttactaaagaagatgaaaacatccagcagctgcacctgcttgatctacaaaagcaaggcaagttactttactttactgtttcttcttttggttaaaattgttgaaatggccaaaatgctaaagcatctagggtttttgttctaagtggtgattctctggaattatcctgcactcaatgccagttgaattgtttcatttatttcttgacgctactgctctttatgtaaagttaatggtgtgaagtgcattaaagaaacacagcttggatttttttccttttaatagtttctaaaacaatctaaagattgttctaaccattaatgaaactctttttaattttttatccagttagttgtctattctctcttcatgggccttttctgggtaattgactcttttcattccacttttcagctgtgagactgatgcttgttcacaccatttgggaccgtttttatctctgttgcttccccatatcattctagatgcctgtgtgtgtacctttttaaaagtaaagaatcacaggattttcctgtttatttatgtatttctttactctgggctgcgctgggcttttgttgctctggcagggcttcctctggttgtggtgaatgggagccgtactctgtcgcagtgtgaaggcttcttgttgacgtggcttctcttgctgtggagcacaggttccaggcacacagtcttcagtggttgctgtgtgcaggctctagagcgtgggctcaggagctccccggcaggtggaatcttcccagaccagggactgaaaccatgccatgccccctgcattggcagttggattctgatcccctgcaccaccagagaagttccgtgtgtgtgtgtgtgtgtgtgtgtacttcttaaagaacaaaattcaaaataaagtttgctcggtttataagatactaagatgtcctccctgcatcccatgagattggccttgaagctgcaagctgactttgacaccctcaggggccagagccttgctgtccaggcttgcaactccagcataaagctccacattctaggacttggacagtgaagaatgggcctcctgacagctagaccatgaattccccactgagtgtaaacactcacagcacataatcaggacacggtcaaggccacttggcatcctcaacagttagccaggggccccctcctgaccaccaacaatacatcaagccctgttttaaccttcccatctcacacaggaaaattattcagataccccagtttggacaacattcccccccagattagcctgtttctttaaaccaattgtagaaccatccaccattaacacaaatcccacagaagctccccacagcacctcagggtaaattatcttttgctgcaagttaactcagtctcactttgactcaggatgtgttccagaagggcgttggtcggtaagctttaacagcaggtccttaataaatgcttgattaataaattttctttaaagcacatttttttatgagcagtctcctcttttccaaactccttctgacttcatctctgcagctccagcctcttctaaccttcctgctggcccctcttctcctctgactccctctgtgttcccttttctaaatctgcccatcttaggtaccaacctaggatgacatccatttccctcttctttttaaaaaaattagttttgttttttttcggaatatagttgctttaaaaggtgttaatttctacagccggagaaggcaatggcaccccactccagtactcttgcctggaaaattccatggatggaggaacctggtaggctgcagtccatggggttgctaagagtaggacacaacttagcgacttca

SEQ ID NO: 24869 - DNA, 2581 bp, Bovine  19866880430556
  misc_feature (1)..(1): n is a, c, g, or t
ntcctagagactctgggggctggcgcagcgggcagccagtgagccagtgagcaacagcacagtctctctgctacaaggtgatcagaagaaatggaactagaggggcttatacagtccttgggctggaaccaccgaggaattctgtaagtttttaataatcacaactcttttctaatgatcacactcacctcttatttcaatatgccaaaagctctgtaagcatttagtcacatttatgaaaaatgttaatttaccagtagtcctagtaccctgagcatcttgctttcttgagatctggtagtctctacaatccctgttcttggttgctgtacccaatggaggaaattcaagtttaaactccacaactccagtgtttgtcctgaaatctagtcatgagctctgtctcaagatatctttctcaaacaactcttccacttactgaaaacctatggaccaaatattctgctacacatttcaggaccattatctccaaaccaccaatgggaggcattattcccatcatgacaggaaagtaaactggtgctcaaagaggatcatagcctgcccaaggtcacaggagtagttctgtccagcccttgcctctgtgaatttccacagcccctcttagccttggtttaatcattatagccaatgtccttttgttcctaaattgtccacccaaatgtaagcatctttgcctaggctgaattctgaacaccaattcttattttattcctctggaaacagaaaccagcaagaaaataagaaccatctgtcgctacttgagcttgcaagaagcagaggaaagatttttcttcatccaaagtctaagataaagaaattcactgaataccacccacattatacagtcctcccaccatcccacctaggtgtccatttatgtgcccaacagtcatttcaattgcaatctagaggtcacccctgataataaagccctcttctttcattctcagagcactctggttcccaaagtcattagtgcgaatttgtttcaattgctttcaattctgtctgcacataggtttctccatagggaccgctgctattccaagcttctactccccttgcaaagactgttgctaaggagaagagagttctgtcttcgcaattactgcctgaagtgtttctgtaatctctaccagttctttccctaacatcaaggtccctctggctcaaatctgtaaccttgctttttgtacctttgagcaaggcttccatttgaagtcctgagtgtttgatgtcctctgtaaggacttcagattcggttactccaggagcctctaagctttgaggaactcccctcagataaagagaagcagtttagatgttttccaatcaaagtcacaaagccaagaagttcctccttcaccacagtactccatttcatctgattctgggaagacagccacacaagtcatcatgctagtatgaaaatggttttctgaatcagaaactttatctctaaaagtctcctttttcccaaagcggtctgtccctcctccaggcatagctttaccctcacagtcaaacaaggtggatcctaaagcaggttgttccagacctggttccccagagggccagctgcatcagcagtgtctggaagcttgttagaaatgcggaatctgcattttaacatgaccgcagatgactcacacctgcatcaaagtgagagacaccccgtccgagactcagctgaaaagaatctgactaatgagttcattggcttccctggcggctcagagggtaaagcgtctgcccacaatgcgggagacctgggtttgatccctgggtcgggcagatcccctggagaagggaatggcaacccactgcagtattcttgcctgggaaatgccatggatggagggcctggcgagctacagtccatggagtcacaaagagtcggacacgactgagcgacttcaccttcactttcaccaatttcattaagaaatggacagttgatgcaaactggaatttttcacttaattatggtaggagttgttggaatttgtttttaagactgtttttctaacctaaacctgagctgggtataaaaaagtttccagagaaaagctaactttctaaataccatggaatcaggccatctcgtcactgaccaaggtgaaagctgacactctgtgacaccatatgtgcacagacacactaaccactcacagatttttgtaggtgagcttcaggaccgtgtatgaaataactgcacagcaagcagtgggtctcctgctgaatgagccccacgggttcccttctacggtcactaccaatgccaccggggtggccgggaaaggagccttttttttttgttttaatataacagcatcaatcctgaaatgaagtaaggaaatgacaaaactatgttgatgttaaagctatacaaaattgtgttttacagagataaaacttcctcaatgtacccttcagaggttttgtgcagacaaacacttataaagcaaagatccaaataacaatgcctatagagcctaccctctgcatctgtgagttctgcagcaatgggctccaacaagagcagatagcagtcaag

SEQ ID NO: 24870 - DNA, 1766 bp, Bovine  19866880449084
  misc_feature (1)..(1): n is a, c, g, or t
naatctgcctacaggagatgtgggtttgatccctggattgggaagatgccatgaaggaggaaatggtaaaccaatccagtattcttgcctggaaaattccatgaacagcggacgactggcaggctgcagtccaaggggttgcaaacagttggacatgactgttgaactgtggtgctggagaagactcttgcaagtcccttggactgcaaaggagatccaaccagtccattctaaaggagatcagccctggctgttccttggagggactgatgctgaagctgaaactccagtactttggtcacctcatgtgaagagttgactcgttggaaaagaccctgatgctggatgggactggggacagaaggagaaggggaagacagaggatgagatggctggatggcattaccgactcgatggacatgagtttgagtgaactccgggagttggacagagggcctggcctgctgcaattcgtggggtcacaaagagtcagacaggactgagcgactgaactgaacggaatgtctgcataatgagttggagataaagattcactggcgtccatctgctagtgttgactctgtagttaagttttatagctcttcttgcaatgtttccaaaggagatttctttgccagtgaaccaacttttacagcacaaaccatgctgctaccttaggcaatgtaagaattcttttcctcagcctttcagcaccggacagcctattagggagaggagatccgatgatgtccgtctcagaagccctgggtgtgtttgcagaccctgtcgggtggggggtgattctggtggggcagacaggggcctggcagcccccctccctcagaagcctgctgtggcagactgtctgcctctggcatctgtgctgagtgctctgccctggcagcagagctgcaggcgctgccccagcagggtgtgctctgtgttctgtgaaggctgatgtccatgaggtagacgaatgagctgacctgctgttactggtcggtaatgctttaaaccaaaaaggaaggccttgaatgatctcttcgaatatttctctcaatctcatgtcctctaagctcccttaacacgctccttccctgagtgcttccttcccctctctcagcattctcctgccatctgccatctcctcacagccagtgagtgtcgggcactcagattccagttctcaggcctctctcagccctgtcctctgggctccaccttcggaggcagtattccttctcacctgcagtgtcatttgctcgcttcctgtcaccttgctcacccatctccgtggtgtggatcccgcagccctctgctgacgtctgaggtccccatcacctgggaacaaagtcctccggagaaggggagccgggctcctgagagcctgacgcccccgccggcccccctgcacaggctgccttccccaggcccggcagaaagcgccgcccccagcccaagagtggggtctctgcttctcccagcaccgcagcctccggagcctcgcccaagcccgaccctcagccctgccttctccccaccgccttgcaggtcaccacagcttcctggctccttaggccttcctgaaagttctggaagcggttccctttgtggtgatccatcccttcaacatcctgtttcggaaggcagtgtggccagccccccttctcaccgtttggtacctcccccccagcatccattctctggatgcactaagcttcctgagcttcgcactcccttgagtggacctctcccgtccacctgaa

SEQ ID NO: 24871 - DNA, 1330 bp, Bovine  19866880500347
  misc_feature (1)..(1): n is a, c, g, or t
ngtcttaccctggggaagaataataagcatcttgaattatttgtctggataataagaaactttccctggtatgagtaacgatgtctgtcaaggcaccaccttctaggaattccatgaccaccccagagctcatcactaacaaggtagctgttgtacatatcaaccacgttgtcatggtgataatcccgcattatcacaacctgggcaaaatggaaagacgttatttgatttaggaaggtgaaattaagctttttgttttcttgtgactacatctgggctgtgagtttaatgatggagaagtaatgatggggagggagagacagattcagaagcctattacagataaaggggcagcgctgagagttgctggtaggaatggagatcacgttagcaaagtcagagaaaacagcaggtcagtgaggcttgggaagaatcaagaataaagacaggcagaaccatagaagggtctccattcgcaagagtgaggttagttgactattctgggggatgtgatcagatttctcatgggttgctcttaaaacccactgtgcatactctgttaactgggcaaaagagtcaccaacgcaaagtaactgagtctcataaatgaatgaaaatcacggtcattagggtttgggccacatgagaccaatttcacttcttgggaggtctgcgttgagtctgaaagagtttgggctgaatacaaaggacaagtcttgaaggtaaaaaaattaggatttaagcataaaaaggtcaacttgtgtctgcttgctagagagagcatccaggaattcctgtcctgggcctgcttgtggtgacactttcagaatcagtattgaataataaattatacagttatttatctaagtttgtttgtcctgtctcttctggcactgcaatttggaaataagttccagaaatcaggagctgtggatcaggaagaagctgagccccactgacctggtgctgtctgtgagatctggagggtgggaaagaaatgaacgcctatgggaggtagaaatgcacggagctactggtggcttcacatgaagccccacagcagaaggttcaaagtcacagctgagggcacagttacagctgtatgaacctgctgtctgactggggctagtcacataaactgagtccaggtttccttgttgctaaagtggagataacatctttctgtcacctgaccaatgcttagcacagaagggtgacccacagggaggaacttcctaaagaggcagccatataggcacagaaaaaaggatgccgctttgtatttacatttttagcattctctaatgtcataaaatgtacaagggctatt

SEQ ID NO: 24872 - DNA, 1292 bp, Bovine  19866880554079
  misc_feature (1)..(1): n is a, c, g, or t
ntatctggttatgctgggtacttgaataaattaacaacaggaagagagataaagagggtctagggtatgtgtgtgtaagggtcatagtaaaggtcatactaccccatgcactttggtaacttgtatttttaaacttaaaaaatgtagcaggaatatatactatgtcagcaaacatacttggacttcctagtggctcagacagtaaagaatgagggccgtgagtggcgatgagggataccctggttcgaccctcagtagagaagattcctgggagaggggtgtggctgcccagtaccttggagaactccatggacagaagagcctggagggctgcagtccacgaggtcgcagagttggacatgactgagcgactgacactttcaccttttcactttaaacatattgtaaataagtattattctgaatggcatactctattgatatgaatgaaagaggttttgtaactagttatccaatgttataaaacaagtcttgcatttaaaaaaaaaattgcttctgtgagcaaggttataaggaatattattccctaaagataggctattttgcacactcatagaactcttaggataaattcccaatagcagaattatcaggtcaaagagtagtcttttgttaggagtttggttatgtgcccaatgtgattaaaaatattacacagctctttcataattcaatttgttttcctttccttttcattcttccctcttcattttcaaagtttcagatctaagcaaaaattaatagtattctcccaatttaaagagctttgtactgtgataacatgctactttaatggtgaattttttgtttctgaaatcagattcttattgtaagtgagaggcttagggcacttgtaattgcatcattgcacaagtcaacaaagtgctgtttattgcttacaaagttggtatgaaacaaagaaaaaagacattaagcacaacacaccagcagctttgaaaatgcaggaggggtcaagagcaagtttcaacatgtcatttcatttgctttttgttaaggtctgaagaaagtctaagaatatggaaacgcattacaaaagaagcattcagtcttaagagaaaatcattttatttttttcaacacgccttgggactagagttcttttgtttttgttttttaatcccagcataataaaataaaattcgttaccgcagatgaaaaattctgactgactgccgccctcgctggtctctctcaggtggccgtctgtgtgacactcgtgctgacggtacctgcactcacctgcacagcat

SEQ ID NO: 24873 - DNA, 1753 bp, Bovine  19866880583994
  misc_feature (1)..(1): n is a, c, g, or t
ncgaaggtgtggacggagaggactccaggaggaggcacccgcagatacagtaagccctgagcagagtatgtgctttacaaggctgaggagggtaacgtagctggaacaaagcagagggagcagagggccaaaaggaggtgacatcagcaagaggaagccagattattcacggacactgactaagcctgattctcagtgaagaagccaatggagaccttttaagcagcagagttaaatagtcggacttaagttttaaaggaaaccgctgtttggagaactaactgtagcaaggcaagggcaaaacagagaaaccaattagcaggctgccccaggagtccaaatgagtgctggtgaacagctgacactgggaaaactggtcaatttggtgcatattttgaatgtagaggaaatgaacgtgctaatggattccatgtgtagtgtaagaaaaggaaatgacttcaaaattgaaaactagcatcagaaaggttaaagaaacaaaatcatttggtctgaaaaccaatgaatgatttccttttgacaaggatttttaggaatctgaaatacagtataactgcaacgacaagctggcatccaacttcggagcaacgggagggaagagaggaaactgtgatggcctctcccagtaagtcgcttttggaacacttgctgccatcagtcaccgagggagagtcgttagaatgctgaatgaaggtcaaaatcaggataccattctttcccttctgcccgaaatgacttttatgtaatacattccatatcagttattgtagttgagtttgacaggaattatccagatgaatggattaaacaacaaataaccaaaatgactgaaatgtaaatagatgaaggttaatgcaatggagagcaggaaccaacaagcagaaagagataagatgcaatataacaaattataattccaaaagattcataaactgcatcaattgtctagaaaaataaaatctgaaaacctgaggtttggcatacaaatgtttttcatctctctcagaaaattaaggatgctgtcaagatgaaaaccacttctcataaagataacctaatgtttcaagactgagaataataattttaaagaaattcaagatggtctggaaagactagaaagactgaaattgtaaatatcagagtacaactttctcctagacttcagtgagtctaccatctgaggtttaagggtgagagaagagtcaatgccacactaattaacatgcttctcagtatcccgcagagacggggacaatttggaaccagagcttcccaggtggctcagcgctaaagaatccgttggccaagcaggacactcaggttcaatccctgggtcgagaagatcctctggagaaggaaatggcgacctactccggtattcttgcctagaaaatcccagggacagaggagcctggcagaggagtccgctgggtctcaaaaagagtcgaacgtaatttagcaactaaacaacaactcaaactactgtcctttaggtttgttcccattaccttatacaatatttctacaccttaagtgcttaataaatgcttactgaatgaatgaatgagtgaaactttctaccacaattacccaaggaaaaccttaggatgaggatgaatacactgtgggaagataaacacacttcctttttttaatttttttaattggagtataattgttttacaatgctgtcacacagcaacagaatcagcatgaagtatacatatatcctctc

SEQ ID NO: 24874 - DNA, 975 bp, Bovine  19866880606533
  misc_feature (1)..(1): n is a, c, g, or t
nagaggagaggtgagaaagagacattcattgctttgtttattgagtaaagtgctaccacctatttttttcttttaatggaaaggcaatgatgctgctatttttaacatctccccactcccttcctaatatttttgcattattctaacctatggagcagaacattttacatggtacgttattaaagaagatggctcataaaaattcatcccagaggcgctactgaggatttatgatgacattaaagatgcagttattaaaattgtgctttggattctgttaaatgctaagcatcgaagaaaagttgtagagaagagtggtcttctattaaactttcacatgtgatgacaaaagagaaactatggagggcttggaatgagccatctctaagataatcagagatacctcaaaattaaaataattcagttttcccatttcacaatcacacctgatggaatcatactgcctgttaatcattatgatagttctactgttttgaaaatatactaacaataagaattgaggaaaattgtttttcttgaaattgggaaagaaatttattttagcatttcattcaaagacactgcataagaggtcacacattctatgtcacagaaaacaacttaagtggtcatttgatagttgactacttgttctttgcaaagcaaataaacaaaattatttgtttattctgaaaagaaattagtctgagctggtggaaaagtcatatgcttaaataactttttaaaatataaacggataaatttagaaaggcagatgagttcttgctgggggaatgaaggaagctttagaggcagcattctaggaggttgctttaagggttagatatgcacatgaccagtgcattctcttggcaaaactctattagcctttgccctgcttcattctgtactccaaggccaaatttgcctgttactccaggtatttcttgacttcctactttgcattccagcccc

SEQ ID NO: 24875 - DNA, 1756 bp, Bovine  19866880637616
  misc_feature (1)..(1): n is a, c, g, or t
nttttattttgattacaaaaataagctgttattatgaagttcaaaatgcacagatttggatttgagtttagacaacttccagactgctcatcatactttctgtaggttgtaaatatttggcaaaccccataaattatgctttgtaaccaagtcatcaaataaacccatgattgaatactgtagaaagtaaattacaaaaatgttgtgtcttctttttgtagacaaaaaagataaggtcagatagtttattacaggtaataaaatcgtattttagtcaattggattgaatgtcagaatcactctgctgaattgaaattatgttgagtggaagaatcactgcaaaagttcttggagaagggatttattctttgttttgttaaggaagaaaaatcaagttcacatttagtcagtgctggctaatggctttgctcacactctgcagagctcccctgagatttccaggtggtgctagtggtaaagggcccacgtgccaaggcagagacaaaagagactcgagttcgatccctgggtcgggaaggtctcttggaggagggtgtggcaacccactccgttattcttgcctggagaatgccatgggcagaggagcctggcggactgcagtccatagggtcgaattgcaaagggtcacaaacaccactgaagcgacttagcactcatgcagagctcccctcctttcaactaggtcctctacccataggcaagcactgacctactcaaagggatctaaccagaagcctcacctgggactttcttaaaaatgcaaattcttgggtcttttgccagcctaataaatctgaaattctcagaatggagctcagctatctgttttgtttctctttttgttaatcaaagtgtaactgattaatataacagttatattaatatacaatgttataaacaattaagataaacaatggtatgttaatttgagggcacatcatcgtgattcagtatttttacagtaatattttaactagcctcccaggtgattctgatgctggatgaagtttaagtccccatttgcttagcatacaaatggacttagtccaaatattttagccactttgaacccaaacaagtttttatcaaattaattgacggcagcagtcaggtgaatctatggacctactgattcctgtggccttaccagaaatggttagaattcactaatacaaaaagcatgattaaaatgaatttatttctgtgaccctaggtgggaaaaagctatttcttgaagtgtagttttaattgtgttagctatccagtggttctcaaagtgtggtccctgaccagcagcttcagcggtacctgggaacttaatccaagatgtgagatcttaggctctgccctagtgctcaagttgaggagctcaaggttagagctgctgccctgcagaaaagctctgtaaggagtttctcctgcttctcttgcagagcagccttgaggaacttgcatttactggtttgaggaacttacatttactggtttgctgcctaggctcacctgagccgatgcctgctgaatgctaaaggagctcagttgtaaatctgcatttcccatccatcgtccaagccccaatatactaattgatttaagttcttcaccacattgtctcatggttttttgaggctcaagtttgagatggggtgcgtgtatgtgagcgtgtgtgtgtgtttcgtgtttccaagagtgactgttggcgtgcttttgttttattttttctttaaaccatccc

SEQ ID NO: 24876 - DNA, 1574 bp, Bovine  19866880673800
  misc_feature (1)..(1): n is a, c, g, or t
ngcgcgaagccgcaaagcttttgtctggcctgccgtctcctctccatgctgacacaatccccagaactgtggctcagctgcaactttcacaaataatcgcttcttttctttaaagctttgtacctaaatatacaaagtgtgttggccagagttttattatgatcatttacatacttacaattcctgagtatttaaatactattggcaaactaacatgggtaaaaactattatgtgagattttgtaagagcccaagatgaagaataaagacacttgggatggtcctcaacgcccttctatcattgcattaccaggattctggctttcagggacattctctctaaggattagagctaatttagttgaaaaacctaggaattgtttattgagaactattttatcatagagatctctaatctaggaattatagtactcacatgtcaaggagtaaaatagaaaatgggttttctttttaatatttttttgtctcttgaaactggagggcagtggatttgaaagcagtccgtttgtctatttgtccatccatccatgatgcatacttatatatatttatttacttaaatatgttgtatatatttaaaatattttctctacgtatattgcatgtattaatatatgtaagcagaagcagacttactcattgtttgggtacatgctatgcatgcatgctaagtcgcttcactcatgtccgactctgtgcaaccccatagacagcacccaccaggctcccctgcccctgggattctccaggcaagagtactggagtgggttgccatttccctctccaatgcaggaaagtgaaaaatgaaagtgaagtcactcagtcatgtccgactcagtgaccccatggactgcagcccaccaggctcctccgtccatgagattttccaggcaagagtcctggagtggggtgccattgccttctcctacatacctttaatctaaagaagcctgtgttgaaacttagtaacctattatcagtgaaattgtattataatacaatgagggtatgagtgcccgtaaataacctcttactcactttgggttttgtaccatgtatattacctatctcttaaattggttaatccattgactttttaaaaacatgtgtaaatgttattatacacatacttctactatgacatcagcaaacatgttctaaaatgagtgcatcttgctgtgtcctgctacacagctgtatctaccctgattatacccaggtataaggcccactacttgaaaaatccagctccctttgatttcagatcacgttttccgttctctgttgcgcagacatcagataaatgtgatttctgctctattttgttgtttgttccattcttcttccttctgtgttcttttctttattcattctcagctgctattaatttatacacaattaaaaggacagagaagcatattaattgaaaaattgattacataaccttgaaggcttgcttgcagtgtccaggaacagcattttccctgattgatttatctgccctgacttaatagaggatttttctaccaacctgacaacatcttgtgttcaga

SEQ ID NO: 24877 - DNA, 742 bp, Bovine  19866880741728
  misc_feature (1)..(1): n is a, c, g, or t
nataaatacataaaaatttcacctcttaaaccctaaataagatgaaggactctttgagtattaggcctaggatttctattgcatgaggcatgaaaactgaacccagaaggatttttcacacaataatcgaagtgctttttaactaacctaagggtaccctcatttcaatgtatttttaagcagacaggctctactcaaagagccgttacatcatatattagtcacaaaactcaccgaagatagaaaagaacaaaggattagtttagaattcctaggggagaaaaatcaggagagtacatagtaaactgaaatgcagtaaataacatttaattttaacttttaatatgattttttttctgacccaaaggaatagacacatttaaattattttgcttatttatttaccactcatgacaactctcctagttaagtattccaaaccttctaaggaatgaaaaagaaaagccctggggaatataatgtcatgcttattctcagctccatgctgagtttcacttggttaagtcatttgagggtgaaagaatggtttccaaggagaataataattccttaactctaactggaaagggattaaaagaaaaaagtatgtggacagaaattgccacgtttggaaactcttctaagaaggataatttgggggaagtgggcaaagagccaactatagaatgttcatgattgcgctcagttttgtcccaaatctttgtggcccacgtactgcagc

SEQ ID NO: 24878 - DNA, 1851 bp, Bovine  19866880769626
  misc_feature (1)..(1): n is a, c, g, or t
ntctatgaagtttttaatatatgcatgtctttactatttgatttttatatatctaaataaacatacatggtaagtagcttcatcgtgtccagctttttgagaccccaccaggctcctttgtccatgagattctccaggcaagaatactgaaatgggttgccatgcccttctccaggcgatctttccaacccaaggatcaaaccagagtctcttaagtctcctgcattggcaggcaggttctttaccactagggccacctgggaaaccccagatatacataagtatatatttatatgtattgtatacatctatataaccatatgagaacatattccatgatattttcccaaaattctaaatagacctataggctatatatgattatctaaaaggtacctgaccagagtacagttaattgaggattttacattgtttttcattcatgaccacacagggcaattatataaatgacagtgttgaaataaactatttagccatcctttaaaaggaagcagagacttgatcgatcctgataaatagaaatggaaccaaatcggttgacccacatttcatttgttcagcctatgttttatatacttaggggaatatataattaacttcacatcacttgatgttttacttcatccgacaacccatccatactggatgcaagagaaaggagccattttatcaaagtgctcagtcgtgtctgactctttttgcaaccccatggactgtagtccaccgggctcctctgctcattgagttatccatgcaagaatagtgaattggtaaccattcccttccccagggatcgaactggggtctcttgcattgcaggcagattctttactgtctgactcaccagggaagcctaactttcaataaggtttagacataaaaatttcaacagtttgtttgatgttacaattactagtcttcttaccacaagctgtgaaacatcctataaagtggttatttttatattactatgactgtctttggctgctaaatgtttgcttaattcatgattcaaaagctcccagacaagtagccaaactgggaaggagctggtacatttaggccttaagaacctgataacaacagcaccagccaaagatttacaaacaagtactttctccttgtatcttacaccattttctcactttttccaaaagaacactgcacatagtttacaaagaacctattaaagcaacttaattttaattaacagctgtgcttaaaatagtcatatgaaagtagaattttgatgaaacaagagaagcaagcgtttcctttagagttgactaaattggggaaggtgaagaggtggataaaggaggaatgtgggaatgactgggaagaaaaatgaggctttaattctggaaaatgggcatcaaagagggaacaatgcctgacggtaacttggtttaaatcactgagctccaagtcacatgtctttatacgtagcagtgtgatttctagttggaaagaggtcagagaagctgtttggctctttgtctttctaaactaagataacttcttttggtttctctcactctaattggaagcttgactttcgctttcaagatgttgctccgtgtccaagaatattgagaccttctaggatattcaccactgtggcccctgacatgtaatctgaaaatgaggccatccaactggaaaatgttcaaggatccttctgctttaaaataacaaaattctaaggtcacattagttctttcaaccaaaagggtacctacaagcttgaggtgatgacaatgtgggtatagtcaagtgctgacatctggcaggaatgtacatgtggtcgtggcctgtattgttaattct

SEQ ID NO: 24879 - DNA, 1303 bp, Bovine  19866880858051
  misc_feature (1)..(1): n is a, c, g, or t
ngacagaagggcctggtgtgataaagtctatgagattacaaaagtcagacacaacttagcaactaaacaacagcaataataaagccctgtccattttgagaaaaattattaatttaccttaaagccaaagttatttaaggttttggaaattttctgtagatgaaaacagtccagagaactagacaggataataaatggattgaagtccattgaagaatgaattcagttacataaaaattccattggtctgaagatatcagacatggatacatttcagatgagttgaaaatgtaggaagtgtgttacagtattagttgctcagtcgtgtctaattctgcgacctcatggactgtagcctgccaggctcctctgtccatggcgatctccaggcaagaaggacatgtgaataaatgatattgttacttttgggaagagcctctagtcatggaacccccagttctcaaaggatttttcacaggaagtgaaaggaaatccacctgtacttctgaacaacagaaagcagaggttggtgacattcagtgacactggctacaataattgtcaaagaactataaattcatacctgtgaggtaggtgttgtgtgaggaattaatgaaatagtgagaaaggggctgagacatatcttcattcaaatccagtttctcaggtgaaacgactccattttcttctccactcagatagcgcataaatccatccactgatatctgtcctagaggaaatgaagagttaagaggaatgtgaatgtaatatttttatgggtttctgatatcatattattatttttttgcagaaaactctggtagcatccaagatggaaaacattagccacaactgcaatttgatatggataaacagtagtctagggtcatgctgctttactattcttatccccgaatgccagaaataatagagaaaatgtaattacaagagtctcacagactttcggagaatttaaatacctaaacatggatcaactgcttttaaaatataagaatggttacaatcctatgcatggacaccaaaatgtttttagtgcttatctctgggtagtaaagttaagggtacatttcccaatgttctctcataaaaacatgttacttttatgatcaaaagacttattcacacatggttttattatttaaaataaagtgaaaatgttttcaaataataatctttttcctctgaaaaaggaaataaatatgaccataactgaggaataaaaatctgaaggttcataaaaatgaaggtccttaacatttcttatttagaatacttttcttca

SEQ ID NO: 24880 - DNA, 947 bp, Bovine  19866881083438
  misc_feature (1)..(1): n is a, c, g, or t
ncaatgttaatcattagatatatgattattcaaatttacatgaagaacaaccccctagaaggatggtagtttagcgattgcagctgctgggagaaattttcacagtagctgtttggaagtacagatagtatttccttttatttagagtctttttggacctgtgaggccctccgagaaccttaagtctggcctcattctgtccatttttcattccctttgaaacaatttcaaagtaactgggtaaagttcctctcttatctgtcacaagaaacacaccagaaatttcttgtgcagctaccagaggaaaagaaagaaatttaaaagctcagatgatttgggtattaatacctaccctgaaagttagtgactctgcttgaaccaaattctgctgtaccattctgtcacatgttagtttttattttctcagcttgaatttgtaaacgcaacagaccaacaggttttacatcaagagtgacaagcagaaggaacccactcctcaatcagagcagtaaatgtatttttaaaacctctgaaaatgttctactttttccccaaaccaaacctctcccagcactcttaaaaagcttaaaattgaaatatatttataccaattagtgataccaagggaacattttgtgcaaaaatggacacaataaaggacagaaatagtatggacctaatagaagcaaaagatattaagaagaggtgacaagaatacacaaaagaactattcaaaaaagatcttcatgacccagataaccatgatggtgtgatcacttgcctagagccagacatcctggaaggtgaagtcaagtgggccttaggaagcatcactatgaacaaagctagtggaggtgatggaattccacttgagctatttcaaatcctaacagatgatgctgtgaaagtgctgtactcagtatgccagcaaattggaaaactcagca

SEQ ID NO: 24881 - DNA, 2908 bp, Bovine  19866881089853
  misc_feature (1)..(1): n is a, c, g, or t
nccccttttcttgctgcccttgtgtctgcgtgtgggcaagagatttaattacaatgaataaaactgaatggtggtctgagactcttaaaatcaaagtggggatcatggctgaatttcattagcaaacataaatacaaataggcacatcttgtttgtaccaatgccatgtgactttcccccttttgataatttcaatctaactctgataaatttcagaaaatctaaactgaaccatatgatgtatagcactgtaatacgcaaagctcttcattaaacattttccttttttgggtacttccccatgttataaatatcctgtgaaaatcatggaggacagtttgtcagacagcagagccttgatttaagacagtggagggagccctgccctctaaataagaggtcttctctggctggcagaatgggaaaaagacatagcattaacttccattctattccaagtaactgtgagcctataaatcttacggaatgtgtcattttatacatgtttttgtctaagtctgtatcatattcttcttaaaagttatttcagcattctggatataaacatctctcaattaaaattaattattaaaaattaccatttctaattgcccaagtcatctcaatcaaattatatgagagatgtgttaatttctttgctgtcattgagcaaagtaattacatggttgatgcaaacagcacagtattttagagaaaagttttttgtgaatgttatttttagcaattttatatgagtctaaatagaagtgtaccatttctatgcttaaactattctttccatgatactgtatgcacttaaatacatttatggtagtaataatttaatggcaataatattaagctttttttccccttacacctaaattataaacaattaaaacacaaatttccaaactattccaagctgcagacacatgttatgtataaacagtaccaaattggcagaagttagtcatcaaaatccccatggcaggcagggttggggagagaggtgctcagtataacaacagttaattcttatttttcttgtttgattcaaagctctccaggaggcaggaagttactattttatttgtctctgtatgtccagggtacaatccaatgcataacatataagtaggtgctcaatagacaatcatctaatgaatgaatgcatttgatttgcaaatagcttagtttcctctggacaatgagaaatgctaacatgtattcaccatgacagtaggggctgagatattgtcagctccgaaaaaatcaggtttagactaaatacttatcatttcaccagataatcgtcagcagcaattagtaggaaaaataaattagtgaccttgataattcagtcataaacaatgctgcaaagagtcactctgatgttagttctcagttcccactgggagtgtttctgggcttctcattactgttatctgccaggagtaaacacttttgcatcaatggagccaactgccttgtgtgccagaaagaaagaatccaagtcatctaaaacaacactattgaattgttttgttgcatcgaaacactttaagttccaacattcttttatggaaaagcttacagtagtataaaataatgttctaaaagtcttggttgggtggcagtattactcaattgtattttccattttcaaagttgtcaacaatgatataataaaaattaaaagaaaacactgcctcagtggcctttgctatgtcaaaaaatacaacatgagggataagtacatgaatagcaacagctgtttaccaatggtcaaggcaccaatttagaacagtaaacaaattataattaaaattctcaagaatttttagaagaaaatgaataataaaattacaacacagaactatcaggacacagtcactaataatgaaaatcactgtggtagccacctgagaaggtatacttttgtatgaacctattgtcattcattcatttaataacataggttgcgagatgcagtggctacagctgtgatcagagaagtggttcctgcccttcacgttgaacagcctaatgggggagacatattgaatgaaaaatgacaaaggtaatgggaatcacaaaatgagagtagagtataacgggaccaataagagcacagtagaggtgggtggtgatcaacagtgtttcttgaaggaaaagacactcagctgaggccaagctggggatggggatgagtggtgaaagggcaggacagaaaaatgttctaggttaagacccagaggacagatagcctgacttattccaaatgccagtctataggctatgcttgtcacaataaatagcaagtctaagacactaacccacaccacctaccactgaagggtttatcaacattcaggtaaaaaacgatcatgttatattaatgttcaactaattcttttcaatcactgctttagagcctgatataaactctttacatcaaactggaagaactggaggacttctggtttctgatccagcatggaagaagtctggaagttgctactctgtccttgtttactcaagtgaaagttgaacaaagtgaaaaatcaagaactcttagatccaaaggagaagtgaagtcacagggcaaaccactgtccttaaaacagagagacagacgaagagtcacgacttaatggaacagagatctataagcaaaaaccgctgtgggaaccagtgctggggtgggggacactgaactgtaactgacagactgctaacgctcagtgtggacaaacctggggctaaaacccagggggactcagacacgggtggtggggtggggatggggaagggagccacgcttttgtgagttttagctcctggaggtcaactaggttctcacagtgactatcacagaaaaacctcttcatgcttccattttaaa

SEQ ID NO: 24882 - DNA, 1206 bp, Bovine  19866881116045
  misc_feature (1)..(1): n is a, c, g, or t
ntgtaatgtattttgccaatgaatttgtaatttttctgtacgatagttttgataatttatagtactttgatgtcacgtagccattgtatcagttgaagtaatacctgtttactagcaagagtttgaaaaaagtctttcctacttttttatccctttcagagaaccaacgattctttaggaactttgaatactgaatgactctcaatcaccgtcagctttagtagaatatctttcttatcttaacaagtgtcttatgtgatggaagaagacttaagagtgatggtgatgggggtgggtgcacatttcatttatccaaccaaaaataatgcagtgaaatttgagccacggtataccaccaaaaatattccttgggagaaaacgaaatattttgaaaaaccacattttccttcaaacctattagtagtagtaaaccatcttttgcacggcagtatgttcccccagtaccttctcttaaatgagtatgatgtccccttgtggccaaatttcccctccaaggagcaatttcagtgctaggatggtttgatgtatctgtgggaggtgctgaactccatgttctgcccctgtgccatcttgattcagcaccccagtgctagggtcatttggacttcattccccaaattgaatgtttctagaagactgcgagaattctagtctcacagaaggaaaagagaacagggcaagatgtttggttttgtttgccactgtttttaaagctctgtatgctggcacaccaaactcttgtctgtgcttacctttgtaccgcagtattcattgctgttgtttttgtaccgtacttggaagtctggactctagaggatgcattaggaaaaggggatttttcccaggtgtgatctgaattcagttgtgaccatgttacgtgtttctgacataggagagttgtgctgctgactagatcttcttgaatgttgataaacatgaatgactactacaatacattttgtgttgcttgttggaagaatttgcatgttaactgtaggccaatatagatttgcctttaaaactctggaaaagctacatagtcatcattagtttctattaattctgcatcaaacaaaagccatttgttaccaaactggaaaaccagaggcttttcttaatgacttcacatactgtaacaaacatgaatttaaaattttgaaaatgctctggctactctaagcctaa

SEQ ID NO: 24883 - DNA, 951 bp, Bovine  19866881175494
  misc_feature (1)..(1): n is a, c, g, or t
nattgcaggcagattatttaccgctgagcccaagggaagcccaagaagagaaccatggtcatgcccatgtccaagatgaggaaaaagagacccaaggacattaaaggacttcctcgagatcacctaggaaccattcctggaactaatatagctccattcagtgcatcctctctaccggaccctggcggtgtgtcagtacctggggaattacctgtaagagtccaaggaagtacatttgctctaatgacccaaagactagccagtggggctccctttcgttcagtttatacttggcgcctgtcatcgttagggttaagccttaggttctgggaatcaggtcccaaagacgtccttttccttccctgtaggttttccagacacggactggggagcgtggactggttcactggaactcaagggagctacctctcttgatcatttcaaagatggtcttaaacctgacctagctccttcaatgtgatttcctttctagaatgaatgaagagcagatagctactgtctgtctgtccgttctgagagctctctcctaccttcacaaccaaggagtgatccacagggacataaagagtgactccatcctgctgacaagcgatggccgggtaaggttttcaggtttggtccgtccccagtttgctctgtcacttcatctgtcacgggtattatcttcccaagagcactttctcataattctgattgtccataagtcacctacaacacttcccagaaggcttacaaaaaggaaatcaccatcctctgtgtcatcctgttaatcagaattatctgtgaactgaatttgaaggataattttccacttaacaataagcatgggaagtaaaaatatggaaaggtcttttattttcctgctacatgcttatttttgttggtggggaaaaaatgactttctaggatgtgtccaccctagtatcacta

SEQ ID NO: 24884 - DNA, 1595 bp, Bovine  19866881233700
  misc_feature (1)..(1): n is a, c, g, or t
ncaagaatactggagtggactgccattcccttctccaggggattttcctgacccagggactgaacccaggtctcctgcatttccagcggattcttcacagtctgagctaccagggaagcccgtatactgtttactataagcaaatattcattccatcctcacagtaactctatgaaatgggtactatttttatgcttattttatgaatgagaaactccaggcaagtagcttgctcaaggtcacatggcttacaagtgaataaaatgggatttgaatgcaaaaccaggttttttgttccatgccattaactactatgctagcctgctgtagagcacatactctagtactggaaaaaggcatcaataaatcatcaccatcatcatcatcccaacaggaagggctagcattacctgggcagtgatcatgtgccaggcacagaaatcctataagaaaggtactttttaattcccattttcagttgagcaaactaaggcttagagaggttagcaacttgtctaaggtcacaggggtactcaatttgagtgctggaggcagtgccagggcaacagaaaggcagatggtagtgagtgtgactgacgatgttttatctccataactttcccagcactagcccggatgagaaacaaggatgatgaaaaggagagaaccctgcctctgtagcagttggcgtcaatctgggcaccacagattagtcctaaaaatagccccaaatgtgaccaaggaagcattttttcccatgatttacttatctctccaaaacgtgtgactttaatctttctgttaaaagaagctgggctcaggcaggacaaatgacccatctggcagaggcataaggaaggattagctctttgatttggctttgtctatcaaggtctaaaattcttttccagacttaatttacattctattctctgcaagtaatttagaggcacccgctagcatttttattctcccaatcatgagtctaactcttagaaagaaaaataaaacacaggaaaaacatgttgtgccaaggtaagcacagcaaaagtgctaaacagaggctgtgatattgctttgtgggttttgaaaaaaaatatacaggttaccttttaaaaggaacagccaaatgcatgcaaatattatctttcaaggctggaagcacagagaaatctctacaaattatgctttggaagacagatggcctaagaatcctcacagagttatcacacagttgagatgggcaactggacaatatctctgccagctagcgtggccaccagcctcactttttggagtcaaatgccaattgggcaggatctggcactcacatgtttggatgtcactgggattaggcagttgaaaatccattcatcatcattcaaaccctgctcttactgtaatgataccagagcatgttggaaagttactggtccgacggcttagcacctcctaaaaccacttccaagcagagccctcagaagtaatttccttggctcatattggttctcagtgctgtgactgtgatgtgtgttctgctagaccagctaggagaaagtaagtgcagatagttcaatatcccagggctcaccaaa

SEQ ID NO: 24885 - DNA, 1883 bp, Bovine  19866881292173
  misc_feature (1)..(1): n is a, c, g, or t
ntccccaaaataacccataaaatatgcatcaaaattattttagaaatgtatgaaaagaaaacatgtgtttatagacttcattccatgagaaacaataaaatgttcacacacaaaacaagagaaaaaataaatcagagcatgattgcaatattatttaaaaatacacaaatgcatagatgaaaagtgggtatttgtatcgatatattagcagtgattatatcagggtggtttgcttatgagtgctatctatttccttatataaatggacattttctttatgtttaaggacatattcaaaaagtagccttttatccacaggtttttttttttttttaaatagtactttcaatgggattattttaaatcataaattggaacacctggagccttgttcctaaaacttgccacagctgacacattgcacatcatttttaaagaagtggggttgaatatgtcaccaaaacggcagtgattccttaggattataaattttaacataataagtcattatgcaaccatagtaagtccactcaggcctgagggaaactgttaaacaaatggacgtgtttctctccctggcctctttctcaaaaggaattgaatgtcaggagaatagatccattattaaaagggaagcatatttcaattgcttaaagaccttagcatttaagaacataaattattactctgatatcaatgtttatctactagacattccattttctatttaggtctgttgttattcatggcatatattatctctgaatctcttgacagtgctaaatatttataataacttatttttgttcccagaagtggaaagttcacatcaaaggattggaaacatgtgaaccatgacttagtccaggtctaaataaatgataattcattgaatttaaggcaccgtccgttttcaggtctcccgttactcatggagtgcctagaaggaaaagcaccaacaaattgtgactatccattaactatatgatgcatcttagttttagaaatgttaacatattttttaagtgcatattctaaaattgattaaataaatcaataaaatgcagactgttttaagctcaagctctgtcacattaagtgttttcttggcattaaataaaacagtatgtagtcatgtaagctaccactaacctcagtggtgcctttgggcaaatcacagtaaggaccttccttcatcttactgatttatactggagcaatttatgagaaacatacaaacctgccatgtccatcctgtgaatagtgcccctgagaaatggtgctcaagaacctgtgcacacatttgttaagccagaaactgttaaaaactgcattaattctttcatcatcaccataacaaccttaagaaatagacattgtgtgatccttgaagtgaatccttttggtgcccacccaagttgcctctgccatctggtgctcccagctcccagctgtagtgaacgttggttgctaacagctcagaacttcctctgcttttgaaaactgccttcacggaaggcacactgatcgggaagagggatttctcatctgagaaatatctagctgctgtgtcaggtactcgatcatgcagcatatctcattatatccctttgagctacttgttacacagctgtgtctctgacaatgccctgatgcatttgatgttctaggcatcaaagatttgtatcaaagcaggtgtagtgctacttgcaaacattagcaaaccacacggagaaggcagtggcaacccactccagtactcttgccgggcaaatcccatggatggaggagcctggtgggctgccatccatggggtcgcacagggttggacacgactgaagtgacttagcagcagcagcagcaaaccacagggatagatgaag

SEQ ID NO: 24886 - DNA, 734 bp, Bovine  19866881315941
  misc_feature (1)..(1): n is a, c, g, or t
natatgacaaccattttcaaatcagataaacagtgggatataaaacagaggctcataaaaataaaaggaaaatggcatcattgcacattagttcttagggattaactttaaatatactctaaaattgggaggcagtttatcaaagcagttcatcctgtactggcattttcatttcacaaaggatcagaaagaaacatggttaaggtctgtgtagcatgcatcgaagcaaaccaatatttttaagataaattctgattcaactgccaatattaatttcagctttacaatcctttctgtctcctaataccttcatctatgagtcgagtgatgattcaacagagaaacgtctggtctctctgtatctgtgtcctgctgaatctgctaacttaagatttcaaattcacgtattccaggaaaggtgtaaagttcatctgatattatcaatagcagaagcccattatttggcaatgcgtgaaatgactgtcatgtttttttaaaaataaaatgttcactgataacaaacaggttggaaagtcacaatgttccctggtgaatgaaaagcaagtcctgaagtttacagagcactcatccacaatcttaccacatccacaactcattcttagactcatggactagaaattgaagactctgcttgacgtacatccctgagcccaggaagatgccacaaaggcctccgaacagagaccaaagagatcccaggaaataaaagtcta

SEQ ID NO: 24887 - DNA, 892 bp, Bovine  19866881363673
  misc_feature (1)..(1): n is a, c, g, or t
nctttgttttgtggcctttaaagagattcttgggtcaagcctccaggggaccacaaaaagcagttttcaaaataatgattcatactggctatacttactaagattttttttttcctaccctaaactagagctggcaaaaaatatgaagtcaagctgtgaatttcagactttggtcatttttggtcatctctttgctagtctctaggaaataaagagtttcaatttcaggatatcagttaacactttaattttaggaagttacagttatttggccaaatattcatcattttaattttataaactaaatacagtatcctcagtcaacacgtcaggagcccttgtacactgctttactgcttaaagtgacatgccactcccaaattatatttctgatattaaataaccgaaacctatgggtaaaatttttatattgctaacttcttttaacgacctagaaactaacagaattatgaagacaacaagcacttcagcagcagttaaatgacgctggtgcaaagggaaaacatgtctttgaaaattctgtgctctgttctctatttaaattatggaaatgactgttgtttggcttaaggaaaagaaaaacacaagtgatctgaagaaatgagatataagacaaaccatgaaatacagataaatcacgcatacccttattcaagaaagttctcgtcccttcagtttatatcacaaagtaattttattaaggttttatggaaaggtcactattacatttctgtaatattaaaatctatcttagcatacagaaatcccccatgagcctgaaatattagttcaagactaagtttattaaggttttggcatgactcgatattaactttctccaaatatgacaaccattttcaaatcagataaa

SEQ ID NO: 24888 - DNA, 895 bp, Bovine  19866881400181
  misc_feature (1)..(1): n is a, c, g, or t
ncactttatgaaaatttaagacagaggtttcagaacccataaagatcccccaatcttctgaattaatttgacccagatgtttacattatatctctctctacacacctttctgaagctcggtggaagctttccataccaacgaatttaaacaaatatgaagctctttaacatcagtcctccagaactacttgacccttcagaaatgaatttcaaaacatccattcatgttagaaatatggtttgctaaaaatacatactggatgtgattcaagtgcttgtttcaacaggagatctccaaatagatcttcacagtatttggacatcttgtactgttgatatttgctggagggaaagaaccgacatttgtaaactcaaacatccattaactgtccaggataagaacaagaaacatccattcctagcgattaaaaactcccactcaccaaaatgattgtgtctttgacgctaatgagctaattgatgtaggttaaaaagtagattttgctgctgaactaagagctggtaagcagaaaaaaagtgtctttcaactccatcacatctgactacaaatatattgccaagtcttctaactccatggaactttgagcaaggtgtcctgctctctgacctttggtttagaggaagcatttctaaaacatattaagaggactctttttttctcttttggaggtgttggggaatagtggtttgagttccttcttttttttcccataagactataggtagttagcacttcacaaaagaaactgttcagttattcaaaaagatgcagagcagggatgggaaatggggattagtaaacaacacggagagacagggtagaatgaatcactatacctgcagtgattttcaaaggagagaattacaggatatt

SEQ ID NO: 24889 - DNA, 836 bp, Bovine  19866881406343
  misc_feature (1)..(1): n is a, c, g, or t
nattgttccccggcctcccttctccccaatatctgtcactttgttaataaagtccccaatccttgaggcaactgacacgtcagagtagctcatgggtgcttggctagaaaaatatatatatatacaaatgaaatatgtctgataatgcgtgtcagctgcagtatggggccaggaaagggtgaccccgggcatgggctgagtcctaaggggcctccttcctgtccccaagtcaccacgagcttctgttctagagctgctggtccatctgcatccctttttcctaagaaagcaaattgatagggtcaaaatttattactgtggttgtctagtggtctggatcctgcatacatatgttcacaagtagcccgggggactgtctgtcttagaatcaagtcacctgactggcacaaccagctctggtcagcagagggccatttcaggagccagtttggggagtgaaaaatacccagaaaggagaagtgattttattttcctttttcttttcttctatcccaccatcttggatctttgcatcacagaaaacagaattaatagcaactttttttttttccttttctgccctagtattactagaacctttgcatcggggaaaacagaaaaggtgatctttcaagcactcaaggagctaggtcttcccagtggaaaggtattcattaatttaataacattgttctaaaaccactttgtgtatttttgtcctcatgtaataagtaagattatttatattaagctgattcagttagattcagaattaggttcagtcacatatagtacagttaatttttcctttattctcttcccttctatccttcctt

SEQ ID NO: 24890 - DNA, 782 bp, Bovine  19866881485953
  misc_feature (1)..(1): n is a, c, g, or t
naaacactcttttacgtgcgccgtatttctagtaggctggcccacggttggaccttctggctcctatcaggaagagtcagaggtgaaaaccctgggattacaagtaatcatcactctgctgcatgaacctgtcagttctgtagatcctccaaagagagagaacggtgcctgatttatgacaatgcttctgttctttccagaatgatgaaattgagcctgccgcatttacttatgaaaagttctatgaactgacacaaaagatttgtcctcggacagatatagaggatcttttcaaaaaaatgtaagttccgtttatgagaaagtgtcacatcgaagttatccttgctcttttagactttaaaaccattttttgtcctaatatcttcatataatatgttgacagtatctaggaatgtctagtcagggttacattttcaccccttagtttatttggtgtaaaagttcactctgattttttgagaaacttttacataagttggttgcagcacctggaacttcccccctcctctccctgcattggctttactaactacctacaatgttaacctgctcctttaggtattaacccgttatgtgaactaacgagattcaatttggaatgttattatgttgttcaaaagtccattcattccaattatttcaaatggatgacttacatgttgttttataataacgcctttggataatgcaaaagaaggattgcggatattttctataagttagggggagtgatttattgcctttgctgtcttgggtgtttt

SEQ ID NO: 24891 - DNA, 1293 bp, Bovine  19866881545868
  misc_feature (1)..(1): n is a, c, g, or t
nctaagtaaaggttttctccttcccccaagtacaggtcttgttgaaggaactggctgctgaaaaatcacacgccagctgcctaaagcaacccaaatgggacatgatagggtttggaatgcacagtgtaggggcagagagtcatggtcccatgtgccctgaacatcctatgtgtgagcatgcagggtgccatctgatggcttgtccttggaaggaaaaaaataatggactcaccagaggggaaaaaaaggtttggtcatcaagttttcctttttctgaggtttgtgcttgcatagtttaaattgtaataaaaattaaaatgcctgaaatgtttgtgagttggaattctctgctgctttacctcatgggtgcctcccagaatgcttcctgagatagtgacaggacccctagcagtgcccccagagaatgttctttgaggatctcactggcagtcagaaaagaggatttggtgttctggtggttcagagggcaggcaggggtgtctcctttctaaggttgcttgttgtccatgtgtatgattttatcttttcacatatgtcctagatgggacatccttataaacagctttatcttggtcagcaaagtcagagatttggtgtactagggaaactcacatattactagacacactttgcttacctttgtggataattgattttctaaaaaccaaagttgttaaaatactaagttttatatattttatcataacccaggttgtacaattgctagtctaacataccagactgttaaaatatcccaaataatttaactttcgctgattctgaacaaccgtgtctccctgggtcattatcagtatggtatgaatgtcgaattctagttgttggggttccggtttacaggtagagtcaggtggacatctgagcagtgcatcatgcggcctgtggcaggtgacaactgcaggggcgggcgggaggggcttgaatcaagctcagaacatgagttttgctgaacatgggatgtttttgtttttcctggccacaccccacagcatgtggaatcttagttccacgacaagcatgtagtcttaaccactggacctccagggaagcccctcaagtggtgatgtcttagctggaggggcttgctcctgttggaggcacagatttctgctgatttaggcttgacctatgactgtgcttgatgaggtgttaacatgggtagtgcagatgctgggggcacagaggggaagggagggtaactggattgcagagttttgagagaagcagtgatggcttgtgtagcatctgaagggg

SEQ ID NO: 24892 - DNA, 2098 bp, Bovine  19866881782886
  misc_feature (1)..(1): n is a, c, g, or t
nacttgggtttcactttaaaggactcctaattggcaaagggatgataatgaaatccaaacatacagaattttacaacacagtttaaccaggcttcgaatgataagaactattatttattactttcagcatctgatgtttatgaaagcaagattgtgcagttttgcagagatcaataatacaataactgcaagagtaccagtaaatctcatgctgcagaccagtcaggcattaaaaatcaatgcaacccaatctacttgagtttgacgccatggttctcattgtctctcctctgtgcctggaccagctcaccgtcagctctggctcccagtgacagcagccatatttcatggtccttctttctgaggctgctggccagtgataagctataatggatctgtccctaagaacagctgtctccccttgatcctggaaagagatgaaaaagtgcctctgctctcacaagctgtattaaccctgacaataataaagtgtgtaattaacagctttgccctaataagacctcacatttcttttttgaaacaatgacttctatcctcctcaaaaatgtgtttcattttgtctttctggtaaacacttctcaggaggtcaataagctagacagtcccctgagtcaagaataagccagggcctcttagaaaataactgactttcaaacaagccatctaaacttgtaccctctttgcagagaacccattccccttttctcacaaggaatatggctagaaacagctgggtacataatcccaacaaacaaacagctctgatatactttcatccttatgggaagaaatgttggcttttattttttttaacatcaaaagaactcagatcttctaacttctttcagttttctacacatactttttttgataaccgcagagagtgaggctaatcaggtgagtcagtcgagaatcacatactcctgcaaaatatgagaattagggcagggtatctcaaagtggaggaggtaatgagggtttctaaccattaaagccattttaaataaattatgcaatagtcttaatcatgcaaaatccaaataaacaaattcctttactataaatattatgttcaacagaaaatataaaaaaatattaacagaatgcatctaaggaaggttctgtgaattttgtagagatcaagattttgtcattacagtaattgggttttctctgcctttgaaagcacaataaatctaacacatttagtcatcagttcatacaaggataacacccaaaggtgacttcctatttagtgttaacttggcaaagcaaatgtatagtttatagccctagttcttgctgcttgcgacatgcaaggcagccaggctggagtcaactgaagtcagtttgcccagagttaatagttaaaagggtggtgttggagaagactcttgagagtgccttggactgcaaggagatccaatcagtccattctgaaggagatcagccctgggatttctttggaaggaatgatgctaaagctgaaactccagtactttggccacctcatgcgaagacttgactcatttgaaaagactctgatgctgggagggattgggggcaggaggagaaggggacaacagaggatgagatggctggatggcatcactgactcgatggacgtgagtctgagtgaactccgggagttggtaatggagagggaggcctggtatgttgcgattcatggggtcgcaaagagtcggacatgactgagtgactgaactgaactgaactgatgttatagcagcctgatctatatctttaacacaccaaggatgacttaaattaacagatgtattaacaataatagccaccattgttgtatataagccatgtgccatgcagtgtgctagatgctctcagtatatatgatctcatctgatctttcacaataactctattaggtagttattatcagccctattttatagattaggaaactgaggcccaatgaggtggacaagactgcaatgaactgttgacagagccatggcttgaactcaagtgtttaaactttcgattttgggctcttcctattaccctgtgctgggtacttacctgctctaaatgagtt

SEQ ID NO: 24893 - DNA, 1501 bp, Bovine  19866880052542
  misc_feature (1)..(1): n is a, c, g, or t
ncagtgacttctcctgtggtggagcacgggctttggggcgaaggggcttcagtagtggctcccgggctctagagcacaggctcagtagttgtggtgcacgggcttagttgctccatggcatgtgggatcttcctagatcagggatccaacctgtgtctcctgcatcagcaggcagattctttaccaccgagccaccaggaaagccctttatttagacttttaattagagattgacatgtgctttgttgtgttactctctgatgagacaaatgctagattttttcccctctcttatcacactattagttgttattttagtcactcagttgtgtctgactctttgtgaccctgtggactgtagcccaccaggctgttctgtccatgggattctccaggcaagaatactggagtgggttgccataccctcctccaggggatcttcctgacccagggatcgaacccgggtctcctgcattgcaggcagattttttaccatctgattcaccaaggaagtccagagaaagagagaagtacagatacacacacgttacacagagtttacaaagaaattataaagcaaattcctgcatgatcccaggagccatactagtctcttgagcaggagcgacaagatcagatgtgacaggctggccaaggggacttgggtaggtaggttcagatttgagacctccagcatgcactggtgggagaagaggagctgaggggagtagccagcaggctctggatctgctggtgggctcagatggctgaaggtacccactgagtggacggctggaacggggctggtgggctgagccaggcagagcaggagtgtggttggggaccccatggacaatggggtggggaggcaactccgggagctcttccctcccccatcctggcaccagttgggagtacagctggggcatccaccgcactgtgtctttaagaggctctgtccttccagcttctgacgtcagggctagggagggcccaggagattcgctttacttttcctggaaggggaggagattgaaactgagtggcctcgggatggaatggggaagcccccggggtgcaggaggcccctgagtgaaggcagagactaacatggggtgagcttctgtgccagtgctgtgtcagagagagagacaaaagagaggaagagagtgggagagagagattagagattggtggtggcggccctgcaatcatgtgtcattcatcgtgctcctgcgtgtgtgtgtgtgtgtgtgcgtgtgcgcgcgcgtgtgtatgtgtgtgtgtgtgtgtgtgtgcctgtgcgcgcacaggcggcacctcctgactcccactgttcctgtcttggggccttggtctgggccgcacagtggccagtggctcctgttttatgaatgcgattgggtattttgagtctggggcgggagggtctgtccttagtccatcccaaagctgtgatgtcagctggcctatgagatggaagaccctccacccagggtgg

SEQ ID NO: 24894 - DNA, 1304 bp, Bovine  19866880197737
  misc_feature (1)..(1): n is a, c, g, or t
ntcgtagttggactgacatccctggtgatcggatcctcctgtttttgttctgaattgttagcctcaattggtttgtaggtttggaaaataataaaattggaactcaggcgatgtgaagattgtctatttctgtgtccctcagtacatatgtatggctctgacctcacctcctctcccttttcagggtgaaaaggctgatagcttttacattatagagtctggtgaagtgagcatcttgatcaaaagcaaggtgagtttatgtgtgatgatgtgggttgttccaggggagatccagatgccaggtatatgcacagaatgtaactgtgtttactttaatagtgtgaagtgtatttcatgtgccagaatcataattgttacgtgagatatgtgactgacagagaccagggtttaagccctttcattgataaatatttagtatatatatatcttttttgttgcttttacctctgttatgtaattaaggatatgagaagtagtgacctataaatcaataagaaaaagggtaagtaccctaatagaaaattggaagattattgaatatataacaaagaatacattgtgagtgttggttatgaaaaagcttcctttttagcatgctaggaagggagtctctagggcagttattattgtggccatttaatggatagggagacccagaaaacacaatgacctataggtggaaagagtgattcttacaataaattcatcatcattagatattgtttcagttttttttttcctttcagcactttcttttttttgttttgtttttaaattttattttatttttaaactttacaatattgtattagttttgccaaatatcgaaatgaatccgccacaggtatacctgtgttccccatcctgaaccctcctccctccccataccctccctctgggtcgtcccagtgcaccagccccaagcatccagtatggtgcatcgaacctggactggcgactcgtttcatacatgatattatacatgtttcaatgccattctcccaaatctccccaccctctccctctcccacagagtccataagactgatctatatatcattctagaaaatgttggtctattaattggggaacatttttattttattacttttaataatagaatacttaagctgcattttactcaaatgatgatctcagctccacttctgtcacctaattttttacccattccctgtattgttaatggtacatttactctgaatctttaaatgaaaaccaaagtcgtataggaaaccccagtgcacaggacagagaagttttta

SEQ ID NO: 24895 - DNA, 1887 bp, Bovine  19866880403748
  misc_feature (1)..(1): n is a, c, g, or t
ncttcagaagattttatttgcaggaactgggtagtaagaaaattctatttcccatcgctcttgtgtctgcacattctgggattccctagcaggcccagcacttcagtcatccatgggccttcagcacacggccctcaaagtactgaagaaataggaaatttgaagcatctctgtgctcaggaggcagccgtgttctccgtcttcaccgagagagggaagataggcacacacagatcctgtgcagagccctatagacacataccactctgtgtgtcccaggcctgaggtcttcactgagaataatcacaagagatgcctcacaccaaggaggtgagacgcagtcacccacttccactgtgtaactgctaccggtaaggaggacaccacactggcatctttagagaaattactctgcagcataaagaccctccaaactaagccagggtcatgcaaacctgagcatttccttttgacatgacccaaatgcatggttcacaaatggtactgccttggaggaagtaccaaagcaggtcagagaaatattaaaagtcatctgtgtttagctacagtgctaaacacaatgcaaaagaagaagctaaggttttattgcctcatatgactgtggctaagatgctaaaaactgttaaaatgatgaaaagctaaaagacaaaaatattttaaaagtcagtgttaccggatcaagatttttgaaaagaagaatatctttgcaagcttcctgaagtctgcaccgctgttgatcagttttaggatgaatcacctgccaatccaaagaaaacaagggaaattttaatattctattttaaaatattacttaacttacaaattagaatatttctttctcctaaaaatgggaaaaattaagagcacatttaccataattttaattttatacaaataccaagcagtaccctgatcgtggacaggcaatgggatgggggtatggctggcagcaagtcagctatctgctgggagccccagaatccccatccataaagcaggaggttacatgttcattcattcaataaacattttcatcaactaggtgccaggcaccatcccagctctggggacagagcagtgaacagaagatacaaacacctgctctcaccatcaataaatacataaaggatggtagagagtgacagggctaaggagaaaaatacggtggggaagggtgattaaaagcgtgtgtacatgcaggcatgtgtccagatgaggcctgagaaggtgacatttgtgtcaagatcctaaggaactgaggacaacctgagggaatgagtcatgtggacatctctgtgaagatgacctcaagcagaaggaacagcaaatgaaaacaatatgatgggtgaatagcatgtttgagaaaaaccaggagacaggtgtggctgacaaagagcgaggggaaaagatcaggaagagacctggttttgggcttaggtggagggcaatgtaaatcacagaactggaacttttctctagtgacatgggggcactgaggaaggaaagagatctgacagatgattttaaaggcttaagttggttcctaagtgaagaacagccttgacggatacaggagcggaagccaggaagcgtctgtgattatcctagtgttaaactggggattaagaccaaggtggtagccatggaagtgttgagaagtactggaattttggatataatctgaagaccaagcccattggatttgctgaaaaattgaatgtgggtataaaaaattaagaggagctgagggtgaccttaaaattgtggacctgagcaacaggaaggatggagctgccatttaatgagctggggaagactgtgagtaaaaagaatgtctcaatgaaatcatcaggagctcactataaa

SEQ ID NO: 24896 - DNA, 1721 bp, Bovine  19866880453162
  misc_feature (1)..(1): n is a, c, g, or t
nacctgcaggagaggaaatagcaagagatgatggcctggcttccagagcccttgaggacttagggctcgaaccagggaagtgtgtgtgagtctgtgtgtgtggggtcaggatgtgggtggtggtgtgtatgtcttgggtgggtgggtgggtaagtgtgttttgtgtgggatgtgcttccgggtatgtgtctctggctcgtatgtacaggcagtgtgtgcatgcatctaggtgtgtgctcacacccatgtgtttgggtgttggtgtgtgcatgcagggtgggtggtgtgtatacttcttggtgtgtgcgagcatgagtgtgctcacgtgctggtggcagcctggggcaaggcttggcctgggcctgtgggcagggcatgtacctgggcaccctgagagggcagagtttgggcagagggcaaggatgggaaatgctgagggcgggctgtaggggggatagggccaaagtgggggccagactgggcccaccggccactcaactcctccatagctgccctttcccaggccctgaggatgcctggttccgctgccctccccctccatgggctccgaggaggcgtcccctgtggaatgtgtttggtggctgagggccaggctgggcccagctccactagcagactgggcagcggggaggggtacctttgtgctgcctctgtggtggggggcccatgttcctgccgcccagcccccagctccatgctctgctctctccccggctaggtgactcccgctcagggcatgccgttgtctcctgatccagccggccctgccaggtgagcctggcctcacacccaagtgtgggactccccacctctcttaggggctctccaagctggggtccagctgtttaggccctgtccatggcagccttgaccctctcatctctccggtctgttggttttctgcttatcacccttctggattcctagcctgaaaggcccttcacccacttcttgccctgccctaacatgcaggtggcccataggatctcgccctctcgtttcctgcccaggaaaccgacatccatgcagaggggccttctgggtcccttcttcccattccctggctctcctgccccttccaggccctggtccccaggagcaggatgtttcccgcatctctgcctctctagcccctcacccttggaccctgtgttgacaatgggcagtctaggtgtggggtgggggctgccggtctcctgagagagtgatacttacagagaacaggcagtgttgacgttcccaggacagcgtctgctgagcccttgcaaatgtgtggtcctgtggtcctcgtaagcgcggtgccatctcagcctggttctcgctgtcttgggaggggcatcttggcagtgtcacagccctgtttctcaccagtggtcccatggggctcaggtggccgcccgagccctgctcacgctctctgtctccctgccaggtgaccatgcctgcccttggcctagctctcctccaggcgctcttggcccggatgggtcctcggcctccaacccctgccaccgacggctttcactcccaatggtacgcgtctgcagcacctggctcgagaccccacctcaggcaccctctacctcggagccaccaacttcttattccagctgagcccggaactgcagctggaggccactgtgtccactggccctgtgctggacagcagggactgtctgccccctgtgatgcctgacgag

SEQ ID NO: 24897 - DNA, 1418 bp, Bovine  19866880484057
  misc_feature (1)..(1): n is a, c, g, or t
nttcaaaaccttaaatacatgggttcatgatgatgcggaaaacctcactggttacctctggaggatgttaagaaaccatctcgttatttcaaatagtaaactaaggaaaataagcatttaacctgcctttcctatttgaactatacttcatgataagcacgtagttgataaggaaaagcttctctttcagcaggattccagctcatgaatgaaaaaggaatgacaaaaaaccacctacttaaaaaactgatttaaggcaatggcaatacaaaagagagggacaatgaaactctgcttcccatcaacaggtaaataccatttctgaaggagtcttgcctccactccctcaaactgcccctgaatctgatcaagcctgtagatcaaattatcaacttaatagaaacagaggggaaacagtaatgtgtaaaagacaccacaagatgtaatcagtaaaatccagagggtgggtaactctagaagaccgtttctctgacaagaaatttccaagaagaaaaaaacagaaacgtatttttaaaagacttaaacgtttcaactgaatgcaacatgtgaacatcatttggacccgcattcaagcaaaccataaataaaacatttataagacaattaggaaaatgggaaaacaaattagatatttgacagtaacgaattactgtccactttcaaggagtaacgatagtattagtgttttaaaatatctttatcttttagagatatacgctgaagtgtatacagatgaattatcggacacttgcttcagagagagttcaactgggggttttgggtatacagagacaggagactgacatgagcgggttaaccagctgctggaactgggtgacggtaccattaggttcagtgcattctctatagtgtgcatccaggttccctgattgaaaaaaagaaaggagcctttcccttgtgatttcttcatgtggcagcctggtaaaccagactgaaagatcagtccaaccccaccgcagactctggcatttaagctctacttggggacttctgcaagtgtgtgaaaacataaaccagcttcttgcattccagcgtaaagcacctcgaatgcaagttggtccctcaggaacccatcaaacttcctccccagcacctgcattcccagaccagcgctcagcccagagggaagtgatgtctgcccagttatcacgcagggtgtcctggcacaaccatgactttaaaaaatccaatttctctctccaagcctgaagggtctcctcccttgtcctcccctctccccaatgcagagatgccctgtgagcaaaggatactgtactggttccggtgtttcgcattctccttcattctctgtaactgttgctggtgacacttcatgctccaagggttgtagtgtttaagctgagaacttacattcc

SEQ ID NO: 24898 - DNA, 1328 bp, Bovine  19866880526958
  misc_feature (1)..(1): n is a, c, g, or t
nttccccgacgcagcacagctgtgcccgggacacacagagtctctcaggtgctggtgcagccagagctcactccccgctctcctcacttatctctgtgacaatgtctatcaggctctggagcccaaagatatagccagcatcctggccttcgtggaccacagtgtcctcaccatacagcctgcacgtggtgtgcgcaaaatcgatcatgcgcacgtccaccgagctagtgccgatgggcttgtaggcataggcgccggctgactcgtcagcagactcttccgacaggtcctccaagtcctccgcgtctgagtccagggccacttcagcccgctccttgccgtcatagatgatcagcagggagcttgagtagaagcggtaggattcttgtcgctccagcacgcccttgagttcagtcagcttcctgagcaccgggcccaggagctcccggcgcaagtaccggccgttgtggaaaaactggaaaagtgcctctttgaagccctgtacggacagcttccgtccgtggtacttgttcatgaacatgagctgcccactgcccgcctggtacacctgtgggagggagaccagcaggtcagggaccgacaggcatctctggcagagatggcccagccccaggagagtggcagcaaagacgacagccctggacccgatccttcaactcgttcagtataccagtcacacgaggccctgtccttgccagtcaacacccctacggccctctgacttgggcgccgtcgctagccctctgttcagtgtgtggcttggtggggagtgcccaatgtctctcctttcctctctctccagtccatagcttctggactcagccagtttggccagccccagagagcattacccacacacacaggctttccttcctcaccagagagcaacaggatcagtccaatctggaatcttttgagaaaatggggctctgccatggtgggagagtggcagctcccagctgcccagccagcccacccccaccacatgccaacactcctctcacctgcatgccgcacacgcgcacaccgatgactgccgacgtgctctgctggcacttgcggatctggttagctgccttctcctctgaagcatcgtcaccatgctggcgtgtccccattttgaggtccaggacacaaggcacctcataacaggaagtcaggttctccagtaagataaattctgagtggttaaaggataaggcccctctaaagaaagggtgctgctccatggcactcccagggtacagggcctacacatggcgtcccagaaatcctgctctacctcccaggcgggcggcccagggctg

SEQ ID NO: 24899 - DNA, 1024 bp, Bovine  19866880531824
  misc_feature (1)..(1): n is a, c, g, or t
ntcaacccttgcctcctgtaatggtctgtgagctcccagagcccatgagttggtctgtcgcgcccacgtctgagttttggattcaagccacccaaggcctggctggtggtggatacggggtgtgcatgtgctgctggctcgttggaggtggacaagatgtgtgtatgggggaagacacctgaagagctgtctcccaagctcctgaggggcatcccgggggcagccaaggtcaaccccatatacttgagggtgaaacaggttcaagctccacgccccagaagtggctttatctgtgttgcccagtctcctccagctagagaggtgccgtctgggagtgggtgtggtgtggactgctggtcctgggtgggggcgagaagccctggatcttgactggctttatttaggttcttttcttttggccgtgcacggcatgtgggatcttcgttccctgactagggatcgaacccatgctgccagcagtgggagtgtggagtctcggccactggagcgctgactggctttctgtcaggttcggcacagtgatcgccatcggggtgaccctctttgtgatcgctgtggtcaccgtcattgtctgctgcacctgctcctgctgctgtttgtacaagatgtgccggcgcccgcaacgtgagcatctcccctctgccccacggtgaccccttggggacaggtgtagaccccgggtggtggcagtgggtttatcggggccctgactggcctgagctggagggagggtggccagctcggcggtcctgactggggctctctttgcagcggttgtgaccaccaccatggccaccacggtgacccacaccccttacttgcaaccgcccagctaccctggaccaacgtaccagggctaccacttccgtggtcccccagccggggatgccaacagcaccctacccgacccagcccacgggcccccctgcctaccatgagacgatggctggtgagtatgcctgccgactccgccatgcgtgaccccctgcagccgtggccccag

SEQ ID NO: 24900 - DNA, 919 bp, Bovine  19866880610390
  misc_feature (1)..(1): n is a, c, g, or t
ntcgccaggcctgtggcagctccagctttgtatctggtggtgcaggcagggtaaggtctggtgagatcccatggcgtctgaaaggcccggggaatggtgcatgccagccttggttagagaccccccccccccctaccccagagtctgggggtccgtgggaagctctctgctgccaggagcctggaaagacacatcggaggccagtcctgtgccctgaagcagaggaaccctgggcagagaggcaggggcgccctgggaggggtccaggcctcgtgggacaccgtgttccttgcctttcagtttgcatgaccaactgtccaacgctcattgtcatggtggggctgcctgccaggggcaagacctacatctccaagaagctgactcgctacctgaactggattggcgtgcccactcggggtgagattcagcctcggcttcccaagcagggcttggggtctctgtgggggaggagtgagaaggctggactgcaacggggccagaggggtgggtgaaggtcgggtgttgggaagggatgctgttgtgtgacaacagagcctctcctttcccccagagttcaacgtgggccagtatcgccgggacatggtcaagacctacaaatcttttgagttcttccttccagacaacgaagagggcctgaaaatcaggaagtgagtgtgtgtctatgcgtgtttatggagaaggccctggagcccagttgctagtgatgaccaagctgttctctgagcctgggccttgccctgccctgtgggctgtgacagagctggtttcttggcatctcaggctgtggtgggggtggggatatgatgggattgggaacaaagggaaagggttttgtgggctactggtggctgccctgccctgccctgccctgccctgttctgttatctctgggagggag

SEQ ID NO: 24901 - DNA, 909 bp, Bovine  19866880651011
  misc_feature (1)..(1): n is a, c, g, or t
ntccaccccaaatctctgtaacttggccatagtctggcacatcctctgctctaacccggggacagccttcctgctccagggttcagttcccgccttacagcggcacacagcggggtcacgcaggtccttggtcgggtcccggtagaagaagggccggcagagctcacattggcgcccggctgtgttgtgctgacacccatcacacacgcctccactcacattgccggatgccaggtatatggccatgtcgaagtgacagctgtgggcgtgcccgtggcactcgcactcttgggagaggggaaggaagagagggcaaaggtcactggagggaccgtgccctgagaggaagggacttagggacccccagtgccaccttaggtccctgccaccggccagaatttgtgggtgggggtttggctttctactgggcccctcatcagagcacgctgttgagaagggttgaaggagtccccgggggcattgagaccaggatgaaaagtgaaagtgttagttgctcagttgtgtctgactctctgtgaccccatggaccacagcccaccaggcttccctgcccatggaattctccagcaagaatactggagtgggttgccatttccttctctaagggatcttcctgacccagggtcaaacccaggtctcctgcatcgcaggaagtttctttaaccatctgagccaccaaggaaggccccttcacaaatccttttttttttttggccacgccttatggtttcaggatcttagttccctgaccagggattgaacccaggccctggcagtgaaagcgctgagtcctaacgactgggccaccagggaattccttcctgatatccttcagacacaatctaggtgttagggacttaaccaaccatctctaggttgtaccctggg

SEQ ID NO: 24902 - DNA, 1744 bp, Bovine  19866880667137
  misc_feature (1)..(1): n is a, c, g, or t
nctccccctgcagataccaaaatccctggatgctcttgtaaaatgatatattatttggatacaacctgtacacatcccctgggatactttaaatcacctagagatgacttaatacctaatgaaatgtaaatactatgtaaataattgcaaatgcaatgggcatagtacagtgtaaatagttaccagcacagcaaattcaagttttgctttttggaactttctggaattttatttagatttttttttcccgtgtcgaggcatgtgagatcttagttccctgaccacggattgaacctgtgcctcctgcagtggaagtgtggagtctgaaccactggactgccaggaaatcccctttttggaatatatttgatcaaggatggttgaatctgcaggtgcagaacccatgggtacagaaggctgattgtatacgcctgggtgaaagtgaaagttaagttgctcagtcgtgtccgactcttagcgaccccatggtctgtagcccaccaggcttctctgtccatgggattctcccaggcaagaatactggagtgggttgccatttccttctccaggggattttcctgacccagggtcgaacccaggtctcccgcattgcgggcagatgctttaacctctgagccaccagggaagcccaactcacagtaattgtatatcaattagtatttcacaataaggctaataatgaccaagtgaaatacaggtaaaaataaaaacctttaccaggacttacgttacaaagtgactttatttatggaacccaaacatacctcataatttgttatgttattgtctctgtgattgtttaattcatctgtacctctctcatgagattattaaaaatgaacaactaaatagtggtgattcaagtcaattcattcatgaattgattttgattccttttctatgcccatttggaactcacactttgttcaaggctttgctcagtttccacccattccacatagggttcctgactactgagaccattttctatctccctttgctttccacactccacattaatttggggcattactttgtacctaaggagttcagtcttatggggttaaacccagtgcttgtaaaaaaatagaaggatttctggcttcttctttcaaagctttcttctcaccaccccattatagctcttcacttaagtttggccaagtgtatcctctttattgggaatttgaatcttgagcaaagtaatacagaaacaaaatacaagaactaaagaaatgactagaaaaggtcaatttaaaggaactttaaaagcattgataggaattcaattcatactgctgaattaattttcaataagaagagtacaaaagtaagtaatcatcaagtaagcaaactattccttgagttatacttttcctagtaaaatctaaaaacatcataatggaaactattcactaaccacaatatcttctataaaataaagccacattcatgtttaaattctacaattttttgttaaatacaagacaaaggcttttatctcaccatgaagaccaacagaagagagaggaatgtggaattaatagtcaaagtcaagtgaagtaataaaatggagttctccgtgacccatggccttttctgcagtactttagtacattcctttgataagcaaataccaagatcacattgcattcataacacactaggaacttgcacaaagagattgatttcattttttattattcaaaaattctaaatgagt

SEQ ID NO: 24903 - DNA, 2264 bp, Bovine  19866880678386
  misc_feature (1)..(1): n is a, c, g, or t
ncaccccagtcccacttgcaggtgactgacgatgcagtagggctgggggccgcgcaaaccacaggtggacgaggcggtcagtctgtcagcgcggcccaccagcaggtcgcctgtggcagggtagcagcttccccgagaacagcttggcacatccggggctggggcctgggccagggcggtgaccagcactgggaacagggggtcagctggttctactacactaccccactccccgcagcccctgatccagctaccccaggacccacccatcacatcccacccccgccaggccttcaccgggccctctcaccgctcagcagcaggcccagatgaagctgccagggcccaggctgtcccggcaggtccctccctcgtccccctgctgcgacccactccatcctgaagaggagaggaagaggatgatgggggatgagaggcctggggcccgtgccctcctatcccctcccttcgggtcccatgttgactctgcctgtgtgggtccttggctgattccccactcggtcctctgtcggtccagcggtccctccactagcgcggagtccagcgactttgagcaaagttgggaagtatggcaggaagtaaagcatggagcggatctcgggcgggagcgcagctttgtacagaaaacccctacctctctgggaactctcactctagaaactagacacagaccggctcacctggaaacctttattgtgcccccaggcccaggtctgcacaaagccaggggaacactggggtttggggtcctaggccactgtagttcagggacaaaccaagtaggggttgtggcataagccaaggagaggagtgtcatcttggagacctcaaggggccatggagactgtgtccccagtgttgtcggtgctatgcgcgtctccatcacttaggcttttcagtcccagggctccagcatcaggggggcggtggaaaggcgcactcagggtgccaagccccctcttccgggactgtgagaagctttaggacagcatgaccggaaggacaggacaacatgagggtttgggagaggtggagaaaggccatcccctgtccaggctctctgcctcccccagtcgctacaacaagtaggcatgagaagaactgtttcctggtatgaaaaagggagctgggcaccgacaacagaccacagcggtagcgagtgaatccagatcttccggctattcatccactccggacgtttcggcccgccgggagcgcccagatccgggcttggaatgcgggctgcgggagcgtgtgccccacccaggcccctgggacctcggcggggaccagactccggggtccatagggccctgtcgggacaactttgagcttgctacatctgcgcctactgtcttgagtcaggtggagagtaccctggagtggcaggcccagggaaaaaagctggggttctttaggggaaacatcaaggttcaccagttatctggagtggggtcaccagacaccaggggggtcacgtggtcaatctaaggggctcagggatactagagggcgctcagaattatggatcactgagagataaggctctatcaggatctcggggagcactagatggcctcagggagttgtccgtgacccctcctatttgtcaagatcagcgcaccactaaatgacaggctgtcacatggatcactcagggtcagcaggcactctggtgtctctgggctctcaaggtcaggggattcctgggtcactgtggggtcacttggagtcagaccgaagtcagcaggtgccgtatgccctggcccacagccgcatgtggcccagtagctctgctgcccgctgctcgagagcccacagcgtggccactttcttgcccagtgcctcctcattctgagccaggcggcgttccaaccctggggattaaggtcatctgagccaggctctgacctctggccctaatctctgaccctggtcgtcatctccatcaagaccctgactctgatcccagccctaaataagctctaacactaatcaacatttgacccctctgttctggactttgaccccagcctgatcctcatatgaatatggacccaacctggatccagccctgaccctcccacaccatccctctaactctgaccctgaccaccccctgtacccacccatcctggcccagccacataccctccagtcttctccagctgttctgtacccagtgttagcagctcttgggcctcagcgcgcgccccggtgtgcccgctctcctgcatcctgca

SEQ ID NO: 24904 - DNA, 1033 bp, Bovine  19866880791951
  misc_feature (1)..(1): n is a, c, g, or t
nccgggtgaacgtggagcctggctgttcatgaccaacgcctgtgcctctggaccctgccctccccacgctgactgccgagacctctggcaaaccttttcctgtacctgctggccaggtggggcctgggtgggggcagggtgatctggggctcatggtgaagactgggggacctggagaggaggcaggcgctgagaaggacagatgccttcttcctcccatgcctgtggccagtgtcctcagctccctgacccaacccacaaggttactatggcccgggctgtgtggacgcctgcctcttgaacccctgtcagaaccaggggtcatgccggcatctcccaggggccccccatggctatacctgcgactgtgtaggtggctatttcgggcaccactgtgaacacaggtaaggggctgggggctgaggtgatggaaagagttggagagggttggggagggtcgctgagctatggcggaggcatctcacctggttctccaccgcagaatggaccagcagtgccctcggggctggtgggggagcccgacatgcggcccttgcaactgcgatgttcacaagggctttgaccccaactgcaacaagacagacgggcagtgtcactgcaaggtgcgcctggcccctggcctttcacctgtgctgtagccattctgtgatgcttgctgacctctgacacagcccctgaccccttacccctaccctgtgacctaactgccacctcttgtccttgacatctgacccctcccttatatttcccttgaggcccgtcttccttctggcctgtgagcactgttctgccaaccctttgcccttgattccacccactccccaagccctgacctgaaatcctcaccttaagccctgacccctgacctccggcccctgaccctgtctcaaacaggagttccactaccgaccgcggggcagtgactcatgcctgccgtgcgactgctacccagtgggctccacctcacgttcctgcgccccccacagtgggcagtgcccctgtcgcccaggag

SEQ ID NO: 24905 - DNA, 810 bp, Bovine  19866880805093
  misc_feature (1)..(1): n is a, c, g, or t
nagttgacggcactcattgacctggactacgaagctcgccaagaatacataattgttgtgcaggccacatcagcccctctagtcagtcgggccactgtacacgtccgcttggttgaccagaatgacaacagccctgtgctcaacaacttcccagatcctcttcaacaactacgtatccaaccgctcgggacaccttcccctcaggcatcattggacgcatcccagcttatgatccagatgtctctgaccacctcttctactcctttgagcggggcaatgagctgcagctgctggtggtaaaccagaccagcggagagctccgactcagccgcaaactagacaacaaccgcccactggtggcctccatgttggtgactgtcacaggtgagggacgggggttaagcaagtgagccagtgaccttagcctgtcaggtcctcagggccccccacaaggcacttcaaagaggggtttccagactttccaagaatcccttaagtgctgcgttcctgcacgccacaggatctgccatagacctcccaggttagggtcatatagtctctgcttagggtcttggacagtctccactgaaccccgaagattctagggcgttatgagcagacctcataaagactcttaaactgctttatttaaataattacttttttaaatttctttttggctgtgctggctttctttcagttgtggcaagaagggtctactctctagtttcagcatgcaggcttcccattgcagtcatttctcttgttgcagagcgtgggctctggggcactggacttcagtagttaagc

SEQ ID NO: 24906 - DNA, 1039 bp, Bovine  19866880806015
  misc_feature (1)..(1): n is a, c, g, or t
nacaccgtccacagaacagcccctccccgcttgagtacccagcacacacctccttgcctggggggccccgctcgcctgggtcccccttggggccgcgacgccgttcaggcgtgggcaggaagccaccagagctttcttcccaggtctccacgatctcccgcagggcagatgtctgggtgacatgcagggtcagaagaggaaggccaaggctgcagccacccatgccctggccagccctgggggcattacatgtcccgtggggctccccgcggcccctgtgtccagcccccatcaacctaccttgatgccaatattttccagcaaccgctctgcattctggggacacaaactggatgaggggatgcccacagaagaaaaggccccacattgccccccaaaacagcctctataccctcgtcccctggcttcctgcctagaggaccctttagcccttggctggggtgactggaggccactggaagcccctccctggcatgtcccatcacccaggttcccgtccatgtagcccacaggaatcccaacagggcaggggcccgagcatataggacagcacctgtggctgcaagcggaagggggcggaggcggcccacagacatgcgtggaacagtcaaggaccatgtcccaggcttcactcaccaccaggctcccaggctctcctctcaggccacgctctcctgggaggccctggagacaccaagaggtaagctgctggacccagcctggggtgcagcatgtgggtgcatgcgtgggtgctatggctactggggcaagtgaaagaggtgggggcctcacctgctcccctctgggtccagtctccccacggtcaccctgagaagaagaacgactggtgggaaaatgcccccactctgggcagcccgcccaccgtacccctcacctagcatccgcacactcaccttggggcctgaactccccgggacgccagggaagccctgagatatgacagaacacaaagaggtcacgggggatcacggcctccaggggtggcaacctaaggccc

SEQ ID NO: 24907 - DNA, 966 bp, Bovine  19866880817373
  misc_feature (1)..(1): n is a, c, g, or t
ntcccatgaccttggcgtcatcctgcagaagatccgcaacatcccctacacggacccaagtgggaacaacctgggtaaggactccaatggacatggactcttggggctctcccttggggagctcggtgcccctgggttctgacatgtcctttctcccaggcacagccgtggttacagcccacagatacctgctggcaccagatgcgcctggacgccgccggcatgtgccgggggtgatggttctcctggtggatgagcccttgagaggtgacatcttcaactctatccgtgaggcccaggctgctggtgaggaccagggctggtgggaatgggacctgggagcagccttggccccggcagggtcatcatgcaggctgctggaccactccttagggctcagagtgatgatgctggggctggcgggagctgacccagagcagctgcgtcgcttggtgcctggcatggacccttcccagaccttcttcgctgtggatgatggtctgagcttggagcgggccgtcagtagtctggcagcagccctgtgtcagacagccttgaccacgcaggtttggaaggggcatctgggggactaggtggtggagaagaatgggtctgagggctctgggttgaactgcctgacctcaaggagaccctgtatccacagccacagccagagccttgctcagtgcattgtccaaaggtgagtgtccagggttgagagtgtgagtgagggccactcttggggcaagccactctgaccctcactcgacttgtctttccccagggccagaagggggaacccggacagatggtgagtggctccgatggggggtagagaatgggttggggggcccagtggggcaggggaggccagcagcagaggactcactgatcacctttcctagggcctgaaaggacaagccgggcctcctggcccccccggcctcccggtagtcctccccacgc

SEQ ID NO: 24908 - DNA, 802 bp, Bovine  19866880885020
  misc_feature (1)..(1): n is a, c, g, or t
ntcacctgtgtagcctgcccggcagtggcacacaaccttgctgcgagtacccatccctgtggcaggaagtagcaaagtgccgccggctcccagggccttcggggcaggggcagggccggcactggcccccgtagggcagccgggggtccccatggaagccagcaatgcacctgcagggagcagagggaaacgctgcatcctccctgagcggtgtgcctacccacccgctcgtccacggctgctccaggctcacctttcacagtgctcacccccagtgtggtcccggcagcccaggcaagtgccagtgttggggtcgcactcgtctgcgtgcccatggcagacgcagggccggcagctcgggaacccccactggcctcgttggcagcggtcacagcgaagcccaaaggcaccagcttggcaggggcactgcccactggtggcatcacacaggccactgagcgccccctcggggctgcactggcaggctgggggcaaggcagagactgagccagggaggggctttgaggggaagctgggtgaggtcagggtggaaggtcaggggatggaagagaaggtcaagtgatcagggctgaggatgtggggtccgaagccagaatgagaaggaagaagtagcaccagaaaaaggaggaagaacagtagtggggaggggggcagacaactggagggatgaggccagtgaataccttgacaacccgtggggccaaagccatagtagccaggggcacagaggtcacagcggcgcccaaccactgcaggtttgcaccggcactgaccgccatgg

SEQ ID NO: 24909 - DNA, 922 bp, Bovine  19866880901057
  misc_feature (1)..(1): n is a, c, g, or t
nactggtgagagggctgggtgcttccttcaggctgggtgggcaggttggccgggcacagaggaccactgatgtcccacgtgcccccggcagacacgtccgtcgagcagaccctgcgtcctgtcatcctgggccccacgtccatcctcctctcctggaacctggtgcctgaggcccgtggctaccggctggaatggcggcgtgagagcggtccgtgcaggaggccggggtgggcaggtggggtagatgcctggcctcggctggcctaaccccgtcctcctgcaggcttataggtgccacagaaggtggtgctgccctctgacgtgacccgctaccagttggatgggctgcagccaggcaccgagtaccgcctcactctctacacgctgctagagggccgtgaggtggccaccccatcgaccgtggtccccactggtgaggaccctgtgggcacggtcaggtgagcagggacgggaggagggatgtcccaggccgcctctcatgcggcgctctcttgccggtccagagctgcccgtgggccccgtcacagccctccaggccaccgagctgcctgggcagcgtgtgcgagtgtcctggagcccagttcccggcgccaccgagtatcgcatcactgtgcgcagcgcccagggtgaggaagacaccgccagactgtgcagaccctgaagttccagccctcggggtctgactgcactcttactgcatccctttccactcctggggctctaccgcctcctcctgtctccttgtccatccatctcccaagaaggccccgaagccacacctgtcacggggcctgtcttacccctgtcctgcccctgcctagctctgcacctggatctgtctccactcctcaccccacatccctgaccgggctttcatcttctccacaaccacgagctcaac

SEQ ID NO: 24910 - DNA, 804 bp, Bovine  19866880907906
  misc_feature (1)..(1): n is a, c, g, or t
nggcccacacacgcacggtgtactcagtatctggctccagtccatccagctcggccaccgtggcctccccagaaaccaactgggatttctctgggcctaggagtgaggatgagtgtagccctaggactatcctgactctgacccccaatgtcccacctggacccctaagaaaccccctgctcccattccacccagacctgccccaccccaacctccaaaacctctgttcctttcccaaatccctggttcccacctcggcctgagcgccaggagaccctgtaccctgtggcaccaggaacccggttccaggtgatggtgacagatgagctgctgactcgagtcacatggaccgatctcactgggcccaagggatctggaggggagaggcaatgggggagtctgatggaagaggcagcggagggtctgataggggaggtgttgggtatctatctactagaggaaagcaatgggagtctaaccggaggcagggatttgacagcggaaggcagtgggtgggtcagatggggaaggagaggggttcggacagaagggacagtggaaatctgaggcggcagcggacaggaatctgggagaccagagcatctgacagagaaggtaacagggttctggtggaggtattaggagtagaaagtatataagtctaagaggagggtcagagctagcagaaaacaggcaatgtggtctgagaggtgaagaggtgggaacctgagggcaagaagagcagggtgttgagagagaggcagaggaatcctgaagaaggcagggacttcgggggagccaagg

SEQ ID NO: 24911 - DNA, 1332 bp, Bovine  19866880925243
  misc_feature (1)..(1): n is a, c, g, or t
nttcccgcggcaggacccttcgcagctcctttctgctccttctactgatcagtgcctcctggctctttggccttctcgcggtcaaccacagcatcctggccttccactacctccacgctggactctgtgggctccaggtaaccctgacaccgcccccctgactctggaccagatggggcttcggtagggtggggcccggggccttaaccccaggcctggagctgatgcccacccgatgattgacagctgactgctgctgagcctggactggccttcatcagtgctgaggctcctggctgcttgctggtccacaatgaccttcactgactccagtcactcatgacttctcactacttctgttgcctttccctcattcccttactgggtccccctggggcctccgcacagcctcactctcatctgcaatgactgatcccacttgctgaccctcattgacttccactggccctagctgaccccctcacagccctgctctgacctctcatggccctcactgtctcctctctgatcctcgctgacccgcagggcctggtggtattgctgctcttctgtgtcctgaactcagacacccgggctgcctggacaccagcctgtctgggcaggaaggcagcgcccgaggaggccaggccggcgcctgggacggtgaggggccctccgggcagaggagttggggtagggaccccgggaggccagcgttggaggcttccccagggctggctcacgcgcctgtcccctccaccaccccaggggcctggcgcctacaacaacacggccctctttgaggagagcggcctcatccgcatcactctcggtgcctccactgtctcctcggtgagcagtgcccggtccggccggacccaggaccaagacagccagcggggccgcagctacctcaggtgagggcagggccgcctcgtgagggggcatacggcccggggctggcattaccgggtccttgggctggctccacccgtcttggccatctgtgcctctgctctgctgcctctgccccagtgtcttctgccacacacccaggggtaccttcagagccataccgtgtgcggctggctgggtactcacaggtgccctgcttccaaaacaccccgtcacatccctctttgatgggggctcctgcgtttctagggacaacgtcctggttcgacatggctcggctgctgaccacactgaccatggcctccaggctcacgctggccccactgacctggacgtggccatgttccatcgagatgctggtggaggtgggggcccgggccagggaggagggactcagagggtctctcccccgttccc

SEQ ID NO: 24912 - DNA, 2061 bp, Bovine  19866880950390
  misc_feature (1)..(1): n is a, c, g, or t
nttcctccgggtggagcccagctcccccagggctgaggatgctcgtggccctccggtgtctggactgggagcctgagccctggccttcgtcctcacccacgtcctgtcacctgaaccctccgccctccagaaagaacagggcagctgtgtgtgccctggcgactctccatcaccggagccagccccctgaggcatcatcttgtgctgtgtaggtcctggcccagaaccgcctggggaatggacggtggatgactccagagaacattcaggagatgtactctgccatcaaggctgaccctgacggggatggtgagctcatatcttgtcactgttgtgtcccagagcctcctcctgcccccagccaggtggcccctaggcccagctgctagagtagctggaggtgaggaggtgaggggccagcagagcccttaccccagaaagaggcaggagctagacccgcccgctcccccttggtggcagtccagagggcaccctcttggcctcgtcgggcagcatgtggggtacaggaggtatggctgctggctggcagagggcagagcagtggagcgggagtgaaggaacaatgaggtcagcttggcatccacttatccagccaggcacatggtccccgccagctgactggtctaaccagggccccccttgcctgcctcttgcctgcctggagtcctctaactgccgggggtgggtgtgggcaggagagctgtcctggaagcaccctcccctttggtaataacccccaggaagtatctcaggcgtagtcatttccctcatgcacaagttctgcaccagttgaggaagcaggacttggaaggatgaccttccaactggtgagccccgagtgaagaatctggcccggacccgtgcctggagaggcactaggctgctcccgctcccgctgtgacacactcacagccctcgagtgcccccaccctcagagaagccccagccgaagcacgggagtgtgtcattgggatcaaccttgtagcaaagacaccaggccactcttccggaacccctagagggtagagcccagctttgtggcttgagcaggaacaggggagagtgttctctttggggagagtggcctgattgcctctgctgagggagactgtcttagcaggcaggactggcctggggtgttccacccaggatgagacctgaggtcatgagagaactcctggggaccggttccagcttacatcctccagtgtggaaggcccaggacaaaacccagcactgaacactctctttcttcaccctctacaggaccggagggtggccaccacgctctacagagccaggctggagggccaagggcagtccttggcctagggtcttggccatatggcctaagcttcctatggagagcccgctctggccaatctgacagggttgggcttcatccttttgggggccaaatcagggcttaaactgaggacacgaacttctctgggtcttcctgtagggcctgatgtgacagaagccaacttcatctgacccgagtccaggttgggggacaggtgcacatggccccccagtgcctgaggccaggggtaggtaggaaggtgcagcctccccactctgccctccccacacgggcgtggtgggcattgatggtgggggggggatgccctgtgcaggagtgctgagcctgcaggagttctccaacatggaccttcgcgacttccacaagtacatgaggagccacagggcggagtccagccagctggtgcggaacagccaccacacgtggctctaccagggcgaaggcgcccaccacgtcatgcgcgccatccgccagaggtgagcgcccgagcctgggctccctgctgcagggaggagaccatgcaggcccccacagaggtccttggctgggaccaagagaacagcgctcaggactggaactcactggagaccggcaattaacaaaggcgaattagccctaatggtgggcaaacgatatacacgtgcgattagtaccagattgaatattggttttctgctaactagagaaatgatctcttaactctgtccacagga

SEQ ID NO: 24913 - DNA, 1507 bp, Bovine  19866880954220
  misc_feature (1)..(1): n is a, c, g, or t
nttgtcccagcatcatctttggttatcttttgtgatgtatacaatcactgatctaccttcttattttctaccttcctaattcctacatgcattcagaataatttagataaatgtctgatggaaaaatatggtctgttttaaagttacataccatgtgtagcatcttttcatgccattctgtgtgctgaagtacagcagtaagacatgaactgcattatcatcagaaatgtgttatctgggatatagtcaccttagttagattaaattatcaggaatcgagtggcttctcctgtaaaataaaggtatcgtaaataagcgctctaaagaatctgtgcctgtcttacagcagcaaaattggagatgtctcataaagggatttcaagtattttgtctctactgtggtttgtctgtggtgggagtagttttgatcctgagttgggagttgaatgcctgtggaatgtacttctctttctgaccctttagaacaacgtccccacactttcaatcactaaccacatggataaactattttttgaatatacacctaagtatatatttatacattgtattcttatactactatatgagtatgcgaaaacaaaagggctgacttttaaaaagaaggtaagaaatgagcaagagttttgatatttctcgtgtgctagtcttgagtgctctcaggtggctgtgtgttgctctgaacgcagcatattcagagattacggcttcctcagaaggctggagtatggcagcccctcctcctcacagtacgcagggctcctgcctgagatctctgcccttcgggactgggttctctgtgttgtccagttcactcactgccacatcttgttgctgcaggtacaggtacaggtacagcagtctccgcagcaggtctcggctcagcagctctccccgcaactcaccgttcaccagcctgctgagcagcccatccacgtccaggtgcagatccaaggccaagcagcacagccggcagccccctccatccagaccccatctctgcagagccccagcccttcgcagctgcaggcggcccagatccaggtgcagcacatgcaggcggcccagcagatccaggctccagagatcccggaggagcacatcccgcaccagcagatccaggctcagctggtggctggccagtctcttgctgggggtcagcagatccaaatccagactgtgggtgccctttccccaccgccgtctcagcagggctcacctcgggaaggggaacggcgggttggcacagccagtgtcctccagccagtgaagaagcgcaaagtggacatgcccatcactgtgtcctactgccatctcagggcagccagtggccactgtactggccattccacagggccagcagcagagttacgtgtctttgaggcccgacttactgacggtagacagtgcccacctgtacagtgccactgggaccattactagccctacaggagaaacttggaccatacctgtttactctgcccagccc

SEQ ID NO: 24914 - DNA, 776 bp, Bovine  19866880973204
  misc_feature (1)..(1): n is a, c, g, or t
nactgtagcctgacaggctcctctgtccgtggaatttcccaggcaagaatactggagtgtgtagccattcccttctccaggggatcttcccccacccaggtctcctgcactgcaggcaggttgtttaccatctgagccaccagggggttggcccagccaagacctttatttcttcgcggccttagactccctctctgccgggttctaccgcttctggaataaccgcgcccaacttgaccccgggtggctcaagagtgatgcccaatgctcagcactgacttccgccccccactctgcctcctgttcccccagccccgcgccccgctcacccgtgaagcgcggccggcaaacgcaggtgtagccgccctcacgccgtgagcaggcgccgccgttgcggcaggggttggagtagcagaggtcaagctccgtctcgcagaagtctcccgtgaaaccgggcgggcagcggcagcgcaggcctgcgatgggctggatgggtctaaagagcgtagaggcggaggccaagaagggcgcagaggagtcaaagcgcagcaccgacacgcacttcatgtagttctcacagggctcgcgcaggcacacgttgtcgtcgaagggcagcacgtccagcagcgagcgggcggccagggcggcgcggcgcacgtacagctgctcctgcagctcttcggagctgaaccaggggcctgtagagccggctccagccccgcggggcgccagcgccgagaagctcacgttgagcacggtgccccccacgtccgtgt

SEQ ID NO: 24915 - DNA, 756 bp, Bovine  19866880993664
  misc_feature (1)..(1): n is a, c, g, or t
natgggcaaactagagaatggagttgcgaatttgcctttctaaaaggttagtggtaggatttcttgaagtgggtcatatccccaggtgtggcagggcagtgggagtcccaccttggtttcctgagtatgggttgactgctggaaaacttgaaagggtcagtctacacaggagcagagaagagttgaggaacgctgcccctccagcttctcattgccccgtccttactgaagtctttatattctgagatcagacacatagctttgaatcaaaggatcctagttctgagactgaggtcaggagagcagtctcactggctcttcttgctgtgtgaaaatttattattcatttatttagtaaatctttaagactgtgcaataaggaccccagcaggaaatgagctggacactaccccactcctaacaaagttaatggttcaggacttctcccaggagtcaagaaacttgtccagggagacactgctctttggaatcatagacttgcctggcctggggcctgagtggcttctacaccagtggggatcacgtattcctgcttctagatgctcagttcccagcagcactgagctcctggatgtgtgccaagacaaaatgagaggtcctagtgaggctttaattaatactgggtaattaccaggcagagcttaaccatcccaaatgcctttcagattcccaaggctatatctaggcactttctgacttggcccagcagagagacagaatgctgtcccatgctta

SEQ ID NO: 24916 - DNA, 2777 bp, Bovine  19866881045177
  misc_feature (1)..(1): n is a, c, g, or t
naccgctggatggatacaggcctgagtgctggggacccggccccgggcgttgcacctgcaggctagggcacacagctgtcagagtgcttcgggactgctgcgggggccggggtgctattagggcagtaactggggacagagcaaggaggacctggggatgggggtcacgctgagggtcactcacgctggcagccttctgactgggtgaggctcaagccatagtgacctggccggcaggagtcacagcgctggccccagacgtgaactttgcagcgacactgcccagagaggagaccccgggtggtgtctgtgtaggcatcacacaaacccccttccagggcacccatagggttgcagtcacaggctgggtcaggggtcagaagtggggacagagtcaggtcagaggtcatgtgaagtttaaggatcaaggtcacaactgggatcggggactggagggctcacgtttgcaggagtgaagggagcgggggtcctccagggggtcccggtggaagaagggctggcagagctcacagtggcgcccggccgtgttgtgttgacatgcatcgcacacacctccactcacgttgccagatgcgagatacagggccatgtcaaagtgacaactgcgggcgtgcccatggcacttgcattctggagccgggcaaagaaggtgggcatggagtgggctgacccatggcaggtgtggccagacaaagcggggcatggcacctaccctggcaggtgtgggggtacccaggctctgctgcctgccacgggtggtcctggtacaggccctggcaacgttcacagtgggtaccagtggtgtggtggcggcagacacaatggccatgcacctaacagggatgagggcaagatgagtcggccctggttccctggcttaccctcccaccagccactggtgcccctccgggagtactcaccatgccttccacgctgggtggggacccgggtgcgggcctgcactcggaagcatggccgtggcacaggcagctgcctgcaatcactagctcatagagagcatagtagtagaaggggtggcccctgaggccccccaaggggcctgtcacccagtgtgtgcagcttggagaagttcacacggaggttagtcacacgcaggagttctggagacatatggagagccctcaggtgcacagaggttgtgacccctctatgccaaaggtggaggcggcactgtggggtttctcccctctctacatcactgaagccactcctccagcacctgcgctgtgcgattctcccaccccaaccccctgagtataccgttttaggatgagcacatcccagtggcgattatcccacctctgcgctgcgtcagacctgccatcaccccggggctgagacaggcacaccccactgctccctggacacccctttccagtatcactagatacgggaaacctgcttccccagtgcagtaaagggccccattccccagcctgtcactagactcagagatcaggtcttcacccagccaaaccacttgcggtatgtgtatttattgactgcccatcttatttgttatgtgagctccaagacagttaccctgtctatcctctccactgagcactgcccagatgccaggcccacagtggggctccacgggtccacagccccctttctctacacagcttaactcagttaccaagccaaggccacctcctgtatctctttgccagaggtcccttttcttctcatcagaggaacacgctctaggccttagaagggtgaaaggtgtgtgtgcacatgcatgcccagtagctggtagtaatctaagtaagtcaaggtgggtggagatcgtagaacatagataaaaagctactttggggtttgtcgtcctgttctggccctctcctggcctggttctgggctgccctgctgggttatgttatgtttctcttgtcctttaacaagatttatttcacaaggaagagatcccacccagagacacgatggcaccacctggtggcagcttccggaatgcagtaaactaaggcggggtgggagggcagacaggaccatgaaggggctgtgatggggaacagggacagtggctcacagtttacggggtacagtgtgatacaagtagaggtgggggaaaaagattggtctggtagggccaggagtgatggggaccacagtagggcctcctcacaaaggacttcagtgatggggcagaaatataaactgctagcatgctggtccctatgcattgggcacaggtatggggagcactaacgggacatgcatggggagccctgacaggggccacagtaaaggaccaggatgcggcaaggctgcgaaacaatcgctggggggctgagctggtttgcctgccgctctgccccactagtgcacaaacttaggcaggatctctcctcccacaggtaggtttctggttttcctgacacacaaggaatccaggactgaccgtgggatagttaccctgaatctccgcgttgtttgtgttctccgccagaaaggatgggtccagaacttggaaaattacctgggaagaagcaagcctgagcctctggcttcatgccagggccccaccctccttcctctgggcctgacctctccctcagtggcaggctcgatgtctgagtaacgctggtcacagacgaggtcactgactctgcggccaggggcaggagggatcccaggaaagaggcctgagcagttgtgggcaaagtagcggaacacatgccaggagtggccatggtccactgagcgct

SEQ ID NO: 24917 - DNA, 1268 bp, Bovine  19866881132826
  misc_feature (1)..(1): n is a, c, g, or t
ngtacgctcgtacctgtcccttgactgtgggccgcctggggcaggcagcggtgctcacaggcctcccgggtcccaaaacggttggcattccctccgcagccaccgtagacgaaggggtgacaggccttcgtgccccccgccccagcccgatgataccagcgcagggtgtaggcactgcaggaaccctcgtccagtggaagcgagcaggggtctgggggtaacggggcggggcagagaggtcagccgggacgggctcggcctgccccctcccccatgcccctgtgggcccagcccccttcctcaccaacgtcatcccaaggagccgcggggtcctggtattcctccatggaatactcagagtattcatactcatcgtcctcggggggcacctggcctgcacgcacagtaagggggtgctgtgagcagggccactgcggggcccggttcgtgcggcccaaccctggcctcccatgcgtgttccctgcatgtgctccctgtacacacggcgtgggccgtgcatgcacgagcggccctatgcgtgtgtgctcccgccccacacgccccccaggctgcagccatcctcaccgtcctcctctgcgtgggacacgcggagcacgggcacggggtggagctgcgggccagcggtgtctgctgcgtaactcgggagaggccctggagccgagagcaggggcccggggcccgggggtcagcctggtggccgccctcaccaagcccctgctaagacgacccaggcaatgggcacagcagggcctggcacgaggcaagctccgggagcagaaaagaccagaaaactactcacgtgatccagatgcgatatactggccctgacaggctggagagggcagagaaggggccagggagagagacaataacagagaacaggagacagaggcggaaagaggcagggagagaggctcacggggggcagagacatacggaggggacggagagagtgacagacggcgggggagaggaagggaagcagacacaaggagagaaagagaccaagggggagaagtggaccaagggcgagagagaagaggggaacaggccagccaaaggtgagagaaggagagaggcaaagggtcaggagccggcaggaatggagaaggacagggagaaggcagaggaggaaggagatgagcttcactctgatgccccccagggccgtcagagcccccgccctgtaccccggcgccatatctggcttgaggagccggctctgctcacacctcctcccctccaca

SEQ ID NO: 24918 - DNA, 942 bp, Bovine  19866881310893
  misc_feature (1)..(1): n is a, c, g, or t
ncccctcactgcaaatgacctctgacaggcctggatactcaggattcagccccaggggcctgtgagttcttcactggcacctgctccctgcactccctggttctggaccctcagggaagagattcccatgcttgatgctggctccgggtcagagctgggtctgtgggtgcttgggggtcagaggtcactgacagtggctcctccccctcctccggcagttctgtaccccagcggcagcagcatggaaaatgccaccacctcgagcatggcacccccaccagcccctccagagcccgaacccgagcctgggatctccattgtcatcctcctggtttaccgcacccttggggggctgctccctgcccagttccaggccgagcgccggggtgccaggtatgagtagagttacccccaggcctctcaaccctgggctgcctgctcgctctgacccagcttagaacaacccccccacttatggtggacagacaagcaggttcaccatcatccagagatgcgcctggccacactcctgctctgcgagtctcatccgtgccgggctccgccatgtcagtgtgtctggggaactagatagacacagagccacagctgggccagtcacataaaggatacaggagccagccagacaggcagactggcctatggagatgggctgaccgaagggggccagccgcgggcatgcagggagacacaaagtctacagctgcttaggctgcaggctccaatgtgagcaatggatccaaagcccctcagctgtaattctgcagaaccaggccatggactcctggtgttgaggccactcagtggaggctgaaggagttctcagaaacaacacccagcccagggtgccccaagctctgggcaagggaagacagggaggtgggcagtcagcttggaaggcggcggcatccaagctcaggtggg

SEQ ID NO: 24919 - DNA, 874 bp, Bovine  19866881369983
  misc_feature (1)..(1): n is a, c, g, or t
ntcccttggatatgactgcaaaaccagaagggaatatatggagcagagtgaccaaggcttaatgcgagaagaagtaccagttaagagaagaagaaaggattccctattccaatactagggagtggcaggaaagtcttctagtagagaatagccatccctttgctccactgattccccacctgagggctctctacttccccgcagtcttgaacacctgtgagaccaacggaaagaggatgggggctcagccacccccagacaaggtggagttggagagaaccacttggaaatgatccctgtgagtggatcagcttggacacagcatttctgttcaatatgaagaaactggagcaaagggagtcatcacagactggattttataaagatcactcttgactgcagctggtggaaggaggtagtgcactggtcagatgtgtcgctgcagacagaaggaaaataaaaggagtctaacgatttacagaagattaaaatttataatgtttagtgataaactcaatgtttgctccataacaacatcaactgaagttatacacctacaattataaaagaaaaagtattcaatatgtgcttcagtcaatctataaataagggtgctgccatggatccccaagttataaaatgtcagagtggcaaagcatttatgaattcatctagtctggtcatggcaagcaagtttcatctcacatgacaactctaattgatgtcacgggtccacctgaatcatcctgactccttcctttctttcattactcacatctgcttcattaataattccatctgttctcccacccactttgtttcttgaatcagtctacctttctccatatccaccctagtctaagggcatcatttc

SEQ ID NO: 24920 - DNA, 1562 bp, Bovine  19866881385391
  misc_feature (1)..(1): n is a, c, g, or t
ncaacgtggaccccagccgggcgcggcaggcgctgttccagcaggagatggcacgcctggccggcgaaggtggcgccgactcgcagccggagtgggccttggaccgggcctaccgcgacacgcgcgtggaactctgaggggtgaccatcccagtctccagccgcaggtcaccctaagtcgggggccctgtcgtccccctgtccagctgcaggctgaaggcctggccgatgtctagccctaccccggcctcctgccgcgattagggcacagtccctacatccatgttatttattgtgtacagacccgtgcttcccggacaaataaaactacgcggcaatggagctgcagggccgagaggctcggagtaggctataggtacagtgggcggggcggggcgccgcggccgggtggggcttgtacgtcatgtgacgggggcgattcggcccggccaatcccagccggacagcatggggcggagggcggtcgtcattggacctaggcggcggccgcccctgcctctgctacctgttgctacgggagccgtagagctgcagcgcagcagcacgcgggaaggctcgtctcgtgagagctctgctcctttcttggccgtggcagctgcagcggctcgagggaccgccatggacgctcacgaggactacgtttggccgcgggcaacctcggagctcatactcctcccggtcacgggtctggagtgcgtgggggagcggctattggcgggtgagttgtggttcgaggcgcgggctagcggagaagaaaccgaacgctcgcctggggaggggccttaagaacaaagggatgccccttgtgggaggaggacgggcggcgggcgggaacccacggcatggcggggctgaagcgcagcctaaggagcccaggaaacaaagagctgcggtggttcccgaggcctttcagaaactgcaggtgatgcggagagggcggctgggggcggcagaaaggtgcagggaaacgcggtcggcgggggggcgggggaagggaataagagacgcttgtggacgagtcgcgcgggggcttcatcgttccagcgaggatgcggggggagctccgtgatgaagcccccagtgggcgagtccagggtccggggcgtggcctttcgggggtgggccagcccaggagggggtgtggcctctcgagtgagagaggggcgggtgatgctcttccctagatggtgggggtgaagagcttctgagcagcatggagtcgcgggaaaccagaggatgagatctttctgagtaggccagtgctcggggaggcggaggctgaggcccctcccgagatggttggggtccaggaaatcccatgtcagtgcctcttctgaggagggtcggctcgggtagcaaaggacagggacccgaggccacagagccccatcgagcggtggagtccgactggaagctagaactagtgacttatgttagagctgctgagtttaataagggtcgcaaggcagggcactggctggcaagccttgagtgagctgctccgagtcctcagaggggggatgtacgggggtggagattagg

SEQ ID NO: 24921 - DNA, 953 bp, Bovine  19866881561759
  misc_feature (1)..(1): n is a, c, g, or t
ncaacctccaggtgaatgcagcatctcgggtctcaaggcacccctgagctctgaccattcaccctaaggccccacctcgtatttgcacgctgaccctcacctggatacagccaaccagaccctgaggagcctcctcttcagcaccatggggcaagcctcccacatggagtcgctttaccttcaggccctgcagctcactccccactgccaaagtgtcctgggggaaggggacagtcagcacggtgaggggggaccgatgaacccctgccctaccccagtggcagccttggccttatcctagccttgcaccacgctctggacgtctggaccagagggctggtctgggcatgagatgctcccgagtacagaggacctgctggagcacaggggataaatgacaggaaggtttagtctagagctgggctctggattgggccctctctcctggaccccgaatagaccctgaaattccatgattttgagctgggacgataaggagaccagaagaagtttggcaaagtgctagctacagaggtaccccaagaccaggccagaaatctgcatagcctccctgacatgaggagggcggagcaggatgggcttagagcaaggacgtgaggagggggactcgggagacaacatcagactatgtgcagtggacggaagaagaggagttggactgagtggggttctgatgaggtgggtctggtcggaaggctgagaatggaccaccccagggttagaagtcagacctggaagagactgaagtccaatgagaccatgaggacatggtggccccgccggccacctggctcctcctgcagctccagccgcagatcgtgccaccggccatcactgactatcatctggtccaggaggaggtgggcagcccggcctgaggccctggtcactgttacagacagcaacccccgatccagctgcgggcagagagg

SEQ ID NO: 24922 - DNA, 1096 bp, Bovine  19866881755947
  misc_feature (1)..(1): n is a, c, g, or t
ntcctcaagccagaccctcaaggggccctaaaggcagtgagggtctggactgatgatccatatgtccatctgcagttagagcaggaagacttaaacctgatgaactctactttgtaaaacagaaaccgtaagtatgctgggggtgtcacagagctcctatgaaggggaagactgaactgggatgtgaaagagggcaggacgagaagtcctatccctagcagcctgcaggagtgactggctcagaattcacagctggccctaactaatgctggcacggggatagggtggggggtgtaagggggcacgtgttcacagagtccttacacagtctgggggcaagatctctgcgtcactcctgaagcccaatgtacctgttacctgcgtgagagacaggcatggctcttgtctgctaaagtgcaatgtctgctttcttaatttatgtgataataaagcaatgccatacaaaagaagaaccttggaaaatcatggggaaaaaccacacaggctttcccggtgctagctgccggttttggagtattagttacaacctttcccaattctgagagctgcaacacagactgccgactgagagtctttctgcttccacttcatggagaacaaggaaaagggagaaccgagcaaggcaatgatgagccgccgctctaaagatctctcaactatactgtctgcggcaaaagcagacagcctggtttaagagggcaatggtgactgcatgggctccatcgctgtctacaacagggatgacttgagccccagcatgttaatctcccagggattcactgggatatacaagtttaaaaaattcatatcagaaagggcctcttgatttaatataaacatggctatgacatccaaatttatctttaggtaaatgtcacactgctcctaggatctcttgtaacatctgattctaggtcattctgaagaaaaaaatttcattctgaaatatatctagttaattatgataattcatcagaactctacctgatataatcaaaagggtaaaaaaagctaagttactttcctgtgggattaacaactggaaccccaaatatcccaacatcttaattagaaa

SEQ ID NO: 24923 - DNA, 751 bp, Bovine  19866882003283
  misc_feature (1)..(1): n is a, c, g, or t
ncgggaagatcccctggagaaggaaatggcaacccactgcagtattcttacctggagaaccccctggaccccagggggtggcaaaagagtcagacacgacttacagcgactaaacaacaagcaccattgtatcaatagtatcatacggtgtattttcactgccctaaaaaattacttgtgcttcacctatctctccctccccatcaaacgcctggcaaccactgatgtttttactgtctccatagtttttccattgttaaagttttcactttgatttgcattccttgctttctgatgaatttgaacatcttttcactttgtaaggttttgttgcttgcctcacaatacccttttccccttgatctttgctaacaaacctgaattttgtccagagcagcaagtgtccagtcccaagtgatcctctgaccccattccctcatctcttaatctccatatatctaggagtggccacagatgacccagttttaatcattgggaaataaatataagtctactgggagttctggaaaggtgtttgcttaccagataaaggagaaagatgtgggtggctccaacagcaggattttcttctgctttgcatactaatgtgatgtctggagagacaattaccatcttgtaaagctgggtccacaagcatgaagacaaaagtcaataagctaaggatgatggtggtatatgcactcatgtagtggaatactatgaagacatgggaaaagagaagactaaagca

SEQ ID NO: 24924 - DNA, 3450 bp, Bovine  19866880444781
  misc_feature (1)..(1): n is a, c, g, or t
ngggcacttacctaggttatggcatatattgctttccattaattttatgttagatttttttttagtccttctttatatatgaagaaccacggaataaagttacagctaaatgtgacaaagacagaatgtaaatctcaaagacccattctgtgaatcacaagcctgtgtttgtcctatcaaatccttctactggttctagcaaagaaccaatgttcgtgtcggcagaaacgacagggagtctgtgttctactccgtcagcaacagtgcaaaagaataaatagggttgtgccctttgtggtattttttcccatttacgttatgcctgctcacacctacttttctgattaagatcttataggtagcacataggtagagatgctactcagagttccacatgcctctagagggggaaaaaacagtgagataaagtttaggatttgtaaaagaggtagctataaatgtacattggtgtttggggagaaacaaagtaaaaccattgttttcaaagtgtatcttggatacttgaaaatacagtgctacaaaaagttaaattgggctcaacagttcttgagactttgatctaaatcaaaaggtttttggacagcttatggattttttctttcttccctgaaactgttggaagccatagatttgaaaaggaattcacacacatgtgattatcacagcaccaataaactgttatctctacagaacagaagtaggcaagtcagtgttttgtgggaccaagttcctcagccatggagatttcaaggactgttatgtgagagacatgctgaaaacatgagatataatgcatgttacagggctcacgatgaaatcgcatcagcaaaaatttcaccaggtcactgtaatataaataagatggttttattttgaatggcttagaaaaaggaatttttcctctttcttttccaattttaacttaacaagaaaatagctatgccagctaaaatgttaccatctgaagtgttaatagttgcttctgcattttccaaatggcacctcttttcggtaaagtattttaaagtatgcttctccaaattatgttatgcttatttattttacaatttcatgatgtgttaatatacattgtaaaaagtacatgcaaatggaaatttaaagcacaagtaaaatgaaataaatgatattcaaaaattaaaaacaagttttgcttttacttaaaatactagtagtattattactagtagaaatgtaattgagtatgtttcattccttttgaaaaacttggtttaacactttgtgatccagttatttgaaggtttatatctaaggtcagtttatttcacagcttgcttttaaaaggtgataaaatacctcagtgacaaagatacctccctaagataaattgaaaaagaagaaagaaatgttatcattggctgcattaatctatcatggaattcataaaaaatcatctaccaattttgcaagttttaaattaatgaagcacaagctggaatcaagattactgggagaaatatcaataacctcagatatgcagatgataccaccccttacagcagaaagcaaagaggaactaaagagcctcttgatgaaggtgaaagaggagagtgaaaaagctggcttaaaactcaacattcaagaaactaagatcatgacatccgggtcccatcacttcatggcatagatggggaaacaatggaaacagtggcaggctttctttccttgggctccaaaatcactgcagacgactgtagccatgaaattaaaagatgctccttggaaggaaagctatagcaaactcgggcagcatattaaaaagcagagaattactttgccactaaaagtccatctagtcaaagttatggtttttccagtagtcatgtatggatgtgagatgtggactataaagaagggtgagcgctaaccagtgaacctgttgtggtagaaaagaattttctagtgacttcttatattgctatcaagtataacatatattctactatttaatatttttgttttagtaaatgtaacagtacaatgatattataaagtaaccagctacagtctcccacaaaggctgtacctgggagggaaggatcattaaatactctctggtatagaatttattctttctgcaggttacttcacagctgtgttgggaccaactcacatacaaaatattaatatgcacaaatttttagattaaaaatgaataatgctgctgctgctaagtcacttcagtcgtgtccaactctgtgtgaccccatagccggcagcccaccaggctcccccgtccctgggattcttcaggcaagaacactggagtgggttgccatttccttctccaatgcatgaaagtgaaaagtgaaagtgaagtcgctcagtcatgtccgaccctcagcgaccccaaccctcagcgaccccatggactgcagcctatcaggctcctccatccatgggatttttcaggcaggagtactggagtggggtgccattgccttctccgaaatgaataatgaggaagttaaaatcccagcagattattctaaacacctggagattacccactactttggagagcactgagctgaagaggtggttctcaaactttagtgagtgtaagaatcatctagaaagagtgttaaaatacgagtctctaggggcttcccagagagattctgattaggtctgagtgtgacttggggattagcagctgtctcaagcatcttggatatttcaaatgtagttccttagtagactatactttaagaaacccagactaaggggactacaaattcccccctattttcctcataatattatccatagtttaagattattagcatatcaatttcagtttgaaactttgcatacgtacccagggaatgaaatggagtgactgagtaatggctctttaatatgtttaattagagagctttaatgaataggtggacaagatacacctacctcatttgtgcatagcagttaacaaattataatcaggcgccaacccacagtcccattctctgaccccatcgatagaatttccttgagcatgttgtcatacgttgtagagatccaatgtggcaactggatttctgggaattcttgagtaatttacatgttttagtggtcattaatactggctttaaactcttattcttgttgggtctcatttccagtatctgatctgttcactctttttttgtgtgtgtgctcaattcagcaaatcaataattttttctccccctgcccaagtaaactccattgtacttatacaatgcatttggatgttagacatccttgatcttcaatgttatttggtcatccgcacatcaaaactttctcactggccacctttgtccatggtcttggggtcttttagcagtgaactgttttccctctccccaccaaatccttctcgattgttacaagtcgaatttactg

SEQ ID NO: 24925 - DNA, 1914 bp, Bovine  19866880526961
  misc_feature (1)..(1): n is a, c, g, or t
ngggatggaatccaggccataggttaaaaatgaccctttacttgggcatctcttccatcagggaggggaggtacagatgccaataagcttataagaaagagggagaggaagatacggttcttatcttgtgtccttggcttttcttggggaaatggcagaattgtcatcggctgagtctgataaagcttggtggcaaaaagagggatttaagacgagagagaagatttagagcaaccactgtcagctgatcagacatattgactatcaataaggacccagccttagtcagaaagcagcaatatatagtgacatcaatggtcacagctgtgtaatttttctccaggaactctcagctgctcagtctaagggccaaagaaagaggatggctgtataagaggtgaaagtgatactgaaagcatgatttaagtggtggacaccagtgtccagggctggacaggggaaaatgggaagacagaaggggctgattgattaggagaaaatggaagactcaaagcactgggggtcacgaggtcaaagagcaagcatagttcaagtaagaacaagaaagccagcagaagcaaacggtggagagaagcagatgtcttgcttaaacatgaagcctgaatctgaatctctctacagaggaggatttgtgttcatccatcttctgtcgtatcattctttcttaggattcctgatctttctgtgactttcacccacaagctggatgaccacttggtggggctcttgcagagacaatgtcagcctattggttgaaaatgaagattcccctgaaaaccggaaatgctatgaaattttgcagtttagtttattctagcactttagtggtaagtactgagaagtactttttaacctcacttctttgagttacctagtccctggtgcatcaaacagaaaaacagtctggtatactgaaattttgggaaattctttgatcttaactaaacaattactattccctttattaccagcataactctaagtttttctttcagtagaaatcatctttaagatgagaaaaagggactataggaactccctggtaaaccagtggttagcactccatgatttcactgccaagcacccagattcaattgctgcttgagatccctctagcagagtttttttggttttttgtttaaaaaaaaaaaaaaaaaaagaaccacagttaggacatagttcttttagtcttagtctgttaatactatctttactacttcacttcaaaagttgaaaaaaaaaattctttctattccctagtgccacccttccttactgctgactatgaaacagtaatctgttgactaaattaccacctaccttttatcctatagcagccatgtgttaaaactgaaaggccagtaattaccagtaaagacagtggcattatcggctgtggcttcctgttcagttttactttgaaaaagttttagcaggtgagcttacttggatattgtgtaccatagacgacttattctcctgtccttggcacagtcccccaaaatacaccttatctctgcaaggataaaatggctgaattgttgcatgttcacctctgtaactggcaaggtgactcaaaccacaaaatttcattacctagggttcatgatttcatcttggtttatgaccaacaatgcatactttctattgtagtgtgagcaaagacaatgtagactagtacctttgcagcaagatgcttgtgtactccttacaattccacccagtggttggaatcattatactaaaaagctgcttttaagtaagctgtcaatgtaagtatgcttcctgctgctgctgctgctgctaagttgcttcagttgtgtccaactctgtactatcccatagacagcagcccaccaggctcccccatccctgggattctccaggcaagaa

SEQ ID NO: 24926 - DNA, 1868 bp, Bovine  19866880625366
  misc_feature (1)..(1): n is a, c, g, or t
nttgaggagagttctttgtttcgtgacactgacttgacgaaaagaaagggccacttgttctgtagaatatttatttcttttttttttttttgatttgtcttgcgtccttgtggaaagacctatataaatcacagtaaatgttttggtaggggtgtatactaactatactctttactgtattacattaggggacacataccatccagcttcccatcatttgcattgctttgactatgcatggtaatgccttcccaatcatccactatgatattacattttctgcctgctgtcagaaaatcgtctgtgtgctgtcactctggtacctcacaaatgtcagatccctctatacatttacattacagttttaatatcacttgataatgcttatctacagaagtaatttcatttaagtttacaaagtgattgtttatttgttctgctacgccttccaagtatattttctggcattctttttaaaagtagagctttttcttacaactgaggctgtttaagatgcattttctactggaaagctttatctttctcataattcacagattttcaaagtgagtaattggttttaactaaacgcctcaaatgttgacaagtgaggtagcctagctttctctgtgtaagtgtcatgaaggacacgctaatgttcacgattaaatgtgattcagttgcctacaattattctgaaaatgtactcgcatgacaggagtgagctgtcaagaagcaatgagctgaagacccaaaggacaactcattatgacaggaaacaggtgactgcgctgccaagacaactcaaggcttcaaattcccttattagccttttttgggtaaagcatccaaggaagaggcccctacccgtgaaacactgacaggagaagacacattccatttgctttgagaggtattcattccaatgtggcttaataaagccaatccaggaaattgtggccaccaatttttattattaataatagatacagttttttaaaaagtcagggtgctaagaaacctttcagggtatataatctttgcaacgtgtttgctttgagcctattttgggaatagtgatggtggaagaaaatgctgttctttatggtatttataaccatgctgagcttgcaaagggaaaacagactgacatcattggacgaatgcagcaaggcagttacatgtaaacacaaggggagtgatttatatagaagtcttcagcatttttctctatctcctggagtttttttttttttttttttcagaagatcaacaaacaaaaaacctagtagtgaagaattggaaagcgtttcctgttaccttggtttgaagtgccaaatgacgttggtaagactgttggcgatagccacagtcataggttttaactgtgtatgttcaaggagttgaacttctagcagatgttttcaatcatctctcttggatgctgtcaccccttccttttgttcaagtctcagctaaagggacatgaaatctgtgctctgtatggagaaaatcactatgatggatttgttgatgcgaaagatagtcctactcgttccctcccttgtttgctggagagccaggtgttattccttggaaagccacatagaactctgaactggaaattttcaacagcaagtaccattagctgggatcatatctacccttcctaggacccctgtgccaggaattctcctgggttgaccttaaacccaagccagtctgacatctttcatctctgtcactattctcacacccattctctagcactggaatgagttactggttttccagaaatttccatacatacatacagaaatatatgcaaaagtaacatcctgagaattttccaggttgaacttcctggt

SEQ ID NO: 24927 - DNA, 2524 bp, Bovine  19866880661229
  misc_feature (1)..(1): n is a, c, g, or t
nttttttatttatttatttttgctttggtatgaaaacaaactttgggaattaaatgacttatagtactattcttaggtaaaattgtccttcatatctgtgggtttcccatccgcagatgtggaaggttgtctgaactatgtcattttataaaagaagcttgagattctgcagattttggtatctgcaggggagatcctgaaaccaatcccctgcagatactgagagatgactctattttaaatattttgttcatcaaaacttcattagatcaggttgttcagagtatcatggccattgtgtacaactaaattgcttaagttatttcaatatcaatttataccatttgtgataacggatgaaatttgaggaaattgtgaaatacataagagaaagataaatcctacatgataatcacttatatgtggagtctgaaaaagccaaacttggaaacagaatagagtgttggttgccaggagctggggatagggagaatggggagatcttgggcaaagagcataaactttccattataagatgactgtttctgaagctctaatatacagcatagagattgtagctaatgacactgtattatatacttgaaagtggttaaaagggtagaacttaaatgttctcaccacaaaaacatatggcaattatgtgacatgatagaaatattagctagcacttcggtggtaatcattccgtaatatatgtgtgctcagtcttgtatattttgtaatatataagtatgccaaatcagtctgtgtataccttaaatttatacaatgctaaagtcagttatatctcaataaaactgggggagaaaaagaaaaaaactcctggagatggatggtagtgttggttgtataaaatatgtatgtacttaatgcatcagaactgtacatataaaatggtaaattttatgttatgcatattttttcacaaaaagattattttgaaagctatttcctttggacatcaagtaagtaggtaaaaggaattgatattcatcagtgtcatttatgataaaaagagaatctgcccccgccaaaagtttctgaaaaacaaatactatcctattcacaagtaaaagttaagatgaaacaccaaaaattttactctattggggaacttgggcgagtgcacaattgttacagattaaaagtagtgttagctcacctaagagccaatctaaagagcagagaatggtcaaatgctttctagaagagaaatctttagtttaaaaaatatctaactaaagacaaaaaaggcccatttctttatcatctgagccaccagggaaacccaacaagagtcaggcctaaaaaaggttcgtttcttgtcctgacatatttttctattccttctaattatcttttcccaagcctgtggtacgttatttcttctctcttacactgaacacaattacaacatttctcattgttatagccccaagtgttaaaaacaattgcattagcaggaagaaacttatctttttctttccaaagggagctttttagtctttattgagtgggttgtcttttcagtggtatctagaggtaccactttcctagatcgtcctagaatgtcctacactcatctctccagcttggtacaggaaattgctccttccactgcctcaaactgaattcaccttaaatgtctgtggtcttgatgtgagaggagagacctctccaaaaaccatgttggtctttggtcagactttttctaagctcttctggtccaggcacatgtaaaaatgcttaagtcctgccaacatcatgaataaatgagttgtattcattgccaactcctttgtttacaaagatgtcctgggcacctggaaaagcagtcaaacctcacttgacactaagtttaacctctgagctgagctgagggaaataagctctttaaatctgctgaatcatcgattctcacacatctttttatgggaaccatagatcaggaggtttccctgggtgcacttacagctggaaaatatctatcattttttcactgctcagcctggacttttggaacataactccttcttgtaaacatattaagttcagttcagttcagtcggtcagtgctgactgactgtgaccccatggactgcaacactcaaggcctctctgtccatcaccaactcccagagtttactcaaactcatgtccattgagttggtgatgccatccaaccatctcatcctctgtcaatacctgaaattttaaggcttttcttctcttggtcatcctccccttctactctacctcccaaggtcctctgaacagctcctctctctgtcttgtccagagaacagcaagagatgacacagtgatcacattcagatcagagaaggcaagcagatgactattctaaaatagaagagaataaaataccttaggcaggtaatattgctccttaatgttgaaagaaagtttaccttattggaacacttgctgctgctgctgctaagtcgcttcagtcgtgtctgactctgtgcgaccccatagacgg

SEQ ID NO: 24928 - DNA, 3542 bp, Bovine  19866880691281
  misc_feature (1)..(1): n is a, c, g, or t
ntaattctgaagctgtcacaggtctaattcagttcaacacattctgtgagtggcatcggcacaagagaactctgccatcattgactttattactgaatacagacactctcctaaatttcttgctccttccctgtctcctttggccttgagcaaattggcagcagactgcactggcttccctgccctaggttttattctgcctcatccagactcaaatgacttccaagaaaagggcaaaatgtccttttccctccccacccagaaaaagagaatgagagtgcaggacccaaggactccagaggccttcttataaagtgccaaagtacaagactaaacactagaggccttccctgctcctaacaaagatttcatcacccgatgcaatttcatcaaataggggctttggacctgggcgaggaagagcggcagagattcaatatttcctccttgatggctctttcccaccaaatctcttcctgctcacactggaaaaggaccgatactgtggtttcttgttgcttttaccactgttaacccattttcttcttttactcttttgtccatctcttcctctgtggtgaatccatgctattatagtatgaatatccattcagaggaagctgaggtcacaagaggtatgacacaaggcccatagttttggcaattagcagcttaaaagagcagagttaatggatttaactagccttcctttaaccttctaaaagacttctctttgtcaccgccccggctgttcaaactttgccacccactgggtacaatcaggtcaccaactgaaagacagctctcacatgcttgattaaacttagatctgcctctatacgctgctgctgctgctgctgctaagtcacttcagtcgtgtccgactctgtgcgaccccagagatggcagcccacaggcttccccatccctgggattctccaggcaagaacactggagtgggttgccattttctcctccaatgcatgaaagtgaaaagtgaaagtgaaggcactcagtcgtgcctgagtcttagcgaccccatggactgcagcctaccaggctcctccatccaagggattttccaggcaagagtactggagtggggtgccattgccttctcccgtctctcactactttatattaaataaggaaacaacaaagacctaccgtataacataatatcttgcaataacctataatagaaaataatctgaaaaagaaaaaaatttatatatatatattcactcaacatttgttgagagcttactatgagacatagtatatatacatatatgggacagtcaaacctcactcaacacttgacattaagtttaacctcctccaagggaaataagtttttaaaatcttctgaatcatcacttttcacacatctttttataggaaccatagcctaagaggtttcactgggtacatttacatttggaaaatatctattattttttcactgctcagatgggggtttttggaatataactccttcttgtaaacatattaagacacttgaaattttaagacttttcttctcttggccaaacagttagaaccgacctagaacaacagactggttcgaaattgggaaatgagtacgtcaaggctgtaatattgtcaaactgcttacttaagttatatgcagagtatatcatgtgagatgccaggttgaagcacaagctggaatcaacattgctgggagaaatatcaataacctcagacaggcagatgacaccacccttaaggcagaaagtgaagaggaattaaagagcctcttgatgaaggtgaaaaaggaatgaaaaagccagtttaaactcaacattcaaaaaactaagatcatggcatccggtcccattacttcatgaaaaacagatggggaaacaatggaaacagtgagagactttattttcttgggctccaaaatcactgcagatggtgactgcagccatgagattaaaagatgcttgttcattggaagaaaagatatgacaaacctagatagcacattaaaaagcagagacattactttgctgacaaaagttcatatagtcaaggctatggttttttcagtagtcatgtatggatgtgagagttggaccataaagaaggctgagtgccaaagaattgatgcttttgaactatggtgttggagaagacttgagagtcccttggacggcaaggagatcaaaccagtcaatcctaaaggaaatcaaccttgaatattcattggaagactgatgctgaagctgaagctctaatattttggtcacctgatgcaaagagccaactcattggaaaagaccctgattccgggaaagattgaaggcaggaggagaggatgatagaggatgagatggttggatggcatcactgactccatggacatgagtttgagcaaactccgggagatggtgaaggacagggaagcctggcatactgcagtccatggggttgcaaagagtcagacatgactgaacaacaacaaaatgtatgtatatgtgtgtaagtataactgaattactctcccataaactgacaatattataaatcaactatacctcaataaaaaaagtattctaaatatatccaaatgaaacttctttaataaaacttaaatctgtctcatctagggcttctccagttgcagccctatttgctcagatggttctctaaaacttgaattattgcagtggcttagacaagcatacaatggtaaatattaaaaaaaaaatacacaaagatagttttaagcagccatatttggttcaaacaaattaacaattccttggagttgttacaaactgtttttgctctggatggaaagtttacatgcttaatcaacatgggcatgtgtattagaaataacatgacaaggaaaaaaagaaggtggacataggacctcaaatgacattcacatgcattcatttacagtcatttaatttgcttatttctctgaatataatgatatttgctgcaggtagcaaaattctaatgaaaaacccacgagacacgactgtcttttaaagtatgttttagcttctattctttcacatgataacaaatatccttttcttatttcaagagagaaataaaatactcacaattaagactttaatgggaccttgaaataaaagatgaattttagggggacatgagcattatcatattttaatgttgctactgctgctgctaagtcgcttcagtcatgtccgactctgtgcgaccccagagacagcagcccaccaggctccccatccccgggattctccaggcaagaacactggagtgggttgccatttccttctccaatgcatgaaagtgaaaagggaaagtgaagttgctcagtcatgtccgactcctagcgaccccatggactgcagcccaccaggctcctctgtccatgggagtttccaggcaagagtactggagtggggtgccattgccttctccttaatgttgctgctgctgctgctgctgctaagttgcttcagtagtgtccaactctgtgtaatgttgctagtgcacggtaatca

SEQ ID NO: 24929 - DNA, 1639 bp, Bovine  19866880741191
  misc_feature (1)..(1): n is a, c, g, or t
natggtaaagaatctgccctgcaatacaggagacccaggttcaatccctgtgttgggaagatcccctggaggaggacatggcaacccactccagtattcttgcctggagaatccccatggacagaggagcctggcgggctacagtccgtgggatcacaaagagctggacaccactgacacaacacagcacacagttgttataatcatttctttgcctggattgggaaacactgaaagcttgcccaattcttataattcatctttttatattttacttcatggacaagtgggaaccttcagctatttgtcatttgctactatgaagcaaaattagtttatattttcattgcaaaaggtttctcacagtgccatcttctagatggatgatactttatattctaggtatttttgtatacttcatagttaaatacactgtttagaaggaaggaaatctaagaatactatgattttaatgacactgactgctaatacaccattatgtatttgaaagaaatttctaacctcatactatgtaatctctttatgaatagagggataattttcttgtgtatttagaattcatttctagagaaagaaatctttgtggcataggtataaaaaatgtattttgcattcaatgttgtttattcttttaagatttgtaacttgccagcacattatatgtggtttttttttgagaaggcatttttattttattttttttttgagaaggcatttttaaatgattattatttctcatgttatttattaaagacaagatgaaaaaattaattgcttttcagattcttccagatgatcctgataaaaaaccacaagcaaaacaattacagacacgtgcagactacctcatcaaattacttagtagagatcttgcaaaaaaagaagctcagaggctttctggtgcagtaagttaaaatatgatgcttaagagcactttacttttggataagataaacctagtttaccccatcaccctggattcctgtggttaacatgggctcatcattgtgtttatctgtaatttagtagctttgtttgaatacggtagtattttgccttaacagcattcatgttgaaactccagtgagtcatgtctttcagaagaagaatctcttttttcctagtatttagtatgggagcaacttttggagtgaaatggggtgttttttgagaggtcaagcctccattactggagacagggcagtaattggatttggagacattgggcagcttaaggaatagaagtattgaagatcaccaagcttatttattgattgtgttccacaaaagaaggaaaaagacagtaaaagagaggtgattggaaactaaagcaacctttgaaagtttacctgtgaccacagtgtcaataactacctctgtactatttaaaataatttctaatgctatctctggtggcattgtttagctgaagacaataatttaggattgtgaacagccttcctacttctctctactctttttttttttttttaaggaataattacagttggttagcatttattcagattaatttgcatttgattaagctatatcacttttgttgataatttctaagattggtgtaccaacagactaaggattgggtaggaatgtgtgt

SEQ ID NO: 24930 - DNA, 1053 bp, Bovine  19866880925419
  misc_feature (1)..(1): n is a, c, g, or t
ngggatcttcccaacccaggggtagaaaccaggtttcccacattgcaggtagattctttaccagctgagccacaagggaagcccaggatagaatatggtaatattaaaatcaattagacataacagaaataaaattaaatatattaatacaaagagtgaattatgaatcacaatcttctagaaattagagcgtgccccaggtgttggcagataactgtataaataatgggttggaggccatttaatctgatgacctaagaataaaaactgcattttccaggaatctggatgatttttgtcacccaaaaaatgtgatgaaaaatgttaatgaatatattaatagtttttcaaaactattatcactggatcatttggaacaaaaatattgaggaattctcaactgtcccattccctcccgccaacacttcagtctccccgctcagaagacctaccacactgctgggtggtcattgtaccatttgccctctcaatagactctaaatattaatattgcaaaggccgtgtatgatgcatcccagttgcattctcagctctagccactgcttgtgaagcactcatatttggtgcttcataaatgctgttgaataaaggaaaagaaagctggtctttgtaaatcattttaaaggcgtatgtcatgagagctatgtcaggcactactctaagagctttgaatataataatccatttaattctcacaatcccactttgagattactatcactagtgttcccattaatctacattacataatttgaaaaaatacatgcaccccaatgttcataacagctttatttacaatagccaatacatagaagcaacataaatgtccatcaatagttgaaaggataaagaagatgtggcattatatatataatggactatactcagccataggaatgaaataatgccatttgcagttacatggatggacctagagattatcgtactaaggaaagtaagccagagaagacaaatatcatataaccttgcttatatgtggagtctaaagaagaaatgatacaaatgaactta

SEQ ID NO: 24931 - DNA, 1113 bp, Bovine  19866880946289
  misc_feature (1)..(1): n is a, c, g, or t
ntcagaaaatgtgatatgcttgctttgtgggaaaaataaaaaggcaaggaattggtaattgaactagtggaagttaaactaagcactaaattttgatttgaaaatagatacccagatgttacttttatatatataaaaagactaaatgaaaaaataatgagccattttatgaaaattcctttaactgaagttagacaaaagctggttttatggactcaagttttgtctctacataatgtaagcttccctggtggctcagctggtaaagaatccacctgcgatgcaggagacctaggttcgatccctgggttgggaagatcctctgtagaagggaaaggctacctactccagtattctggcctggagaattccatggactatgtagtccatgggtcagagagttggacacaactgagtgactctcactttcacaatgtaagctccttgagaacgaccctctccggtcgaccactacttttgcactcagcctggtgtttatagagttgagcacctgaaatttctcttgatcattgtcctttacaccctatgtccagctaacagaagctacattgctccttcacaattaagttccttgggtggttaggtagttaacaccttctaactgttaggtagcagtgaagaccatgggtgtatttttcctcaacctagatatgaggtgacacattttacaacgtgagaaatcaagaaacattgagactgaattttgaagtcagcaagcatctgtcagcatgaaaacatcaacacagtcatcccactcctcagtattcccagtgaagtctagctccccttccgggcctctgacaagcaacttgtgtggaaggtttactcaaggcagatggaataatattagagcatcagaatccaggaccaatatttccagcaaaatatttccagccaatacatgtacattgaacacagtcatctcactgctactgctgctgctgctgctgctaagttgcttcagtcgtgtccgactctgtgcgaccccatagacggcagcccaccaggctcccccgtccctgggattctccaggcaagaacactggagtgggttgccatttccttctccaagcaggaaagtaaaaggaaagg

SEQ ID NO: 24932 - DNA, 1720 bp, Bovine  19866881003671
  misc_feature (1)..(1): n is a, c, g, or t
nctatccccccacccccggggggcagaaggcgctggccggggcgggaaaggcctccccagctcctgacccgcactgtggccgggctggcggcgcggcggcaggaacacacccgccaaccgagcggcgcgcccagggcacacgggagcggcctttcgccctgcctcccgccagcccgcccgccgtctccgccttctgctcggaccgtggatggatctctcctctcgcagccacttatcaaagatgtagcgcgcgggcggggggggctgcgctcccgagacaaacgttccggatgctctattgctctctgcatgggtgtttttactgaaagtcgggctgggatcaggtttccgccgccgccgccgccgcctcctaggctggggagaccaggagcctggttgctgctgccgccctggagttgggggtggcgtcgaggcgaagaaatggcacccgatgggaagataattctacccgtttgaaaacctgggggttcatctcgaagtcacttaagacttctttaaactgggatcactttcatatttgcgaaagccccttttaatttcagctttcaccccctctttggaaaaacttggtgctttgtggctagccgcgtgttttggggggttccaggagagtgtgaccgatctcttgccttcgggaacttccccggtggaagcagcagtgaggaatctgttcttagcgaagaaaaatctttttgtgttagcgacgatgagccttcttgcgtgttttgcctgtttttctttttaatatcttttcatgaacacaatgatgtatgtcagttatatctcaagaaagccgggggggcggaaatctagaacgccctttataaataagtaccattcctagcagccatatctagacaaaaagttttttcagtgccaaattgaaaaagacaatctatcttttagtttgagagcacctagagcattagatacgttatcctttgagatctttttgtcctgtatttgtgggacagcaaccacaacactctgatctggagaatactgaactgtaatgccacccaactgtgccagagttaatttttatttatttattaagtcataccagcggtgttaaaaatccgggaggtcttttaagtaatggggaaaaaatgtgacatttgagcagacgactaaatttagttttgcagtaactttgcattgtgatgtaacagcctgcattttaacacctgtctcttgtggaaacagactgaagtcttaatagagagtgtaaatagcaagttttacaatgatgaaggtttttaattagtgattttagaaccttagaaaataaagtcagtctgctcacggttgcgtggaaaactttttatgacgtgtcaaaaaatatattcaggagtgttttgtgtggaaaaaaaaaagtgtccataatgtcaaagtgtagatttcttgaaatggaaattgagctggtgggcaggactgtgaccctcttgactgcttagatgttgtttcctttagttgccatagggtcctgtaacaggattggaatgtggtccttgaagctttcttcgatggcctctgaaaggcctaagaagttggtttaaaggtttagaaaattaaggtgcctgagttcaagaacttggaatgtgaaactcctctcagtatcctaatgtggtcacactgaagtccccattagattcgacccagagttgctgtagtgagtgatatctgtggctagattgtt

SEQ ID NO: 24933 - DNA, 1527 bp, Bovine  19866881026500
  misc_feature (1)..(1): n is a, c, g, or t
naattgtggtaatgattatttgtaataatgagctacagagtattaatcttgaagtaaaaacataatttttgaatatctggctttctttatactgatcataaaattttaaaaattcattccctcccacacacagacatttctgtttgcttcagaaaccaaccagccagaaatatcaatatatttcaaagagctttattttagattcagttcaaaaggagggcaaagctaacagcagaatcctttatgggagctaaccttatatgagagaatctaataaaggatgccatatatttgtaagggaaaaaatgcaccctgaaacattttcaaagatgctgcacaaaaaaagcaaaaactaacatgacataaacaaactgtattgattatattttatcttagaaacattgagatcttgaggataaatgaaatttggctgtgttgatcctcccatcctgtgaatttcaaatatctaagtatctgctgcatgtaacatccatacttctgcccctctgaataagtcatgcttactgatagttgctgctgtatttttgtgttataaaattcactttttaccactaaatacaaagctcccaggtgaataaacaaacctttgagaagttttttaaaaccacagtctaacaagcatgccatacagatgaactctgactcgcatgaaaatactggtgaactctatgaaacttgtcaaactgtgacttaaaatgttctttctactataaaatatatgatgctcttgattttgataatctaagtgctttatacaaatgagatttactttgtgtgaaaaagctcactgccatagtggtgccagggagcttcagtttcaggaacagcaatgctaaccagcaagtcatttgggtgctttgattcattggcctcttatctgtgagtgtaaatctatgtgacagacagtgcctggtgaacaggaggagcctgtcttcacaatcttacattctattaaagtagattaggaaacaaaaaccaaatattaaacagaaaaagaacaaaaataattaaaagttgtaaaagatactgtagaacaggacactatgaaagaaaatagaactgcaaagggcagaggaggtcctacttctcacaacatgtttaggcaagacctcccggagtaagtgatatttaaccaaaacctagaggatgataagaagacagccatttgatgaaagggaggaagagttttcaaggtggagactcagtaagtacaaagagctcacaataggaaaaacttggcctcatagggaaatgtacgatgcctaatgtttctgcagtatagcaagtaggacagagacacaaaatgagactaaagagacagtcagaggcctgattcagagcctggaaaaccatggtgtaaggaccttggaacatattctagtgcatggggacctacaggcgagttttaagtagcagtggccaattgtacaatttttaatgttcaggtagagtaagaactacttcctccaaagttctggtttcctccatcaaaatacaaagagaaca

SEQ ID NO: 24934 - DNA, 2272 bp, Bovine  19866881093025
  misc_feature (1)..(1): n is a, c, g, or t
ntaatgtttgtaaaggccaaataagacaacattaatcgaaacatctaacgacaggacaaatgccacgagcattctctcatgctttggaagtgaaaagatgtgctttcattctacagataaagaaaccaaggcctagctcggtgatcaccagctagaaggaaattgaacaccaccacaatcattgtcttttgactccctggcaagctcttctccaggcaaatcatgaatatccctcccaggggcaaactgggtctgattaactgaaagcctaagagggagccaatcttgagcagggctacttctgttcccagcccctcaccacacccacgggggcagccagaatttagatcccttcctcttgttacacagggaacctctcaaggtctggggagcaattttggagccattctggcaaggccctggcagattctgtgtgatttctgcagcagcagccagctgattcaaggctgactcacgaagccacctgggcaagagtgggggccaccagcagctgctgcctgacctttcagaccttctctcctgagtgtgtctgggagtctctggggcagttgtgacaccctgtggccagcttggctcatcacagcagagtgtcccttagtaaaaccaagaggaataggtgggaacaggtgcaggcagaaagagagctgtttgcctgagtttgtggaacattcccggaggctcagtggtaaagaattcaccttccatgctggggacacaggacacccaggtttgatccctgggttgagaagattccctgaaggtgggcattgcaacacacttgagtattcttgcctggaaaaatcccatggacagaggagcctggcgggctacagtccatgaggtcacaaagagtcggacatgactgagcatctgagcacacacatgtacagggcatgggtagaagccctggacagcagctctattgatgtctcatcgtgcagtcaggatcaggtgagccatctagatatcagtccaatagagtcctttgataaattaagccccggatacttgccaaatgcaatcaataagagactccaagcaagaactgtctggctgttccagccaagtcaaggatgtaagggctcataataaactgttgctttatgtgattataaaaactggaacattgtattttctttgtcagaattttactcctaaagagcttccaacatcatcacagattttctgtaacctctggaaatggttgaacagcctgtggatttgaaaaaatgagcacaaatcacatttttctatctatctatgtatccatctatctatctatttatctgtcttctatctgtttatgttagctgcagtctggttgccagctgggacaagtgggtagattaatatttgagtctcagtaactttgccaaggactgggttcaataaggtacttctcaaggttggcaacaggcaacattcttacagttttctgagttactgtcataaactaaaattctagaacatcataatttaagggaacatcgagctgactagtttgtccctggtggctgtgtgagagtatacttggtggaaggctttgtcctcagggaaaaactgcacacttgaagtggcacaggaaggagacgatacaaacgtttagtggtttaataatgtgaatgcaggaagggcagtctgcgtgtcagttacaatgaactgattccttatggtgtatgacttgtaaaagccagcaggaaagaatttaccataagtactttcctcatataagagtctaaatcctgaaatgtgcccatttcagattcagtcatttgtgttcttttcccccccgctaaacctccattaaaatgttaatattctttgaagaatgtgacttgaacaaacttatactcaggtattaaggagtttcagatataatcttttctcctacagggacaagaattttcagaagtgttcttgtttaaagagcctttaaagagttgctggtgttttttagtagatgctgagtgttgaaatagagaaaaaggagagatgacataaatcgctacctcataattttatctgagcttatgctagatgcagtatgtacttgcatttctatttatgccgttttctgctgatctcctctgaagtcatacgctctttgaagaaggttcatgtatgtacatatattatagtaatttggtaagtcaatagcatttattgcctcctactgttaactggtaagcatttcttttatcagctttattccaggtcatatgtaaatgtatggaaaacgacaatacgaatt

SEQ ID NO: 24935 - DNA, 1379 bp, Bovine  19866881209321
  misc_feature (1)..(1): n is a, c, g, or t
ntatttaattcctctattttcccttaaatagaaagactaaatcagagcccactaatatgaactccactatgtctactaacatgtttctacatattaagtgggatttcacctgactccaggttctactgtcctaagaaactgaaggagttctctatgaaaggctttattactcgttagttatttaaaaataaatggtttatgcagtgggacttaagacaaagttatatctcactattattttattttttaaattaattaattttttattgaaggataattgctttacagaattttgctgttttctgtcaaatctcaatacgaatcagccataggtatgcatacatcccctccttttgaacctccctcccatctcccaccccatcccacccctctaggttgatacagagcccctgtttgagtttcctgagccatacagtaaattcccgtgggctatttattttacatatgataatgcaagtttccacttatgcaatgggacttaagataatgttatacctcactgttattttagaagaaacccagagaatagggtagaattgaataatatggcagtgattaaaacactttagaaattgtcattaaaaaaacacacaggaagtttgaaagaaaactgctttccattaaaatctcctccatctctcccactcaccctattaccacgtcagggacacatcgaagtgtacccaggccagtttaaattaaacacatcaatcatcccaagggtcaagaattacctaatgctatgatgaacgactcctgtgacttagcttttaggctttgctctttgaagattttctatccatgtgcatttattttctagactgaggcaatcagtctgatgcaaagttgaaaaaggcagttgcttatgttttgttcagaatttctccagagtagcctgctatgtagtgcttggcgttcctaccatcaggattatttctctgaatgaagatttatgaacagaaggttcctgtttggatttaaatacattttcttagaggggtgctaagataaacagccaatcataattaataaatctgcggactaaagtgcctttcaagagagaagttctaaaaaattaaagccaaaggcaggtgtattttgattggaggctggataagaaccttctgaagcatgacgtcatggcttctgattattagcatcccgagagtaaagaggaaattggaggtcactaagaacctaagggtgggtgtatatagaaaatactgtagaaagtaggttttcagtagaggtcagggagatcttaggcaaataccgtctccttaagcctgattttattttagtacactaaactgctgcaaaaatttgaacaacctttttttttttttttttccccaatc

SEQ ID NO: 24936 - DNA, 1920 bp, Bovine  19866881234443
  misc_feature (1)..(1): n is a, c, g, or t
ngccctttgcagtaaatattttatcctattattttggaagattatttttgcattcagagcagaagtctactgaataaaccagaagtaccccaaagaaatcacggaacgttgcttcttaggtttgttagttgttttgtggcacattatctcacacctccttacagatgatctgagagcaatttttggctttcagtgcaggaggatcaaagaaacgcctatcaaatgttgcccctaatcgctttagacagttcaagcttctgcaatgccccagtgtttcagtttaacatttactgtggtgtgccttgtgcaaatagatacagttgaaatttaagcctgttataatgggagcctgaccacgtggagcagagggaggaagatttctaccaaaatttgccagctccatattttgccctggtcctcctggggtaagttcagggtaccggctcccattcatttccttcggcagcaagcccagaagcccctgttcgcagtgactacaggctggatattatctaaactctcagtgaatcacagctgacagtgctgctatttctaagccccggaatcactctttgaacaaaatgcaagcgctgtgtcttttcaacctgttcttcagcggcggaagcagcagggttccagcactgtataataactgtcagaaacaatttctgctctgtaagtgaggtgaagcaaaatgtcaaaatatttgaatacatttcattgaggatatcttcttttaaattagtgaaggctagagaagaagaatcccattctctcgcataataaatatgcatggaactggggagccacgtgcattctaataaagccgagtcctggctggttaatgcgttataggtccacaacaataaaacacaataattactagttaaagagatgccagtgttggccttttaccaacatccctgaacatataattcataataaatttagtaaggctgaagtcggcctgttaattaacccattttctacaatgattgggatggaggaagccacgatgtaatccgccaaggtgccctcccaaaggtgcacagctctcgctggttggactctgcagtttggacccatgcgcatcaccacaggatccttgcttgtgctcagacaggtgggaacactgggggaaaagcgctaaaggaatatcttactctgtaactaccatatttgagaaatgaaattgcaggacagtatacacactgactggtgggtttccggggccttttttagaaccaacaatttaggcaaggaaagctgaggagaggggcttagcaactcagggactggagtaagatggtggacagaagacatacgtttttccttttttttttttcccacttaaaaccattaaagtgacagaaaagacagaaacatgtcacagtgctagtaaataggaaagggtatcatattctgccaaaatttaagacattcctggactacagagaatagaagaaataagactggtcagagcagagagtcccacagtctaacacaaaccaagaagaaaaccaccctgaacttatattttttctgagactgctctgcctacctggtaaatgaataagaagaggaaaaagaggtcctgggaaattatcaggatttcttttttccttcttaaaaacctgttatagtgagtgtgcagtgtgtaaatactttaaattattatggtagaaaaataaagttacatacccttctgtggaaaaaaaaaaaaaaaaaaaaaacctgttatagagcattccccccttcttcctctctcacattgagcagtatgtagcagaggggctcatcaccaggctctgagtcaataactgctctctaaggaaagtgaagctggggcccacggagtgctgcaagttgggtgcaggacctgagggaacacaaactccatggcaaatgtcgggtgggaag

SEQ ID NO: 24937 - DNA, 1226 bp, Bovine  19866881267622
  misc_feature (1)..(1): n is a, c, g, or t
ntgagaaaattttttaccagtaactttcatttaatcctttatccaccttctgtgccgagctggccaacagaagttccagtcgtctgaagaatcaaacatctgaaagttacagaaggaaagaagaaggaaaagaaaagtacacttgccttatttgtcgcagtagcactagatccagggaccacgggcacgttcgtcacttgaactgaaagataattattgtctatgagtggccaagcaccttccactttgcatgtctggaagtgatccttgaaagttctaaggtgagggtctccgaacaagccacagaaaaggtaattgggagggttctggtccccgcccctgtgttctctggctcccgcgtggctgtgatagttacaagggtcatgggtcacttctgggttggtagatgatgtgggtccatccttggaacagtttctctggctcatgaggtcgctgatacccagcacagcagaatggtacactaggttaccacggcaggctttggaagtccgctgggtgcagccagcataggcgcgcagagccttgcagaactcagagtcaaagccatcgacggcggagttcaggtgtgaggtcagggacacaaagtccgtggtgcatttctggattcgacactgggctggctgctggcagtcacctaggagaaagacgattaagaccaaatgtttttaaaaggcttcacaactttctgagctgcatgagaaaaggacattcttcccctgggaactgtttgttctatttcctatactcctattttaagaaggccttcagaaatagggttgcattgtggcttcttggtctctcacaaagtaagccacgggaagaaccactgcatgcagctggttaacttaacaactaaagcgcgggccactgcgagggaacaggagtttagtcaggtgttcttaggctaaactacaagggaacaataaaggaaatattttatcaactttgctcttgtttacagattttgagaaagatccctttgctctaaggccaagtcaaagatgtgaactttgttttgattttgaaaactgcataagtaatttgctttgaaaagcacagtctgtacacaaaatcatgagtaaagcctgcacacttcagggaggggaaactcctaaattatagcgtgattagttaaaacacctttacctgattctactctagtacagggcaagaatatcaggaaaaaatccaggtactaagttatt

SEQ ID NO: 24938 - DNA, 1210 bp, Bovine  19866881313022
  misc_feature (1)..(1): n is a, c, g, or t
nttgtgtatttggcagatattttctcaaaataaatgaaacaagcctgtcatttcaagggaaataattgacaatatttgtttccaatgatgatattcaagcttccaaataggttagaatttttgaaagctatctacctctgtgagcttaaaaatttggcaataaagactttagatactataatggtgatgttaattaatgtgatttacttttgatatcatataagggtatgtgtcaccatatggaaggtctgaataactcaatgagccaatatttttgaaatgattgaagcgcagtgttccaaaatcacacatgctaaaagattcatttaaagtgtaagatagaccagtagttttaatataacacagtacattaaacagcaaatttaagttaaaggcaaaagacagttgagaaaactatctctaacacatagtaacactttgtcagaaataaaaagctttttatatcattaataataagtataacagaccattgagctgtttctacttctttgggtataaaaatgaagtagctttttaaaaagaaaaaccaaaccattgcttgaaaatgtgctgtgtttaactttccttttttatcccttaacattttcctggacagattccaaaatcttatagggattttgttattaaatgagtcccgaatagcttaagaccataacctcatatccccatccctggtaccactagaagctgtgtctctggccagtgggagtgacttcaggaaatgggtatagggagttcaggaaacactacaaaaactgcctagcctggtgctttatctggggtggcagagaggggtgagaggagcctggaagaaatagcattgtttctgctacctttttctaccttagagggagggagaactctctagtgaaagctttcggtgacattttggcacagtgtatctctttagcacgtaggatacttttacctctgaacctcagctttaaacctgaacctagattccagatagtggacatcctattctgccagaaaaatactaatactgcagtaaaaaaaatgaccaaagtgcttaaacagaaaatacccaggaaaacaaaagactcacttttgctgtttcagatgacttatactagtataataattttatatatttcagtttagttgctcagtcgtgtccgactcttcacgaccccatgaatcacagcacgccaggcctccctgtccatca

SEQ ID NO: 24939 - DNA, 1323 bp, Bovine  19866881443865
  misc_feature (1)..(1): n is a, c, g, or t
nttgtagcctatctcttctaggggaacttcccgaccgaggaattgaactggagtctcctcaattgcaggtggattctttactagctgagctaccagggaagcccataacaagtgtggtagcatcaaatcaccaaaaatcctaaacactggtattcaaatatatacgcacacacactcacaaaacaatccttttctgctcttgattaatatagatggttaatgattaaatgagaggcttactttttaacctgatactgtgaaaataacagaaacaaaatttcagaggtaaagcagatagacatcatttaaattcaatcccttcatgaaaaccgaattccaaagaagccaagatcacaaagctaactttcctgaccccgagctgactttatttctaatataatttaaaagcaaaaattcaatttaacaagaatggtcaacagaatcaagtattgcagtaccttgtgtgtcagactgaggtcaggatccattttaatcatctcccagcttccatatccatattcgtagataccaattaacaaattggaatcatcttctttgccccagtctatatcaaaatgagctgccttcgtgtggcatgggatgatatacctatcattaaagttaacaaccactgtcaggtttataattgcctcattaaaaattttgaaaaccacgtttgatcattagaacttcaaaatattgcgctttattttatttttaaaaacatttcattcaaattggccatggaataaaaaccacttctaacatacactcatgtccaaattattgagtaacaagtattttacagcagaaaaaaataactcactgctttctttcttctggatctgaaggaatggatttgtgcagcggtattaattcttcttcatgggagatgaccagcttggcattcacctgtacacctgatattcggaatgttgggccctttacttttccaagtctaccacctatatttggaaaagaatatcaaaaagtataaaatatataattccacaaaatacaaagcaatgtatgttattacttatataaaaaagtagtagtatttatttacctattatttttaagtattacttatttgcattaacgggagaggcttgctggcaaaccttaaatttcactctaagtcttttcactacatactagtgattataatacagcgcaagaggattcacaaaaagcatttcacatactacagcaaacacatgtactgtgctgtgctcagttatcagtcatgcccaactcttggactgtagcccccagggactgtagcccgccaggctccctttgtacatgagatttttcagg

SEQ ID NO: 24940 - DNA, 1496 bp, Bovine  19866881449157
  misc_feature (1)..(1): n is a, c, g, or t
ncacatttgacattattgcccacatgaaaggaaaccaaatggatttccaataacttttggccttttggattctggaagtgttcagagacctacccttttaaaccaaatgcatctgaaaaaaatgtttccagagcatgcagtttagattttacagatcatctcaccattctgatacacaatattgactaaaaaagggaaaaggaaagaaataacatgtatctaataaaatagtcaatataaaaaggactataatggaattaagtggcctgcaagtgacttctgtgtattgattttgtgtcctgtgaatttgctaaactcattgattagctctagtaattttctgatagtatctttagggttttcttgtcatctgcatcatgtcatctgtaaacagtgagagctttacttcttcttttctgatatagattccttttatttctttttcttctctgattgctgtaactaggacttccaaaactatgttgaattatagtcgtgagagtagacacccttgttttgttcctgatcttaggaggaatgctttcagttcttcacaattgagaattatgtttgctgtgggcttatcatatatggccttttctatgttgagtaaatggtacttctatgcccattttttgaagagttttaatcataaatgggtgctgaattttgtcaaaggccttttctgcatccattgagattatcacatagtttttatctttcagtttgttaatatggtgtagcacattgattgatttgcatatattgaagatttcttgcatccctggaataaacccaacttgatcatggtgtatgaactttttaatatgttgttgaattatgtttgctagaattttgttgagtatttttgcatatatgttcatcagtgatattggcctgtagttttcttttttagtgttgtctttgtctggttttggtattggggtgatggtggctgtgtagaatgagtttggaagtgttccttcctctgcaattttttgaaagagatttagaaggataggcattagttctaatctaaatgcttgacagaattcacctgtgaagccatctggtcctgggctgttttttgggagatttctgattacagtttttatttcagtgcttgtaattgggttgttcataatttctatttcttcctggttcagtcttggaaaattgaacttttctaagaatctgtccatttcttccaggttatccattttattgccatatagttgttcataacagtctcttatcatcctttgtatttctgcactgtctgttgtaacctctcctttttcttttctaattttgttgatttgattcttctctctcttttttccttgatgagtctggctaaaggtttgccaattttatcttctcaaagagccagattttagttttattaatctttattattgtttctttcatttctttttcatttatttctgctctgatctttagatttctttccttctgctaattttggggttttt

SEQ ID NO: 24941 - DNA, 1733 bp, Bovine  19866881592707
  misc_feature (1)..(1): n is a, c, g, or t
ntgatgctggcaaaggttgaaggcagaaggggatgacagaggatgtgctggttggatggcatcaccaactcgatggacatgagttttgagtaagcttcaggagttggttatggacagggaagcctggtgtgcatcagtccatggggtcacaaaaagttggacctgactgagtggctgaactgatccttggcagactgggatattaagtagaaaccatccctctggccccagaattttttgccatattacctttacctgttatgaagctcttcacttcccttttatctaattcacattaaatacttaagttctcaaaccatgtcacttccttttcagactagggttctgcattacgaattctcacggccctaaatgtttcttcataccatttttctgagttatgatctccaagcctgattgtttcttgcactagactttaactcttgtctgtttttgttctattataaccctccttccctgttcctgcagaatgcctggtatgcaacacagtgaatgaatgtcaatataatgcgatggggacaggagctcacactgtagtatggaagtaactgtttatttcaatataatgatacggtgtacctacagaatacaaaattttaatgtcctaaaagggaggtgagagagctgcattacatttctcatagggtatgagaaatgtaatgcagggtactggcacaattgtgacagggtactcaacagctgttttatttacacctaaaataaactgattcataagatagagggactacatccacttatgagactaataccttcccaataacctgaagaaatgtgtggctagaatattgtctcccaggtataatgggatgcaatgctggaatcagactgtgaaggaagtaattaaaatattacgtatggaaatacatgtggtattaagtagtggggattaagcagaaaagctgaacaacaacatatatgaggtaaaatggacaatatacaaaggatttggcagaaaggaatgataccttatcaaggcactaatctgatattctgaagctagctacttaaacaacttcccctccaccaccacctctgcacacttaaatttttaagtagaatcattgaatccacttcaatacctgttttatacacagttgcttcttagtgtcatctccaagaatttcacatctgaaatttaactatgattttaaaaattagtaaaatctccaaatactgtggccatcaacaaggtgggcgagctgttggtggttatcagaacaatctagtttttccaaatactacttagaacctcgaaattgtgcatttcagaaagggacagtttggcacgtgtaattaagaaaaacttcccaaggtgactgactcctgtccctgcccaacactgggaaccacggctcctctcctctgatttttatgatcaagcaaacagaaaatgtccagtaaattttcattatgaggtggtttgggatttcatgggttctgtttatgaaggactttgtaaatttaagtatcatatttggagggctctttctgtttggcaagaacatggggaacaatgtcatagattgagattctagggtattttaatactgtcctgattgttttagcagcttcttgtacacaaatcttctaagcaacgagaacaaatctggcatgtaaaacatcaactgaaaagcaagagtgctcattgtctttatgctgtgcatctcataattcggtaagggctttcaatc

SEQ ID NO: 24942 - DNA, 664 bp, Bovine  19866881610959
  misc_feature (1)..(1): n is a, c, g, or t
naattcctgatttctcttttattagatattacagtgatagagagaaacacagaaaactggatgatcacaggagtagagaccacagatcaaatctggaaggaagtttaaaagacagaactcattctgatcatcgttctcattcagatcatcggttacattcagaccatcgatcaagttctgaatatacacaccataaatcttccagggattataggtatcactcagattggcagatggaccatagagcttccagtagtggtcccagatctccactagaccagaggtctccttatggctccagatctccatttgaacactcaattgaacacaaaagtacacctgagcatacctggagtagtcggaaaacataacgaaaactgatactgtctttctggacttttcttttagccatatatcataaaccaacacagtaattgccttacatgacttgaaagatataaacagatcttctgtcagtagcagtattgttacttctttccaggatgcaaggtctattatcccaacagaagagaaaatatttttatatttaaggattatgctgcactgtactacaaatattgtagtactattttttttcttttttaaagaaatggaaaatgtttactattacagggacctcaacactgcccttccatgtaggctg

SEQ ID NO: 24943 - DNA, 1184 bp, Bovine  19866881621191
  misc_feature (1)..(1): n is a, c, g, or t
natgaaagtattgaattatacttgtgtttttattccctaactttaaaggaaatgctttcaaaattccttatagacttaatcttggctcctttatgcaaagtgataaactgttttaactgtagggattgctttatgggaaatttttactggctttttaaacttaaactgtcaaaatagtcactctgactttctcatgaattgaacaaggctgaaaatactttccagttattataattcagacggattcaaagcacaatcaaagcagagtctccagcccattgtcaggagggaaaaaaaaatgaggttgtgaatgctaagcactaaggcatcttctgtaaatggaccggcaaggattgtaaagtggtttatttttcagtattactttttcccacaagccaggaaaaaaaaaaaaaacacacacacactatatgttaacagtggcctcccatttctccagtttacaaatggcttacattccccctaatgattttatatcttttcacttcttcaaagtttctggtccatgggttattaatttgcctctgtgttttgaaagagactaccatgtgctttctagcagccatcactctttttggtgtggtttcttaggccattagaagatgggcatcagtgatgactgtgacttccagatcacattcttgttagaaattgcccaacctctctttccctctcctattgcctttaatgcaggtatgatgctggtgacacagctctgtccatacagacaaaggaaaacatcctgaaaaatggtggatggatcaaacaaaggaagcctggtcctcaaatgtcctgctagatcataatcatttacatgcatcagctggtttcttaccttttatataggaaagaaataagtttctaccatgtttgggtccctacttttgtttttctttattatagcacctcagcttatcttctattgcaactgttttatttttcattttataaagtttttttttttttttttttactattctggatgagaatttaaaaagtctcagtgagtaaactccaaaaagtaacacaacagtaatactgatacaattagaaagtgttttacattaagttaacaattgtctaagaaatttatcatgactagaagatgacaaacactacccaaaagtttataaaatgtcccataattctgaattgggcaaaataaa

SEQ ID NO: 24944 - DNA, 811 bp, Bovine  19866881679933
  misc_feature (1)..(1): n is a, c, g, or t
nattcaactcattttatatattttgcaccatttaaggaagacacaataattttgtttaaatttaatagtgtatcacttccttataaaagaaacttaaaattaacacacacaagctcggaaatagaaattatggctactatcccaaagtctgaaaaaaaaggaacattcaaagatcaaattagaagaataaaaattttaaagcaacattaaatattcaggtttgctttcagtattcaaaaaataatgtctttttaagctattttgttcaaatgagtttgcatacataaaatattaagttatttcccagtttggttcagatgggattacaattggtataaaatgagagttagttatgctaaaaaacatattcaaagcccaaaagacttaatcaatattatagaatagctgtataaccatcaacatatactaaaaggaattctttccacaagctataaacatatagctctgcaaagaactgtgcagagatcttatctttaaaatacagtattggaagaatgtaattgaatccaacagttttattaaaagactgtatattttataaagcttataaactacatacaaattatggacattgactttgtcaagcttaaaattctttagtatctctaatgcttagacacccatcagtagggtcattcctaggcaaagtttgcaactcctcatagcaaagtttctacttttctctttacctgttttgatggtctcctgctctggttctcaggccatttgtctctcttgctcaaaacttcttatccagcttattacacgattaatcttgtgacaggccctg

SEQ ID NO: 24945 - DNA, 4179 bp, Bovine  19866880382725
  misc_feature (1)..(1): n is a, c, g, or t
ncccagaatgaaggcagtctgttttagagtttttaaaatatatgttataataatactgggaatcatagctgggagctttttttttttaactcttaatcctatactgcttgtacaatgttgatgtttatattttgtgtaaaagatttatttgtgcaaaagcataagtcacagagagaagctgtgcctctcctcagcccccgcttcatcactgggtctctctccgtttaggtgtggcatgcacaacagtttggcagatgcacacccactcccaacccttctcccttgccttcttctattgaagccagagttaaacactcaatttcctcccctcccttccagccaggagtgactgtgtgactcagttccagacaagagaacttagccaagttcaaagaatataaagagagactcccccaaaaaggggagagctgtagctagtcctgctttggcctctctgccccgttcttcctgccttgaatttggatgtcacatctgaaggtatggtagccatccttcaaccttggagttagaagccaacaccttaaaaatgggacagaaagaaagcaggagactgggtcttctacaatggtaccaggcctggattaccaacttgccactataagaaaaatatcacttgtttctttaaacaacctttggccagactttctgttgttttagccaaacacattcctatatgatacacattcgtgtattcctatatgagatttctttgatgtgctgctttcctattttcctcagcttcttggatagctctttctcactctccagccccagcccctctttctctgcctatgcctgaatgctgagatttctgtgttttctgtccttggtctgttctcatttcttgaataattttctccacgggcacagcttcaactaccccttatgtaccaacaagttccaaatctagatcatggacttaggcctccaacctgaacccggaccattattttcagtacatttacaacctttccccttataactctggagcaaattgagcctgctgctgctgctgctaagtcgcttcagttgtgtccgactctgtgtgaccccatagacggcagcccaccaggcttccccacccctgggattctccaggcaagaacactggagtgggttgccatttccttctccaaatcttggggatactgccaggcaaaaggaaaggtcaggcttgtatgtcttgtgattgggtgatcttgtgtgtgtgtgtgaacatgcatatgtgtgcgggtgcatctcatctttcctgtaaagcactctgatctgctcacagcttttcttccacctgcttttctgtcattaagtgtgtggtctattatagacaagtcaaaccctggttaatgggtttgactagaattgatataattttattagtaaaagtgaagttaacatcccttagatatttaaggaaaatttatgcaaattaccattgcctgttttatagaaaagacaaaactgaaactttggttttgtgacattgaataccaacagataatctgtgaaaataaagctcaatgttattgtcttcatagagcataagacaagtaatattcatgaacagctctcattgtattatagatctttacttccttatgatcagaggcaagtttctttaaacaacttgaaggttctgttcacatgtttaatgtttataacattaaatcagaacaaatgttcatagtagtttatgtataatttcaaaaaactagaaacaaccaaatgtcccacaatatgtgaggtgttaaacaaggtgatgcatccataccaaggagatgtatgtagcaagaacaaggaaacctactattgattatgcaacaaacaacaacttagatctcaagtgcattatgctgaggggaaaagataaattaacattcttgaaataacaaaattacagaagtgagaacagagcagtgactgtcagggctttgggaggatgaatgtgggaatggctacaacaggggtggcaggaggaggccttgtggcaatgaaacagtcctgaatcgtctgtggctgtggttacagtagctacttaggtaatacaattacatagaactaaactctagtcaaggctatggtttttctagtggtcatgtatggatgtgagagttggactgtggagaaagctgagcaccgaagaactgatgcttttgcactgtggtgctggagaagactcttgagagtcgattggactgcaaggagatccaaccagtccatcctaaaggagaccagtcctgggtgttcattggaaggactgatgctgaggctgaaacttcaatactttggccacctcatgcgaagagttgactcattggaaaagaccctgatgctgagagggattgggagcaggaggagaagggaacgacggaggatgagatggctggatggcatcactgacttgatgcacatgagtttgggtgaactccgggagttggtgatggacagagaggcctggtgtgctgtgattcacgtggtcacaaagagtcggacatgactgagcgactgaactgaaccgaattgaactgaaacacacttaaaactcagtattcaaaaaacaaagatcatgacattcagtcccatcactccatagcacacagatggggaaaaagaggaaatagtgacaacttttaattttggggcttcaaaatcaccatggatggttactgcagccacaaaattaaaagatgcttgcttcttggaagaaaaactatgacaaacctagacagtgtattaaaaagcagaaataccattttgctatggtttttccagtggtcatgtacggatgtgagagctggaccacaaagaaggctgagcatcaaaagtattgatgcatttgaactgtggtgctggagaagactcttgagagtcccttgaactgcaaggagatccaaccagttcatcctaaatgaaataaaccctgaatgttcattggaaggactgatactgaatctgaagctccaatactttggccacctgatgtgaagagctgactcactggaaaagaccctgatgctgggaaagggtgaaagcagaaagagggggcaacagaggatgagatggttggatggcatcatcaactcaatgggcatgagtttgagcaagctctgggagatggtgatggacaggaaagcctgacgtgctgcagttcatggggttgcaaagagttggacatgacttagcgactgagcaacaacagaatacacaggcataaatgagtgcatgaaaaactggggaaatctgtgcaaggtaccaatgtcaatttcctggtcatgctactgtactacatagccatgcacgatgctgccactggcgggaactgggagtactcaagtacacttctctgtggatcatattttgtggcttcctacaaatctatcagttcaattcaggtcagtcactcagtcgtgtctgactctttgtgaccctatgaactatgaatctataatcatttcaaagtaaaaaagtagaaaacaattcagcagggttaggtttggcttcactttagttctttgccctgaactgatttttctatatgcaattagttactcaattatcctcatgtaatacataagatttaaaacaagattgagaatagtggagtaaagaggaagcacaaacaatgacaccactgtccacttgtgaatatccatttttgttcttcactgttggcaagcagagctcaggtgaccctaccctgggctcatttctgctttgttctgtaaatgacgtcattatccttggagcaaaatataccaatcagactgcccactgccaatatgatgcaaggaactgtgctgcttctcaatgaaaatgtatccatcgtatctgttttctgctcttcaggcccccatacccacttccaatgccatgttttcttttctttctatttttactttttatttaaattcttccctatactttaaattttaatataaaataaagacgccattttaatttaaataaaactaatttgtgtgtgtctgtgtgtgttagttgctcagctatgtctgactctttctgaccccatggactgtagccccccagggtccttattaaaggcatagtcatcaatcatatgaatatacttatgaaactggaggtattactgtattgtttgaaggtttctggtgaatttgcattatttttgctgctaaaaaa

SEQ ID NO: 24946 - DNA, 1599 bp, Bovine  19866880492314
  misc_feature (1)..(1): n is a, c, g, or t
ncatctatttcccatgaagtgatgggaccggatgccatgatctttcattttaaggctgtgtattgtcaccctgcttatttaacttatatgcagagtacatcatgagaaacgctgggctggaagaagcacaagctgtaatcaagattgccgggagaaatatcaataacctcagatatgcagatgacaccacccttttggcagaaagtgaagaggaactaaaaagcctcttgatgaaagggagacacaagtagatggtatttgagactgagaatcttaaaggagtttctacataggaagtaagtttagagagaacaggtccacgggctgagcccagatgcctcccacaagtgcagaagtctaggagtagagcaggaacccaagcaaaagaaggagataagccagaagtgtaggtcagtgtcatttctcaggtgccaagagaagcccgtgtctcttgtcgtttcccacaactttatgaggtcagtgtgattttcacctccattgcacaggtttgaaaactgaggcgcatcgtcaatgataaatcccttacccagagtcaccttggctggaagtgacagggatgcagtttgaacctccatcactatcactttgaatccagcagctctatagtcttcaatacacatgatatatggtggtggttgttcatttgctaagtcttgtctgactctttgcaaccctgtggactgcagcacatcaggcttccctgtccttcactgtctcccagagtttgcacaaactcagggccattgagtcagtgacgccatccaaccatctcatcctctatcctgcctcccttctcctcctgccctcaatcttccccaggattagggccttttacaatgagttagctcttcacatcgggtggcccaagtattggaggttagaggtattgcatgttattgaagaaagacaccaaggacatagaaataccatacaagttttcaacttatttaaatgactagtgattttgaagaagcagaaatatctcaaaaatgtgtcaacatcctgttgactatgactacagtaccaatttttgttcaattctgtacagcagataacataatcctttcattttctggttgagagcaaaattaatcctgttaaaaatagaaatctgagttgtaaatacatattaaagttaagtcaaacatcagaaacttatttttaggtaaaaatgaaatggattaaatgaagattcttagccaatgattgtcatcaaaactgacctaatagggagaggaatttgtccacgcttgtccctcctgtacccccgccaaagagacatcaaactcactatttagaggggatcacacactgtaagcctcacattccacattcttggagatctgattcattccctgatttgttaatactttcaggtgcacctgttataagaaagaaaaaagtgcctaatcctatttaaaagctttgcagtctctgctgtcagttttctcagaggaaacctgaggtctcctcaggtaataagcaagtttgtttatcacatggtgcttggggacgtggtcagaatgcagtgtgatatctggctgcttctgcccttttaaattgcatttcctatacttg

SEQ ID NO: 24947 - DNA, 5246 bp, Bovine  19866880520923
  misc_feature (1)..(1): n is a, c, g, or t
natgttatcttgttaatatacatcttttgattgaaaaaaaacaaccaaactctataacttaaactatcaaaatatccaaaaacaacttgaggtttaagatttttgaaatattataagcaaaagaaactttgataattttgtgaagtattactgcaaaatgtaaatcttacggctttatttttcttaaaaaattagtgttgcttttgaatggataatagcaaagaataaaggagcaaaggaagttcaaaatggaaagaaacactgacatgaccaagggaaggtggaatcctttttagaaaaggaatatgacataaacgaaacctgcagagggaagataacaaacatctgctgatccatgaggaagccagcgaccgactcgcagggagctcttgacatggaaaataattacgaagctgcaagggtaaagtgtcgtcagtgcattgtctgcctcatgcctccaaccccacatttgccttgggccagagaattcaactggctctgttccatttgaccagcgacagatttgcaaatgaatttctatctgctagattttatatagagtgtgtacacgtgccagctaatccatgttgatggatatattcactgattcaacacctatttactgagtaagcgacttctagaagttttggacaccatcatgcttaagaggagaaagttccttgccttgaaaataagtcagtcatcacatttagagatgaaggtactgaaggaaaataaagtagggtgaggagagtggtcagtgtcagagggtatactgttttgataaggtagtcatgaaccttctttttgaaggtctcacatttcagcagaaaacttcataagagagccatgctggaggaagcatgtgtgtttctcacacagagggggccagcagggaaagcaaaggctctctgcaggagtcacttcagagtatttacagcagtgattttatcattcatttaatccacattgtctttaaaaagaaatgccagttagtatgtgaactctttacaagttcataccacaaatgatcataaaaactgaacagatattttttgactcaaaatttcacagtcacagtagccgtattttaagccaaagaatttgaaatattcaacaggagatcacacataagaagctcatgagaactgcacaacaaagattcagctcaaatacatacatatagatatgcatttgaattgtcattccttagaatatgattaattctcaaacctttatttattccttgcagatttatctgcaagactcttaaaagtgctgattcctgagcacaagatcctctgaagtctaactcggtccatctgagcagagagttggtgctgtttagttgctaagccgtgtccaattcttttgtgaccccatggactgtagcccaccatgttcctctgctcatgggatttcccgggcgagactactaggtggacgtttccttttctaggggatcttcccaattgaggaatcaattcgtgtctcccacactggcaggtagactctatacaactaagccatctggtaagtccaagcagggagtagcaatgtgtatttaatgggcaccaccatgcttctcggatggcttagctggtaaagaatccacccgcagtgcgggagacctgggttcgatccctgggttgggaagatcccctggagaagggaaagactacccactccagtattctggcctggagaattccatggactgtacaatccatgggattacaaagagttagatacgactgagtgactttcacttttcgcttttcaccatgcctcacctttctcctgcagaaatcaccctgacggcctccctgtcccagacaaagcggagagggaaggcataccccaaagacagaaatctgcatttaatatgttattaccctccatttacacttcttgctttcttcaaatagtatcattcactaccactaatgccaattactttattgactagaatgaaacagattcattctcttttcatgggggtccattcatattctcttaatttctagactatacaatttctggttctctaattcaacaagaattcacttgctttctcacagaaacaaatggttgcatgttttcatgtggaagtatcaatactaggttctgaaggacacactgccattgacttgtttccttcaaatttggaagccagtttcacatgctcatttgcaaagaaatggaaggagaaaaagaaggacctaaatgacatatcgatcagtacagcaagctgactcgaggagtatgtggccagacggcggagttgaacacttttcatttctgagagagaaaaagagttgtctgcagaagaagacagcttatcatgctacatagaagactcgaaagtaaaatctaagaattcagtttttttttttttgtaaaccatgcaatcagttcatacacgctatttatgagtaaaaccacatcttcaaagggcaaagtaggacttttatagagacatgtagagtccggaagaaaaggaggtttccattcacaaatccccactatacctctttccttgctgggggctctgacttccaggtatgttcctacagatacgccggcatcactaagcgacgtggccaagcagcacagcctgtgcgggcaggacgcattctctgcgagggtttctgactagttcaaagtggactagttctagtggactttgaatgtcttaaaaggtctggcttgttatttgttatcattaaactcccgggagaaaaaaatgccctcagcaaatgagcactatcagaaatacataaatttacataattttggtgaatgttatactttgggcacgtgatgagaagagccgactcatttttcaataaaagaccctaatgctgggaaagactgagggcaggtagagaacggggtgagacaggataagatggttgggtggcatcactgactcaatggacatgagtttgagcaaactctgggagttggtaaaggacagggaagcctggtgtgctgtagtccatgggatggaaaagagtcagatatcagtgtctgaccaacaataaagttgtaaattggcacaggagtaggaagtagagcttgaattttgatttgtgtcaaaagcaaaaatcaagaataaaacaagtattatatagaatatttctcacatttaaggtataatatttgcataatttgcaatttaattccagtatttaaaagatctccaaataatttctgtacaacctgagtcaagtccatatgctaaatttcatttgaaaatgaccatcatttattgaattagtttgataccttatattggtataaatgttaaaatacatggacatatttcctacatataggccatgaaccatatttattggaagggaaattattaattcatttgtattcaatgatgaaactgcattgaagattaataattttagtgtaatgggccacctgatgatataaaatgattctatgataagtctgttctggaaagcaaagaatgcccccccatttcatctctttcataaaaccctaaattttcctatattttgctgatataatacagccttgctgctatcgtgaagactgctcacacggtctctgaaaacaaatctaacatagaagcatttgctcctgtgattttcttgacaaagtttccaatacaacttattgtaattacaacacttcacctcaccttttactaaatggatagagtcatctactgggactcaaacactttccagtaagaataattaaggccaaaatccctggccagtgtatccctgtgattttgttcccttgtctttcctccctaaccataagcatttctttccaaagctgttaaaaaaacgggcttcttttgtgcaattccttttgcacaggcaggcaggtgcacagtcatgagacagtggtaatgaaatgtgagtagtgtggaatctgatatctctgcaccctgaggatggaccattgccatttttattttcagtccagggtcgtgtggctccacgtccacactgaaggatggtattctgtgtcacacacaactccaagtaaagagcccgaggaaacatacctaagatggcactgtggtactagtgaaacacacaagatacacagcgtcgatctggcatccatctcttcacttttttatctcagggaaggtaggcagtagctctgagtgcaccagcagtagtgtttcagtatttctcaaaaagtcccctgattaatatttaggttctgactcaacaggtttggggaagagcctgaggtccttcatttttaacaagttcttgggcaattttggtgttgctggtccacagacctccctgtgagaagccaggatgtactgatttagctatgattgtgtatctcggttgctagacgttttcaaccctggcatacttctagacccctggacacactttgatacccacacactcttctttatcaacgagatggataaaactcaatgagtgtcattttatttctctacagctacttctcaaaaccctaccagtgcagtatttccactgtatgtctggagtctggttcagacccagttgccagggataattatgaatctttccaagaaaaagaatccaggacaaggtgctcctgacccatcgtttttgttatatcaagatataaaaacagactctggctgcaagggaggggaagtcttcattctgctttacaaagactgactgttgtggggggaggaaaactcagttttcacttttgtgcatgtggtttttgcccaaagagcacagacgacattctcaatggatggacaaggagaagggttgcatcagtgaaagtaggtatgcaattttcttcataaatcgctttaaacattttgaaaaatatctgtactaagaggttttgcatctcagcatcttaaacagaagacccttcctcagattgtattaggtatatcatagacagaggcacaaattccttttcaaaattacaagtgtgcatgctcagtcatgcccggctctttgtgaccgcatggatcgcagtccaccaggatcctcagtccatggaatttttcaggcaagaatactggaccagtttgccatttcctaattcttttaaaaattagatatttgtgaaaacacaaacttcaaatattctcctgtatcatttttatactgctttccatgctcctcccaccaaatggccttaatggtaattccagaagaagtaggcaccgttgactctcaatataatttggggtggggggaacaggcaaataa

SEQ ID NO: 24948 - DNA, 1265 bp, Bovine  19866880521453
  misc_feature (1)..(1): n is a, c, g, or t
ngtttccccgtggctagtagtaagaatctacctgccagtgcaggacacgtgggtttcatccctggtcaggaacatcttctggaggaggaaatggcaacccactccagtattcttgcctggagaattctatgaacagagaagcctggtgggctacagtccatggggtcgcaaagagttggacacaactgagtgactgagcacgagcataataatccaattctctgacattagaaggactggtgtatttattgtcttaaactcttgtttagacacaaacacactttatctaattacatcattttttaaagctttaatatgtctgtaaccacatggcatacctaattaatatgctatgaggtaattctgaatgctgtttccctcatttaggctagtatgctctgactaaattgacatgcttcatgggtcccacttaggcagaatagagttctgatttagtaactggggaactggaatcttgtgaattcaccagtactttctagcgggtagtatagctgttttcaccaagtagcagaaaggctattctaggaagagatatcactgcgtcttaccaaataaatgaaacgatgggtcaagagtctctcccacaaataatgaaagacaatgcaacctgattttcatccaagagaggttgtgtctgccttctcattcagggttccgatttatgtctgaccaattgcagaagtatattgcacatttcattgcttgaaaaagaaaatgatgactatcaagtcaagaatttgtgcctgtctacgggtagttataaacttggcagttgtacaatgagtctgtcccccaaaaccattcatcacctgtctcatcattaagatatcttagtttccataatcactaaattacataatcacttctcaaggcataattattaaatggagttaagcatgtcatagacaaaatggtgggatcagcagctccaagaatttcagtgccttcaaggtgaggctgatgtctaggtcacacaggcagcagcatgtttctataaagaatgagcaaattgagtggagagggtgatacctacatattatagattgcatgggtttttgtaactccaaatcgatatattttggttattttacacatcccttcctcctttcacaaggagttaaaagtcactaaactaagtcattctacaaagtccctggaaaagtccagtagctcttaccaggaggaaaatttagtgtaaactcatcttcagaagttaaaggtagtaataaaatataaaacctaca

SEQ ID NO: 24949 - DNA, 1021 bp, Bovine  19866880527050
  misc_feature (1)..(1): n is a, c, g, or t
ncaagtgaaatctaacaaggaatacatccgtatttgcatccagaaattcaaacaagaacttgcaggaatgctgagttgatgactgtaccacagttgagataatctgttatatgtcaaagcaagatgaaccatgaaccatcaatctcttccctagtcatcatccccccaatctccccccaacatggggcagtagcttaatggacgtgcattatcaatgcaggcttcttttccatcataaagaacagtgtaccaggagcatctggtacactgaatttgtcacactgcagacaagctaatctcattatgggagcccacaggggagaagagaaaagattcacatttagtccatatgaactaccaggagacccatcaaggcagttgggctagctcatgatacagcagcttctagcaaattaccagcccataacaacttagtcataatgagctgcaagaccctgcaccataagctccaagccattaaagggaattcaagtacatgaattcgtgtacacagtagaaccttaacatctgtctgtgctaagccaatattttgcttatatctttttaggaacagcaaaattacccttgtgtcccctgaaactagggactggaattttcatcaactgcagttttcacctgcgagacagggcagagccgatccacttcagcctcccccggccaccgagccgggcagcaagccgctcattctggcggctgttttgtacatattaggctgattttctcccaaaccatttcctcttgctgttcaagtgggaaaaacaatagtctagtcataaattaaacaggcaacaagacatgcggatccacgaagagcctaaacatgataattaagcaaaataacttaaatcatatcctactaaactcagcatggagaacccctccccctgcattttaattaatttaggccattgtgtctgtttttcctgttaaagcaatgtactcctcttcttcccacggtggggtcaatatttagggattcaggaaataaaacagcagtaat

SEQ ID NO: 24950 - DNA, 1474 bp, Bovine  19866880634993
  misc_feature (1)..(1): n is a, c, g, or t
nacctcattccagtccaccctgaactcctttcaggggtgttgaaggtcagcagtcacagcatcttgtgatttaatccttgtagaggcagatggcaagtgccagtttttagttggcaacaagacctgcagacctttccacactacccagtcccagcagaagggagcaggctctgcgatgacctgccagcctccctgggcttggatgtggtctttgtagtgaggcagagatagtagagcagtggcccacatgcatcaggatgggattgggacaggaagcagcatggtggccccaaagcagcaaagtgacccaaaaaagggtcagttcctgaatcagcagtggtccccactcatcagggtccccagaggggaccctctccccagatgcatccctcctctctccctgcacggggaggccagatcctgtgcctgtagcagagaccaggccagtgagtgaagagtgggatggtggagcaaataccctctgggaccatccacccagtgtctgaggccttctttcgcacagtgaaaatttgaagaggcactcttttaactagggtgtctgtttaaataaaacataccttttgtctgggataaggacttgtccaaatcagagcttatataataaggagagcagccagacaaagactgtgtgatactcaaggatttgtgtgtggtgaagtctattaaactgaaactaaataacacagatttttatttcaaactcaagcattcagtgactgtcaacttaggagtcgtttgattaacacatacttgactctgacaaccccccataacatctttctaaactagcaaaaatggccaacatctgctgagatgatagtcttgtgaatttcttttcagataaatgtgatcctgagtggagaaaacaagctttctatggtgaatgtgtcagcttgtaataaagaatgaattatcataggtacatagcaaagggaaaatctgctaaatgtcctgataagattgacaaatattgcaatgtaaaaaggaagaagaatgtgatgaaaatatttgtctggatggcaaaagcattattttaaaattttaattttctgcagtaatagctattacttcgtaaagttatagagggattacatatctccttactttcataaaattttactactattcttcaataaaatataaataacattttcaattaaaatcatcatttgagtccacgaaaggtggaatattaacagtttattacttattaaatgctgttacttcaaatgataaaaatgactacttctcattagaacaagtcagatgtgatcctctataacctcttagtttaaaattttacctcttttaagtctaaaaagtcaggggtacattattacccagttggagatttttaataagtctaatgataaatattatcttaaaatcaatgaaagcttccagattcttagctatatctgttcaccaaaatggtagaaatacaaattctaat

SEQ ID NO: 24951 - DNA, 1231 bp, Bovine  19866880644099
  misc_feature (1)..(1): n is a, c, g, or t
ntgacactgtgtaaagtaagtgtagaaattcagtatattggacagctaaacttgttgcattgcatagccttttttcagagataatttggtctcttgtagagataatgtagtcctcactgatgagcgtatattgagactagaatataataattacatgttttgatcattctaaatgctgcaggcgtaaatggggtgcaggcatcccatcattatagaacaccttttaccatacaagtgtttccagattgcttttattcagataaacttgttgaaagaatcatcgaccaaatttacaatgacttcatagattttacctgtgtcgctgctcgagttaaaatatttgtgctactcaagagtttaaagaaacaaattgatttcagaatgctggcaatttaacagatgacaattgatgattgctgtacattgctgtgtatttgtaagagacatgtgcattgtagaattgtgagtacaggaaaatggaatgccttgtaaagtctttattttctttttctttaaattattttcaaatggagacgacaaacagagattgactttcaacttatgttaatcagaaattagcacttctacatgcttaataatatttgaaatttgaatgactttgtaccccaagtactaagtataaataatgaccatgttgacataaagaaatgatttatttttatcagaaatatattgtcacatgttttattattttaattgcctagcatgaataaatttaaaagatgctaacaaagacccccatatactctgggggtacctcttaataaatatttcatttcagttaaagttaaaaatgtatattatcatattaaaggtaagaaatctgtgtatttttaaggaatggaagtaaaccttagtggtatagattgaggataatgttttgagaaaactttgacctttgaaagtgttttctatatatattggctgttattaataatactgtctaaatataaaggtaaatggcgattaagcttcactttaggaatatagttctaggcattcactttgggtaacaccaatgtgatgacgatccaagcaacattaaactataaagcatagtatgtgcattttatccaatagtttttttaaaaataaaaagttaactgacatgcagagattctattaccctagattgccaagtataaatattttttgtgggggaggacatttaaactatttttaagtaacttctttttaaaatccaggtatt

SEQ ID NO: 24952 - DNA, 844 bp, Bovine  19866880841389
  misc_feature (1)..(1): n is a, c, g, or t
nttatggcattaagcttccatatcttgatcctagaccataaaaaattttaacttgaggcttaggatatttatcctgattaaaattctgtctttcaagctttaacccatgattccagtgtcttgaaaattcactgaattctttttttccaagtaataactcttcctagtcaaatcacaaagcaaagtcagctgcatactgtaagataactccttgtctttgaaatagtagatacttttccatgttgtcattaagtatcaacctctatctactgttacctcagtaaatttttaaaatgttttctgaaagattttagctacgggttctctacaaatatttttgataccttgatacagaccaaacattatattatgagtcgagttctagtagaggaggctggtattaaagcaaattattaaaagcactgtaatgcacacctaatgtaatggcataatagagaacatctgttctagggaactactgaacagctgctggtgactctacctggatgaactagggtctgccttgcagagctggcagcatgtgggtaggtcttgaagaatgatcagaaataataggagttaaaggacattccaggatgctatgaacagacttttaagatgcttgactacagtccacaaacattgtctttgcagaattccctagttcttccaggactgatgcatctatcaaaaagacaaaagatctgtattataagactcgcttttcatgatccaattttggagcctcgtgatgaccagtaatttttcaaatgctttctgaacacctctgcaaattaactcaaattgtattcaccatctctaccggcaactaaatatagataag

SEQ ID NO: 24953 - DNA, 813 bp, Bovine  19866880914397
  misc_feature (1)..(1): n is a, c, g, or t
ntgttgaatgtatccagaaaaaaagagcacagagaataaaaacgacagtgtttctacgatcacctgtagttctctgcattgagctgcaggaaaaaagtaaggagttttcctacctagagagcagacattcaacttccaaagatttcaatagtcatgaaaaagttacctgtgatgaattgccctggaatttttactactttgtagtggcttgaaatgattatgttttgtctaagtgtagttactgagaaaatgaaagaacttccagacctgccattgagattgcgtagatcccaacaatggggaaaaagtaaccagtgatgaaagtctcttgagtgtgttgcctgtttattaggagggatggagtggggagattgggctcaacgggttttggggatgaaacctgcttttccttgccagtttggaggaggtgacatttctgtggtccttacgcccatcaaagaccaggctgaactggggattcgctgctggttaacaccatatgttcagcttaaacaagacactgtgattgaaagactaatattttgtctcctaaaacacctgacaacaaccccagatttattgttgattttttttaacctcatatgaaagtatttggtaattgtgtcactctagtaacagatgctgctctcatatgttccccttcttgacataaatggatgcctgtgaagataaataggataaagaaaaggaacttgttgcatacaggaggcaggtgtccaagggctttttaaattcacacagtaatccccggtgtggaccggtcggcataacaggacgcaggcaggaattctg

SEQ ID NO: 24954 - DNA, 1875 bp, Bovine  19866880947699
  misc_feature (1)..(1): n is a, c, g, or t
ncttcccaggtgatgctaatggtaaagaatcggactgccaatgtagaagatgcaagagacccaggatcgatccctgggtcgggaagatccccaggaggagggcttggcaactcactccagtgttctggcctggagaatcccatggacagaggagccggggcaaggtacaggctacacagggtcacaaaaagtggcaagaagtaactgagcacacgtgcatacatatatagctctatagatatataaaatgcataactaaatcactttgctgtacacataaagcattataaatcaactacgcttcaataaaaaaaattacagttaaaaacaaaaataaaccagtgtttgtgcttagtcactcagtcatatccgactctttgcaaccccacggactgtagcccaccaggctcctctgtccatggggattctcccaggcaagaatgctgaagtgggttgcacagtcaaagaaaataaggtaaaagtccagggtttctttttcacattcattaggatattacggagggtcttaggttaattttacattcagaggaattatttctgctacattgtgacttttaagacagtggtttccaaacatttgtctgaaaccaattttgattttttttgtaaaggtacctttatgcaactgaaaagactgtccaatattccaaggttatttcctatctacctttcctgtgtgttaagaagtggctagaggagactatttgcaaaggaaagccccaccaccctgggctggcacccacctgcttttggaatgcaattagtgtttgcattccaaaaacactggaacctctgtgctgtgtttcacagtcttccggtccccgaccccctactcccgccctgcagggctgtgttcactatagcatctgtcagtatagagcacctgagggcggagagaagtcctcacttcaggggtctctatgcaaacataatgtagatttttgcccagttagcagtgttcttgcctggagaatcccagggacagaggagcctggtaggaggccgtctatggggtcgcacagagtcggacacgactgaagcgacttagcagcagcagcagcaaaacacaaccagagttttcttggtgtgttggcttcagttttaaagagccttctaaaactggtggcccatggtacaaatttttttaaaaattcaaaaaatttaaaaaaaacaggcattaaaaaagcaaagcacataatgaaatgcccctagaaaaccaaaaaggtaaaacaacataaaaagtgaggatactgtctcatctcagtctaagagatccttccagtatataaaacattctgtgttgctagaatgctgcacactggatttgccaacaaatgtcttctttttctatcttccttctactcgtctttctactcttaacagaattaagtggatgctagaacacactgggttcgggaaaccagttaaggtagccgaacatgattcttcagtagatgaaaaatgttatgctaccagatttgtaatgtatcatgaacaatgaaaatatcacttcaaagtacacttttcttactataaaatgctaattttccctctatagatgtcagtgcctccaaattaatgagcaccattagctgcaaaacatctcaagaagcaacggaaattaatttccattagtcacaaacggacagccaactaccacccgccttagaagacaatgagttttgaatgctccatttttgtcctcaattgcatgttcaaagtcagatggcgaaaacaagtgacttaagatatccagaaaaatattaacactggtttgcatgtgaaatgaccaaaggggatttcagattttctgttgcaatgggataaacaggggaggttatgaggatggtgtga

SEQ ID NO: 24955 - DNA, 738 bp, Bovine  19866880986176
  misc_feature (1)..(1): n is a, c, g, or t
nggatatcttttctgaacagcatttctgcccatcatgatttatgaggatcgcttctgaaacatggctggacttgtataaccaggggattaattagctgaagaatcgcagtgacaataacacagataaaggacctggggctctgggtggaagcctggagagcagacagaatggggtggaaaggaaaatgggaggaacaggcgatctgtgcctcacccccaaccccagcaaggagaggtcagcatgtactgaccaggttgaagcaggccggagcaggagcggggtgagtgaacctgaatgagaagggtggtctggctgtggatatgtgaagaggagacattccagccagcggcaggggaggaagagaggggaggagagagacaggagattccggatccttccatacattggacctttcgtactgcggtgtgcagactgatccatagtcctcgggatatttcacttggtgatgccatggcgttgtccctgttctgtattctatactgtgggttcagttgctcagtcgctaagtctgactctcgtgcaaccccatagactgcagcccgccaggctttctctgttcgtgggattctccaggtgagaatatggagtgggttgccatttcctcctgcagggcatcttcccaacccagggactgaactcatgtctcctgcattgcaggcagattctttcccactgagcccaagggaatccctctgcattctgtattcccccaaatt

SEQ ID NO: 24956 - DNA, 875 bp, Bovine  19866880999566
  misc_feature (1)..(1): n is a, c, g, or t
ntatcaggtataaagacccccacacaaatgtctttctaactcttagactgagaaagctggcaccagagaaatgaagcgtgatggactgattaaccctgaaccctctatcctatgttggaggcaaaaataaagttaaaacctttaaatacctgtctaacatgctcaacctattctacaaggaggtcttgataattcagcctttttggcgcctgtggatgacagtctgaacacccacaggcgctgtttgcttggagggtttctgcccaccccagctcctaacgccttggcctcccctcatttgcagtggtctgtatatatccgagctgctgtccggaaagagaaaggcctgcccatcctcgtggagctgctgcggatcgacaatgaccgtgtggtgtgcgcagtggccaccgcgctccggaacatggccttggacgtcaggaataaggagctcattggtaggtcccctccgattcaccgcgtctccactttttttcttttaaatcgaagtataatgcatttcctgtgtttgaacccacatgcagaacatatatgcgcatgcagaaacagagcatgtgtcagagaccttgtttttccagctctccttctagcggaaatcaatgcgctaatttatcttttagaatttagaggaaaacgcgaagcttgttgacattcctaatccttgcaaattaaaaactaccgcagtgctgagcactggataccgttgtcctgatcctctaaatccttgccaggctgtttgtatgctttccatgttgtgaactggaattctaatggggtgcagggctcttctcctctctgtgttaaaatttatttttacattagaccagatggctctccagtgcatttttcaagaatca

SEQ ID NO: 24957 - DNA, 1781 bp, Bovine  19866881074293
  misc_feature (1)..(1): n is a, c, g, or t
naagagtatttgagaccctgcgaactggatgtgcaagcgccctaaggcacagaccaggtggtgcatgtgaattagagtatattgaaggcagagcccataggaggtcctggggaattgactttagggttttcaaaacagggaagagataaaagacgattgccgtggttttgtccctggttttgtcccgagtgaccagaagaacagggttttcgtttcctaaggtgggggattccaggagatagataggttgggaggcagcaggaaggggtaagtggaaacagtttggggcctatctattttgagtactatggggttggccaaaacgttcatttgatggtaccaaaaaacccaaacgagccttttggccaacctaatattttctattgaagtggagactggaagctgtcactcagtgcataggtgggagaaaactgtgagagtcatcggcatgtgaatcccatgcgattagaatctccagagaccagaggagatgagcaggatcccccaaagcttgtaaagcctttgcagaaaacagggtctagcagagaaaatcaagcaaaccagtagacccaggacaatgctgtgttttgacatcgagaataaaatagccaaagaaagaggaagtaatcccaattgtcccaagcggctggcaggactagtataaggaaagctgagaattaaccattggatttcacagcatgagctttcggggctggggtgctaaatcctgatttatcagattctccagaatatgggtgaagaaatgcaggaatgaaatgtagataaaattcagagagaaggttgagagtatgagctaccttggtttgaaccttagctcatctgggtcctggctgatgtgaccttggagtagtcagtaaacctctttgtgacttggtttggtcacatgttaaatgaagatgttaaatgttaatatcatgttaaatgactttatagttaataattacaggattcttatgtggagtcattagggtaatatgtgcaaactactgaaaacagtgttttcatgacataggtgtttgctatcattattaatatacttttggtattgttttcgttttaagcatttcttggaatttctttttctaagaagatcagggaaaggaaaatagcagtgtttagatgcccgtgtggggtcaagtggggcttccctggcggcttagactgtaaagaatccgcctgcaatgcaggagacctgggttccatccctgggtcgggaagagcccctggagaagggaatggcagcccacaccagtattcttgcctggaaaatcccatggacagagaagcctggcaggctacagtccatggagtcgcaaagagtcagaaatgactgaagcaacttggcatgcacgtggggtccagtgcgtatgtatcgttgcttgctttgttttatttcagataagagattgtatagcatgttttaatgctggtgggaatgccagagaagaaggatgaaaccttagtggtgcaggagaaagagggagaattttaggtaaggatcttacatatggaagaaggggtggattgagtggtaccaaagcgaacagggactcctcattaatttgaagaaaaggatcagcggagggtggggggggcggggcacagacacagctgtcttggaagatctggtggagatctgcgactccttttgcttttagctgagataaacgccagctcctcagttgagtttgaggggagggggcaagagcctcaggagctgggagcttgaggggcaggtgtgcgcttacccatcctgtggt

SEQ ID NO: 24958 - DNA, 1841 bp, Bovine  19866881099380
  misc_feature (1)..(1): n is a, c, g, or t
naaatattatattcagcaggtcattttgaaaaatgttcccaaccagaggtagggccttaaataaagactactggggttgtggaacagttagaagaaactgaccaagtgttagatgaggctgagtaaagaggaagttcccagagaaaatcactagcttcaatcagagactatagaaaattacaatcataaaaggtcagatgtggaagaggcagcccggaagaagagatcacacagaagaggaagtgggtctaaatgccatgttattaaaaatgttgattctgtcacatcttgtcatatcccttattgttcaggacaaagtctagtggctggctttagaggaaattaataccctatcataatctattcaagctattgttcttgacaagcaatgaggggaaaagatgttttgtcttgacagctctgtgacttatgtgtgtgttggtttaggacttctgactccactgaagctccagagtcaaattattctctagagaatcattaagaattacagaaagcatccgccatctctccttcctcttttataatgggatggacaaataacaagcaattcagagatgtttcctgtttataacaatgctttcctatatcttgagaacacatgaaatattttaattttgctacattcacatttacttcattcataaaaaagacaatacaaagttccattttctttacttggcatgagtttgatgttttatattattatgcaggcattattttaaagctgatgcaggcttatttacaataaatatgggtttatttaggcaataaatacagaagagtaaaatccacattcctttaatctgttcccattctttttcattaagtaagtaacattacatatttaatacatgttattattaacattatgataaaaaatatatatgtagttttgcattattttaaactcttttgtgatgccatgaactgtagcctgccaggctcatctgtccattgatttttcccaggcaagaatcctggagtggggttgctgaactttcctccaaggaattttctggatccagggaatcttatggactcaggtatcaaacccacatatcctgcattggcaggcagattctttactactgtgccacctgagaagccccaaggatatatgggagtttttgcaacaaagaccaggcgatcagactgtcaggaccaggtagttggaacatcaaaagattactgttaattaaagaaaaccagatatcttaagttaaggtagttagcacttctctgtattcattccttttgacaggcacctcagctacccgggcccagcagcctgtgttttctcatcctgagtttcctcagggtgtactggggaggctccagtggctggtatctgcaacatcctttgtttcctgatatggcaggcaacattcttaggtcacacctgtattgcctgagatatttaaacacaggccacatttatcataagctataaagggcttccctggtggctcagtggtagagtccacctggcaatgcaggagaggcaagttcagtcctttggttgggaagatcccctggagaaggaaatggctagccactccagtattcttgcctggagaatcccatggacagaggagcctggagtgttacagttggcccatgggatcacaagagtcagacccaacttagagactaaacaaccacaacataaatcttggtatgctttttatggatatctataatttgctttaaaacattgagaatggatacctgtgttagtttaagccatagtcaacaagctttttctgtaaaggtgaaccaagcaggaccctatgggcccttcccggccagatccctgcccc

SEQ ID NO: 24959 - DNA, 3277 bp, Bovine  19866881152222
  misc_feature (1)..(1): n is a, c, g, or t
ngggatgggggcggcagggacaactctcgaagccttgctgatgccaaatgcaaagatgctactgtgacaagtctgattgccaagcagatatccagtcagtgctttaagtaacatatttaggaaagaagctagcaactcagcaactacttgtgacgcattctttctaattaccatcgaacatttggctctctgtagacactttgctgccaccaaaatactgctatttcatgcatgagagcttgcttagcaaaaatattttcaaaaagaacaaggacagctgtcaaaaatgatcacaacctttgcaatgtgaggaatcctgaaataagctgttggggatcttcgtgtgtgaaatggaagctgggtatagcacttggatagctacctcaagtctcgcaacacatctctcttgcacacatccataacattttacaacattagcaagacacacttgcgatctctacaatcagggcagttgagtaggtatttttactttcctttttaaaagagaaaagttcttcaaggcttgaacaggtttaaagatgaatctggtatgaccccatgtggcaaactagattctagactagtgttctttccactacagaatgctgtccattcttcatttcttgatgtttcagtgctaggcaagttttattcacacatttatagggtatgtgtaatatcagaaaatgtatatacatatatgagtgagtctgtccctgcaattctctaggcaagaatactggagtgggttgccattcccttctccaggggatcttcctaacccagggattaaactggggtctcctgaattggcaggcagattctttactgtctgagctaccagggaagcccatatatatatatatattatatagtatgcctatatgtgtgctttctgtgaattgacttttctgatacctgtatctacatctatatagctatgcatgcatgcatgctaagtcacttcagtcgtgtccaagtctttgtgatcctacggactgtagcccatcaggctcttctatccagaggattctccaggcaagaatactggagtgggttgccatgccctcctccaagggatcttcctgagccagggatctaaccagcatctcttatgtttcctgcattggcaggagggttctttaccaccctggagccacctgggaagccctatatagctacatctatatttatatctagagtttgtctgttttctgctggctttttttaatgaaagaaaaaaggccaatataaactacagtaatataaaaagaaatataggttttgatttatacagttattcttacaatgattgggtttgagttacagacctcaatagttttgaaccacttgcttgttaggtgattaaatcctggcttgccatttggaagacaaagggatttggttaaggtattggacaacatcagtcattcaatccaaggtctgcagagtctggaggctcaagtcttggggtgtctggggtacagagggaggatgtgagatccttgggttcacagccatcaagcaacttgaaagtccatctctctgggctgagttacagactgggcttctgagggaagatttcactagaaactcaagattaaaacatatcagaaaatctctgatctttaaggtcactttcttatcatttaactccttaaaaagatacattgattttaatgtttactgtgatcttatataatatggcatttccatgctctacacatctgtgcaaaatacagaaaagtacaatatcaccgctttaatggagctgacaatctaatggtctagaaatcattgttatctatctaaaatgtgtgtgcatatcatatatatatatatacacacacacacatatatgtatatatatttaagaccctgacatgagcagttgccttacttagcttactttagtttaactacaagtactcaacagtaatgaaatttcatttaacacaatactaatcttcagactttatctgaatcaatgaggttttccatattgccttacttcagaagagcaactactatcttaagaaaaaattctgaatttggctttgctaatatcctctataagtcttcattataaaaaaagtgttaacaatctgataagtattaacctaggatttatctttagataaatttgtggttgagaatttagatttacagatggatgaattctttcttaaaatcaattttaaaatacatagcattaaacaagtgccaaatatcacagtggtttaaaactttttataaaaaatactgataggatttgtgcttaaagaaaaatatttaaagaattgtttattcaatggccacccttcaggaatcaatgatcaatttgtggtttttaggaatatattagttttcataatatcctgacaagattctcaatcttccagttgataactaatagtcattgttaatgttaggtaactccacgaatattttctgatcttcaagaagatgtgggtttgttgctatgtcatcagacatgatggatcagttggctaaaaagaaggataagtctttatttgaagtaaacattttttgaagctccattgtatcaacagctgtcacttattcatttcatttgcaaaggaagggagctttctgctctataatgcatattacaacatggctcaactctgtgggagtagccttttgaaaagaaatatggctgtgaaataaatggaaataattttcaaagagatgctgccaccttttggttgctctcccacgaagcatatactgtctcctgaaagcctgcaaaggtaggagaagcagggaatgaaatgccggaatatttcagcatcataagcaattttgttatgttgggatttcttacttagatggctcccactcttgttgataggtttcagaaagactcattgatacgaagtaatttttccaaatgttaatacagcagtagaaaagatccgttcaagaaatggagaaatgttctgagttttattgaggtcagatatattagtactatgcttatcataccaattggggcaataaaaagtaatttttttctactgaacaaaagactaggaaagatcacatacattttctgtactcagcattccatttagacttcaagtctcatttcatcattgattatttctcatatttgtgaatatccttttactaatcccactgtctaagtagagtaggggccacatttcttttttcctctgagttctttacaatttcttttgttcctaagaagttaatttgctttaaacgtgaagcaactaatacttctaaagaa

SEQ ID NO: 24960 - DNA, 863 bp, Bovine  19866881369682
  misc_feature (1)..(1): n is a, c, g, or t
ntagagagctgtcagtgcatgcatgagagggaagtacccaaggctgaagaaaaaaattcctgaaattattagacaaaaatgaaacttggcacttacacaggaatggatatagtgtgcgttcccaagagccatacaggaaaaccctgtgattcgtggatccttgagcatagcactctcagagtcttgcctcggtaattaggtataattagccctggactaaatatgctctagtcttccctatcagatcttaaaagtgagatgcagaggatcaatagtttgcaagtaaattaactgcatcctagactaaagtttaaaaatacctatagaaatacaaaaatacccagcatccaatgcattaaaattgagaatgtctgacatccagttgaaaataaacaagaaaaagtgattcatgatgaggagaaaaatcaatcattcaaaagcagttcaaaaccaaccaagatgttaaaaatatcagacaagcagttattataattctactccatgtgttcaaaaaaaaggcagtgtatacccgtggaaattttaaaataatttttaaaaaaagagcaggttagacattgctgaagaaaagattaatgaatttaaatatagctctggaaactatacaaaatgaaatggtgagagaaaaaaacaaagctaccgatcatccatgagcctcaagtggtctactgtacatgcagttaaagttcccctaggagaggtgagagaaaggagaaagaaaacaggaaaaaaaattgaagaaatgatggttgaaaaatcttccaaatggttccatatttttcaagtttaatgaaaaccacaaactcaccgatccaagcctaagaaacataagaaactataccaag

SEQ ID NO: 24961 - DNA, 1961 bp, Bovine  19866881418652
  misc_feature (1)..(1): n is a, c, g, or t
nttaatttcaagaaattgagagtcagtaaaacatggcaggggcatcacagaatttatttcagttcagtcacttagtcatgtctgattgtttctgactccatgggaatgcagcatgccaggcctccctgtccagcaccaactcccagagttcactcaaactcaagtccatggagtcagtgatgccatccaattatctcatcctctgttgtccccttctcctcctgccttcaatcttccccagcatctgggtcttttccaatgagtcaggttttcttatggtggccaaagtattggagtttcagcttcagcatcattctttccaatgaatattcaggactgatttccttcaggatggactggttggatctccttgctgtccaagggacgctcaagagtcttcaacaccacagttcaaaagcatcaattctttggtgctcacctttctttatagtccaactctcacacccatacatgactattggaaaacccataccttcgactatatggacctttgtcggcaaagtaatggtctctgttttttaatatgttctagattgatcataacttttcttccaagaagcaagcgttttttaatttcatagctgtagtcaccatctgcagtgattttggggtcccccaaaataaaatctcttgctgtttccattgtttccccatctatttgccatggagtgatgggactgaatgccatgatcttagttttctgaatattgagttttaagccaactttttcactctcttctttcactttcatcctgaggctctttatttaaatgcacaaattaaacaactatgaaaataatatcttcagaagagaatttaaatgtagtaaatcttgacagtgatttcattgcatacaacagtgtatcccatgatttttacataatgcactcatgtctgaaccagcccagtcattccaaagacaagtctaatgtatttaaccctttattcatttagtttcagcaataattcaaacctgggtaggattttgtttacaatttaaaaggacaaagtagaaatctattttaaaccactattttatggaagctaaaataataggcaatgggcaaatattcttgggaaaacattcaaacaattgaaagcgaacaggatctgcccaaaataaaaaacaaaactaggcatttacgtgattataaacgatgtttggtttaaaatgggttagcattttgtaattaccatataggatcttctcctttctccttctgttgaaaggtatactgttagtacttttcattgatttgttaggtctatcaacaatatgaatgtaaaataacatgagaggaaaacgaaatgatatttctttaaaatgagttataggatcattttataatttaaagtttggacatcatttaaaagttctaaattctttcccttgactttagttcattcatctgcaaaaatagacaatttatctcagttcaatgaatgctaattctaaaatggacaatttaataaatgaaaagataaggaagcctcactctgggtctaaaaattcatcagtgataacatactttttattctagtttctaagaaattggtgtatcttcaaattgcccttgagaaatttatgcagcttttttatttattcctaaaaagattttgagttgaaagtaacaatgatgtcacacataggctgctattttttaaaactgttagctctattggcatatactacatataagttcagtcttttaaacctacaatttggtgtttttttggtaccttcacataccagtataatgatcaaaattctttgattttacaacattctcaacacccaaaaaggaaatattcattaatagccactctccattttccactctcctgtccttcagaaccactcatctatattctttgagaagatttgtctttactgggcatttctagaaaaggaagcatacatgtcatctttttgtgactgg

SEQ ID NO: 24962 - DNA, 702 bp, Bovine  19866881453892
  misc_feature (1)..(1): n is a, c, g, or t
ntggtggtttattgaataggtctcacaggctgattacattcttttacaagtagctcttttgaatttcataatttctcccagatttctaccagaatatagtcctaaaaatatacagaaacttattaaacctggaattagactgccaacacattttctaatcgaatgtttaatttcataattggaaaatgatacatctgcttggagaaaatcagtggggttggaaaacaaattatgtgtcgacagtgttggtacagaaaaattatacatatttatgaatggccaaatcatcttattactggaatttgaaaatataattaccaatcatttataaggtaatgattccaagtgaatgccttatctcggggcaagtgttttatgtgtgtgtgtgtgaatttacacatatatgctgtataatatgcagtatctctaggcaccatctcatttgatttttttcagctagaattcagattttagggaattcattgctgcagcaaatatatactatgtgaaatgattaataaaatagattgccacttttaagctctggaagaatgttgtactttaatcaaaaattttgtgtattttaatcataatgtataatattttattatacattttaatcataatgtgtaagtattttaataataatgtataatgtacactttaagtacattgtgtgaattgttcaaacagaggctgtat

SEQ ID NO: 24963 - DNA, 1299 bp, Bovine  19866881559049
  misc_feature (1)..(1): n is a, c, g, or t
ncagggtgatttataaatggcaagtataattgtctaattttatgcgctaagaaccaatacaatgctagaccatcatgactgatgtcctctgttgttatctacttataaacccagaagaatttaagaaactacgttgctggatatcattcacatgatttaattgttgctgtggctagaagtaacaattacagttgtttacctaaaacatgttctggatatttagagccagaaaaataagttgatgtgttgccgtacatattacacaaagtgacactttgttatctgtgtcctctgtctggcatgacgtgtccctgtcagatgcctttcagatcctattatctaggttgttttcactttttcctattgatccatttattgattccactattaatgaacctttcccactgtggagaagatggccaaaagtaacaaaatctgtctctagactaagtgattgtcttgtattctgtgcactaaatgcttaagaaatagaattgaggatctgcctccatcattggcctgtcttgagtatgtgacaactggagtgagtcattttttaacctgccctcctctagacaaaaagttattttccatgatgattatgaaatcagatgaataataaagatgaccacagaaaagacaaaattgaaaatttctttgcttgtatttagtatatatattcaggctgataaaaaacaagcaagtgtaacagtaaagggaaataagtcatcttttcatatttcttagttagattagtgcattttgaggaaaaaattataaaggaaacactgctttgtggtgtcccacagtaatatatcatattaaagtttaatcacctatattccaaaaacatttaaaaatagtactacttcttattaaaatagtttaataagttatgatataagaggaataacaattttaacataatttgctaaagttgccattgaaacaagtaaaatattacatatatgaactaaaatttgcacgtgcacacacacacacaaaactataccttacagtttgcagtctattttgtcattttcaatttgaaacacaagtaaaaagccaagggcttacatatactgtaactcaagatcagtttctttgcaattatagttcagttcagttcggtcactccgtcatgtccaactctttgcgacccatggactgcagcatgccaggcttccctgtccttcaccatctcccaaatcttgctcaaactcatggccactgaatcagtgatgccatccaaccatctcatcctctgtcatctccttcacctcccaccttcagtccttc

SEQ ID NO: 24964 - DNA, 1823 bp, Bovine  19866881675838
  misc_feature (1)..(1): n is a, c, g, or t
nattcctgaagcatattttgcttcattgttttttcaaccagtaatgacattgtgaaagagagaagtcgaaaaatatatgaggaaatatgaagctggtaaaaagaaatgtagtagtatttggaaaatgaataataataaatatgctttctataggacttccagcatgaattttcctgtgttgagcctactaataaggaatacaaaagttaaaaccattacagatgcaaaggggcaggcaggtaaatattcctcatccgggaagataaggagccacgcaagtggggaaaacccatctgcttgggtcctaagcatttaccttgtttcctgtcaatcactcatacactggagaaaagatggtacaaaatctaattttgtaactgactggtgtctataattcttactctccttactgctttacaagttaccttctttcagttctgttgaaaaatcagcattccttgaggacaaagatgtttaagcacaatatgtgctttcatattgtaaattaattctacatacttaaaatagagcccaaatggacatgactgtacagatgagagagcaaaccaaagagagaaacacacttgcacagcaggaatccagtcccctcattgatcttaggctcttctcatcttgtccagcctggaacacctgtgtgcccaatttagcacctaatcacacagcaccttgtgtcagtagctgtcacatttcaggttgccaaactattttttctgagctcagttactacatttccagcaaactgattgaaatactgtaaactcagtggaggtattgaaatacagtgagaaatgatagtgcttggtcattttgaggacttcatttggctttcttgttcatcatttttccagaataaaaatgctttggacaagagaattaatatccaaacttgattgtaaagtttgaatattagaagataagaaaaatctcgagttggacccccggtgggatggcctggtgtgtaaacctgtagcagggggacaggcttccccatggtcagccagagaggtagagaaaaccacaaaccaatgagcctcacaccttttaccatatttcttagcagttgaatttaaaataatttataccatgagtattggagtcatgtacagatatgagacttggaccgtaaagaagaggaggcactgaataattaatgatttcaaattgtggatgctggagaagactcttgagaatccctttgactgcaaggagatcaaaccagtcaatcctaaaggaaatctaccctgaatattcattgaaaacactgttgctgaaactgtagtggttaggactttgctgtccactgcaggggatgcagtttctcacccttgtcagggacctaagatcccaagatgccctgtggccaaaaaaacaaaacccataaaacagaaacaatattacaaaaaattcaaaaaagactttaaaaatgatccacattagtaaaaaagagtgtatgtttagagtgagaattgggggttccatactccagtaaaacaataaatgacaaaagattccattctctatctctggaaatttatattaataatgtttctgtggaaaaattacattcaatgcatacgataatttctaactatccaaaacatttataatttttctcaatgtgcatcaagagttaatcatgacatgtattaaggagtttttccaaatgtgaaactgctttttttttttccctaaataaatgtagcttatgtgttttgtccctgagttagtttatcatttcaagtctttgttggcaagagtttgtgggctgtaaatgggatctggcaaggaagctttccttaggg

SEQ ID NO: 24965 - DNA, 1226 bp, Bovine  19866881891002
  misc_feature (1)..(1): n is a, c, g, or t
nacaaaataatgccattcgcagccatatggatgcaactagagactattgtactaagtaaggtaagtcagaaacagaaaggataaatgccatatgatataacttacatgtggaatctaaaatacaacacagatgaacttatccacaaaacagaagcagacagagaacagatttctggttgccaaggggcaggagttgtaggggaggagtggattgagagtttgagattagcagatgcaaactgatatacaagatggataaacaacgatgtccttctgtatagcacaaggaactactagcaatacttatgtgataaaccagaatgttaaaaatttttctatataaatgtgtatacatgcacataaaatactatcttaatctcaagaaaagtacattctaatgaaggagacagcaggtgacagggcaataaataatgtaacttcatattgcactaagggacatctaaaaaataacagtatatcagttagggtgtgtttagctgcaagtaagagaactaaccaacacaacaaattaattcagtatcttacttctcttgaagtgacagtcagggttggttgtgactccatgtatcattagggaccagagatttcagagtctgcttttttgtgctccttgtggtctccatcctgtgaacgcaggacctctgcccccacttcatagttctctgttggctgccagcctctataaggccacttgggtttgtccacttctagatgggagagatcagttacttgatgagtagctgatcctaatctcatgggtgccacagtggccaagaacaaagggagttttggctgggatagtgtagcttcatgtgctcactgacaaagtctaaggatgctgagtttcccattgataccgtatgcatttgaaacagttgatcaattaatttgccttcaaatacagggacaatgaaatgctcgtgagacgaaagcttagctctctcttatgaagaatatgatatgtcattaaccttaacaaaaacaaatagtatttttataaagcattgaaaatattcatttgacctcctagtaagcaagaaaaatgaattgtgatttttaaaaatttggttttttgatgtatagtttatttacagtgttagtttctggtgtacagcaaaatgattcagctttatatatatagatagatagatagatatagatatagtttttcatattcttttttactatgcttattataggatatg

SEQ ID NO: 24966 - DNA, 945 bp, Bovine  19866881932123
  misc_feature (1)..(1): n is a, c, g, or t
ncctaaagactgcagacatggccaggacttcgtgataatggtgcctggggtacctgggagactgtgatgacaaggaaggcgagggtgaggtagcatacagcctgataaaatgagatcagagtcagtaaaaatgagctagaggagctgggcagatgcaggaggcctaagtgaaatgcagagtgagccacatggagtttcccttcatctctccttcagtcacccagggagtgcaagggcgtgctcatgtgcacacacacacacacacacacacactcaggtgtgtacacatctcagtgtgtacacactcaggactttgcacacatctattttgttgtctcgtcctaattcaagcctaaaccattagtagtggttgtcccttcatgacagatggctgcctgtcatgttttcatatacaggcattgatttttgtaattacctgttgtccaaatactaatcttgcaggcaccagcctttccaaatttactcagtcctctagtctttctattgcattttattgaattgatttagcccttcagtctacatttcattattggtattgactttgcctgcacaatggataggccattgagcaaaaggcaaaattaaatctcctgtatgtgaagggtcataaatcatgcctttctcattccttattacagtgctttgtacagttttcatttaatgaagccaagaaattcagctttgttcatgatgatgccagatctcataggtataaagttgagaattcactcccataaatcagcagatagaagcactgtcccaaacttttcctactggtccagtgaacttgggtttaaggcagactgcctgttccctgacagcaaggaggtggaacttaggggagaggaatgggcatggtcagttcaggaagcaccagtgactgtgggagagtctgcagtccactgggtgccctgacctgggcca

SEQ ID NO: 24967 - DNA, 2053 bp, Bovine  19866880156113
  misc_feature (1)..(1): n is a, c, g, or t
ngagaaggcaatggcaccccactccagtactcttgcctggaaaatcccatggacggaggagcctggtgggctgcagtcccatggggtcgctaagagtcggacacgactgagcgacttcacttttacttttcaccttcatgcattggagaaggaaatggcaacccactccagtgttcttgcctagagaatcccagggacgggggagcctggtgggctgccgtctatggggtcgcacagagtcggacacaactgaagtgacagcagcagtagcagcaagattaaaatgtaagtgctaaacagtattttttccctccgagtagacaaattcaactcaatttcagaaattctttcatttttcgtaattatcaaataattttgtcaattaacatgaaatcaaagggttaccaatcgacttactcagctacataacaatacgtacaaagcattcctgatgcttagtttgaactgtacaggcgataggaaaagaaggaaaattaacctttggtacatatttcctctgttccagagactgtgtgattaactttttctgttcttttatttaatcctcacaatgtaggtaatatgtacatttttagatgaagaaagtaaggctttgtagaaagcaggcattctaatgcagtccgtctggcttcagagccagatagattcaactacactttttctaaggggcagaaaatgtttagtggtggtttccctgtggaggaaatgaattgcaggcttaggataccatgagattcttttgccctgccaaccagtagttagagtgccctgctggggaagttgaagcaattttcttctgcctgataggtccctacattttattattatttttaaacagttgctattgaggtcaagtttgaactactcctgatatgattgtttctctgcttctgcatcttgtctgtggctgcctttattgttgactgtccaggcttgtgaatgattggtttttatgttctaagtactcataatctaggtcttcctgctcttgctccaaagtttattttgcttcaaatactgttttagaactttaactttccagatagaaacagttgatgaaaaaatctaattttgctaacatgactttattgatttaaaaaagttgttgccaatattttggaccaaaaaatgtatatctatatcactgttttaaatggcatttacttgattaccaataaagctgagcaacttgcctatttattttccaacattacttctttttcaaattgcattattttattcatattctaaaattaatttgtaaactctacatagcaaagaaatctgtattctgagatgtgatgcatatcttttctcataatctgttatttgtcttttaagtttgtttataatatattttgtcaatgaataatttaagatttatgagatttataatatcaatagtttactttctggattcccatttttctattttaagaataaatgacaatgtaattcaaatgttcttttatttattattaaattgaaatatttactcatagtaatatagtattttccctaatctctagctaattttaatttttttaaagtaaactatcttgttccaataaaataaaaatttattttaaaattatgaccttagtttccttatatcaaaggatatattcccatatacttccctctatttctggttgctagtctgttctagctacttctctattctagtggtcataagcagtgtgagtgcgcatatgcatggattcatgtagtatagtgaagacagagatcttataataatattcacttcattaggagaatttgcagctataaatccctcaaaaacattgctttatctgtttttgtattttatattttcattataattttgtttcagacattaaaaaatttctattgtggtttctaatttgacccagggattctttatgttttaattcctttataaatcattttaatttggtctgtttggtgagagaaatcaaattctgtgtgattttaattcttttaaatatattggaacatgggattatggcttagcatatagtctgtctag

SEQ ID NO: 24968 - DNA, 1207 bp, Bovine  19866880207888
  misc_feature (1)..(1): n is a, c, g, or t
nccatctcaacttcccccaaaattctcttgtctttcttcctgatttcatagtgtttgttgctgctgctgctgataagtcgcttcagtcgtgtctgactctgtgcgaccccgtagacggcagcccaccaggctcccccttccctgggattctccaggcaagaacactggagtgggttgccatttccttctccaatgcatgaaagtgaaaagtgaaagtgaaggcgctcagtcgtgtccgactcttagcgaccccatggactgcagccaaccaggctcctccgtccatgggattttccaggcaaaagtactggagtggggtgtcattgccttctccatagtgtttgttaggagagtcttactcttgagagttgatagtagatatttgaggtcattcaagtgagatttctgtttgagcattagatttcatgctagctaagaagcaggtattgttttatcaagtctaaaattatttgaaaggtgaattagatcaaataaagtatgcttcttttaatgatgttttgtttggatgtaatagtggataagatgtattatgttagtaaacagaagttctttctttctccagagcgtcatggaaaacagtgacaggtgtgctttgtcatctccatctctcgccttcacaccaccaatcaaaaccttaggtacaccaacccagcctggaagtgctcctcggatttctaccatgagacctctggctacagcgtacaaagcttctactagtgactatcaggtattttaaggattggataaagaacatactttaaaggctgcagtgcatagtgtgtttgtttaactttttcgttgggttgatttgtatgcaattaaatgccattaaatatttcctattgaagttgattaccttgatgaaaccaataaactttgtgttttaaaattttctattttacaaattacagttttggccagtggaaatttatcttgaattttcaaaaaaaaatctttatcattttaaaaaacattttgagagttgttattttagttttttctaagttacgtttgcgtacataaaaagtttcttgtggacatctctggcgtgagagaatgttaaaactctattagttgataactaaatctaaggtatcacaaaccttagattggaagtagttttggtgatcaaaagaaaacattgcctagctcccatttcaaaatttaaccatttcaaaaaagctta

SEQ ID NO: 24969 - DNA, 1640 bp, Bovine  19866880426907
  misc_feature (1)..(1): n is a, c, g, or t
naaactaactgtaagcattgcactttcagtggatcctcaatctgtctagtgaattataagaccttagagtgggcttgggaaagcctgaatttgcagccagcaagtctgaaatgaaagtggccctggggacccgtaaacttacagtcggcacctgaagatacagcagtcttgcagggactgtatgctcagacttgcagtttgacaaacgcattgtacccggatgaatataacaatatccaaaatagtacgacgaactgaacaccagtattcatctccagcatttgtcaggtacctaatgacaatcactctggaaagtccaaggttttggagaccacagaaggtgtgaaacagactcctggttgaaatcaaggaaaactagtttaagagagtatataataaaggatgaaaaggcaaggccttcctcatcttgtgcagctactccacccccaaaacaccaaggtgttagtccccaaggaaaagaaatgtcaatacctcaggactatggcaccccactccagtactcttgcctggaaaatcccagggataggggagcctggtcagctgccgtctatggggtcgcacagagttggacatgactgaagtgacttagcagcagcagcagcaggtgggtcccagtcacagtggagaataactatgtaagagactaagcgaaaatctgcatattgaaaagaagacttctccctttctacattcagaacagcagcttagacattaataccgaatattaaagaatttttctttgggaaatttaaaagaaaggacctatatatactgaaatcagatatttttccaacaaaaatttatctaactgtccgatgctcctacagcaaagcccaaaaagaggcagaataacctctctccactaatttcccccttcctaccactgtcaacacacacacacacagactccaagtagctatttagtgcctcattcaatatatatgccttcactaagaaaaggtataagagttaaaaaaaaaaaaaaaagaaaaaggagagagggaaaaaaaaaagatctagaaggaaacagacagtatgaacaggaataaaagtccaacgtgaacttcactggtaagttattttaaccatgaaacaagacaggatgctacattttaaatactttaagagaatagcagcaaaaaagatcattgaatattaaaatatcaaaataaattattagatgcactggaaattgagattatggacacctttcagaaagtataatacagatatacaagacactctaacacagaaaaagtagaaatttagaaatctctgcagcactcacaaacagaagaaattccagagagatagagaacacagaaaacagtgggaaggctattatcaaatataaggaagtttgccaaaacccaggctaagtgtcttgatttaaaggatccaccaactccccagaaagataaagtcccagaccaaggcagatttgtaaaactgaaaacactaaccatacagagaccttaaattttttgaaaccaagcccctacaacagcttaggaaccatcactgcgtctgacttctgcagaacactggaagccagaagacaaagtaatgatgcctccaaaattccaatctagaactctatacttggccaaacaagcaac

SEQ ID NO: 24970 - DNA, 3117 bp, Bovine  19866880429569
  misc_feature (1)..(1): n is a, c, g, or t
ntagtctgatgatattgatccataagtacgggaataggagaaagaaactacttccgtttcatcttttctgggctgaactgattgaaccatagtaaatttcattgctatactctcctttgcctgttgtagatttctctctacaatcagatttctcggattctttttttttttttgtactgtcctctgtatgtatcccagaaacttctggtctataaagaaactctgggtagaaggctgaaaataaagatgaaataggatcctgggcctggagcaggactgggtatgagctatgaggatggaggttatggagccaatgccactatttcttcctaaaactctggctgctgatgtttttctggagatagcttaaaactctgtaaactttagacttaaaaactctgcccttcaaattgctgcaagtctcttaccactctttaccaagttatgttagaatcaataaattaaatgtaaatgactttattttggaggtgggctggatttatattattacttgcagtaaaagaagtgataaaatgaagtagcatataaagcagattaatctgaaaaataaaactggttaatttgaatctatgtctaatggtaaaaacaaagagctatattttcagtggttgtaagtggtggtttctttctcagagtaggggaaataaatttggagagtttgataatactcagccttaaatagatagccataataaagattttacacagcacaaaatcttttaaaatatattagaagtcagagagaacttgtccttaatggattctcatgaggattatattttaatccatagaagtacccttcctttttatttttccatatattcaaataaaaagtttaaataaactccagtgggactacattatggggccattttgatgtcattatgttctgacattatctgtggaagtagtttcttaaaaaatttttattggagtacagttgatttacaactttgtgttagtttctggggaagaagttttagagtatttcattagataaatgcctcgatgagagtacaaatagttagagtgataatttaaaatagtgcaaggaaattgaggtagagttacccatgataatgaaagctaccttcgtttggaaaagcaagtgctcctatcaataaatatagttctgatttcataactgaatttgtaataattggaattatattatttaaaatggtggcagtatattttcttggtaccaatcagccagatcttcagctaaagtcaagcagaaaattggaataattgttgagggatatttagataaagaagctgcctttatttgagttaattataccactaaaataaaagaaccaaagccaatcatcactagatagcttttgcagagatgctgtctgccctttgcagaacttccataaaaatgactgtgtcaatcagatgcttgataagttttagatatacatcttaacttcaggcccttatctaaaatggctgcttcgttttttttttggttatttgtctatcaggtactaacaattgaacttgtgtcaacagaagagttaaaaaaaaatcatttataagtgatatagcactctcagaacaagtgaagtacattgtgtgatagtccctggctctaatttgaggcctaaaacagtgttggtcagacttgaaagtatctaagaatctttgggattttgcagacgtgcctaggggattttgacatagtagatttgggttgagattttagaattttaacttttaacaggtatcctagactggcagatgtctgtggttcaaagaccatactttggaaacgctgacttaatgcttgcagttgttttctacattggccattcttctgcaattctccttaaaccctaaacaacataagacagacatgacctggctgcagcatgtgggggtcagagcacagaacatccatctactccctcgttttctactcaatttcattaacttaaataaatattcatttgccagtggagtgaggataagggtatctaagggaagagatggtagacctgaattaaaaaaaaaaaatatatatatatatagccattaagaaacttgaaagccttgtaataataaagaaaaggaattaattttgttctttactatgtcccaggcacttagaccaatgcctatcacttcacctatgctcaagaaatatttgttgactgtgtaatgaatgaattacaaagcaaagtgcaattaagtgatgtaaatatgtgaacaacaatctagacgtgggtggagcaggataggagtctagttgtgaggttactgatgtttccaaaattatgtcatccctgtaatttgcttccctccaaaccccacctcagggcttccctggtggctcagctgtacagaatctgcctgccaatgcaggagatgcaagtttgacccctgggtcaggaagatcccctggagaaggaaatggcaacccactcctgtattcttgcctgggaaattccatggacagaggaccctggtgggctacagtccatggggttgcaaaagagtgggacatgacttagtgactgaacaacagcaaactccacctctcatacctctcatatgactcacagaatatgataatcttaccagctcacagaatttttagtgagacttttctgagctagaggtccagtggacactgtggaagaggaggttggcaatgagtagagctgtggctgaatctcagatctaacggtgagtggctcacggagtggctgctgttctgtcactcagctgtgttcaactctttgtgaccctggggactgtaacccccaggcccctctgttcacagggctctccaggcaagaatactggagtgggttgccatttccttctccaaaccacgtgacagagtgtcctaatttctccatttcagtggattagcagggacaatgcaacctccctgattcacagagatggtagatgaaaactgagagcataactagggaggtacttcacactcgagagggagaataaaatgagatataaaattctgagttcctgggatgcctttgttactcactacatacacttttctcagagcaggacttattcaaaattgtagctcaggtgaccccttccctcatgtcctcc

SEQ ID NO: 24971 - DNA, 642 bp, Bovine  19866880453527
  misc_feature (1)..(1): n is a, c, g, or t
nttaagtcctgtgatgtctctttataaaagctgtcaacctccgaaagttaaaatttacaaattatagaagttttcatgtatttaacattaaatgtaagagtttaaaaaacgaaagtctacatattcttcctcaattttttcaactcttttattcaatttcttctttagtatcgaccatgcatcatagtcctcatgcctacaacatgatttcaaaagtattctttttcaagaagaagcattctttttcacttatgtcccattaagactttctatacataaattctttaaacttaaaggagaagcagctgtggctcccagtggccaattttatgacagggatattttcctatcacagtttttatattttcacatatggtttctaaaattacaagaaactcatagaagttacagtattagaaaaaaaagattaacaaaaggaagtttaattagctttaaccctgtactcttctacatgacagcaataagaatattataatgtatgtttttagacaactaagaaaatgctttaaaacatataacacattacttaaattacgtgcttttgcatttccaaagtctctgggagtcgtttactgactcagccaaacaatcactattatagcaaacaggtcaagtagcaag

SEQ ID NO: 24972 - DNA, 646 bp, Bovine  19866880495760
  misc_feature (1)..(1): n is a, c, g, or t
natgggaagagagtagggcctttgcccctcaactaccctgaaaacaaactcagctggtggtcttttcctttcctggagaaaccaagcactgaatacacacgttgttggctattgtcgttcagtcatatccaactctttgtgaccccatggactgcagcacaccaggctcctctgtcctcctctatctcccggagtttgctcggattcattgagtcaatgacactatctaaccatctcatcctctgccacctccttctccttttgccttcaatttttcctagcatcagagtcttttccagtgagtcagctcttctcatcaggtggccaaagtattggagcttcagcttcagcatcagtccttccaatgaatatttagagttgacttcctttaggattgactggtttgaatacacatgtaattcaattcaattccagaaatagttcaattgcctattaaggacaaagagactgcatgtttctcagagaagcacatttaaggaaagctgagccacgtttaaattttgacagtgctacaattctttggggactggctgtccaaggaaaagcagcaagctcatgacattccctgaagggataatggccgcctgtcagatccttgtttgtggtgcaggctgactgcacagag

SEQ ID NO: 24973 - DNA, 793 bp, Bovine  19866880527492
  misc_feature (1)..(1): n is a, c, g, or t
ngcttaataaatgactgttgaactgagtgaatgcatggataaacagagttgtcagatatgatcctgaagaggtgaaacatttaatttagtatgtatattcactttccattttattaataagaaactacagactggagctgcaagataacctttactaatgagagtgacattgcatacacaaacaactgaaacctctaaccaggcttgtaaagtgtttttattttacaaccaaatttgatttgtcctgccaaatttgcattgctctgctcattattatcaatagcaggctttgtctttttttttttttttaacccatttctatttagatcatagaaaaaattgtaacttgttcagccaaagattttttctttgaaaagtaattgatggtagtggtaatcctatcagtaaatgagagttttgaagcctataaatatggggaccagactctgggtcttattaatttagtaaggccttgacaggctgcttgggaaatatcttggagttttcttttgaagtttttgcatttactgtgggcctcttgcctttcacattcatcatgtacctcatcacaggttcatggtattattttaggcaatgcatatggaaatatagggcttcccatgtggcactagtggtaaagaacctgtctgtcaatgcaggagatgtaagaggcacgggttggctccttgggtctggaagatcccctggattagggcatggcaacctactccactattcttgcctggggtaatcccatggacagaggagcctggtgagctatggtccatagggt

SEQ ID NO: 24974 - DNA, 739 bp, Bovine  19866880562364
  misc_feature (1)..(1): n is a, c, g, or t
nagagccctattgttgctcttataactccctgacccctgcttttacctctctttcaccagatcctcacttcctgttctaacatgccaggttttcccagatttatgttcttttcctcactcactcttcttgaacaattttattcatattcatgtttgtaactatagccttttcagttaatgagtttggaatctatgtcctcaacctactatttatggaatgcctactacgtgcccattatgctagggactttgcataaattatctcatttaattctaaaacactccagcttattttacaatccatatggccaggaaataagttcatgccaatacatttcagtacccaggaaaacctgttttcacttaaagtaagattttttgaaaatcttaaactccactcctcaaaagtcattttgacaactattatcttgaaagaaagtttggcaaatcaaaatcacttgggaggactcaagtcctcacctctaatatacaatccatgaaacttttttcttaaaaaaaaatcttattactcaaatccctcttttattctcctttcatctgacaaagaggatataaaattagaagcagacagaagcactgaacccacagtactgttgtaatgtcccaaaaaggcctaaagtatgccattttttcctattcttttttggaaattttctggttttatcaattggattttgagaccactgttgctcagactagactctgggagatagtgatt

SEQ ID NO: 24975 - DNA, 817 bp, Bovine  19866880567446
  misc_feature (1)..(1): n is a, c, g, or t
ntttaaaaatgggatcagcagtattagcattttatttccctcatgacccattttcattgctatgctaacataattttgagtaatcattaaaatataaccaaagcctttgacctcaaaattaaccaacaaaagaaacattaggaaattcatagcactttgcaaatgttctggcttgcttagcccatattaacatgtcaagaagcctacagcatgttcaaacttttccccccttggggttcaattcagtaagtacttacgaagactataatatttttaagcaattacaataaagtgaaagactccaattactcagtttagaaagattattctccctttctaatctaacatattttccaagatatctagcttttactagacttatacatgcaaaaatgtgttcacacatgcatacacccacactcactcccatgctgatgttactaagtctgttgtagttgaatacttaactatttgagtactgaacacacaagtgtattttaaagacagaaactcaaatcacagacacataaaagaatttatatattagcactcataattatgaagcaaacatatatgctgaccttgttgactcagatgatgtaggtagcatttacttttcttctcagctctgacattttctgtatgttggcttaattcttttgcagataagctttctgcatttggtggtagtaagttaacagggaagacaagaaatgtgagatgtggaggtatggttacaaagaatttcgcaattgtattgaacttggtaacaccaaagtaaaggtttctcatcctacacctgtacagaaaatatcaa

SEQ ID NO: 24976 - DNA, 2651 bp, Bovine  19866880641317
  misc_feature (1)..(1): n is a, c, g, or t
naaaggaaatgaaggggaatctgatgataaacaaacaaactaattttgactgggagttccaggaaaagccaagataatgatactagataacatttattgagtacttgcattgtgtcatgctctgctccagtgtcttacatgtattaatgtgcttcatcttcataacaaactctgaaataagaacactttattattcctattaaacagatgaagaagttgctcctaagcccacagctggtaaggggcaaagctcaggctattaaccacttaatgagaacactgatgtaggtcagcagaattggtttgggaaagataggaaagttttctcataacttctattttctcaataattagaagtagttcatcagcataaaagggaggtcatgtgtcacaaatattgaatgtttagcagaaaaaaaagcctaggttctgggatcagactgacagagctggaatcctggttttcacacttaccttggatcttcgacatgtgactaaagcactctgaacctcaatttttcaccttaaatgaagattattgtacttattagattgtctgaggaatgtatggaataatttttaggactgtaccttgtgtaattcagtgaatataagtgtttcttgttactactatggtgattattattattgtcccagcctgcccagttgtgtgattttctacattggtatgtggcacaaaaggaatgaagagctgtagatttttctgtttttaggtgagtgctatggagagaaaaagtggcaaaggaattgggagtagtggttagagaataatgtagctaactgtgttttaagactcaaccaaaaaaatttaaaaacttgtctaattgtattagcattgctttgtttgacaaattcctatttcaaagtaataatttctgaaaaagacagttcctctatttcatgttagacatatagcataatcattaagcttctaagtgttgattatatgcaaatgttagggacattaaattttttcttataaaatatacattatgctaaatattataaactcattataagatgattttcccctactaaaacatcactgaagtctaaatgtttaccataagtcaagtgttcactgatgcttaaattcaactttctatacccacttaaattcaaatccagtgttacttaaccaccatcatacaaactaaggtgctactgtttccttgctttaaagctatgaacattcattgtcctacctagattatttgtatggtagattatttgtcctacctagattatttgtatggtaaaaatgtatggtacatttttcccgtttcttccattatttctaattacttcaattgattactattttccccacaaaactttagaatcagaatttatttaaattttccacactttgtgtgtctctcccattcccagtggtctttatttgtgctacacttgaaataataggatgaacaattaactttaagtttgtgaaaagaagaaagccatgtttcacagctagtgtcaagttttgtttacttatttcatgtcgtagattctacatttacaatattaggagaatgttcaaacaaactttagcatatgcatatgtatgtgtaaatactttcgtgtgtcagattttaattatagaatagtttgacctttgtaagttgaaggtatttataaatagctataaatagaaaatattttatgttatctagtatattagcttaaaaatggtagtcattctgttatctaatatattagctaaaactgcaactgctagattacaaactatagtacttccaaacaccagaaggggacattggtagtcaaccagttctggaaaaaacaaagttagtgtagctcactctcttgttttaagagagggtgtgacagacttaaggctcatgacttgaatcagaagaacggaatgaagctaacaactcgtctttactcatttcccccaaggagttgaagcagaacaaaaataaagctgaaatcatcttttccttacattttggtctttataggccaaattaattcttgattctaattaaggttcctaattagctttggatcatggatgctacataaatctaacaaaactaggcatcctgtccataaaaatatacaaaattttagtgcaattttaacaaacttccagtctcattaaagcctatataaggcccacagaccaaagattcagaactattctggactgtaacaagtccatccaaaaagctacaggaggaggagttgtatacccaaagtaatcatgtgttaaatgtccaggtttaacctgacataaatattgaaaaacaaacgttcagaccagcattcagaatgtaaaagtgtctctttcctgatgagttcaatgcataacaactgactctctggtaatctttccgcaggatgaaagtgtagactttgtagtcaacatccttatcaggactaaatatcccgctgtagctggattactcaagttcctgctttatctgcctccttctggtgccagactttggcacctccaacagaaagtaggaaaaagaactgaacgcatgaaacttaaatgatttgattttattttcagttgaataccttgactaaatagcttggtgcaaaggaaactgctattttgctctaagttttttccctttctcttacgctat

SEQ ID NO: 24977 - DNA, 1207 bp, Bovine  19866880649620
  misc_feature (1)..(1): n is a, c, g, or t
nctcagaatgaatgcagaaaaattgtaaatttagtctcagaagcatgctgctaaagcagacccagccagcttttcagccttcaaagcagctttgtataaagcagcacatttggaaatctgtcgctggtacactctattcatactggattaataagaagtaaaatttaacatgacgaagaaaaggacatagaatataagaaaggatcacaaaaatggaaaaagcaataaattccaacaaaatccagtattagttaagttttcaaatacctagacatttatgtttttgaatgctgacaatatactcttattaatgaaatgtcccctctcttgacctcaaagcccagtggcaaattcctctttgcagtgtacatttgcctgtgttccacactgctattgctttttcaggtaggcaaaaagtaaatatatagtaaataccaccactgtcatttaacattaaatgtttgacacaaaataatggacttgactacaattatcggagttaagtgagctgcctcaaattcttcgtggaataagatcatttcaaaaaagataataaaaaattaagattaagggatttttttcttatctccatgggtgacagtttagtttaatttatgtgaaagatttctttttcttttatatctcttttatttcaagtggtgtcgctacctttattgtaagatttttaaaattttaactttatattacaaattgtttcaaatataaaaaatataaagagtataaaggcttcatatatattcattatccagctttgacacctaacattttccccaacttgactgtaaagggttttaatgtatctataattgaaactagaattatttaatctatataataaataatatataattagattataaatattatataaaccataaataattggaaactcttgaaagagatcattttgaattatttttagaagacaactatttattgttccttcagaaaggaattgggcttataaacagaattcttattggcagttaactttattttcatggtgcttgatggtaatttttagaaacattttttaaagaggagactgtaagaataaatatcaaagtaacatgcttagcaatagccaaaccaagtggtcaaacttattaagctcagttaaatacatatctctctatcaaactggaagctgagctaatagcatgtgatacaccattgcatgagtcgg

SEQ ID NO: 24978 - DNA, 1881 bp, Bovine  19866880695560
  misc_feature (1)..(1): n is a, c, g, or t
natggtgactgcagccatgaaattaaaaagacgcttactccttggaaggaaagttatgaccaaccgagatagcatattgaaaagcagagacattaatttgcccacaaaggtccatctagtcaaggctatggtttttcctgtggtcatgtatggatgtgagagttggactgcgaaagaaagctgagcgctgaagaattgatgcttttgaactgtggtgttggagaagactcttgagagtccctaggactacaaggaggtccaaccagtccatcctaaaggatatcaatcctgggtcctcattggcaggactgatgctaaagctgaaactccaatactttggccacctcctgcaaagagttaattcattggaaaagaccctgattctaggaaggcttgggggcaggaggagaaggggatggcagaggatgagatggctggatggtatcaccgactcgatggacatgggtttgggtggattcccgcagttggtgatggacagggaggcctggcgtgctgttatttatggtgtcgcagagtcggacacaactgagcaactgaactgaactgaactgatacatacatatatatatatatatatatgtatgtatatatgtatcctctccttccccactccctttgcattcatctcggttgtcaaagaccaccaggatgggcatcctgtgttatataccagcttcccacaaacaaatgtatatatgttaatgctactttctcaatttgtcctaccctctcctttccctactgtgtccagaagtctgttctctacatctgtatctccatcccttccctgaaaataggttcattagtactatttttctagattctatatatatgcattaatatactatagctgtttttctctttttgactcacttcactccatataacaggttctaggttcatctacctcactaaaactgactcaaacttgttccttattatggctgagtaatattgcattttgtatttgtaccacatctttatccattcatctgttgatggacatctgggttgcctctatgtcctggctattgaactcgtgctgcaataaacattggagtacatgtctttttgaattgtgtttttctcaggatatatgccaagtggtgggatttctgggtcatatggtagttttatttctatttttaaaagaaatctccacactgttctctatcatggatgtattgatttacattcccaatagcagtgcaggagggttctcttttctccacatcttcttggaaatctattgtttagattttttgatgatggccattttgattggtgtgaggtgataactcattgtttttaagatttgcatttctctagtagtgagcaatgttgagcatcttttcacgtggtcactggccctcaaaagtactcactttaaagtcatggacttagctttgctgaaggtaagaagtaccacattctcagctgagggatgcagtctaataccaggagttaatcatgacttattggcaatggcaaaaagcttattagatgcagaaagtgtttttaggatagctgtataggaaattgatcattattaatatttaatgattcattttatgcttggcaggatacctactgggtacagacaagttcatccacagaatagttttaagctcttgaaaatatttttattgttttgtgtgtgggtattggaatcatttttaactgaagcatttgaagctctgactttatatacacatagctagtctgaaatatttataacagtatccattcttataacctcaaataaatagacataatgaatttaatatttatgcttcaatttactgcatcatgaatttgaaatgattaggagatatcataaaatccaatactatatataca

SEQ ID NO: 24979 - DNA, 627 bp, Bovine  19866880714263
  misc_feature (1)..(1): n is a, c, g, or t
naccaaataaagaagtggaatatgtaacagagagcttctcacaggccttaggtgaaaggcattacatagggatacagggaatgacaagattctgctcggtatccatcacaacagaatgctccaaagacctctcaaactgagcatgtctcattacattatctcttgcatccttccacctttatttgcagtggtgagacactggatagctgcttgttaactttgccattttcgctcagggcaaagcctcacctttcttaaagatctctgctgaaaccaccacaataaatcgctgcctactagaccatcgaatcaagatgtctggtgaaaaagaaatgtgcacagctcttcattcatgttccacacacaatgtgctgtatactcgaccatttttatttttagctctgcccattaaattaaaaataaagaggtaatgatgaagagaaaagattgaaacaataggaaccttatgaaatgaaaggcattttctaatccttggctataaatattaaaaatataaatccaactgttttaagaaaagtacagaaggaaatggggctttaatagcaagaaaatgatgttttaacacttgagttattttctcccattttgctatactaaatgatatca

SEQ ID NO: 24980 - DNA, 1069 bp, Bovine  19866880836191
  misc_feature (1)..(1): n is a, c, g, or t
naaaaaattgtaattatgtgaagtgatacatgtaatgtaagtgatacatgggaatcattttgcaatatatatgtatatgaaatcactaggttgtacaccttagaattaaacaatgttatatttcagttacatcccaataaggctaggaaaagtatttattccacccaattttatgactcaaaataatgagttatgtgtgacaaagcattcattttggctttggagaataaagtaagttttgggaaacctaatcaaatgaactcccaagacagaattaggagacagctcaaaatatgcaatcagtaaattctctaaaagtagattccatttttaatatagtacctagcatccactgtaaaggatgttgggctaaatacatttttaactatctcttttctaatttccttcaaaacatttacatatgaggatccaaatgaaggaaaactacactcaattattgttctaatgttcatgctttgtagtctctcagccttttgaaatcccataatgttttactatctctgggtttacaagtgtctcctcagatttacagtttccagaatattttctgcttctccttctgagttgttatgaaatttttgtcatcagtctgttaattttaaggttaattagagatcacatctttctgagggtctggcagaatgcacaagtgttgccagggcaactagcccacaggtcgttacatgcacatgtagctttctgaggctatgggggagcagagaactcaaccattcagcttccacagctctaagctcactggagtctaatttgatccatagagtaccatacaaagaaacactgagaggaaaattccagtaaattaaaactatgattacagtagtttaactacacaattaagttaaaaaatgttcagcagagccttgcagcagaggttacacaatgcttgcacatcctcggttttgagtgcatatgcacgtgtcccttggggacagagatcatgttgaaccagtttttgtatccccaaatccctaccaaagccaggcgcactgtaagtactcaacacacttgctctaacaagtacacaaag

SEQ ID NO: 24981 - DNA, 1209 bp, Bovine  19866880851332
  misc_feature (1)..(1): n is a, c, g, or t
nttgggttagacatgtctcttggctatttatccaaattcataggaaattaatactctcttcttgtgaggtgatcttttcctaccacccctacccatcatgtcactaaatgtgaactctacccttgttgctgttgtttagtcgctaagttgtgtctaattcattttgtgaccccatggactgtagcccaccaggctcctctgtccatgggttttcccaggcaagagtcctggcatgggttgccttttccttctccagggaaccttcctggaccagggatcaaacctttgtctactgcattggcaagcagatgctttaccactgagtcatctggaaagcctgaaatctgccctgggattagattaaaactagatttccttctaggcataaaatgtagtggtaaattttgcttgccattattccacaaaagcaggataatattcacatcatttgttgagcttcctgtaaattttactcttattttttaggtacagaatatatgcatggtaatctttgtggcaatgctattggatagtgctttttatcacttcagtgtctagtcaaagtttgacaataaaattgtactcaagacttaaaagaggttctttctacggaaagagtaagactgtatggagttatttggcaagaataccaagagaacactaaagaaagcaaaaaataaaagttagttggagcttgaaaactgaactatgatttattgtaaagttctgcagtaaaagagaatgtgtgttgaggcggggagtgagagggggacaaatatctgcagagtgattcttagaaggaatggctctaaaggacaaggctcaaggacatcaagcacttggagttcttacttcccaaagaaggaacagagaaattgctttgtcattctgaccattaattacttggctcaaatattttatggagatttgtagctattaaaatatgatgctttgatttttttttttttcattagaaatttcttttttcccttcctgaacaaatgctattctaaaggttttcatttgttttggtagatttttgcctttttatacacaatcagtcaacaattcagctacctaacagtaacttttcttcacctttccaaagatgatatttactctttatctatttgtatgtacttaaggttttgtgtgtaagagaaggatgcctgtgttcacttttggaatggagattgctccactgatgtg

SEQ ID NO: 24982 - DNA, 1383 bp, Bovine  19866880880711
  misc_feature (1)..(1): n is a, c, g, or t
ngagtttattctgcatgtttctttcttttcttgtcttttttctattgtaagaaatagagtggaattattatttaaaagatgacatgcatataaaaccaccaaatttcagttaacttacttgaatccatttttcctcctgtagatgaataggacttcctacagaaaactgagaaattatttttaaattatgaggtacttcaaatgtgtaaaaaattacagactatagcaattatatatctaccattaacaaatgttaatattttgataggctaagttttcagtagaataaagttgaatatagattcagtaagcagcctgtgagctttgtattaccaagagaatattggccaaccagcatattgctgaccttccagctacctaaaatcacatggtggaagctggcagatttcccagacagttaaagtgaaaaaaatgttttctatagaaatggaacctaattcaggaaagtaaaatacttgaaaactttaaataataaatgccctattttttcagttgtgtaactcattttattttaactagttattctcctgtataaacttgcttattaactagagtcatttttcaaatgtaggagatctggaaagccaactttcacagggagcaactggaaaagggtacagccctagctgtgcatggagcgtgggtggaactctgtggaccagcagtgtttgctctaagctactgagtgttcccggacgagctggcactaaagcattttgtggatgtctttttaatattcttttcttcagttgcaaaagaaatagatactgtaaaaagtacacgtgagcatgaagaaaaaagtcacctataatcttactgtaacattttgttctatatacttcttgcccatttttaagcatatacatcgtttttatttttacagaaatgattgatgttttgtaacctgcttttatcacctaatatattgaaaatatatttccatgcaataaatattcttctacatttctcatttcaaagggctgtatatattttcatgggatattcatcaaaaatattcatcctgtaaatacttctgggactctgaaatcccacttctaggaatttttcctaaaagttctggatattgcaaagattagctattaggatgttcttcacaatattgttggtaatacaaaataaaccccacaaaaacaaaacaaacaaaaatccacccaaacccaatgcccaatttttctaggaacaattcctagaagtgggatttcagagtccagaagtatttacaggatgaatatttttaaatgaatattcctgaattatctttcagagagttggactcaggtcctcccaaggtgtatttcttaaaataataaccaacacaattggacaaaattcagattaaaa

SEQ ID NO: 24983 - DNA, 1844 bp, Bovine  19866880978587
  misc_feature (1)..(1): n is a, c, g, or t
naatctctccctctttacaggataatctgacaacttccactgaaagtaaacagagaaccctccctggacccctctggctactgccctagtctctgctgctaagtcacttcagtcgtgcccgactctgtgcgggttcccttcaaactcctgttcagtcttctttgctgactccacttaactgtatttgattcctaaagtcagagttcttcagggctttggactagatcctaatttccttttaaaaataatctctccaaaaatgatctcatctattgccacgattccaaatatcatccatattttgatgatcctaagtttgtactcctagtctagacttcgtggaggtccagttcagtatgttcgatattcttcccaatttttgtaaactatttatctttcagttcagttcagtcgctcagtttcgtccgactctttgcgaccccatgaattgcagcacgccaggcctccctgtccatcaccaactcccggagttcactcagactcatgtgcatcgagtcagtgatgccatccagccatctcatcctctgtcgtccccttctcttcctgcccccaatccctcccagtatcagagtcttttccaatgagtcaactcttcgcatgaggtggccaaagtactggagtttcaatctcagcatcagttcttccaatgaacacccaggactggtctcctcctccaaccaggatggactggttggatctccttgcagtccaagggactcgaaagagtcttctccaacaccacagttcaaaggcagaaattcttcagcgttcagctttcttcacagaccaactctcacatccatacatgactactggaaaaaccatagccttgactagacggacctttgttggcaaagtaatatctctgctttttaatatgctatctaggttggtcataacgtaccttccaaggatctttagggtagactaaacgtaaaaatataagctggaagttggatatcatcataggcttaacctgtagtttaactcaagctttgttttaccattgttttttgccaattttacacatagcattctagtattttaaaatacttaagaccaaacaccaaagatcaagcaattagtgtgtgtatacactgatacatcatctactatttgagtatgtctaggcacaatacatttctaaagcaaaaacaaaaaactcacgaatcctttgtactgcaaaaagaaccaagaagaattaaaaccaatcataaacagaaattattcattacattagagtttttccacagaaagaacctgaagttctttgagtgattttaaaaggaaatttagtttgcagagcagaagcaaacaaacatgtgtaaagtgcattatcaatatctcgcaggctataagatgaattctaatcggatgtgaatggtaaagatcaaggctgtaattaatttctcattgttttctttttgaacttttcagatcagttctgttttaggcatgtcttctgctaactactggagacatcttctgtttcatttaaacttctcttggttactcctttgcaataccaagttgcaatctctgactaagggcctaactccttattcacttactatagatactgggatactgttgctgcatctttccctgttcactttcttaatcattttcagttgtgtaattttcataccttatggtctttgaatatgtagaacacaacttgaagtattgatttagcatgtatcttattgtctatcctttttatgaccatagttaaactacagtgagatcttctactgtccttttcaaagttcttcacccaaagttgattcttctgtctatggtatggtccaactatatgcaat

SEQ ID NO: 24984 - DNA, 1235 bp, Bovine  19866880995031
  misc_feature (1)..(1): n is a, c, g, or t
nttgacttgtctgggttacacttgttacaacagccctttcacctgtatggggtgtgtcatttcagtttggagtactataccagatatttggaaaataagtcttggaaaaatagactgttttgcttcagggagtcctgtatgcttcaagccaaaattcttgtttgccaggtgaggaaagtcaggacagagctgatgcgcttgttcaaggtcgttcagaatagaaacttgaccagggttccagacacccagtcagggctctttttgctagagagtgctctttcactgataaggttctggtgcagctgcgttgtctggcaattaactctgccaggtcaaatctgagcatgttccatagcaagcactgcgtgatacaaaaggagacggaattcgaccagtataggctgaaattaaactgaaaggaatatggcatggctatttaaaagtgtttaattttataaaccccagcagatcaaagtaattatagagcaataaaagatgagtaaaagcctccaatggatgcaaggaagagataaagctagacttttcagaacagccactgttcttcctacaaaacattttctggttttgttgtctattgtctagttcttattaaactggctgggttgcaaacaaagccgtgttaatataatgtggatggaatttattcatgagtacatctgtcctttcacaaggaaaaatgcatctatttaaacaataccgatgttatcctaaaatttgaaagttttatgcttatgtaagtgtgttaaattatccttataacatattgagaagctggacttttaatcaatttatgtttatttataaatttgtaagttttctcccattagaatatacactgctgctgctgctaagttgcttcagtcatgtccgactctgtgcgaccccatagatggcagcccaccaggctcccccgtccctgggattctccaggcaagaacactggagtgggttgccatttccttctccaatgcatgaaagtgaaaagtgaaagtgatggagaactagatttcaaattaatgataggaaagtttattttagcttttattttcttaagtttgctagtagtactacctttgaggagaagactttcttataatgaagaaaatcagaatattgcttattttaaactcttttctggatcatcaccttcctagaaattcttaaaataatcttaaatactttctagcttttggtagtatgagtgtgtgggggaa

SEQ ID NO: 24985 - DNA, 1305 bp, Bovine  19866881034522
  misc_feature (1)..(1): n is a, c, g, or t
ncttatatgatttgctacttttgtgaagtaaaagcttttcaaggtaaaatttatgaatatatagcattttcaatagagtcggacatgcctgagcaacttcactttcacttttcactttcatgcattggagaaggaaatggcaacccactccagtgttcttgcctggagagtcccagggacgggggagcctggtgggctgctgtctatggtgttgcacagagtcggacatgactgaagcgacttagcagcagcagcattttcaatataataatatcttaatactttcctttaaaaatatatatttatatagttggtgaaggcacaaagaatagaggggaaaattccttcctcagtgctggtttagtaacagtgctgggtaaggagaagccagtggcataaaatcaagttcaggattctgcaagttactaaagtattgatctctgttaaagggaattttagtcctgagggttattgccaagcacctgcaaggtggagagctatttcttggttcttggccatgtgtgtatggtttcagtatgtaggtggagaaaaacttggtgggaatgattcctctgttgacagcaagcaatgggcagtcattacctttcttggagagaaatgagatagggtgctcaatggaaagcgaattgctctcctggaatatgtgtctcactctgatagttaaaactttgcaaaagagtccactattggaatatacccatgtaatccttccatccattcatgtatccattttgttattcattcactcatgtagatgctagccgattggatgaagctttttttctgttaatccccaaaatgagctgtcatctgagaaaggttgtgttctgtgtttccctttttgcagatgtcaaggacttgatttcctttcattttaacatttaaaatatatttatttaaaattatgaaagaaattaatctttaataccaaagaaatgtagactaatttgaagaagattgagaagaagctaggaaaaggaattcactgtagctccactacacaaataaacattgctaactttctttagtttctcttttctgataggctgaaaagttggaaccgtattaacttcatcatcataagggcacaagtagtaagttagtagtatatcagcttccactttaggctctgtattcttgggatcccatctaaggacacatagctgatttaagcagaaaaataaaattcactgaagatatcagatagctcatggaatatctgggggagacagaatcagacttggaggctacagagttggaaacatcacccgtatcatactatag

SEQ ID NO: 24986 - DNA, 1931 bp, Bovine  19866881231417
  misc_feature (1)..(1): n is a, c, g, or t
nttctgctttgtcagggatcggctttgtccttaatggtactctaatgggtctctggagtaaatggatgctgaggtttggtcataataggaatatttattaagatacggtgggtactttgcaccccagagaatctattcatttggcatggcactctagcttcctggagagcaagaatgaatcttgggtaccactggggcacagtattggacttgaagtaagtgcttgtgtttgctgaactacacttttagtgtaaatggttcttttagaggagggccaaatgcagacttgtttttcttgctggagactagaggaaacttctgtgcatttggcaattcctgatcaaagacagcatttctgtactttctggcgttttcctgtatgtagtacttttatatatatcactagaggtgtgtgtggtgatttaagtggaggcatggaaaaaaataatacatcagtagaaatatattttaatatgtactagtaaacatataactcaaacatcaaccttgtgattccaagcatcttaccacttagaaaaaagctaaattcaacttaaggaaaaatgttaagtaaataataagacacaagagttatgaggataaggtaaaaattgtgaaggttgaaacggaatgacaaatgtttggaaacatagctgagccatatgtcctggattaggcaagggtatgaatacttttcctactttctttgctacttcctttcacatgagaggagatacttactatctgtatgtgcattatttcagattaaaaatattctttgcattcccggttactctcttactgctgttgagcagatctgaaaggatcttttccaatcttctctgagaacatcagttattgtcaacatcttatcaagcaccatttgctgttctctggttttttttttttttagttgttaattatgacattgtaattgcttttgtatttccatcaagaattgtcaagtgttttatgcgaaagctgtgtcgttatagtagttggaaatatttagcaatatatctatagccatagattctaattcaggctctgcataactagctatgagactggagatagggagttctgttattggtaaaatgaaatagattatctctcttgggacttccctggtggctcagtggtaaggaatctgcttgccaacacagaagacttgtgttctgtccctgggtcaggaagatcccctgaagaagggaatggcaacacactcaaatattcttgcctgggaaatcctatggactggcaggctatagtccctggggtcacaagagagtcagacacgacttagcaactaaacaacagaaaaaacaacaacaacaacttgagttcttataactctaaaatcatcttttgttcctgtatttctgacctctgtgtttaaatatattatagagttaaggtcgtcctcctttgtactctatggtctgctgtacggggctacttagagttcccagaagtcaccacgatctgtgcgatttccgttttgctccatctctcctgtttttgaatattaggttgaaatgccatgaaaatagagcatttgtatcagatgtgagaatcgccctgcccattctgtgctatgaaagattcattcttaaactctgattcaaacaaatagtaatcaggatgaaagtttcttaatgtccacactttagagttcgggagcccaaaattctttctatgaaacttggtattattcagtgtgagttttgtttgcagagcctattattcagaagtttaagcttgacttagaaattcataatgtatgtatgcgctgtttgtgtcttactctttgcatcctctggaccagagcctgccaggctcctctgttcatggaatttcccaggcaagaatactggagtgggttgccatttcctactccaaaaaattaacaaaacttagttctttgttag

SEQ ID NO: 24987 - DNA, 1864 bp, Bovine  19866881328384
  misc_feature (1)..(1): n is a, c, g, or t
nggtatacatgtgtcccctccctcctgaatccccttcctctccccgcccaccccactcctctaggttgtcacagagtactgggttgagctccctgtatcacacagcaaatccccactcgctatctgttttacatatgataatgtatatgtttccatactattccctcaattcgtcccactggctcttaaaaataatagatcattggttagagtaatacaatcaaatagcatgaactaataagcttcctacacaatatgctgttacataaaacctggaggaagtaattctagcagcaactctgtatcttagaaatagttttatctagtggtagaagcaaaatctgaattaatttaaataaaaaactgaactaagcaataactgaacaataattttctctccatcatgtaagacttggacaatattccctttaaagaggattatgtaagtgaactatagtttctaaaaggagaattatgttttcacaaagatgttttctaaggaaactaaaattttagtaggcaattatttaaatactttttcttaattttaaatctctttgagtttgtgttgcctgatatttacagtttagctcccagatttgcacattctagactaagtactgtttttctaaaatcaccaatagctttcttgttaaaataagatgtgttgttattaaaattccctgctcatgcttgtaccatcatttccaagcttactccaacagaggattcaagggtagtgacagacagaggtcatggctttctaggaaaagtttatacaaaacttcagaggacttcaaaatccctatgggtcattcatttgccattgaaatgaagaatccgagcaattcataggtcacaatacacacaagttgtttcaaggaccttctctagaattttggttatggtccagattcttatgtgtaatctttacctggatacacagacccccaagagaaccgtgaataaaattcagaggatcagtgaatgcagattataaaatgtaacatttttattgtcactgacctctaaattaaatttatcatttcctgaaattatgaggcaacaaaccacaatggtattaaaatgccaccaatagtaatcatagatatttccatatcacaatatggttgatgtagatattctaaaatacatgcttcatttatgttcatatctcctttaaagtaaggtagttatgtatgctgatatagtagggagtccctaaagaaagagaagcaggaatgactttcttgacataagaaaagtcattttagacctaagccatttcatgatctaagtctggccacaacgcttgcctttgtactggtcttagtaattaacaatcttaagggaacaaaggaatgcaggaacaaaagaaaagcactcaagaaataatagtgcagaggtaaaacagaatcccggtttctcctcgaaggacatatatagcaatctgatacaaatcttcgagttctgcaggagcaaaagcccacaccatgtggaggatggagactacaggctgagactgcagactggtcaggtggaacctaagaaatgattggtgttgaacttttctgacccttgtgacatcaatcaactaaagtttggactccgctacttccgcttcttgactgcactaaagcccttgactgtatagatcacaataaactatggaaaattcttaaagagatgcaaataccaaaccaccttacctgtctcctaagaaaccctgtatgcaggtcaagaagcaacagttaggatcggacatggaacaacagactggctcaaaattggagaaagactgtatattgtcacaaggtacatcatgcaaaatgcagggcctggatgaatcacaagctggaatcaa

SEQ ID NO: 24988 - DNA, 878 bp, Bovine  19866881472011
  misc_feature (1)..(1): n is a, c, g, or t
nactgatgacttgtgttacttagaatgagaagagagtctcctttcggtctggtatttcatttatcatcatgtatcttggaagatgtttctttattctgctttgtcagaaacatccacaaatcaaataactattgatatactcttggtgacttatgtctagaaatacattttaaaggttactgaagaaattaaccttggtaacaattgtttttgccatgctaatgggtcttaaggaatgatttaattgtacatgtctttggaaggcttctcaatgtcattgctggtcaaacaggaaaagggacaaggttctaaggtcaaacaccagaaacagcgtgttcctgtcatgctcagagttcaagaatttttggagctcagcttttttcttaactttgattagaatagggattgtgagtttatggaccttcttccacatcccctcccctttgcctgttgtctgctttgcccttgcttatgctgccttactgcttcctgagttctcctcataagccctttagtatgtggcagaggaatgcaagagcatttatagccaggctcataaacttcctgcctgtgtcactgctgcagatttaggtgtgctgattgatcttttccctagagtgcaaggctctgtacctgtccaactagttctgtctgccctcattggcatcttctcagccctcaccctagtgcaaatcaggtgtgcgtgtgccgcctgatgcagtgtcacagtgggcagaccctcatctgccttggaaggtgtaccagccaggtgtggtctcaggcttctgaccttgtttcttagtttagaaagtcgcatggactctatggtgtttattctaaaatttgggacaaagaaaagttcttcttctcatcaggtc

SEQ ID NO: 24989 - DNA, 1128 bp, Bovine  19866881721735
  misc_feature (1)..(1): n is a, c, g, or t
nagctacaagaaaaaattactaaagaagtaaagggatgatggcaatgtcccattaaatagagaatatcagtaaagagacagaaattagaaaaaagaaccaatggaatagaaaaatacaataactgacatcaaaagatcactgtaggggctcaaaagtgacttgaactggcagaggaaaataatagtgaacttgaaaatagattggcaatgattatacaagatgaacagagatggggaaaaaaagaatgaagaaaaatgaatggagcctcagagaaatgtgggtaccattaacacactaacacattcactgatggaaatactagcaggagaggagagagaaaagaaaatatattcaaggaaataatgactgaacactttccaaatttactgaaaaataataacccatatatacagggagcaaaatgaactctaagcaagaaaacacaaatacattacagtaaaaatgttgaaagtcaaaaaactaagagaaaaattttaaatcaacaagaaaaaaattttctttgagatgttcaggcaacagactaccacaggggccaatgacacagaacaagttgaagaacctcaggtacagcatctagaataaaacaactggccacaggacacagtggggatggggaggaaatcccaggtttcaacctgcttttatcaaaatgctgcagaagataaagtgtccatagtcaaaaacaaaaggcgggggggtcggttaaacaaaattaagtcaattttattactacaagacttgtcataaattttaaaatgtcaattgtgactctcaagatattgataaaacttacatcatttcccaaattcctttaaccataaaaaaaaattgtggagtacctctcaaggctcaaggtttgaagagcactttcagaaacactgacctggtagttagtaaaagtgaggggtactgataactgctggggtcaattgacatctctgtttcctatgtctatactactaagagaaagatactactttctcttaagggcatccataatagacaactacccatattttcaaggacatcctaggtcaaaagctgtctgagtttcctagtaatgctgcttgctaaggcccccaaatttaagccaccctgaggggtga

SEQ ID NO: 24990 - DNA, 1092 bp, Bovine  19866882021889
  misc_feature (1)..(1): n is a, c, g, or t
ntgtataataactgttattgctaatcgtgatgtataaaatgcttggtttagtactggtaactttatttaggatgctgttttcataattttgttttacaaacgtgaaggtatttttttagcttcctcacagatttagctgtgacattgctttctcagctctgtttttctcttatggctttaatttattgactgtaaattacaccacaggaatttttctcaacctgagccctgtggtttgggagaaactattacatgtttcaagaaaaatcgggacaaatttgtataaagggattttaaaagagtaaagctggacattcctaaagcaattttggctgatttccagtaccataaagtaatgcaatttaaaatcaacatgtctaacctaccagtgaactttcaaaatgaaaatttccacctgtttggcaatgagacaatctctcccctcccaaaattcaagcattcttatcttagaagctgagattctctgctaagagcctggagtaacctcctttaagtcctggcatataaatgtgaggatagatacacctttatgtaaccctgggtcccaggactcaccagcccttgaatctaactgatctcatagccaaattaatgaccacattccacagctctgagtcacatctccatctctcttccaatagcattgagggattcctgggggatatggtcctcagatacaagtatgctgacgttttctgctttggtctcctcacccagaagctctgtcacagctgctgttcctaagggtacttctttccatgtggccagcaccatctgtactctcttcccttacatgtgctcaggtttcacttaaacaccacgtacacagagatggcttccctgctccttccctatgactgcgtgaaagctctgtattctccgccctcccctcaaccccaccatagccttctgtatttcttccttgcagacttgcattattgtaatcatttaagagattgctgtctttcttcaattttaagacatgctctgccacaacattgttaaaaattttgatagttcttagaattgaaaaaaaatcatttttttttcccccctgagggatgggatggg

SEQ ID NO: 24991 - DNA, 4589 bp, Bovine  19866880527715
  misc_feature (1)..(1): n is a, c, g, or t
ntgttaccgtggtggtggtgggtggtttagtggcacagttggtattggctggtgagtgaccctgctttgttgtgaagtagcaatatcatatccagagaactgctacatgtttgttttctaaaagtgtggtggataattaagatggattattctggcattttgtgctggtcattagaaaaatagtatctgaaagcagataggagagtggaccttaaaaatcaatggatctggtaatttgcatcaattgcttctggtcaaatacagatgaaaagataagtaataacagaattaggaaaagttaatgggaaaaagatgaagaaacttattgcaaatatgtcatcaacttttcttctgtgagcttgtaggcagactggagttaataattgtcagctgctaggacaagctcaatatcttaactgacaaaagggagatcctttacaattcctagctggaccataaataacatggtgcagctgaaagaacagaaaaaagagcagggaggtaccccagggaaaatgttgacatttaaaccactctgttaaagaactacctacatgtacttaacatgtcctgctctggtacatacaccttccgatcaaattttgaagatgacgtaaaagtccctttctccccactgacagtgcttttttcagtgctgttagaacagcagggctcattagcaaactgcataataatggaaaatgaagccttttgaactaccaaaaggacttttagcaatcctttctacaaatttctgacaaactaaagagtttttctaatatcccatttgtgtcaagagagtatttttctcattatgaagctatagatatacagtttcatagcaaatggattggagaacggaccctgaactaagtaataccttattcctcacttgtcacttcatcaaaataaaagtgtttttcttattgcagcagaaataggcattcatcacttgaaattttaaaaatacagataagtgaaaggaagaaaatatttaataaaaatcgctaataattccatcaattagaaaaagatttctattcaaatttcacttttgagttgtaaaagttctaatcatactaatctgaagtaaataccaagatttctcttaaaaaggaaactgctttagtgttttgaggttttagagataccggatgcatattaagatatattgcataagcaaaccacagtcatttcaaaatagcttatgccatttataaaagcacatgcattaatttacatggattttaaaaatacagtttcgcatgcttcttcttgatctttgagtctttaatgcctctatgtgaattctttacctaatctctggtgtgtccctgaagatgattcattattttccttccaaaccctgatgttacataattgtaacctttatttgaaaaggaaaagtaaggccatgaggactgcatggaaagagaccgcgtttgtcttgtaatcccaccaatgaaggcggcctttgtgctccgcgcggggaagtcagaaggcaaatggcaggatggccctctggattttaactgatagacacttgtgactcattgagtacctggcccagcctcattcctctttctgctttccctttctcatactctttctagcttctcagtttggatccagagacatctctcaaagcttttcttctctattctgttccagtttttcacgagccccatttagtaagtatattcctctctggagatgttaactgtttctcacccaaaacaattacattggaaatgtcatcataccttgtcttcagtcagatcctcctggcctctgtagcatgttttgataaataattgtactaaaacaatatttgaatcagtaatctaacacttgtaattgattccaccttcatagcttggttttacttttttctttttctaaattttttttggctgcaccccagctcgcgggatcatagttccccaaccacaggccgttgtactccaacccaggcccttggcagtgagagcatgaagtcttaaccactagaccaccaggaagttccctggttttattttttatttacattttttagaaaccctagaaaaatttgtaaaaattattacattttattgacttgttcattaataaaatttcactgttaaaaacagaaatgtctgagacaaatagttaattttaaggtctatactttctttttacaaatactattttttcctatggctttaagatagaaaacagtggatcctacatgccagtctagcacaggaacattttcttgattctctggttatcaatttgctatctgtggttctgtttttaagttttttctcctacatttgatattttatatttatttaatattgaatggcaatgagtagctctcagagacattcttattaatacccctatattagcctaataatgcttacaggactatttggagtgagatgctgttttatattaagtacactgctggtatcacatctgtctctgattcatgtgatgggatgtgccctctcctttgtttccatagcaccttctacatacatttcttagaagaattctttcaatatgtgttcacttgtcattctcaaaagattgaattccttaagagcagtgcatggcatatataatgctagctgagtaagtgaaagaaggaattaatgaaatgtaaagagtcaactcattagaaaagactctgatgctgggaaagattgaaagcaaaagaagagagcagcagaggatgagatggttagatagcatcactgactcaatggtcatgaatctaagcaaactctgggagatggtgaaggacagagaagcctggtgtgctgcagtccacggtgtcacaaccagttggacacgacttagcgattgaacaacaaagctagctatatgaggtaccaacctgttttagctaagagcatgaactctgaaaccaaaaccatgtggattcaaatctcaactccatcatttagtacagtatgtccatggacagggcttccctggtggcttagctggtaaggaattgcatgcaatgtgggagacctgggttcgatccctgggttgggaagatatgtttatgacatttgtgcatctcagttttgtcatttcaaatatgggataattactgtacctaactcatacatttgtgcttagaacagtatataagtaattgtatctctatacagtatctctatacagtaactgctgtatatgtgtttgctactattgctattatccttttatttaatagccctggcgtggaatagcaggtgccattaggaaattgattctggaattcaggttttctcctgtcatcatgaagaagtattttctttccactttgggttcaggagctttcagtatggaaagaggcacaggcggtctttagtacatcaaaaactgaggacatttgtacctttatcaatcatcaggctgcacagactggccagaactaacaaggaactttttatttcaatcagaattgtatcaacttagcataggaacaggagaaggaaatggcaacccactccattgttcttgcctggagaatcccagggatgggagcctggtgggctgccgtctatggggtcgcacagagtcggacatgactgacgtgacttagtggcagcagctgtgcaattggttgctggagtgaaagtgaaagttgctcagtagtgtcctactttttgtgaccccatggactatacagtccatggcattctcaaggccagaatacgggagtgggtaacccttcccttctccaggggattttcccaacccagagatcgaattcaggtctcccccattgcaggcagattctttaccagctgagccaccagggaagcccaagaatactggagtaggtagcctatcccttctccagctgatcttcccgacccaggaaacaaaccagggtctcctgcattgcaggcagattctttaccaactgagcgatcagggaagccctgaaggttgctcagtcgtgtctgacactttgagaccccatggactatatagtccgtggaattctccagccagaatactggagtgggtagcctttctcttctcccggggatcttcccaacccagggatcaaacccaggtctcccacattgcaggcaggttctttaccagctgagccacagctggtgtgtggcaaaatccactttattgaatctctctgaaattaaaaaaatatattttcaatctgcagttgattgaatctgttggacccccacaaagagaggaccagctgcaaaaaacaatatttatttgtgtattgattggttggtttttaaagagtatgtgtttattcttttttttataattttttttatgactgtgctgggcattcattgctgcagggcttttctctaattgttgcaagcagggactactctttggttgtgatacacaggcttctcatcgtggtggctctcttgttggggagcatgggctctggggcacgcaggcttcattagttgtggcccgtgggctcagtaactgtggctcccaggctctagagcacaggcccagtagtttaggtgcacaggtttagttgctggcggcatgtgggatcttcctggatcagggactgaacc

SEQ ID NO: 24992 - DNA, 1073 bp, Bovine  19866880570280
  misc_feature (1)..(1): n is a, c, g, or t
ngaatgggcagggcctgtgatgtgtgcaaagtggctctgaagaaaggagtgtgaggtcgtgtgaagagagaagaacatgtgcatgatagtggggacagagctatagagcaggaggagaacactggtgtgtgcggggtgtgtagaggacaggggtgggaaggcagggagtggagtaaggacttgcaggcttcaatctggcagttgcattggattccaaagacatttaggagccactcaagcaaggcaaatggcaacccactccagtgttcttgcctggagaatcccaggggcaggggagcctggtgggacacgactgaagcgacttagcagcagcagcaagcaaggcctctactaggagggatgatacaaactaaggctctcctattggcatgagacaaatggtgtaaggatactgctcgagtgtgtccactcaggtgcctagccataagagaattacccttgccacaatcctgcaatttctttgaagttttgttttttactttaaaaattcagagatttgtgcattgcataggatcttcgcttcttttaattctcaaaattggtgtttttagtaaagtttatggttccagggagatgtgccatgtttatcctgtggcttctggaagacactcgcactgccctccttggatcaatccaggagcaaggtaattaacaaatagggcatttgaaatgtgaggaccaaggggctttaggagggcttcaccctcagtaggcaggccttcgttactctccttccagaccttgtaggccccaaattcttttcttggggtctttgaaagttcattgaccatgctctagtgcttactgcttccccatctttttttcctcttcccttggcttaaaatatcccacctctttcttactgcttttttcaagcaactttttggagacataatttagatattgtacaattctcccatttacagtgttcaattcagtgtttagtacattcacagagttgtgcaactgttgccaccctctagttttggaaatttttgttactcctaaaccaatctgtgcctattatcagttactcattctcctgcccccac

SEQ ID NO: 24993 - DNA, 1125 bp, Bovine  19866880625615
  misc_feature (1)..(1): n is a, c, g, or t
ncaagcaaagaccccacaaagagaagcccacgcatcgcaactacagagtagcctctgctcactgcaactagagtaagcctgcacacagcagtgaagaaccagccagccaaaaataaatgaataaacagtcaaaatggatcaaagataaaattttaagtattaaaacagtaactattaaaataaaacatatgtgtaaatctttgtgatacgagattaggtttctttgctataacaccaaagacacaaaatgacaaaagaaaaaaaaggtaagcttcatcaaaactctttggaaaacagcctggaagtcgctcagaagtaacctcaaaaagttaaacacagagttactttacaacccagcaattctactcctaaggcatttaactaagagaaataaaacttacagtcatgtaagagttcacacaacaatgtacatagcagctcattcataaagtcccttgcaaaggaagcagcccaatgttcatcaactgatgaatggacaaacaaaatgtggtataaccttataacggaatattattcagccataaaaaaattaagtactgatttaggctaaacattgatgtatcttgaaaacattgtgctaaattaaagaagttagacacagaggccatatattgtaacatttcattcatatgaaatgtccagaagaggcaagcccaaagagaaagacagtagactgctggttgtcagaaactggagagagtggattggggagtaactactagtagacatggatttttttaggggttgatgaaagtgttctagaattagagtgtggtgatgcttgtacaacctagtgaatatactaaaaactactaaattgtatgctgcaaaagggtgaattttaatgaaatggaaattatatcttaattaaaaatttaattttgagtcaggcatgttaaattttgttatatttaaattctgtgatcagtcaggaatatgaagttcatataatatttgcaagcttatgaaaaatgaatgaaatttttgaaaacaaactagaaaattccctaccttagaagattttctagttctgtaattctttcagttagatcccagttgcctctttcaagactctgaatactggtgtttttcaaagatttaatt

SEQ ID NO: 24994 - DNA, 1115 bp, Bovine  19866880652457
  misc_feature (1)..(1): n is a, c, g, or t
nattatcaagaaattaagtgaaaataaaggactttgatgacttattcaaagagagagaaatccaccaactaaagctgtatgcagaagaacataataagttgcgccaggttctccaacaaaaaatggccctgcaatcccaactgaaagaaatggatgaaaaggattttaaggacaaactagaaaattctttacatgttttaaatcagataaaatctcagttacaacagccattgcttataaatttgcaaattgaatatattcaaaatgaaaaagataattgtgaagtgtttcaggaaaaagttcaggcagaaatggatagcattaaagctgtgactgtcattgagaagcaaagtgaggaaaattcttctgaagctagtgatgtggaagcaaaattaaatgacattgaagatctttacatgcagcttaatgcaagcattgattcccgcactgtaagttttttaattaggcagttaatgtatttgttttattttcatgtttttaaaacataaaaaccctattttatgttttactctagttaatatctacatttctcaagaagtaacaggttcttatggctgacccacgttattgtttgatagaaaccaacacaatactgtagagccattatccttcaatgaaaaataaacacatttaaaaaacggaagttacaggttctataagaacattctacacaggagaatagtcattttaaagaacttcaaagggccagtttatagccccaactcattccacatcaaaatgtagtgcctgtagtggaaaaagatgtttgacactgtgagttctatatgccttgtagaatctgttgggctcagaaccaaaaagtttgggttttggtttgtttggggtttttttagagataacagaatgtagtggaataaatatggtgtaaagaacacaaaacaataactccacatttctttagcacttacagtgtctagtaggtatgctgaacactttcatcctcacagcaactctgtgaggtgggtgctaatattagcctcattttaaaacaaggaaattgaagtttagaaactaccattttctcaagatctttcagtagtaacagaaccaggattcatgttgagatctgtctc

SEQ ID NO: 24995 - DNA, 1380 bp, Bovine  19866880661668
  misc_feature (1)..(1): n is a, c, g, or t
nctttcaataacacagctgtttctagatttgtcttttaacattttctgtaggtattatcatattgccatccaagaaatctgaatcaatttatgtgtttccagcaatatatgaatattcattactgttatcttttaaaaacttttgcctgcattacgagtgaaaacactgtcttcttgctgtatacaattagatttctgaaatgatcaatgaggttatttttaatatatgtaagagggatttttttctctcttgaaacttaacatctccatgtgtttgattattttttcctatatgtatatttgttttttaattgtttataatcaagggtgcattttaattgacccagtctctccagaaattttcttgactagctcaattaagctcagttgagttttgattgacatatgttgagcaccagtgtagtgctctgtaagcatggtgggggtggtgaatagatgcctgccttcagtagtccactgaaagaaaaccaaagtgtagccccggatgccaaatggcattgttcagggacttgtgcggtgctcattttaccacaagtaaactgttaccgttaaatgatactttttagatcttgttttggctgaaggttttgtctcagtgctgctaacttatgattccgtacacattaacaatgattatgtcttccttagattgaggagcttgcccggactcttcctggcaattacagtcagccttccctggacagtgtgagtgcagttgactcctctcctacctcaagtcctccagccaagaaatgctccaaagtccaagaaagatggcggatgtctgcaaagaaggctcttctccagtgggctcaggagcagtgtgcctcgtaagtagcttgctgtgaccaggggagacacacagggtagctgtacccaccaacataaccttactgacctccaggtctgaaaatctggccaaataggtgtgacagctacctgaaaacttccctgtcagaagaagaaaatgctcactctctccttctcgcattgaatttttcacatgtagatgtctgcgagctcagccactcttggttttaaagaccagaaggtggtatcacctgagtaacttatctcactcccatgcccatgtataggtggcccgttatggtatacaaataaagtagtcttcaaatatccttttcgttaggcacaattcccttatgcatctggaaggtggatttagattttaaaaagttttaccatgctaggagttctttaaaagtcaagactgttttagttgactgtgtattctcttaattttagccttatatgtgttcacggtatagttggcaataaagttaggaaggacttacggttgaaaatgtcaggggtaggaagaggatttcctttatctga

SEQ ID NO: 24996 - DNA, 1379 bp, Bovine  19866880763228
  misc_feature (1)..(1): n is a, c, g, or t
ntgtgtggtttgtcttgctaaggtatcgtggccaaatcatttttgacaagataaagtgttaccattactataagatcattgttgtccatttggcaaatcttaattacattcagtgtcctgagatgcttggtgaatatgacttttgaatgtatggaaatgttttaagtattgacttagagcaaactatttatataatagcaaaagtttgccctaatttcatttttgagtagatatttgtacataaaactttatttaacaaacaaaatatgatcatttaattcctcaaaggcagtttacaggcatatctgcttttggttaattatagatgtctcaaccctatatttgatttcacagataaatgaataagtagaagcaaaacactgcaaacaattgagtataaatgtgcactaagataacaactttaataattaaacttatgccttcaactcttcctgacaagaatgtcttatccatttctcatagttacattgattggtccagtaacctgaaataagtgttctgagattgttagtctgtatttaaaatctttccaattttgtcagagggagtaaccaaatcacacacatacctttttctgtggaataaatatggctattccggcctctgaaaaaatccatgttctatttttgctaataatttccccttctgtgttcacatagcttttatagcagtgttttcataaacaatatattatcatacatctagaattggttatgtatgtttcacagacagttgtgagacttcttgacaccttcagtgttcatcatcactgattgtatcattgtaaatgagtagtagagaatgtagaagcttggaaaaatgttggctttgaaaacgtaaagcaaaagtgttatactagttggcaatgtcaagaggcccaaataatgaatttaagttagagttttataaagtaatataagttctccttttaatgcattttaatataattttctttagcatcccttaacaccctctaagccaatagttctccataattattttaaagtcaatgtcctttctctgtaattttaccatcctccattctcctaataagcacagcttgtaagttgaaatgattttagagcactgtgagcaaaaatctaataccaaaaaaaaaaaccctcttgtcattttgaagagacgggcacactaggtaattgacagagaatgaccaggaccatggacatggaagtaggtcaaacagattgaattaagtattttgaatgcactgtaaatgagatttttgaagtcaatatgccatttttggttgcatccaatatggacttttaaagatagaggcagcatagaaaggatatgtaatactgctttgttcagccttgcgaatacaaatgaaagtg

SEQ ID NO: 24997 - DNA, 4531 bp, Bovine  19866880771148
  misc_feature (1)..(1): n is a, c, g, or t
naattctttaaaaatattttaccttgcagatgatgtctgagttgtatctttatcatgctggcaatactggggccatgttttgttagcattaaattctatgaatttgattaaatctttctgttccattggttttaactccaaaacctataattgaataagattcaaatggtccaattaatcaaggttttcatttagtacacaaggatttcttctgttgagatcatcagatttgaaaccacttcctaaatcattatttactatctcttgttcttgttaatatttatttttcaaaaacttatttaaaatatttagacaatgaccaagcattttttaacataatactacacacaaggaaaatcaccaaaaaaatacaaacacattttgaaacagggaaacaagtgttgcagttgcagaggtatatccctgcttggtttaagatgcatgttaacaaagcagccaagttcaagtatccccagtggtagcagatgaaagcaaagtagatagtgcagcaaatgctcaaaactcaaaactgctgtacacacaggaacgcctacacatcacactttctattcagtcatgtaagaaagcactccagtggcctttgggtatttattacagcttagtgggaaattccatatagaaaactttattcttgtccttataactattgggggctgaaaatacctgttgctgctggaaatctttttgtctactgaattgtggcctttcggtaacaacagattcaaattcagaaaggttatctggttggagaactttctgatgctctgaagatttctttagtgtggtagaatgctgcaaaacattttatgatggcagactatttaaaatggtgatccatttcaattctaataatgtaactacacaatggaaaagttatatatgaagtaaatgactgtattttgttaattacaatgattacatactacaatttaatgtacttatttcataactacttcaaaaaccactacatttaatgaagtggtcattttatcatttcctcaatttaattcatccaatgaattactaaaagccagaaaatctattgcccttttttcttgagaacaaagtgaaataaatatcaaaaacagacatagtattaagcttatgaactcaaatttcccctatgtccaaaacataagtatattttttaagagagagaacatattaggataaaaggggttccatacagcctgtatatctgcagccaatcttacttctgtaaatagaagtcctttaagtagaaaccaccatctcattaagaatggctgtgaattttacatagtaagattctactcataggatgcacatttgcacttatatacacagaatgcttttaaaagtcataagcatactttaactatatgatacttggatcagtatatataaatatttgtaaatggaaaacaaaagtacctgtgaaacagggttttttgtgtttcctgatgttaaattttaagcatgtctataaaggcttcatttttctagtcaaccatgattacacagttcctttcaaatacgaagttcctttaaaatttatgatgaaaggttgcacagatctcattaccagcaagaacaacaaccaacccagtcaaaccaaacctaatcaaagcaacacgatcactaacaacaacctagatgagcaaactacacagcaaaatgaaaccaatgacaaaagccagggtacccaccccttaaagctttaagaggcacaattctttttcacttactgtaattcctctgtagttgtttctttacctgcacccagagctccttcctgatacatatgcctgtatttacatacatgtctacacacagtcatattttacctggtcctcactgtatttctcctgaagcatcatttggactttttccaattgcatttcacagttttcagtttcaaggaaagtgcttcagcctcctgttgagtggctccactgtctcccaggccctgatctttgcaattctctaacagagaggccaccttctgctcaatctctgttagcatagcctagaaagtaaaatcatttcattaatcacagttttggtctcaaacacacattacactctaaaataagttagattcactgtctctacacctaagtgtatttaagaagttccagaaacacaggttgatagggaccttgtcgggggagaaaaaaaacaacttccacataattctgatgtttttcagtaggggttcagccaaaccaactccaaattgggtgtgaataaataaactaaattggttgtatcacaatctaaaacaagtgatgctatattccccttagaacgcagagctgaacacatccagtacagcacagtggttaggaccacagacactagaactagaacttcatagctgggaaaatttgggcactttacgttgcatgggtgtacctctagttatctgtaaaatggggataataacagaacttacctccggggtcactttgagaagctagagttaaatccatatactttggccagtgcttgatatgtagtctgtgcctactattattacttcccaccttattcctaaactttttctgttgcaatccaagtgttgagtagtaatttaaaaaaatacttccacagaacccttgggaaattctttcctttgctcttttcttgtctttctaaagccaaataagctccccaaatatcagaagacgattacaggaagacataacttggaacctaaaacacttagtcattgataccactggtcaacttacacccatgtctaaaaataagtcaggaggatgaagtaagtttcccagtaagtcatcatcattgttttcctcctcaagagatcaagtttgctctctccttgagctatggagccgcaaaagtcatgccaattggctgggcacacgagtgtagcagcagcagaatgtagagtcagacacattctaacactgcaattgcttgcgctaaaatcgtgggtgctaagaacaagttcaatcctttgagagaaacttaaaaaacttaaaacagattttcaataacagttataatttctcatccaagtaaactacttatatcctctgaatacagactcttttaagcttaaacaacgtgtacttataaagtggctgaaaacaaagtgtactataattttgtgctttttgtccacttagctattttatgtatacattttcatgggtctacatatatatgtttcatgatatctattttaatagctgcatattagtactctatgattctcttcatctccttattgttaagcctttaaactgtttctggtgcttcatttttataatcaatgcagccataaatattcttctccttttagggttactttcagaagataaatttaaagtaatgggattaataggtcaaagaagatagacattttatctgctaacagctgacttccacaaatactgaaccaatcaggcaaacattagtggatctatttctccagagttttcccggaaatgtaatttttgtcaagataatgtaggaacaaaacagctgttttgactcatgcatctttaataatcaaggctgaacatttcttctcaatattaagttacggaatacaattttttcttgactgatctgtttgctcctgtccttgcatatttcccctctgggaacttaatgtttttacagagcactgtaaagctttttatgtttcagtgttaaagtctatacgccatggtgttatataaatgagccagagttggcccgtgtatatggatctatatgttgtttatttcttcacagcagaaatattagttcatatttcaccagtgccagactcaaaactggaccccccacatctagtcatggttaagacaaactctggagctctaaagactccagcctctgcttccttcagattctctgacatcatcttgacacaccacccctctggtttctctaacccctaggagttcccttgtctcctccccttctgggtggtggctccacccccactccttgccaaagcctctggaagatctggcatgagacttcccagtccctccagaccccacctaaacgctgcccaagtaatgctcactgcgcgcgactgccaccttgtggtcgtgtcttttccttgagcagcccccacatttttaaattcacaagaggcccaaggaccagattccggtaatgatcaaggacttggctgtggggtctactcagtcagcaggaccatcagtcggcagatggcgcctgaaaggccctaagtggccgggtctcaacatctggaataccgaggttcaggttagaggaacactgctctgcgccacttacactgtcttctccagaccctcctgcacgtcttaccagtcaggccacatggtagtgcctgtatctgaatgaatccaaccctcgggagctgacttttggggtgagaggtgctgagttgcctgaggaaggaagtcagcttgcctggctgggtcctactaggcagactccggatgtagtaagagtgggggtctgaatgaaaggggaggagcgccggcctcgggccaag

SEQ ID NO: 24998 - DNA, 1650 bp, Bovine  19866880785502
  misc_feature (1)..(1): n is a, c, g, or t
natcccatttagattcctctttaattttcttttttaattctgatctttaaaaaggcaactcatatgtgagtttactgtcagacatcaatttctagtcatctgattgcttcctagttttcagatttttcagatattgttatatctcagtggcaaagattttgcaatccccctttttgtcacctgagataaaaatctgttaacagtgattgattgattaattaatctgcaataagagattttccatttgctttccctatttactcaaaaacattatttgagcacctacaactgccacagatgtttaaaaaaaaaaaaacgacaaagttgagtttctttgttttctctgctgctgctaagtcacatcagtcgtgtccaactctgtgtgactccatagatggcagcccaccaggctcccctgtccccgggattctccaggcaagaacactggagtgggttgccatttccttctccaatgcatgaaagtgaaaagtgaaagtgaagtcgctcagtcgtgtctgactcttagcgaccccatggactgcagcctaccaggctcctccgttcatgggattttctgggcaagagtactggaatgagtcgccagtgccttctccactaagtcactgaattaatgaggaaatatggaagctggagtactaatcttggttttatttgctagttatttgaacttggaaagaatccaaaagtaatggaagacaaaaagattatctgtaacagtagaatttcaatagttgaaggtggtctgggaaacgtgccaggaatcagttcacatcttttttatagccaaagaaatccaagtgtgtttaatgtttaatcagtttcacacccctcccatcccaccacattgcttctgagaaactcaggcccagacataaattacttgcccaaggtcacaaagtttcaagattttttaattctgagtctacattttttcccacagtagtctgcctgctgagtatcttcttcaaatgataaccccacattttaaaagcagaaattattttaatcaaagttttataactgtatattttggagggctaaaaaaacatgaccacaaatatgtcttgttagagaattatgtcatctagagtctaaagcataaatataaattaataatacccaatcttttactgggttctagagctaagctactgtgctaagactatctcatattttatgccacaaatccattattcccagtgtacagatgaggaaactgaggcttagagaagttattcaaactgcctatggtcactggattcaatcctagacccaggattcaatctctgatttcattatgccttggggtctacaagtccacatttttgacataattctggcattcaagttagcctctcagtcaatgaatgtggcagtgcttgatttctgtacaacacatcgctgatttgagtaccaagatccagttaaaatgcaaatgagttttctggctgtagcagtatttcatgccaaaataccaaacctttaaatacttttccatcaattctacaaatatctgcacacaccacccccttgtataaaatgcaaaactgcctggctaaagtgcctagcatgctaagtcgcttcagttgtgtctgactctttgcgatcccatggactgtagcccaccag

SEQ ID NO: 24999 - DNA, 767 bp, Bovine  19866880910852
  misc_feature (1)..(1): n is a, c, g, or t
natgccctaaacatatctaccatttgacacgattctgcagtcatgtgattcttcagtcacatttcttctttattgaacttgttaaagtgatatattttatatactgttcagatcacacagtatttgaatcttcaggtggggtaattgagtccccccaaaaagaatggctgcttaaagcatggccatttgtggtatattttattctctttttgaaagcctttagttcatgaactctcaaaaagatgaacagaaggccatggagctccagtatcacacagcggggaaaacacttaactagcaggactcttctatatgcccctgtcaagcaggtgggtctgttcacccctgtgaaggcttagtactttaccaaaggcacaaagtaaatatcagagatgttctggatattcaagataatgagctgataatgaactcctgagggctggaaacaacgtgaacttttatcacaaggctctgcttgcttctgttgtagatgcacatgaaaattgtttctgatgaaaacttctcttgttctagtttgttctatcacaattcaaggattttggggaccggttggaatctttaaaaggtctcattacacatgaagaagagaatttggataaactctaccggcaagaaaaagaaggaaatcctgacttattcctggtattgccaatgtttgttatttctaggggctcaggctcaccataggataaaaaataagtgactcactgtcatatgatagaatccgtgtgcatcctaacccttga

SEQ ID NO: 25000 - DNA, 3260 bp, Bovine  19866880955972
  misc_feature (1)..(1): n is a, c, g, or t
ncccacttcttgtttctttttcagttctgtgagcattaatctcagatcctccttactttgcaaatacttctcgccttctagtagaagcttttcctgatggctaaattttacaaaatagtttataaatgaaatgacacagcaaaacaaaacagcattttgcaacatataatacaacatgcattattataaaaagcattaaaataacactactgtacattattcccagagacttctttggcattgtaacattctaaatggccctaagtttaactcagaaatcaagataaaaattagttgtagtatgattttaaaaaactattgtttccattatataatttgatctgaggacaaaagtttaataatttagatttcaaactagtccagtttttattatgtttaaatataattattctgtgtttttctttttcatttaagtaaaacaaataagcatgcagtatattggccagctaactagcttatgcttcctacagcttgattttaattttgatctgactgcttccttataaaaatatgaaatttacatttccactgaacattaaatgtatcatgatttgatttgatgtgaaaggagttaagaattttcaccagaactatgttcacttaattcatacatttataaatgtttctcatagcatatatatttaaaagcataaactatcctacagtaaagtaaacactgaggttgtctcggggcaggaggtttggtacagaaggactttattgaaggtagaaagatagacaatgttaatttgttaccaatggtgggttgatgcaccagtcaaagtaaacaaggagttattacagcatgtttcatatctgatccagagaactagtctctgtttctgcctcaacactgtggttgtccctgacattactttctctccaacagatatattatatctacatccagaaggcagacaaaacatacttgttatggcttctctgtgcaatgaaaaatcatgaaaatggtgaaggcatgccctttaccttagatacgtgttggccaaatgggagccgtgttgtcccactggttcttgatatcagtgagggtctgtggaaccactggagtcttgctgctctcagcctgactcatgatggcctgtattttagcatccccttcaggttttagtaaaatgatttcctaaattaaataaaaatgatcttaaaatcccattcatactacttggggattacatatgatatctttttactcataaacatcattcagagattctaactgcggagtagatttcaaaatttccctttcacttttacatatgccccaagcacaaagatatccttcacattgcatagaactgcttctcagtaaacatctgtcacgttacctactctcctctcgattctcaattgcactcaaagaaattatgtacaaaaaaaactccctggcaaatcctcctcccaacctgcaccattatttataaataaaaagttggggtgacaacctgaacaagacgtctttatacatctaagagtgggtttccggcttcctataggaaaatgcacagtgtcacaggcccactcctgtttctccagcacaacataattaattctcattccctgtactttgattttcctcttttgccctaaacaatcaagttcttctcttcttagaaacactacttcagattcaccttctctggaaaacctttcagatgtgatcccaaacacttctgactacttctgtacgtcaaactaacccttgaaacttgaccattatcttcctccacagttagtatctgataaaccaggaaacactcaacccactcaggatctaataccctttaggatccatacatatccactctgaaaatgagctcctctccagccctgactttgacattgccaatgcctctgatgtactgatatctattcgtttaacatcctagcaaactcctacctgctgcagttctaatttatagtctttatttcatatctgcagtcaatgaagatggataataactgggcactgctctcacaaagagaggatatacctttcctttctatatgcgttaaaataattttagattcatcacaggccttctcttttgtaagctcagtcatctgaatttctcacccaatccacactgatcctattttccattaacaaacaaatatttgcaactttcctctaaatcttattaaaattggagttcatcctgacctctgacatttagtttccatagttatacctttattttatggattctttcctcaagtggcattttgccttcagatgaattcaaaaccataagggattctttaattcctgttatccaatgaattacatcatgtgcaagatcattaaaactctggtcctcggcaggaggtaacttatcctctttgtcagtttcacatatttgtctcaataatgtctggtatctatcaatcagatgtgttgattccgttactatttcttcttcctcagtaatcccatattgcttcacagagttgttcaactgggccattgattcgaattgttctctgtaaattccaaatatcattggaagattataggagccatgacacaccttcagaaaccatatccccaagaaacacattttgtgcaagatcatctatacctctttctagctacagcttggcaaaatagctccgttttctctcgtgttccttccatttctttccatatttcttcttgattagtcaaccacttactcaggtttctgtggtcattatggagtctaaaacaacatcacacatgttaaaatatgaaatcagcaaaaagtgtctatctgaagaaatcgttggcaccaatcttgtaagccaaccaggttttttacattttatttttattctttataaaaaattttgtaacattatttacaaaatgttacaaataacaaatttagaaacaaaattataacattaaaatctgaataataacagcatgtattatagtggaattctaataagccataaatatatatcataagcttcccaggtagctgagtggtaaagaatccgcctgctgatgcaggagacttgcatttgattcctgggtcaggaagatcccctagaggagaaaatggtaacacactctagtattcatgcctggagaattccatggacagaggagcctggagggctacagtccctggggtcacaaagagttgaacaggacttagcgatgagcatgagcatgagatatatcataaaaaataagaaacaaacagaaaatattttggggctctcccctgaac

SEQ ID NO: 25001 - DNA, 1175 bp, Bovine  19866880979370
  misc_feature (1)..(1): n is a, c, g, or t
naacttcctctgtaaaagaagagctaggagatacggctaactccaatggcaaatgatcaaaagatgatttatattagttctagactgtgtgtgcacattggcgtttgcatctgactttccgggaatcacatcaagcaaaatgatgccaccgtgtgggtcagtgggagtcagatcgggaaagccacattctgttcaacttctcctaaatatttgagcctttctggcaaccaatatgtaaaaccaggcagcctattttctacttaactttgtcaaatcagaattttatttcaatgtctgggtttcaaggtttgagtatcaattgctgagacccatggaatgagcaaatttaaagaaaagaaaaaagaactctaaatgaaaaaagcagaagaaaaatgattctgtcgataaagaatggttatcatcaaagcaagaaatatactgagaacatttaatgccatcaataagctggagagcataccttatcacctaaaatacttgataatctaccataaagtgatcaagaattgagggtgccatacacattttaaatgccctattaatgcctcttatctcaggctaccttccactccactcccatcagcagtgtattaaaatatttgagaaaaagtcagatttttttggtaaatattacctttatgtagggaaattactaagtcaaaataactattatcttatctacttatatacagttctgcctccagtattttaattttgataaattttgaatgaaatttatatatgtcttcttacagaaagtttttgtagtttttgttccacacacttctttgtttctgatggttcaaaacactccttaaggttcattttaatgctgccaaaccagtcattaaagttcttgcactgatctgtaggaaaaaacaaaggaagctgtatttattcaaagatgacatcacctaccttgttaaattaagagattctgaaacttgctccccatgccatacatacaagtcactgtgaaatgataataaactaaaacctaattttgagggttaaaagaacctacacagtaattgtggcatattttctataccaaacctcctttccaatcatacaagacccacacagaaacctacaggggcagcccgctcacaggcatgtccccagactctgaccacagtgagcaggtcaaacgctag

SEQ ID NO: 25002 - DNA, 1372 bp, Bovine  19866881029707
  misc_feature (1)..(1): n is a, c, g, or t
naaatatcatttctcaaccatcagactggcaaaaattaaacctcacaccattaagtattgataaggatatgggaccactggaatattaatatgctgctggcttgagtagaaatagataaaatcatttggaattaaaaatttaagatgtgtataacttttgacccggtaatcacaatcctaagtgtacacccaacagaagctcttgaatttgaaaacgttcttcctagaaaaaactgcaacaatccaaatatctaccaatacctgggtgagtgaattttactacagacaaaacacaaatgaacttcagaatcataattgtaagtgtgaaaaaaaaaatgaagtcacagaagagaacacatatgtgaaaataggatacaaatacatagtaaaaatattttttaaagcaaaggcatggtcaataaagacaggataatggttatttctgagaggagagggaaggagtccacgaaggaactaaaaagtcatggtgtttacctttgaacctttcagtacaaaggtgtttatcattattctttataccacatgcagatttctataaacattccattttaagtactggatgttaagaaaaaattaaataaatgcaacagaatatttgctatagttttccttagacagtgatttttattttccatattttccaaattagttctaatgtgtacatgttaattataatctatatttgttcttaaagcgttacctttagaaagaagtacctacctttctacttcagcttcctttactttggctgcctccctcaaggctgagttcttagaaactaagtcctgtaaagtgcactcaagttgtcgtttagcttccaggctggagacggtccccaaattcttggtgaggtcctggatgcctgctattggtggatttcagttcctcttgtttctggcgaggcacctccactgattctttcggattatcaagatctactctatgcgacacaatgatggtttccagatcggagatgatccccatggccctggagactgcttcattatagcgtgtcatattttcataagcatcattcaagacactctggtgaatggaagattaaatgctgtgatgaaattttcaaatttgggggatttttgtcatttttgaatgtctgtgatacattcataatacatctctgggtcatacaagagcaagcatttcacacttttagtttgataatattacactgatattttaaaatgaataggtttttctttgcataaagaaaattatttctagaattatttcatatttcaatttcaaatatttcataaagaaaattagatttctaagaaatccaatctaaatttaaaaatacacatcagaatcacatctaatatatatatta

SEQ ID NO: 25003 - DNA, 1075 bp, Bovine  19866881064814
  misc_feature (1)..(1): n is a, c, g, or t
naattttataatgagaaaaaagttacttaaaatgttatttcaaatgtcttaatccattaaaaaaaataaaccaagtaacatattaaggaataagaatgagaatggcaccatttttcttaataacacactggaaatcagaagacaatggagtaatgccttcaaatctgtgtgaaaataaagtctaaacccaactatcaactgatcctgacggtaaacaataacaaaaaaagaccatgtaatttattcaaagaatttttccctccaagataccatttcttagaaatctattagaagatgtaccccagcaaaataagaaagtacatcaaaagaaaggaagacaaaagattcaggaaacagtgcaacctaaccaagagattggagaagaaaagtcacaggattatagctgtgcccaggcccacagagcaacagtccagactgatgcaagagaattaaggagtctggatgagaaagaatgggagatttttgtagattataagatcatctgacataatattggggaaaaattaataagtgaatgttgaaaattatacatatgaaaatacaagaaaactattaactctaggaaaaataacacacattactacaagaaaggaaatgtcacaagagtataatactgggcattttgtaaacattatttagtgtcatagtgaagtaaatgctgattatgggtctagctaaaaatactgatatagctatactgggacaatagaaggtggagggggaaagagataaaattatatctatcatataataggaagtcaacagataatgtctaaaacaaataactcaggatataccaatataagggcttacctgataactcagctggtaagaatccacctacaaggcaggagatcctggttcaattcctgggttgggaagatcccctggaggagggcatgacaacccactccactattcttgcctggagaatccccatgtattgaggaacctggcaggctacagtccttggggttgcaaagagttggacatgactgagctctgagtaagcacagcacagcacacatagcagtataagcaaatcatttaagaa

SEQ ID NO: 25004 - DNA, 1738 bp, Bovine  19866881116200
  misc_feature (1)..(1): n is a, c, g, or t
nttaaaatattttattatttcctaatcatcccttattagaaaagttgaactaagaccatgctatcacatggtgtttataaattgtctgcttaactgtaccctttggttagcattaagctatcacttttctgtcacattttattttctgaattattataatgcatatttatggtgaaaactatccctatttatataagaattaagtctataatttatcagtctagagcagatctggtatgctagtgtggaataccatcttaaagcatagcttctttgtttcaatactgttgatttctgtaaaggaaaactctcaatctaagatttcccaggtggatgaacatggcaaaacattcgagcagctagagaaagacaacaagcaagaaacattactgaatattcagcagaattttcagactgttacaactcaaagattagaggagaaaattcagaaacttcagaaacagctcagtgacttgaaattgtcaaataaaaatatgaaaactcaactgacaagagtaaatgtccttaaagtaagtaaaggatgtgaggctttcaaaaattcacttaagctttgttctgttactgtttttgctgtatgtttctcattgaacttaaaaaattattttacacccataaaaataatatatataatattaaacatataggataataaagttagatgttgtaaatccaccactcatcttaagaatcagagtatctttggatcttcgctatatcaagcttcagttgtagtatttcaaaagtacattttatgcctgaaaccaaagatgcactagatacttattggtcaactttttttgcccgtttatcaagaatatttaatcttactgtatccagttattctctatttctgtgtttgattaccacagactaagactctcgaggacatggaacatgtgttaaacctctttaaatcccaaatgcctagttaataaaagttctcattaactattggttattgatgaacatagtggagaaatgtcctcttaattcataaattgtggaattttctttttctacattatctagctcgtaaaagaaagaaagagagaggaagaaagtaaaaagcatgagttatcatgcatcatgcctgtctgttacttagaagagatctaatcatagtcttctccctttcccacaacctctaccctcataggacaaaacaattgagaagctcagggaatctctaacaaaagttgaagcaatgaaagggaaggcagttatggaaacagacctgaaaactacagtagactctgatgagcaagaagcaagatgggataaaaagaagatccatcaagtgttagaaactgccactcctgagctcagcacagcaaagagcacacttgaagaagtaccgggaaaacaagaaaaggtttgttttctttgaatactatattaaaattctttaagttgaagtgataaacaccaacctcaatttagactaccctaacttagacaacggagaaggcaatggcaccccactccagtactcttgcctggaaaatcccatggacggaggagcctggtgggctgcagtccacgtggtctcgaagagtcagacacaactgagcgacttcactttcacttttcactttcatgcattggagaaggaaatggcaacccactccactgttcttgcctggagaatcccagggacgagggatcctgatgggctgctgtctatggggtcgcacagagttggacacgactgaagtga

SEQ ID NO: 25005 - DNA, 771 bp, Bovine  19866881147209
  misc_feature (1)..(1): n is a, c, g, or t
naggacccattctaaatttcttaaaatgtggtggtagtttttgaagctggacggacatgagagaccaccaccaactcccttcatttacaaggggagaaatgggcttagaggagcttagccaagtctcacagtagttaagtggaagataagaaatgaggacagtggcttctactttatctggggctattccattacccacaccacccgaaggtgagttacatgctacattgttttattttgtttacacataaagagtcatttttctttcttaattctaacagtctgtaggtagtatctagactttatttaaatgtcagaaatgggttccccaactcctcgattacttgcatctgccactcttttcttaccctaacaggaacagcagctctcagaacagtcccatcagggtttgggaataatgctgacaacagaacatgctatcttaagtcatcagtcatactcgtttgtaaaacctggctatcaacttcattgatatttcattaaaagcaccaccatttctttcattaatcctactgaagcaatttcattttacaataataagaaagaggaacaggtggggacagtgactattcaacaggcaggattggaattagagaatctgaggaccagagacagtgggatataacacatctagccaatagagcaaacaggaactctgagctcctccaatgattataaagtcaaatacctaataatgaaatcctccaagtatagtaatagtattactgactaaacgcttgccatgtgtta

SEQ ID NO: 25006 - DNA, 1056 bp, Bovine  19866881167052
  misc_feature (1)..(1): n is a, c, g, or t
ntttttttaaagctgccagttgagtatataatcagtgagttgaaagtaaaattacattcctcattttaaaaacccatctgttgaattagtaaatgttgggtttgaagaaatagctttgataagggttttttagaagtagatggctggtgtgacttttaaaaacaggtggtttgggttgtattttttaagctcaattttttacttttttaatcatctttattatttataaaaccaaataagacttttttctttatttgagaagcccccacttgcttaatacatgtagactacactagcattgtaagttgagttgcaaaatcatgttcaactctttgcgacctcatggactgcagcatgccagccttccctgtccttcactgtctcccagggtttgctcaaattcatattcattgagtcagtgatgctatccaaccatctcatcatttgtcatcctcgtctccttttgccttcagtctttccagcatcagggtctattctagtaagtcagctctttacatcaggtagccaaagtattagaacttcagcttcagcatcagtccttccagtgactattcaggttgattttccttgactggtttgatctccctatagtccaagggactctcaagagtcttctccaacaccacagttcaaaagcgtcagttctttggcactcagcctcctttatggtccaactgtcacatccgtacatgactactggaaaaaccatagctttgactagacagacctttgttggcaaagtgatatctctgctttttaacatgctgtctagatttgtcatcgcttttcttccaagaagcaagtgtcttctaatttcatggttgcagtcaccatctgcagtgattttggagcccaaaaaaataaagtctgtcactgtttccacttttgccccttctatttgccatgaagtgatgggactggatgccatgatcttagttttttgaatggttgaattttaagccagctttttcactctccttcctccagcctggcatttcacatgatgtgctctatatatgagcttcccttgtagtt

SEQ ID NO: 25007 - DNA, 1154 bp, Bovine  19866881199349
  misc_feature (1)..(1): n is a, c, g, or t
nagacatttcaataaacttcagaagagccgtgccctgcagttaactgacttactcttaagcagaggtcctcccattgtctgtgcaaatgctctatttgctccttcaaaaccatcacgtcgtccaccagaatgtgctgggttaggtcggtcttcattgtgtgaagttctttcaagttctgagtccagttagctaaagacttctctagttcctgcatttaaacacaagaaagaaagagggggaaaaaagaaagaaaactcttcaactcaagctgctgttgtttccaaacctgtagaggctaatcctttgattggaccctgggggaggggaggccaggaaagggggtgggactttctgaatgagaaacagcccagggccggcctctgcagctgtggttggccaattcctcagcacctattttctcaaagcagaactcttttctacctttattttcacttcctcaggtatttcagacttttctatacttaactctatgttaaagtcaagtaagtctttacctttatttaggggaaagtaaagtatttttggagtctcacaacaatctctctcacctacatacatgtaattctgaaactgtgttacagaatgttgtataaaatatgatttccctacttttaaaaacaccttaagaaatgcattgttgctacgtggcaatcacataatgacagcttctgttaagcgaatcattttggttaactttcaaaaagaataaatataattgaagggaaaaaaaaaaaaattgttccctaatgattgccagagatgggttagcagaaaatgtcctctggctctggaaacaattttttctttttaaatgaagtattggtcaaattaaaacattttttgaattctaggacttaatctagataattactttcacgagagagagggtaaaatgaaacagctcaaacattcaagagacctccagatttttattgtgcttctcgtattctgtattttggcacatttgaagggtctctattcatacctgtctattgaaatctgaaagaagagagtatttcatttacatcagtaacctgcctgaggggtggcaacagtaaaaatgggttaattctgattgattttcagagttctaaaggctacactggcatgaacttgccaacaaggatttacg

SEQ ID NO: 25008 - DNA, 1318 bp, Bovine  19866881222665
  misc_feature (1)..(1): n is a, c, g, or t
natgctagatgtttctgaagaatgttctgtcacccattttcagaaagacaccccaacccagtgaagaatttggtttcaggtcctaatttattgcttatgctctaatttgatattttatcagaagtttggattctgtttggaatggagatgaaattggatgaaacaatatgtttgaagtttatttcaaccaatacaccttctggtttgctctaaaattaaggatatgtgaaaaatcagccactctgaatttctgtttcagccagctatcaccttacctgaactgtcacattatctgtttgatgttggtcagtaaggaaggggcaggtagtggagagagtgttcacagtatgtgatgggtgaccttatggagagccttcagaggaagtattgcatctgactcaggagctgcagaaaaaacaatttatctagtggtgggcataccaattgtaagttctacaaataaacatcttccttggacttccctggtggtccactgattgagaatttgcctgccaatgcagggagcatgggttctgatccttggtctgagaggattccacatgccacagggaaaataagcccaagcgctgcaactactgagtccgtgtgctgtaaatactgaaccctacttgccttagagcccacgctctgcatcaagagaagccgctgcagagagaaacccatgcaatgcaactacagagtaaccccccacttgctgcaactagagaaagcctatgcacagcagtgaagacccagtacaaccaaaaattaattaattaatttttaaaagtctgtttcttatttagaagataatcggcattactgtgcagcacccttgtatgcttggaggtacattagagtgaacccttagagaaggcatatccagtggagaaaaggccatgggtgcttccttcaatgcctctaatattttctagttatcttccttttaagatgccagttcctgagtcacattctaccaaatggctcctttctattttccgtctgaacaagcaaaattcatgtgtgaaaatctctgttgttcaagtgatgaatttagtatgttttcatcacaattaagaaatcgcctttgagaccttattcctatgactgaataataagttgattagaaaaactgtactaaatccttggggaaagtgaagccccaatgatgctgatgaacactcagattttatagcagtgccttcttttttaaaaaatagaaccaagagaaagatttggaatagtatagaattttagtactcttgcctggaaaatcccatggatggaggagcctggtaggctgcagtccatggggtcg

SEQ ID NO: 25009 - DNA, 800 bp, Bovine  19866881234571
  misc_feature (1)..(1): n is a, c, g, or t
ntgttggtttgctctccctgattagacggtaagtttgtatttattccctcagtcatcttaatacgctgaataaatagtttgcaagaattacctgattgacttcttggatagggttcttttgattgattgccaagaaaaattctacttgccaagaaaacacatgagctgtttggataaatcagaactttgaagtttataatctatacaatggtgtccaggtcttacatgtagtaaggtaggtaatgtgatagaaataatctatacctgtagttgagttttatttggaagaaaaaattggaaataacttaaactcctgggctttttacccagatttcatttcctagtgatgaacttgtattcaaagcttggactcaggatcctggcatgtgactttggtattgcatgctaaatcagaacttcaaagagtttttctgttttgttttgcttttaaaaacagggcaatgcccttcttagtaaagtagaatctttttgtttgcttgtttgagttgtattggggttctcccaatattttctccttgcattctgcttttaataagggctttcagagccctcatgcagttctcaccggttcattatttaatacctaagaggatagagactatgattgttgtatcatttgcagatactttctccattccgtaggtcatctttttgattggttgatggtttccttcactttgcaaaacctcttaagtttaaaaggttttgcaaagtggtctcatttgtttattttggcctttgtttcctttgccttaggagacagatccaaaaagatatta

SEQ ID NO: 25010 - DNA, 831 bp, Bovine  19866881305032
  misc_feature (1)..(1): n is a, c, g, or t
naattccaatgtagctctcaggaaacctcttacaggaacctcttggcagatcttgggtcttgattttggttcctatgattctactaccattcatggtgccatctttgatttttcagtctgtttgaaagccatgagtctctctgttccagaaacgtgtaattcccaataaggctctccactcaaagtagacacctggtggggttggggaggggtaaaatgtaagtctggacaggtgccccttgatgacccagtggcagcctggggccccctacagcacaacaaaggggaggtccagttcctctaacctgtttcagttcaggcgttggtggtttaactttgtttcctttgttttaggagtttagaatggaaatggactataaacaatggatagttgactttgtaaaccagtcattacttcaggttaagcacctgtgatgtagaaagtaagcgctatgagagaacagagtttgcagagcacctgggagagatgaaccgccaagtggcagcaggtccacggagccctgaacggcaaggtgaactcatggtcacatgtgtgatttggccttcgcaaaattccactttctgaaaaatttacaaagacatttatgagtctttcctagtggtccagtggttatgagtcggtgcttccactgcaaggagtgcagatccagtcccttgtcagggaattaaaatcttgcatgctgcacagagtggccaaaaataaataaataaatggacatttgtgtggttaacttacagtcaaacctaataatcatctcaattctagccccttttaaatccagagcttcattctccatgggcatttaagag

SEQ ID NO: 25011 - DNA, 952 bp, Bovine  19866881375430
  misc_feature (1)..(1): n is a, c, g, or t
naatgcatagatcatccccattaaaagtcaaaccccagtgatccacaatggcaaatgagctatttgctatatccaagtatttttgataatttaactgacactgcactagatagaaaactggtgtaaaacagactaagcttttccctcccttttgacatataaaatacttggatgtaactgaaccttgccttggtgacaaagaaactcatatgaatactaattatttgactactgagaatataatagccttcaaagactaagctaattaataatttgaaatttgtgaatctgaatcagtagaatgtagattccgagcctcagtttcatctgatgtcaaatgggtagatgtgctggaatatgtaaagaaaaaacaatagcactctcattctagaaatgaggaaatcaaggcccagaagtcgcgtgatgtgcccaaattcagcctcaaggggagacagtgggaagctcagcctttagaactcaacaaaacttaagttccacttaagtttctggctagtgtaacccggttttaagatttaacctccttcagtagcagtttcctcatcagcttctcttatggctgctgtgacaattcaataaaataacatactttgtaaatataatactgctaactgctgctgctaagtcgcttcagtcgtgtccgactctgtgcgaccccatagatggcagcccaccaggctcccccgtccctgggattcttcaggcaagaacacttggagtcggttgccatttccttctccaaaatataatactcaccttgcttaaaacagcattaacaaattcagcaaaatttagtaaatgaatggttaatagatcccagaatgatacctggacttaagagccatctgaagctctctttctttctcctttaatttggctcttgccttaactataaaaggcttcttaatgtcactctcaagctcttctaacttca

SEQ ID NO: 25012 - DNA, 1590 bp, Bovine  19866881388784
  misc_feature (1)..(1): n is a, c, g, or t
nctttctagaaaaaggaacagcatgaacattgcctcatgtatctctttgccctccaggcttcataacaaatatattccaagagatctgatcaagcaaaacctttgttactgatatcagatctattaagagtcgccttgtcgggatcgctggtgtctgaaagtggataggtgagtttacacccatccacgtagtgcaaatgaacactggttaccatggagaactagctgtagccatcagggtgtacatctctataatcagtgaccacatcaagtctgggtgggaacagtggggaaaaggggagagcaaaggagaagagaaggggagagggggagagcataaacacatgcctgtcccttgagaaggctctgaagaaagcaggttcaatgcagggtggagagagggccagggcttatcacagaggaagggagaacccacaagggagcacctgcagacaccaagaacacaccgggctagttcctaattttgctacagcatatttcctttggaaaggacatggcagaggtatgattgatttataaatttaatatgctgaggtttactgtaaccaaatattcacagaactctgattagaacttgtcctcagaaataagatatttcttcctttaaaagttgaatgagaagacattatttttaaaaagttatctacatttttcatattctcttttacccatcaaaaacttctttaaaaaagaagaaaaataaaattagtgtgtaatatggctttctcaaagttttatgatacttcaaaagtaataaatttcaatgtcaaatatgctataacttagtgcttgggttgttgtgtaaagttatgccccctcatgcttctccctgtactacctctgccctccgtagccatgattatcattaaaactatctgagttcaatccctggttggggaagtaagaacccacaagccacctagcacaaaatatatacgtgtgtgtatgtataacaaattgaatgcgaataatccatcatgttaccttgcacttaaagtttaagaatgttcaactaaagtccacatttagattcctgtcaatctttataaaatgttatttagttcactgtttaaaaatttgtagcaaagtttatcttttcacctgtctagcatttcatcaagctgtaataccaatggttacttttatcttggacataatttgtcatgaacactaagctgtgatttcagttcaagataggaaggatctaacttgaaattaaaattcctttttgaaactcaaatcacttcatcaagaaggaagtgatttaagttaaatattttccaaagacagtcatgaagtgaattctcccccacaacacagatctaaaagctcaactttttagtaaggactagaatatcagaatagatatcctagaattcagaacatcagatgttttaggtgctctatgtgataatgaagaccttgtataacatatatctttcttctcactaaatcataaagcaatctgaatatcggccataatgtaattcagaatgaagactggatttacctgttcacaggtaaggtgtgttctaatgatctggtttcacgccaaggactcttttgagg

SEQ ID NO: 25013 - DNA, 1413 bp, Bovine  19866881418350
  misc_feature (1)..(1): n is a, c, g, or t
ncccctctcgcgccactccctgtctcctgggacccaccgtttaatgaaccgtcagcctgtttgcgtcctccgtgtccaggaactctgtgcctgtgttcatgcagattggctgcttggaaacctggggcgccaggtcacgtgattgttgctatgcctgtggaggtgccttcttcgtttctttttgtttttacttcttctgcccttatatatttgtttttcttttaactgggggaaatgctataagtttgtaggtctttacaagtccaaatctgaatattttggactcctagtttttcactgccggattatcttggattttttcatagggtgccacacctcccatcaaggctgcagctactggcctttcggacgagcaaggagcttttgaggccacggtggagaaagtgaggcccgagcctgcagaagtcctccatgtctgcaagaatcaggtggctgagctggagctgtggctgcaccaagccaacgtggcatttgagccagaaacattagacgcagacatgcaacaggtggtggaacagcagttggtagggtgccaggtaaggctgctgggtctgagttcgtggcctgtctcttcagcagttacgagaagatgaatttctctgaaagcaacagtctgattcttcctgttgctctgacacctatgtttattttggcctcaactttttgttctcaggataattctttgaaataatttatgtaagcagagtatttggggagacagtagtggagaagatctcagaatctagagtttagatctggtcacattaactatgaactggagggagttacctctcacttcattttcctcagataggtcaactcctaagactttgttaggattaaatgagataaagtatctaaatcagtgtctggagtataaagtatatataaagtgctcagcagatactagttttattcataatattcagtttttaaaattttcattcatcagaaatgaaactgaatatcctgattggcagggttacagatacagcagaaaagggctttgctgtcattttactatgaatgctccttctcttgctggcttggtggcgctagcagtgaagaacccacctgccattgcaggagacgcgggagtcgtgggtttgatccctgggttgggaggatcctctgcaggcggaaatggcaacccactccagtattcttgcctggaaaattccatggacagagaagcctggttggctataggacacagtgtcacagagagtcagacaggactgaacacacgcacccttggctagggaggggcaggaatgtaaacttccttgcctggagtcattttgaggaagctttgctggcacagcccaaaggttgggatctctggatccctccagggaggggcgagactgacattgctggagcaaaactgag

SEQ ID NO: 25014 - DNA, 1040 bp, Bovine  19866881422607
  misc_feature (1)..(1): n is a, c, g, or t
ncaaaggggaatgcataaggggagagaaattaggagcttgggattaacatatacccaatactgtatacgaaacagataaacaacagggacctactgtatggcacaaggaactagactctctaccctgtaataatctataatggaatagaatctgaaaaagaatatatatgtatatagacacacaaatacatatatctatgtatacttaatgactgttgtacacttaaaactaatacagtattgtaaatcaactatacttcaataaaaatatttaaaaattctaaacaaacaaaaaaataaatttagctggattccagataggcaaaagaaaatagatcgataataatgaatattcagtttaaaatgaatattatcattttcttattaagtaatatagtttctccatcccctggaggggtttaaggagatataattcacattgaacattgtattagtttaaggtgtataacataatgatttaatacattactgtaattttagttaacatccatcacctcacatagttctttttttcttgtgatgagaacttttaaaaagctactctcttagcaacattcaaatatacaatacagtataacatagttttgaacctaaattactcagaaggtgcatttctattgataaagttctttgaactcattgtaaaagtagctgaatcaatgatttacatgtgtgcttagtcgttcagtcatgtccaagtctttgtgattccatggattgtagctcaccaggctcctcgatttatgcaattctccaggcaagaatactggagtgggtagccatttccttctccaggggatcttcctgaccccgggattgaacatgggtttcctgcattgcaggcagattctgaacaactgaacaaccagagaagcccgaatcaatgatttaccacaattcactatgataaattatctgctgaaggtagaacgaccaaggccaagactgtgtattgtatttcccttccactttaaggaaagttccattagaagtgacagcaacatttcccctttatagaa

SEQ ID NO: 25015 - DNA, 841 bp, Bovine  19866881604085
  misc_feature (1)..(1): n is a, c, g, or t
ngtagactggaagaaaatatatataaaatatagagctataagcctattgagaaataacaagtaactacaatgtatatcctgaatgggattccgtaacagatgaaaaaggacattaggtggaaattaaactttagttaataatgtactattagtcccttatgacaaatgtactatattaatatattaataactggggaaactgggcatgcatacactggaattctctgtatcattattactacctttttaataattttgtaaatctaaaattgttctaaaattaaaagattattttaaaatgtgttttaagaaaccctttaacagtagacattcaattatattactttattctctctctcttcatatactcacacacatatttaatactcaataacatttagcaaaaacaatctctgtggtaggtgctttatataaagccttgcaacaatcctgccaagtcagtgaggtttttcccaattcatcaataaaactcctaggagctaagcaacttgctcaagttcattcattagctgctggatccaggtctgtctgccaccaaagcctacccatattttctatgaaactctacatgtgtatatattaatatcaggatcaatgtcaggatcataagccccagacatacatgcatgttcttacctcccacttggcacaaatgtctctactcttttcttccaaagacagctttacgtcatcagttacattatttttcagttcttcaacagctttcaaatacttggccagacttttagtattagaaattatcagtgcttcctaaaaaaacaaacaaacaaaaaccactaacaagagaataaagccttat

SEQ ID NO: 25016 - DNA, 1097 bp, Bovine  19866881842582
  misc_feature (1)..(1): n is a, c, g, or t
nggagagaagccctagagatattctaagggtttatttttttccctgtttcagaatttttgacatacatttgcaactttccctgtcctgctttggcagctcaaggttgctgcagatacatatgtaatgctcttttgtctagttatatggagagctttcagggctgtgttttctcaactctcacctaggcatgtcatacatatatattcctgctatgattgccaagtggagtaaattagttaaaaccctatagttgatttactatcttagatgcttgattttttttttttttcccttaaggtgccagacatactttctgcagtctaagaaatttgggagactatttgtgcttttcatggtggatcccagattgtgaccaaaaaaaaaaaaagcaataactcttttgaatggatggggggttttgtcatgtcttattcttcatacttggcatcaggtcacagaggtgcaatattgtctggaagaaatttaaaaaacaaagcaaacaaaaagataattttcttagaaaagtcctgtatcgtgtagtagaaaagacgaggagggaaatgccttcagagcttcaactttagtctagtctacattctgaagaagagaccagtagaccattcttaaccatttgcaagagcttttgaatactctaaattatgatcaccatagatataaacttcccctaaagtatgataaagtttaactcagtatttcagttaatccttcctaagcttaatgactctataaaacatgggactaaattaatttctaaagctattaagctgaattccaccaccacaaatgtcaagcttacaccgtgtcattagtacagaaacattaaccattagttcatctgaaactcttaaaaccaaagcaacagtgaagactgatgctgagatctgtgtccttggagagctaaagtaacaaactgtgttccagaacagtctggtttcatctctgttgacacgtgtttcagcctgtagtcctctcagcccttctttagctcaggggaaaacatgacttagactggatcaggttccccgaaggctcagttgtaaagaatccgcctgctaatgctggagacttgggttca

SEQ ID NO: 25017 - DNA, 2442 bp, Bovine  19866880527759
  misc_feature (1)..(1): n is a, c, g, or t
ntgcaggataaaggaagcttggggctggtgcactgggatgacccggagggatggtgtggggatggaggtgggaggggggttcaggattgggaacacgtgtacacccgtggcagacgcatgttgatgtatggcaaaaccgatacaatattgtaaagtaaaaaataataataaaaaagaataaaaagaataatctcaaaataatccttattccagagatatgtttggggtggcatatactactaccctaagtaaatgcatagtatttgtaaaggcattcctgaaacatactgtggcttcagttccagaccagtgcaataaactacatatctcaaaagtgagtcacatgaaatgcttagttttctagtgcacataaaagttatatttatgctacactctagtctattaagtgtgcaataacattaagttcagtcagttcagttgttcagttgtgtctgactctttgcaactccatggacttcagcatgccaggctttcctgtccatcataccaagctccatcctggagcttgctcaaactcaggtccatcaagtaggtgatgccataaatttatgtcttaaaaaaaaagtgaatgacaatttaaaaatacaaaaattttataaaagtaacataaatcacagactaccataacaaagataataataaggaaaatgcttgaaatactacaaaaattaccaaaattttggctcttctgtccatggaattttccaggcaagaatactggattgggttaccatttcctcctccagtggatcttcctggcccaagaatcaaacccaggtctcccacatcacgggaagattctttactgtctgagccaccagggaaataactataattgtatgtgtatatttatttaaagtgagggaaagagaatattttaaaataataagtctacggttcaatcacgcacaggcttcactgagaatgttatatagtatactacctgattggtagggtagagtgaggaaagagttaaacctggttgatgaggatgaaaagttgtagaaccaaagatgaataatcagatgtctgatatctggtggaggcagcctctatattgtatctattatgagtgacacagatgcagaaaactgtattcctcataccactacacttacataccgcgtaattttctttccagaaatcctcggctgcatagcctgaaggtattcaataaaacctagagggaacactgaaagtgaatcatacagatttgacatttccagttctgctgtgaccgccaggccaaaatatagtctgcgggcccctttttcattagtgagaaactgccaggttttaaaacagtttatccattgaattaatctctaaaccgcctttcacacagggcagaaacagctctctgcactgctcttcttcttcacaaacactcttatttttatttgtatgcattctgagtaatgaataacgatcctttgtgtttggagaatgccattttctaaaatagctcctagcattttctaaatgttaactcattagatctcatatggtccagagtcatctatcacacagaggtaggtcaaaagcattatatttcacattttacagatggaagagttttagggacttcaaacccaaggtcacctgcagtcagacaccaaacaggggaagacaaggcccagaaatattaccctggagtcagacaaatctcagttggcactctgagagagccaagctggctgctgaggtcacataaagacactgatatttgcattcttctcagagatcaagctttggatggagctgggtcatatgcggctaattacactgctggctcctactcactttatttggcaaagtgtgattaaaatgcttattaaaacatatcctccagttttgtttctcatttgttcagtcatgtacaactctttgcaaccccatggactgtagcccaccaggctcctctgtccatggaattttccatacaacaatactggagtgcgttgtgatttcctactccaggagatattcccaacccagaggtcaaacccagtttcctttgtctcctatattggcaggtggattctttaccagtgagccacctgggaagccagtttcattacatcacagggaactcaattcaggtccatgtaattctgctctgggcactttgctgaggtttcctaaaagtatatagttctatttctcacattacttctctttccgggaagagacagcactcctcagtcatcctccagcctcaggacactgaactctgctttgtgatttctagttcccaccttgaagccctttctttttttccatgaagcaagaagtccaaacagtaacacactgcatggattgctgtgcagttttcctggctccgtgtccctttttcctcattgttaccaccctaggcttgcatcttacaaataaaaagccagttctttaattttgcctcag

SEQ ID NO: 25018 - DNA, 2591 bp, Bovine  19866880791130
  misc_feature (1)..(1): n is a, c, g, or t
ntgtcctttggttaaatgtatccctttaggtaatgctaagacctccaatattcactctgccctttttctacctggagagggggattctttgtgtgggaagagcttactgtgagctcctggtggtgggagggagcttgcagttccttggagctcttgcacacttctctttgtgctaactgttccttcctgctttggtcactgaccctatggtgggtatattgctgttgcttgcttggtgaattcaggttgacctcccaggtgcacctgtatgccagagacctagccgtgtctcccatctccccctgacaacccttcacccaggtaagccaaccagcaaccccagtgacctgccttccacatgcctgcacaagatgtaacaaattgtggttgcttacaacacaaagtggtaattctggtgtggccaaggaacaggaaatagaaagcagaaagctttcatgagcacctttgtataagagtgagattggttaaagatcttgaggaccttatatatttttaaaaagtttattgagagaagcagcaaaactcccttggactaaagagattcaaaaaataataaaggcctttttattcagtggggtcaggtaaattttttattctatttggaaataaagcaagtgtgtgaattcccaactccttttaatctgtcactcatatatatcactcatatatatcaaggggctgggacccaaaagtggattatataatgagtgagttggaagactttcttgacagaagtgtgccttaaattacatattgttcatctggtttttaaaatatggagttctatttttttgtggttgtcaaatatgtcttggaaaggctgtaatttctcagtaaggatcagaaaaagttttctgctgaacaaagttgaaggtacgcttttggtgctctgtgtattgctatttgatcagtgaggtttgtttgtgtttcattaatcattattgcttgagggtgaataataatcatcatagcgataacaatattctgtcactctgatcttgttgcataagatgtgccaggaggtagatggacaaactgaaacctgatgtttctggctccattttgcacctggatggaagagatggaatctgcacattgtgatttcagatgctcatggaggcaaggtgtgttcacactacagggataacttgagatctggattgtcttttcatggggacacattgagcaggaaataaaggaaagcagatttcctcatacagggtaacacagagcatcatttattatgtactgactaagaatatcagaacttccctggtagctcagatggtaaagaatctgcttgcaatgcaggagacttgggttcaatccttgggtgaggaagatcccctggagaagggaatggcaatctactctggaattctttcctggagaatcctatggacagaggagcctggcaggctatggtccgtggtatcccaaagtccatgggacacaactgagctattcacacattttacctcctttataccaagtagtatttataactgatttgagaaatcttgaattcttctgaagttagggaatctttacatcaatgttatttagccacattatcgtgataacaccatgaatttgaggtaattaaaacattttttcaaaaaattttttttagctttttacttaaaggtgattgttaaagtaaacagagtcaaactctgaagatagtctttgctaactgatactgtgttcttgggctgtgtgctggggcacttcttctagagaagcattagataagaattgtatattctaacactgaattactagtgaaagcaaaatatatttttttgagagactgaaagagggtgaagatgataattgttgaatgagaattgtcaatgaaaaagtcactgttaataatattaaataaaacaagcagaaaattttttcccttcttttattgaagtatggttgtattaattactgttgttctgttgctcagttgtgtccgactctttgtgacctcatgggacagcaatacgctaagcttctctatcatctccccagagcttgctcaaactcatgtccactaagtcagtgatgctatccaaccatctcatcctttgtcatccccttttcctcctgtcttcaatctttcccagcatcagggtcctttccagtggatcctttcatatcaggtgtccaaagtagtggagcttcagcttcagcatcagtccctccaatgaatattcaggattggtttcctttaggattgactgatttgacctccttgaggtccaagggactctcaagagtcttctacaacaccacagttcaaaagcatcaattcttctgcacatcaacccttcttcagggtccaactctcacatccatacgtgactattggaaaaaccataagtgagtgagtgaaagtgaagtcgctcagtcgtgtccggctctttgcaaccccatggactgtagcctaccaggctcctctgtccatgagatttttccaggcaatagtactggagtggatggattgccatttccttctccaggggaccttcctgatccagggatcgaacccgggtctcccgcattgtagacagatg

SEQ ID NO: 25019 - DNA, 1958 bp, Bovine  19866880848885
  misc_feature (1)..(1): n is a, c, g, or t
ntcctattttttaaataatttttaagtatattttggcctgccctgtagcatgtgagactttaaatccttgaccagatccctgaccaggaccctgcagtggaagctcagaatctcaaccactggagcaccagaaaagtccccagaatgtactctctatagcaaccagtgaggtccttatcgcagagaccaacctattgcaaaataggaatttattaacaataattctgcagatatttctttgcaggggattgccgcagtcataccattttggggcatgcttcatgccattagctcttccttgatatttgttgtgtctattagcttattagatatcctgtagtgaggaaatatgttttactttatttaggtctggttttgcacaagagaattgtagctacagaaatgttaatttttcctcttgcaaaatgtagtaaaattctatgaaattagatttccttcaaacacatttttaaggaaatagttacctaaaatattttactaggctcataaccagtttttctgtctctcttctaccttatctgatcattcttttacacaattgtcaagattatcttcctcagagaattatcagatgatgcaggctctatttttttgttggaatatcaaataaaacattttcaaacaaacaacccggcctataattttacaatgaattctaacacattttcagagccttttcatttagttttattttctgtcaaagttgcttccacagctttatgtccttctgttttttgtttgtttgtttgcttttaccatgtgtgtgtgggggggaggggtggtgtgctcagccgtgaatgactttttgtgaaccatagactgtagtttgccaggctcctctatccataggatttcccaggcatgaatcctatggattcatttcccagggaatcccatggatgtcccaggcaagaatactggagtaggttgccatttccttctccaggggatcctttctctcaaagtcaccacagggcacatatccttaatgtctgtgtctagaatatcccttttctcttcctatgcctccatgtttattaaaagttaaagggagaaaaaagggatgcttcggggtaagctggtggcctaatttaatctgaggagacttttggaaacaaatgaaataagatattattttcttaaaagttggctaaatgcagttttaactgggcgatttagtaagacacaggattttgcttgaattgtacgttatactgccaaaaaatagattggaaatgtcagtggcttgtttaaatgtaaattctccatgtgtttggtaaaacatattggcttcaaagtaatagtgtacttttgacttgatatatatcgactcatacctagtagggacttattgattgtttttagtaaatattctgtgaaatgttttctcatttagctaaaaataaagctcagctttcagcaagattttttttttcccctgttcaagtggaaaaatttgttgatcatagtgcctgttcttaaagtagatctgaaactatttgcttaatgggtgcaaaatccagagacctgagtgaaaaaacatttttttttaagataataatgctaatttagaaaataacattttcctaccacgtttatacacataaaatgtagttagtattattccaactatataaaacttgaaaataaaaatgatgtaaaaagattagaatatatacataaaattaatattaatcaggaatattctctaattagtttccaatttataaataaacattttaccaagatcatgttttagtcccaaagatgtgtttgcattgagaactttcatttcactgtttctcctcatgcaatttgaaaacattctttaactttcattcatgttgtatcacttactaaaatgttacattttctacagtgaaataaagcttaatttttttcagatttatgtagcaataattactctgtttctgaca

SEQ ID NO: 25020 - DNA, 717 bp, Bovine  19866880886828
  misc_feature (1)..(1): n is a, c, g, or t
ncaggtatacctgtgttccccatcatgtaccctcccttccctcctccctccccataccctccctctgggtcgtcccagtgcaccagccccaagcatccagtatcatgcatcgaacctggactggcaactcaagaaactgcattttaaaatgacgtccaggtcatctgagtacatgtttggcaaccctggtctctattcacacagccctgaaaagggccatatttactcagtagggagttggtcctggtatccagggatgaacagattggagaaaggtttcataagcaaaggagaaataatggttaagctagatgactccagaaagattttcttgcccatttcccagacaacgtgcatgttggagtgaggaatagtcttgaggaagagcagaactttatgcttcagtgaagatacatttagaaaaagtgtcaagtgagaactaagtttatcagctttaaggcaagtctgagacagttatggtgtactagggttagtatagagaagataactttaaaaaagaagcctatcttgtctcactcacatataccttatatatgtttacttcactgacagatatgaaaagtgatgatgccttttcactatacttactaaatgtgattcccactagttttggttatcatttgattatattttggttaaaatcttattgaacaaaatcaataacagaagcataaggaaaaaaaatccttaagcaag

SEQ ID NO: 25021 - DNA, 1419 bp, Bovine  19866881088482
  misc_feature (1)..(1): n is a, c, g, or t
nctgcagtgattttggagccccccaaaataaagtctgacactgtttccactgtttcctcatcttaagatatatcaacgaataggacagtacatggtctgcataaacagcctgacaactcttttgattgactcacaatctggatactgcaggaggcataaaaggatccctaaatgaataggtggtcagcagaaaggtatacctggttatgagaaggaggaaaaagttacccaaaccaaaaatacagagaaatgcatttcaaaaagctgcaatgaatatgaaaagggaagaagacaggggcagatgctcatgattgagcctgatgcaaataattcctgatatggaaaatcagactatttccctctctgatgtttagaaatagagatatatatttccttagttaggcaggagaatgctagtcaatcatttgtcattctctagtcatcgacaaagatcagagaaaaataaaacaactcttgtgtaggttattctatgaaaaaacctcccagctcatatcccactagacaaaaagtatttctctaagtatcctcatgctccattgaaagctgttaccaaggacattggaagagaaaaaacttgtaccatttgatgagatccactgggcataggagcacaatcaaatttgaactttgttgtgtagcatttttgaagaatgtgattcctaaagacagccatacacaatttaatgaaccaaatatgtgtccttcaagtacctcatctgaaagctagtattttatcttcttgactctgataagatccccttccttgggtcatgatcaattagtttcaggaaggaaatctttccttgtattgaatagcagcatgaaatgcctgccatcattcaaacattatttttttatgtatcagatcaatacttgtaacaggaaagggcatgttagggtaactgctttgagggaaagagtgagtgaagatctgggaaaaagagatcataaactcttcttttctccttctctgctgcttacctgacaggtgtctgcagggaaaatgctaaatcccacttgccttttggtgactcctggtgagtcacagataatggaccatgctctttaccattcttttattactagacttgttaaacatgtcagagtacttctggacacacagtattttctacacacttctcttattattggagaacatgaggcatagaggattccagcataccaaattctgagcttatattttaaggcaaaaatatgccaaagtttcttaaagacaagatatcttttatttcctggaaaatatgaaacaaaggctgaatccatttgaggagagaagtattgctgtctatgtgtatgcatattttcagtagaggaggagttggaatgtcttcaccttttagtctgacctcagagataaagaaattctacaacatggaa

SEQ ID NO: 25022 - DNA, 3836 bp, Bovine  19866881170352
  misc_feature (1)..(1): n is a, c, g, or t
ntttggcattgcttttctttgggattgggatgaaaactgaccttttccagtcctgtggtcactgctgagttctccaaatttgctggcatattgagggcagcactttcacagcatcatctttcaggatttgaaagagctcaactggaattccatcacctatgctagctttgtttgtagtgatgcttgacctcacattccaggatgtctggctctaggtgagtgattacaccatcgtgattatctgggtcatgaagatcttttttgtacagttcttctgtgtattcttgccacctcttctcaatatcttctgcttctgttaggtccataccatttctgtcctttatcgagcccatctttgcatgaaatgttcccttggtatcttatatgttatcaggggaattcaaattaaacaacatgaaactattacttattagtaatatttaatttattatttattatctaataaataacacttagtagaataatctaaatctggcacaatgataacaccaaatatccatgaagatgtggtacaataggaactttcatacattgctgatgggaatgtagactcatacacatagttttgaaaatagtttgacatttcttataagacaaattatcttcctaccatgtaatacagcaattgcatttctttggtgtttaatcaaggagttgaaaatttgtgtttacacaaaactccaagcaaaaatgttgataacagctatatttttaattgccaaaacttggaagcaaccaagatgcctttcagtagttgagtggataaatatatgttgtggtaaaataggaaatgaagcaatcttcagggttaaaacaaaatgagctattaagttgtgaaaagagactgggaaatcttacatatgtattttaaagtgaaataagccaatctgaaaaggctaacatactgttgatttcaagtatatgaatttctggaaaaagcaacacaatggatacagtaaaaaggtcaatgactgacagggagaagggggatgataagtaagcacagctcaggatatttttcagttcagttcagttcagttgctcagtcgtgtctgactctttgtgaccccatgaactgcagcatgccagatctccctgtccatcaccaacccctggattttactcatgtctactgagtcagggataccatccaaccatctcatcctttgtcatcccccttatcctcatgccttcagtctttcccagcatcagggtcttttccaatgagtcagttctttgcatcaggtggacaaagtattgcagtgtcagcttcagcatcagtcctcccaatgaatattcaggactgatttccttcaggatggactggttggatctctttgcagtccaagggactctcaagagtcttctccaacaccacagttcaaaagcatcaattcttatgtgttcagctttctttatggtcctactctcacatccatacatgactactggaaaaaccacagttttgactagacagaccttacacaggatatttttagtgcaggaagtatactctatatgagattatattgatgtatatatgttattatacatttgtccaaacccatagaatgttcaacactaacagtgaatttaatataaagtctggactttggatgatcatgatacatcagtgttgatagaacaattgtaataaatgcacccctctggtgtggaatgttaataacatatcaggggaagctatgcatgtgttggagtaggggatatgtgagaaatctctgtatcttcctctcaattttattttaaacctaaaccttgagttttaaaaaagaaggaagctgactatttcctagatccttcagaatatctgaaatgtttagttgtggcatattttatgtgtgtatctaggtgtttattcatactctttagagggaagaaagtttgttctcattggcattgctgaaagtcttttaggcacacaatgtggaaccctttccttttcctcctccatgctcctgaggcatattttcttctaataaagagtgttgtgaagtatttgttgattttatttttttctcctctcatgactgctgtgggcaaaagcactgacattgatctcatttcaaagatgccttgtcctaaggcttctaatcagcacaaagctgtcagtttaaattccccaagaaactctcctgtgttaggacttgatgtaagaaatggcaccaggaaatggagagcacagaaaaaagagacatactgtattccagactcatcaaggattcattttccaaccaaaatctctcatcaggtggcctgatcatttctcatgggttttgcagtgtccttcactaagtgacctcttatttaggtttcaagttcaatttgcttttccagataaaatgacaaagaaagttgtggtgcaatcagattaagtgtaaatacagtcctgaaggggtaaaatatgactttgtatgtatttttctttcactttgccttaatatttcatttattgcctatctatttacaattaagtagttaaataagtactttttgagagctaactataaacactgggtaaaattcaaacagtttctgcttttattcttttgatgtgtttaagatctactgaggatatattgctataggaaagtcaaagttgtgaaaagtcctcagcactttattcaggataaaaacctctgattaattaagtgaaatgagctcttttaaaatcccatcttccacttcagtaataaaaagtctaggaaacactaatgttaacaccacacatgctttcagtaatgtggctttggggaaatacacactagtataagtaacacgctaggtgtacaaattagcgtgaccattataaagggaaatctggaaagacatgagaatgaaagaaaaattagcttcatttccatgtctctgaagatataccaccaaaattataaatctacatgcacacaagattatttactgcttcacttttcctcataataaaatattggaaattattttcatactcatttaaagagattggctgaataacctggctcacccatctgttataaaataaaattactaagaaaaactaaaaactgcaaattaaaaatgtatgttatttgtgtaagaaaatattggaagtgaaatgcgtggtgaactcattttttgctgaaaagaacactaaaagtaaaacacaagttaatgagattgatgaattataaagggtggatatgaatgggatagaaatattgaggttggagggaaggtatctctttgatttatacatttttgtatagttttaactaaggaaactggttcagttcagttcagttactcagcatgtctgactctttgcgacctcatgaccgcagcatgccaggcctccctgtccatcaccaaatcccagagtccacccaaacccatgtccattgagtcggtcatgccatctaaccatctcatcctctgtcatcccattctcctcctgccctcagtctttcccagcatcaaggtcttttcaaaagagtcagctctttgcatcaggtggccaaagtattggagtttcagcttcaacatcagtcctaccaatgaacacccaggactgatctcctttaggatggactggttggatctccctgcaggactctcaagagtcttctccaacaccacagttcaaaagcatcaattcttatctgttcagctttctttatggtccaactctcacatccatacatgactactggaaaaaccatagccttgactagacagacctttgtggccaagtaatgtctctgctttttaatatgctgtctaggttggtcatagctttccatccgaggagtgtctcctaattt

SEQ ID NO: 25023 - DNA, 1394 bp, Bovine  19866881192390
  misc_feature (1)..(1): n is a, c, g, or t
nacatctacaaaggatattgatgtgagatggatgctgctgatgttagcaaagctgctaggggcaagcaaggaaagagaggtcctgaggaaattccacagccagaaagtaaatatgcgctttctccagtggtagaatctgtagcccgtgatgcaaggatatctctcaaaaggggatttctgaatctgaccattagtaaccaataacctcagtactgggcttccctcatggctcagaggtagagataccacctgcaaggatggagatgcaggttcaatccctgggttgggaagatcccttggagaaggaaatggcaacccattctggtattcttgcctggggaaatcccatggaaatcccatggagtctggcagactacagtccatggggttgcaaaaaagcagacatgactcagtgactaaacaacaacaataacaaaccccagtgccagagtatggaatgatggatatggacagcagaacacagacccattctctctccccgaggccagctggcataatcacacatgctagaagtcccccaggtgacctcattcacctggaagcagagagacttaaaccacgtgacccagcagttcaaggagtgtcctcctgggagcagcaggacttttagtattccactgtcagtctggagaaatactataaatacgggggtgtcaacacttctctgtggttagtttaatatgtcactgtcctacagctttagggcacaaacttaaggtccacagtggggaacacactgagagcaatgcagaagaattagggctttcagacaaggaaagccagattagaaccgtaaacatgtttcatgcaagataactctctgaatcattctcatagaggatagagacaaaaacatttaagaatttatacctttttacttgtccccagatctgaattttccatcatagtcccattgccattttatgataaagttctgacaccaagatatgggatcatttatgaggctgcaggaacacaggacaaaatggctaaaaaaaaaaataaaataatcgctcattttgatttagtcttctcctctgcccagtaatgactttggatgccatcctattgaccttccctgcttttgttcccatccaaatcgatacagtatgcaatatcataaatttgcctggctctctttcagctcattgctggaccaaacactccgcctgcaaactgggtgataatgaagctgtgggcgaggtggcctcctgtaatcagcgatcattacagtggggcctgactttaaagtaaatgatgaataggcagtcagatccaatagagctggggagatattgatcaagaagcagccttgtaaagttaaaaacttgacgtggagttctacaggcaatgagctttagctgcaaatagca

SEQ ID NO: 25024 - DNA, 1428 bp, Bovine  19866881231129
  misc_feature (1)..(1): n is a, c, g, or t
nttatgacaaacctagtacagcatcttaaaaagtaaagacatcactttgcctagaaaggtccatatagtcaaagctatggtgcttctagtaatcacgcactaatgtgagagttgtaccattaagaaggctgagtgctgaacaattgatgtttttgaattttggtgttggagaagactcttgagagtcccttggactgcaaggagatcaaaccagtcaatcctaaaggaaatcaactctaaatattcattgaaaggagtttgctaaaactgaagctccaatactttaggccacctaatgcaaagagctaactcattgaaaaagacctaggtgctagaaaagactgaagcaaaaggagaggtatgtggcaaaggatgagataggtacatagcatcccggactcaatggatatgagtttgagcaaactctagaatatagtggagcagaggagcttggactgctgcagtccacaatgtcgcatagaattggacacaacttagctactaaccaaaaattttcttagaacctcaaagcaatgtctgtgtcaaattattcttcatgatataggtacccagtataggtctggcacagaggttgttggtttttgaaatatttatttgaataaacaaatgaatccatgtatgcaagaagataagctaattgatactggaacataattagactttaatctctaaagttgataatataaataatgaaacaatataacacagcatatttctcacctaaatacactcattgactcctcttccactccgtgcaaatataaaatggtaaatctcaaatgaaattccttctcccaaagtgacttggagttatctcaggtttctgactaaagtctgtttaatggtaaagtgtttcacaatacagggaatgaagccagggagacttcttagtaaatggacaatttgttgtgagaggaaaattagaatcagcaaatttttaacctgaaaaattagaaaatattattactattttcatccagtgcacttaataattgccatgcacttgctctaatgtgcacttgagtctattaaatcatgactatgacactattgtctgtatccctattattgcacttatcacacagaactgtaattactacatttattatgcttttattttcatcattaactggaattctttgagagtcatcacaaagtattgaatatctgtatcccccagatgcatagcacataatcagtgttcagtaaatgcttgttgaatacatttcatatgtcatcctattctgtaatgatatgctttcatgtcaactctttcaaactcctcaaagatagtcttttatcttcatgacaatattcccacattgaataattgagttatcaggtcaataaataaatgagggaattaagacggataaatatacttaaaactcttttatatttcacagg

SEQ ID NO: 25025 - DNA, 1070 bp, Bovine  19866882199972
  misc_feature (1)..(1): n is a, c, g, or t
naaatcactatgtgcgtggctcctaatactaatggccacattaatgacacttcctgtgtcctcatataatgtctacggaaagctggtgctggctgagtacattctgacctggcttgtaacgtccttgcccgtttaaccatctgcggctggctaagcggggatcctccggaagcccagcctcatgctagggcttctctcagaggtctcagtgggctctgatcccgagctccgagtgacagcactggatagggtgtctcctccatgctggagggaggcatctgactcgacaggtgctcccggctgtccagacacacggacaccagccaacacctctcgtctttctcagtaaaaaggcactggttaacaagggggaaattttcaggcatggcacagttggtttggaaaatggttaggctcttccattgcaggaaatagaaaaccaaaactccaaacagaaaacctaatcatcctaattttgagggcacctttgttgttgaactgagataaattttctcgttccctcatctacctctcttctgcctttaggaagttgctttcatgttcatctgtccgcttcctcctttgctgccttcaaatcactctttgagactgccgtccagggttttatggtgttaagagggagacagacaagtgtgatatgagctgagacagaagagggcatggcggggtcacctcctctctttccttctgtgactatactttagagacaaactcaacaccattgaaacaactacagaattactaaattattcatttgggcaccttgaagatgcctttctgtgacattctgacccagtttttcaggcaaaaaatagttccacagacaggtggtgaccatgtgagtgaggataaactacatgccccaaatagagcagctgcttagactcaaaggctcacataacataggtgccctagtctcacagaactcgtctttacaagggtctttttcagatttcagaaagcccctaaaatcacaagtttttcattgctgcgggtatgactatgaataactttaaaaaacttttgagggagaaagagagaatcatagc

SEQ ID NO: 25026 - DNA, 1786 bp, Bovine  19866880447504
  misc_feature (1)..(1): n is a, c, g, or t
ntgttcaaactacagcgaaattgcactcatctcacacgctagcaaagtaatgcccaaaattctccaagccagactccaacagtacgtgaactgagaacttacagatgttcaagctggatttagaaaaggcagaggaaccagagatcaaattgccaacatccactgtatcatagaaaaagcaagagagttccagaaaaacatctacttctattttatcgattatgctaaagcctttgtgtggatcacaacaaactgtggaacattcataaaaagatgggaacaccagaccacctgacctgcctcctgagaaatctgtatgcaggtcaaggagcaataagttagaaccgggcatggaacagtgggctggttccaaatcgggaaaggattatgtcaaggctgtattattgtcaccttgcttatttaacttatatgcagagtgcatcatgcaaaatgctgggcttgatgaagcacagactggaatcaagattgcagggattaatatcaataacctcagatacacagatgacaccacccttatggcagaaagcaaagaggaactaaagagtttcttgatgaaagtgaaagaggagagtgaaaaagctggcttaaaactcaacattcagaaagactaagatcatggcatctggtcccatcacatcatgggcaaatagatggggaaaccaatggaaacagtgacagactctattttcttgggctccaaaatcactgcaaatggtgactgcagccatgaaatcaaaagactcttgtcttgctgcttggaagaaaagctatgaccaccctagatagcatattaaaaagcagagacattattttgccaacaaagtccgtctagtcaaagctatggtttttccagtagtcatgtatggatatgagagttggactataaaggctgagtgctgaagaattgatgcttttgaactgtggtgttggagaagactcttgagagtcccttggactgcaaggagatcaaacaagtcgatgctgaaggaaatcagtcccgaatatcattggaaggactgatgctgaaattgaaactccaatactttggtgatctaatgcgaagaaccgactcatcggaaaagaccctgatgctgggaaatattgaaagcaggaggagaagggaacgacagaggatgagatggttggatggcatcaccgactcgatggacatgagtttgagcaagctctgggagttggtgatggacagggaggcctggagtgctgcagtccatggggtcacaaagagccggacacgactgagcgactgaactgaactgactgaactaccaagcgaaactattattttagagatgaccaggttctgatcactgatgtctcactggctcttgcgctgtattataaaccagcaggtagcttccgcgccaacgcgtgcgcagacttcaccctccgccctttccttccccacttccttctctaattgcgcaggtgcgctcccgataggaggcggtgctggcgactccgcgaaggggagccttgggcacgctttgggccagcagtgcgcgtgcgcggggctagagccaccgaccgtcaccggcgggagatggccgccgccggggaagcttcgtcggagccggcggcttcggaacaaccaacgggagctgtctgcctcagtgcgggcgagcatcgagcggaagcggcagcgggcgctgatgctgcgccaagcccggctggcggcccggccttacccggcaacggcagctgcaactctggaaggtttgggcccttggcggcgcctgcctcttct

SEQ ID NO: 25027 - DNA, 3454 bp, Bovine  19866880450833
  misc_feature (1)..(1): n is a, c, g, or t
ncaaagagtcgcacatgactgaagtgactaagcacagcacagcacaaacgaaatgtggcctttctctatcaggggagggcatcctcctggatgaaacaattagctttggggctaagactcatgggacaggaagggaaggatgaggaactctggcctagccagccaggactgctgactccaccactgtagctttaaaaataatttgtgatgaaagcttttgacctcctgtccataaacattacataggccatctcagccaggcagtcaagaaatggaaatcagggagtgttatttgcttgatccaagatatgttgttatcttacctgtgggccctcacaaaattttcagtctgccttctttctcttttaatttcctgtgctgttgctcttggaatttctcataagatctatcaattctaccttctaaatctgtctagaatctgtcctttcctctaacaccctcagtaaatttaccttctctgtcttttctcacccagcccccataatgctctaagaactttagctgaccatgacattctacttcctggaaccccacagtgtcataaaggctcctccttgggcccccagctagcccttgggattcaggtcctttcaatctctgatgtgtagctcacatgtcggctcctctgttactgcacccagaaccaagttgccctctcacatccctctgcctttgtatcctcgcagctcttcctgtctgaaatgctcccctacccccaccacctttaatccccctggagaatgtctacacccttatttagattttaatcttacagcctctgagaagcccaccctgccctcagacagactcaagggatccatcagttgttcccaaacactgtgggggcattggtcataacatagcctgtacatagcactcctgagttggtttctcccactaaactgtgaggtctcaagggcgggcagcatgtctgactcatcttttacccctggcggcaagcacaggacctgactcataacaaacacttactaaatgcctgttagaaagaacacccatctgtgccattatgaggttctgctaggagggtcctctgtgtggttgctgcctcgctcctcagggttcacccacactcacagaggctgagggccaagaggcactggtcagaggatgggtggaaaagcaggaggcctgcagttgctcccactgaaagcctccctgtacgcatgcgacttgttccctcgcagactctgtgacttgcacaaatccaatcattgtctttaacgaaaaagacacagggccccttggagaatgtttgtgaagggacacatctgtgggtaaactctatggggaagaattatgggcaagggggagaaacatcttaatagaatggagagggatgacacattgctactcttgcttagcaaggggaggtcactggcaggggaatgaaggtgttggtagcaaggcttcttatgttttagaaaatacagcctatccagtggttaccaagactttgcacttctatcatcttcttgagcccgttatccaccctgaggggcaggcaagacagaactgggttgttgtttatagataaggaaactaatatccagagaggtgaagtgacttgcccaagggcatgttttgagcaaagaccagcaaaaatgaagcgactttcccagggttggttgtgaagtaataatcagaactataattcatggggttatttgtaaaagtctctgtggagttttctttgagaaaacttttgaaatgagaaacattttctagtaaattgagtctgtacagggttttcaggcatctcttgggaaatttggctagatgacatgaaagatttcttccagctctgaaattctatgaactgtttttcactctgtcccaggttcacataactccatatagtacaattagaagtttgcaagtaatttccaaaacaaatagctctcctgcccgtttaagcatccctgtctgacttaccaaaaagtctcaagcccatttcttacttagtgtatcacctagtcatcaatctattctttccactctaactccctgctctgtggcaactctattacttgaccagttgttcacttcctctgtcagagataactagaatatagagctaaaggtataatttctatgaaagactagaaagcagaactgtcaccatgtgtttttgagatcttaatttccactaaaggggaattgaattgactggattagtgaaggttcatggtactcattggcttccctggtggctcagatggtaaagcatctgcctgcaatgcaggaaacccggattcgacccctgggttgggaagatcccctgaagaaggaaatggcaccccactccagtacccttgtctggaaaatcccatggacagaggagcctggtaggctacagtccatggggtcgccaagagtcggacatgactgagcaacttcactttctttcactttctgtggtactcattcctcctcagagaggtgtctgaatccttgtgcgtgccatatttggtagtgggatacaggattggagttttacatagatcagggtaggagtaggctttttctagaaaggaaagtctgtcttggttggatgaaccaagttatttaaattctgcctgataattctgtccagtctccttgcttgagaacaaagtattgtacacccatctgaactggataaaaacagaagttaatagcagctctgtggaaatagataccctgcttatcttctaatccaagagtccaggctctatctgctgcaccacatactcttcagggtgataattactcccattagttagtgtttcctgagaagtgaagtatggtatccaatttcaataatgaaggctatagcaataataacatgtaacagcctattttattttcatcaagaagaccaagtccatcagatagaagaactatgggtaattctgggtatattgctggatatctctgaagatggttatcctgtggggtttgttttaatttctctcttgactaccaagaacattctgacacttaaaaataagatgttcttgttgctgatggggaggggagagctcatcacaaagcactgggccaggacttccctggtggcacaatggataagaatctgcctgccaacgtaggggagatgggttccattcggaaagattccacatgccttggagcaactaagcccacgcgccacaactactgagctctcgtgccgcaaccactgaagcccgggcacctagagtccatgcttcgtagcaagagaagccacctcagtgaaaggcccttgcaccacagcaaagactagccccctctcaccacaactagagaaagcctgctcacagtaacaaagacccagtgcaaccatatataaaaaataaatatgaaaacttaaaattaataatagtaaaaaaatctttacaaaacactgggccacaacgctgcttttttcttccag

SEQ ID NO: 25028 - DNA, 1770 bp, Bovine  19866880516485
  misc_feature (1)..(1): n is a, c, g, or t
natttgtcctcctggtgtgattttttacaaaccaacacggtcactcctctttcttgggatcattgatccaacatcgtcagactcgcagacgccagccaggagttaggatataaacctgtaaggcctctgggcggctataccacatgacaggcaccttcttcacaatgaagcaactgggctccaatgcccagggtattctcttctaggcagttctaacaagcgtccttattgtgtctggctttttagagtagaagcaaacaaagactcaagaagctggcctactgaccctaggaaaaagcaatatttaacagcctgacaggagaaatgtccaaaagagtacaaaatgacagctgtattcactcagaatcacactctggattgaagtctacacattccagagctcctggtgttggtaatgacacaagacactaagaatcaagttgctttgtgatcagtgctatttaagagtgcaggattttacaataactgttaatggattgtaatcttaaaaattgtataaaaatttaaaagacaaaaaaggggtgctgggatagttgacagaaaaatgtccaacaacactggaaaccaaaacaaaagcacattaaacaataataaagtctgtgatgtttaaatttgcatgtattttatgaaatgaaaacactcaatgctggtgatgatcaggtaaaactggttctacacggaaaacaaaaactgtataaatttctcaaaggaaaggtaaggtgaattttaattaaatatgatattatgcattcacgaatagcaaaaaatttgaaaactatacaggaatgtgaaaattgcttatgatactacttgagaaaccataagacacacacaaaaaaatagcatgcccagaccgaatgtattaataacagcccataactatatgcctaagaaaaagagactggaaggaatatcactgcgcttccttctttccatcccctctttacatataggcagactgaggccaagtggctgccctgtcattgagaacctgtccctacagtttccatgtggcctacagggacagctgaaggggcagagtgaaggagtgctgaccatgcccaggagagtcaggtcatagaaggcctctggagctggggtggagaggactggttcaacatgtggccttggcacatgcttcctcaataccaagccctgaaggacagaggtaaatcagacctggtgcccatcctcagagcaactgggagaaagagaaggcttctgcctgaattaatcagggaagacatcaaaggaggaggtggcgtttggacccagaatcagagtgaggacacctggcatgccagagccagtgcatgccagctcgtgagagcggactgctagattttcagggatatcgagtgttggtgcctaaacatagccattattaaaaataaattatatgaacctgtaatttcataaataagatttgaaacaaaggtaatactcgatactaatcacttccacattattttactttatttcactgtgacctatgtccctgaggttgttctcatctgttgttaaccatatggtctgcatccacacatttgcccccaactccatgctgtagcgacaccatgtctgcggcctgaaactggcagtggtgggagtgtctacaccacggaaatgggcaagtaatccaaatcaggacttggtgtaacgctctgttgctttctagagtttagactctggactttaaaaagtgatggagaaaaaattaataatgcagattaactttaaagacagtca

SEQ ID NO: 25029 - DNA, 1443 bp, Bovine  19866880528046
  misc_feature (1)..(1): n is a, c, g, or t
nctgtcatcctaatcctgtggtacagacattgttgtcctcccattttgcagatgagaaaaccgagaggtgaagtatcttgtccaagaaactgaactgaggcggtggcagaaccatgatgcagtctgagttcactcttagccctgacactaaaaggcttcactggagtcctcaggaagatagtgtgagccatgcctgtgctctggctttatagttggggagggtactgtatgaaagattgtccccttttcctcctagaaacaacctgagatgcagagatccttactcaatcctggctctgctcccagtttaggcaagtgcttttccctctctggatctcagtttcccagtctgcaaaatggacacagttggcctagatgccctctgacaccccctccagctctaagcatctcgattttatgcgcagttcttcacagtcttatgacctgaattcagttaacaggtagtgttgcagggggttatgtttgcagtgatgcaactgttaagcctcagtgtcatgtgacacagtagagtacgcagaattggaaagctgctttgtttgcagcagaagattccaaacttgtgcacagtaaaaaaaaaaaaaaaaagaagtcctcaaaactttcttagtctgcggcctggaaaaactcgagcttatcatgagattgttgcacttggactcccacgggagaggaatgctccatgtgctaaaagtatccgctgttgactgattccccaagaggacctgccctttcttgtctctgtggagttaagtggatgccgctctgaagctgagccagctgctcggctgaaccagacggcggggaaaatgggtaatgtatagccatgtttgaggatgacaggtcacaccgtgactcaagcagggtacagtgtatgagttcttagagcaacgatagatagtcggcatttgctgcgacagagccctgcatggattctcttctttagtcctccacaagttttggttatcagccccattttcctggggactcacacagtaaagaaactgcctgcaatgtaggagacccaggttcaatcccggggtcaggaagatcccctggaggaggaaatggcaactcactccagtattcttgctgggaaattccatggacagaggagcctgacgggctaccgtccatggggtcgcaaagagttggacacaactgaatgactaacacacacacacacccattttaaagatggggaaactgaggcttagagagatgaagtagcttgcccaggagttgggactccagcccagacagtcagacccagtagcctgtgctgttaactaccacctccagtgagggtatgtgggatgagcctggaacggaacttggagaacaaagttcggaattaccagcaaatttttttttctaattcagtgtcttttgaagttggtacattattttcacataaatacaaat

SEQ ID NO: 25030 - DNA, 3284 bp, Bovine  19866880572344
  misc_feature (1)..(1): n is a, c, g, or t
nctcccacttatgcagaaaaagatcacttcatcaaacatcctgagaaaattgttgaaatgaggaagttcacactaacacactgagtattttacccatagttctgctcctccaagaatggatcttgattttgtaaaacaaaaaaccccaagtacattaacattcttcctaatttaatatcattcataagtttgattagtatgatttctacattttcatgcaggttagtatcacattttagatattctgcttattagagtcactcatcattgtagaaaacttagaaaatacaaaagcataagggaaacaattagaaaactgggatatctatgatataaaaacttacaattcaataataaaaagacaaataattcaactttaaaatgggcaaagatcttgaatagacatttctcccaataagatatgcaaatagccaatatgcacatgaaaagatactccacataattaatctttaaggaaatggaaatcagtttcttgagaggagcatcattaatttgttgctgtattcctggtcctcagcataagacctcgcttggagcatggggtcttaaatttgctgattgaatgtatgaacaaatgcaagaatgagtgagtgtatgaacaaaagaattgcagagagggaaatagtccagaggcaagaggaatgcaggaccagcctagaagataggaagacagagcataaagttcagtgaaaattcatggagggtaagtacccccaaaggcagctggaacaggtgatggggattaactgcaggcttggtgtcagatgctgcagtccatggggttgcaaagagtcagacatgactgagcaactgaactgaactggggtcaaatgatttttgagcaaacggttaaagatgtactcttttcttggggaagtgccacactgtgcagcttgtggggtcttagttgcctgaccagggattgaacccaggcccttagcagtgaaagcatatggagtcctaagcactggaccaccagggaattccctaaagctgtactttagaaaaatgaaactgtaagaccaagtataagatgggtcagaaggagagactgggagccagccaggacgctgttcaggcaaaaggcaatgggagctgaactaggcctgcagtcggaccagagaaaggatggaagccagagacactcatccaatttccaaatattataaaaactgtaaaaacaagtgtgtctcgtgacaaatagttcactgttcaatgggaatccaactattagaggaagtacttgccaataaaatttaagtggtttgtggtctgaagttgcaaccacactttttataaaggtaattgaaaggaaaacaaaaactccaattgagggtagtaagaaaacagggaaccataagactatcaccctattatgtggattggagttcatccacacaatgaaggagccctgggtcacattcatcctcctttggccctattttaagactggcaacaataactctcaaaccaggcttcaaacagagacagcccctgtctgtttcaagccatgaagggcattgcagggactatgtattagggtattagccatgtagagtattgcaaggacctgattccagctgtgaatgagtactagtggagaagaggaagaccattctgttaataatgttgagacttagagtttagtggttgagattattgatatcagggctgggctgtgcctggttgaactcagctctgtcactagattatgaccttgaataaattatttaacatctctgtaccttataatctcatctataaactgggattagtgaacacaatcattgagtagctacaaaaattaattaataaattttaaatgcttagaaacacctactatatactaagcaccatagaagtgtttactgttattattattattgcaaaaaataatggccaaaaccaggcaacagtggagtgggctgttctgaagtggagtgtttcctgtttccacaggtgtataaacaccagggctgagttagttgttgggttctgctttggacattgagttttcagtgctggtgaggtgaataaacctctgagtaggtttattcagcattattcattctgtttatttaattccacaaacatttaatgagcagctactctgcagatgctgtgctggcgatactgggatgaaccagagggtcccaattctcaaggacctgataatttagttaaggaggcaggtaggtatcacttcttatgtggagaagccacaataccagcacacatgaggttgacaggagcccaaggaaggagacagggcaagtttcctggaaaaggcagtaagaagcaaggtcccttggcccacattcaggacctggggaatgcagagtgggaaaagatctgcccttgctggtcagtgggtgactagattttggctttcagcactgataatcatctttcctagttcctgtctttagttgaattgtttggacccttctacttcttattgcttctggaaagaatattgttgttagtctttaagatgttttctaaatccctttgcacatacattttattgatcaaggtttcaatatgatggttttgcctcaatcgctttatcttttggttcagggaggttgaaatcttaagtttttccagaagggtgtcagttacagacaaaggagaccgcgtttcctgggttactaaagcaatacagcttaggtctgtaggatcaggctaatttctgtgttcctgtgtgctcatcccagacaagttacccaacttggtgtgctccttaccacggatgttctacgattataaatttatgccagtgatgttcaaagtgaccacattaagaggtaaagcccagcaatcaggggtaaaaatgcaagtaagaaagaaagccacacacatgtactatttactagatgatactgacaaatatgttcacatcctgtcctctcaggcatgaataaccccagtactgctctcagagaggaggtctaccaggaagtgctgccaaggttttcactcccccttgctggcttccattcttacctgcctgctccttatcaagctctgttagggctttcagttcttcctgtgctttgttcataactcctctttcagccaggatcacagttggtctgggaggtgagaggcacaagcaggaatacagatgtagtcatagatttctcctgacactgaatggggtgaggcaagaacatatttactctattctcctgcttgctttccttttgtgcccccaccaagatgactcacgctgttgtgctctgggcaggccctgcagc

SEQ ID NO: 25031 - DNA, 889 bp, Bovine  19866880602601
  misc_feature (1)..(1): n is a, c, g, or t
natagcagctcctgccactgcacagcctcggcctcagctggtggggctgaatggctgtttgttcagcctgagccaggcagaatcagccctgacagtgatggcccagtcggtattatgtaaggagacccagcttacctgcctgtagacagacaaagcagatgatttgacaggcaaaacagagccagcctcttcactcccaggcagccaaggggctattcaaagccagggcctggaagattttcatgaggtgctgacatatgaagccggaatgcagcagggacaaggcagaactgacaccccgtgcagtcaggcatggcaggtgtctccggcatccaaactgggccttcaggagctttgactgggccccacccatgagggagggagagagagtgagctttgggagagaggccccaattttcaggcctgaatctgcagcaaacctcacctttaccactgccctctttattgttcaatcaaggaaaacattccaagcctttgtcatgtgacacaggatgcaggtgtaaagagccgggagtacttgaggccttggttactggtcaagctgcccacaccaggggctagtggaggcagcaaaggaacaggtactgagtgcccaccacatgcccgacactaacggcttcacccccacagacactgatttcaccctcacaggagccctacaagctaagttatctctatgttgcacatgagaaaacaatctcccaaggaggaacttgcccaaaatcactcagctgggaaatggtacacctaggatttgaacccaggtctcctcagcaccaagatgtatgttctttcgacctaaaagctggttcataagacccacaggccccggactcacaccatgtttgcaatcaaagcggctttggca

SEQ ID NO: 25032 - DNA, 1452 bp, Bovine  19866880627240
  misc_feature (1)..(1): n is a, c, g, or t
ntggaatattccctaaagagaccttttttgcccttttgggtccatatctctaggccctaaatcacactctccactttctgtgtgaattccctggatcctgggagatggctgtagacccaaagcaccaagaaggcattcttccagcctgctcatcacttttctaataaatcccaactggacgtgagctctgctctcaccatgagctctgtgcctgtggtcacacaacctaactgagcctcagttccctcatctgaagtactcttggaattatttctttggccacttctttaatgaatacttgttgagcaccaaccacaggccaggcataaggtcagcacctacttcacaggctgtgatgaggaccaagtgagtctgaggacaagggctcacacgtgatatgtgtcccaaatggtgctgcccttgtgctatggctgggaacaatgagtaaaccttaactctttaggtctagttacgagttactatttttgagaggggaccacagctggcgcttccctactatagggttggggaggagtccttcctgtcccagaggtgttgataccatagccctcgccctccctggcctcttttaggaaatggaacctctcatcttggaaccaggagcacttcttttaaaaaagctggctgagtctgatgaggatgtgaacaatctcttcaaaaaggtggaaaacgacagcaacctcgaagactacaccatccaagtaggcgtctccctcatggtggggcctgccccgcttgtgtccgctcctgctcctccttccctgtgtcccacccattctgagagtccaacccaaacttctctgcacagaccctgttggagctgagggatcaggtggccgagaagttcctgctgcagaagcaggagatcaaggagctggatgagacactgcactcacttgagttctcccgggtagataaagtgagcttgcctccagatgggctctgggtgactgtcgcttgtgcaatttatggggcatcacctgttttcagtcctctaggagaagagagtcactcactgtggtgccttgtcatttctagctaaaaagcgtgttgaagaaatatgtggaaatcatagagaaaacttcctacctcatgcagcccgacgtgtataggctgatcaataaagaagccatggtgagtggttttcacgtgaacgggatcagcctgcaagagcaggaccacaggatgccctagagcctgggtctcagcaatgatgggcttctcatatgtaacatttccaagtaactcaggttggccacttgagttcagaaccagagtctttgttaagtacttccaatggaaatccctgcagtacattttgtacttccctgccatgttcatcccagtgaacctaatacagtgtcagcagtttgactaacgctgattctgcgagcaccttcggggctgtgtctcagctgccatgtgcagtgc

SEQ ID NO: 25033 - DNA, 3722 bp, Bovine  19866880704353
  misc_feature (1)..(1): n is a, c, g, or t
nttagtataaaatctaggctaggaccaggtattggctttaggtaccaagtctttctaaatttctttattctggagtattttcatagccttatcgtttatgacactggcatttttgaagaagtctttccccttcctctatcttttttacagtagtattttccatgtggggtttttctgatgtttcctgatggtcagattcaggttattcatttcaggttggatagtacacaactgatgtgacttttccagggtatcatgtctggaggcatgtgatatccatctgcccttagtggtgatgtatttattttttattagataggcaaaagtcctgtaagaccatgtaagtgcctgcttctgttcaacactccccttaagtttagcatccatccatgagtggttcttgcctgaacctaggatgatggttgcaaaaactgttttctaacttcagcactcattcattccacatttaacaagttggaagtcagccctgataccatcctctcccctacttattttttactggtatggattcattaattcctgttcttctcagtggcttttggttaatttctgtcctcaattattttggtggtcaaattgcctcagatttgggccaacagaaatatctccagactagctcttgtgtccttttggcatgtcttcatcattctttgagcacatctttctagctcaaaatacacatatatgtatcaggttcagttgagtcactccgttgtgtctgagtctttgcagtgtccatcgagtcagttatgccatccaaccatctcatcctctgtcatccccttttcctcctgccttcaatctttccctcctgccttcaatctttcccagcatcagggtcttctccaatgaatcagctcttcacatcaggtggccaatatatatacattatatatctataatgtatgagttcacacccagttctaatccaaaatttagggtttattctggttttctccctttccttatttgtaactcctttctctgacagtcagaatcctgatttcccttatcctttataatatgtgtagttctttgattggtgctcctgaatgtaactaattccccttcatgtctgcctcctctctaggagaccctccttatttggcttgggctctgcccaccctaccacagatgctcactttacctgttactcctcatggctttaggtctagatttttcaggtggagaaagaagtggcaaaaaaggagacagcaggtttttattaaatttttttattacttcctttctagcacaagtcttttcaggactgtctagtgagtattaaagacaggctttgttcctgtcgttatagaccttgagaggttagttgaagaatgggaagaaaagccataaagtcagagtaaaacattatgttcagttgtgacaattatggacagtaaggtagatttttgttaagtattcttttagtgttaagaaaacaattttcttctctctcaatttcacagaatgctcaaatggggcagaggttagcttagtgattggcatgcagtcacattttgagggattttcttcattgggtagtaaaggaaaagtggctggaataatcagaacgaagttgaaaagtaggtattggaacttgaacagaaacatcttcttgtcattatctgaaaccatgaggcatctgtgcagttctggttagcatactattttaaaaatatcccacttttaaaataaaataaggttcttcagaatatgggaggatacaggaataaagattagagtttagaccatgataaactatcatgaagtgtacgcactgaagcttgaaagcagcctgaagtagagtgcttttcatacccggaagtgtatgaaaaggcagcgcatcttagtggtgaagaacatggactgagctggactgtgcctctgcctgtttgaccttaggcacaacttatgtaacctctctgtgcgctagttttctcatctgtaaaattgggaagatagttgtacttattacaaagtgttgtgaggattgaatgtgtttaaataaagtacttagaacagtgcctgatacacagccttatttgtttgcttatccgtatgatatagtaaaggctaaacataaaaagattcaagtggtattttgatactacttgcagtaaaatggattaaagaaaatgtgtgattacttggtgtactttgatttttaaggttgagattatagaaggtaatgatcatactctcccttaggtagggcagccatcaaagacaatgctggatcattggtcagagtagaaaaaatttgctttttttattcattaaaccagaaactgagatgttattagcttattttctaattaacacaaagcatttggtaacatgcagtgtgaactttagaatgtcctggttgcttttcagagcatccaacccaattcaattctttgtgaaaatgctgttttgtatgatgtagtaggaaaagttctcaacaattgaaatacatgacctgggttcccctgctattcattgttcagttttcctacttgcaaaataaaatgaagtaaaacaactctatagttctttccagctcttagtagccagtgattcttttctttgttgtactttgtaacaattacaatttgtctcctaaaatactgctgtcattccataaaataaagaattcagtagatataaggtcagttgcagaagcagcttttttaagatgaaacatcagcagagtggctgggttcttggctttctagttttcttgcagtttgacttgcctcttagagaagtggctcccgactatgaggaacttaaatccttatcctcagtcgtcccagctgattcccctctcattctttggcatcctgttttccatagtcagctgcttaaactattctttgcctgtcttctgaatctagtttcttgctgttcttctaatccacataactccatttctgaacctcctgtttcaaactaaaaccaacagtgacttgaaagattccacagaccaaactagtgagctaggaaagtaggcttgccaaaactgtatcattagttttgacttgttataaaattaaggcataaaccatattcggttaaacacagctgaaaagcaatggatttttaattcagctgaatagcaccactgaacaattggcttttattttttccttagaattacggcgagcagtaagaagcagtgtatggaaaaaggaaacagctgctcatcaacatgagtatggggctgaagaaaagctagaggatgacatgtaccggaagacttgtactgtgtgtggccatgaactgacatatgagaaaatgtgatgttaagtgatctgttctacagtgtggaaatttagattggtcctgttcaaaattcaccaaaatgtaaagtcttcacaaatgaatgaaacacttgtataaataatgctccaataattatgtatgttatggcttaacagcaagtttcagttaaggtccagcaggtctggtgggcaatacactgagtgtgtgaccattttttctataataaggctgggagctgagcaatagaatgggtttaaaagtgttagcttagagctaaaactgagaaataacgaccaaggcaaaccctcgattgaggttaagaggaagagcttttagcagtaaaggcaaaagctggccgagctggattcatatcccaggaaccagcagggatggtggtagaccactgcaccccagaccctgggccaggtctt

SEQ ID NO: 25034 - DNA, 840 bp, Bovine  19866880777180
  misc_feature (1)..(1): n is a, c, g, or t
ngtgtttttttaactgttagttacttttgacatttttaaaaaggcttcttgtggaagtcagaccaaaagcaggaagatactgcagcaagatggatttgggaaaagaccagtctctctcaaagctccatcagacacctgatcatcatcaagaagagacccatgttccaggtaatgaaagaaaccttaagagacagtggctgttgggaaggattgggctatgattattttcctctttgtatgggtctggcaaaaaaggggcatcattgggtgggtacattcatgtattagaaaggaagaataggggctatataactttctgagctgacttctagcactaagattctagtaagcaggagaaacacaaggaaataataaataattatatatatatatgatcatgaaaatacccaatgatggatggtgtggtaaagcaagtacagccatatatgtagcacaaatatagtgtaacttttggaaaggtatctggcaataagtagcaagaactataagagtgtttattctgctgactgactaatcttagtctttggatatatcctaaagcagcattttggctgcttttgcagaaccctaggccttgagacagtgatttaaacattttgtacaccacggatccctttggctttctgatgaaactctagacaccttcttagactaaattttttaaatacataaagttaattacatatgattacaaaggaagcaattatattaagaaaagtatcaaaataaaaaactgatataataatatatgtgcttatttacaggtgcattaaataacaagatccagtgatggatctcattaccactgtatcaaatcaa

SEQ ID NO: 25035 - DNA, 1627 bp, Bovine  19866880851773
  misc_feature (1)..(1): n is a, c, g, or t
ncttctttcccacactccccaactcttccctagtaaattaattacacagaaagaggctgcctttctcttgccagaactcacttactcaaagatctttattagaaacagttcatatgaacactcaagtttatctgaaactgcacaacgagcttctgaaatatttaatgcttgaaagttttgctccagaatcaaaacttacaagatatctcctgagaaaggtggggaaatggttggatttattatgttttttctgatcttggtcatcttgtagcttaaaagaaataaatggaaacaaagttaaataccagtttctttctaagcctgcctaactgcccagtttttctttcttttttgcatgaaaagatgccagggatggaagggccagcccacaaaatgaaagccctcaccaagagactcaagagagttttgttatctctttgacttttaactcacccattgggtccagggcttaataaaaagagagtgggcaatggacaaatgtatttctacctgcctcattggaaaaccacatttatgacccagcagtaatagctgccgaatgatcagcacatcatgctgaaattgtgacataattggggcctggagctaatccagagttgcttgccatgagctctgttcccattccctggagtaaggttaggccttgggtggcccatccatgctgccaaatatgcagggcggcagcagccctgatgggcccttaaagatcatatggggcacggttggattctacagctctcttgtatatcacatgggaaccctgcagggtgtgagtgatggaactgggtcacactgtggcaacccagcacagtccggattcagagccaggtttgcagttctcagaggctgggaaaagcaggcctcggtcaagctaaacagagatctttcccattttttaaaaaagttacttcttttgcaaatttgtcctcctcatcttatgtgggaagacgctataggagtcttttattgtaataagacagtcaaaggcacaagaggtcaaactgtgtaaaaagagctttgaaaagtacaggaaagagtgaaatcatgtgattcttcaccattcctctagactctggagtagacgctaccttgtgccccgtttagagctaagggccctccccggttagaatgtccaaggcaagacctttggagctgcgcctctatgagggtctcttgtcccagtccatgggcctaggacgcttctccccacctcccattttcaaagccgcccggtaggcgcccggtgtacgcggtgcaccgggagtctgcgcctgtcacgccggctcggtccctgccacgtggctctcaattcggccctctgtccagtcctgtcctcaggtttcgtcgatacttagttcgtaaggacagtcgaggtatctatgaattttcgcctgtatgctccgctcacatggcggacacgaaccgatccactgcgcctggataggcagccgcgtggcgagcgtggtaggcgcctccactgcccgctccgagctgcccaccaggattgtagcagggccccagagctccgaactggccgggcgatgtgcgcccatagaagtccaccgcagtctcgacgccgccgctgctgccacccgcggggggcgaa

SEQ ID NO: 25036 - DNA, 2032 bp, Bovine  19866880855701
  misc_feature (1)..(1): n is a, c, g, or t
nttttgagtgagttttggcagattttgtctttcaaggatttggaccatttcatctaggctatcagatttacaggtatagacttagttagtcctttattattttgtaatatgtatgagatctatagtgatgctccctctttcatttttgatacttgtaatttttgccttctttcttcttagttagcttggagaaaaccttattgatttaattgatcttttcaaagaatgagcttttggttttatggattttctctatttatttcctgttttcagtttcattgatttctgttctgatttttgtgattatttttggtacacactttggatttaatttgcttttttctaggttcctaaactagaacttagattactgattttaggtctctctctcttcattatcaagggcttcctttgtggcttcccttatcaagtgcttcccatatcaaaggcttcccctgtggctcagctgctgcgggaaacctgggttcgatccctgggttggaaagatcccctggagaagggaagggctacccactccagtattctggcctggagaattccgtggattgtatagtccatgggtttgcaagagtcggacacacctgagcgactttcactttcacttttcttcattatactgcattataatgacattatactgggtttgatccctgggtcaagaagatctcctagagaaggaaatggcaacccactccagtattcttgcctggagaatttaatggacagaggagcctggtgggctccagttcacagagtcacaaagagtcacacacaactgattacacccatagacaggcatcccttgtatcatggctgtcatttattctacctgtatgtaaggacgcataagcctacagagtatatatgggcttctcagattttgctagtggtaaagaatctgcttgccaatgcaggagactcaagagatgcaggtttgatccctgggttgagaagatcccctagaagagggcatgtcaagccactccagtattcttgcctggagaatcccagggacagagaagcctggtgggctagtccatagggtcacaaagagtcagacacgagtgaattaacttctcatgctagcatgcatacaagcatagagtatatatatatactcttattcatgctattatttgaaccaatcgctctttactagatcaataagaagaaaaatgaaactttttgttttactttttctttttcctttcctgatgccttccttctggttgacctgagtttgtgatttatatttgtgatttatattattttccttctctcttaggaacttctcttaagatttcttacaagataaatctactggcagcaagtctttatttctccttcatttatgaacaataatttcacagaatttagtatcctagtttggtgaattttcactctcaacactttaaatatttcactccactgtcttcttgcctgcatggtttctgaggtttttgttcctctgtcttctttcaagattttttatttattttttattttctgaagtttgactatgatatgcttagatataggtttctatgggcttttttcctacttggtgttctgtgaacttcctaaatctatgatttggtgtctgacattaatttgaggaaattctcagtcatcattgcttcaaatggcacttctgttccttttctttctggtattcctattgcatttgcatgtggttctccctcaattcctggatattatatcctatttgtttcagactttttctttctctttgattttcacttgtttctattgtcatatattgatgctcagagattcttccctcatctatgtcttgtctgctcatgaacccatcaaaggcattcttcatttctgatgctgcatttttgatttctaacatttcttgttgattctttattagaatttccacctctttactttcattatccatctgttcttgcctgttgtctacttttcccattaatgcccttcacttattaatctagcttaaaaaattcttcgtatgataatt

SEQ ID NO: 25037 - DNA, 1384 bp, Bovine  19866880879488
  misc_feature (1)..(1): n is a, c, g, or t
ntgcagcaaatgtgtcacattccctgttgccactggggctgggacaccccagaacgtagaaccaggtgaccagcccagggccagagaactgggagatggcctggtctggaggataacacctcaagagaaaagtcagcagtaaggactctgcctgcctcccccatggacccccaaaggtgccctccccagagggccctcccctcctgctgtaccagatggtgcacagatggtccagtcgcttttgctgcaggctgctctggttcttcatcatggtctcaagctctttcttcacagccggaggagtctggattctctcactggccatgaactcactgggtgtccagacacattggaccatggacagaagaggaggggcagggtgggtgggagagaagggcatgagactcacggtaagaacattcagcaccctgacaccactcccaaccccttccccacatccaggccccagggatacaggaaaggagggaagagagggagggagggtgagggagggaagaacagaggggtcggcaggcacagctcaggtgtggatcctgactgctgcctccagctctgtgaccttggacaagtcgccccttccctgaaacttggtttcctcttctgtcaaggtaatgacaataccttcctcaagtggtacttgtgaggaccctaccagataatgcgagcaaaaccattagcaccatgcctcactcctgggaaatgcccagtaaatgtcacctcttcccatcactgtccatgatggttactgatgtctgaacctcccagatccaagcccaggcctggaccaggtactttccatagagcatcttgttgatcatcaccgaaaccgtcaccagtccatcatagtatctgcagacaaagcctgcgaatgtttaagcccttgaccaaggtcacaaagaaaatacaggggcagtcagacctcggtacacttctccatccgtcctacagtcagactccggtggtctccatttagaaatgtgggtggacagcgggcctcctgccaccacacctacagcacagacagatactctctggtgactttagacatcttggttccaagtctccctttcttagcaaaagaaagccttctttgctggccaaaacctccatggcctttgtgtcagtattaacaagagtgccacctgatgggggaagcttggagataggccctctcttcaccctccctcccaggagtgaaacttgctcccacagggtgggaagtggcccaagcctgagggatggccattctccttggcccagtaacagtaaagagtggacagtgggcaggtaatcaggctaacattttcaaaccacttgtacagtgggcttcagctagtaaagaatccacctgctgtgcgggaaa

SEQ ID NO: 25038 - DNA, 1411 bp, Bovine  19866880952535
  misc_feature (1)..(1): n is a, c, g, or t
nattgacgtggagccaatataagatgattttgcaagaggaacaaaagcccggaggtaagaaaactaagtctcaactgtatttcttcagtcaagtcattttcctttgagcttcagcaggagaagggtttagtcagtgatccctgagaaaagcatcaaaggcccagaagggcagcatccatctaccacactgtgagccagttctcagtggcctgcagcattccaagccactctgttccttctcccagccaaccgagccctgcaagctaggccggacctggggtcttaggcagcagctgccctgacacctgtctgttctcctataactgaggctcctgggactcttcccataaccccaggtgggaaaaagaatcgagcccatctatcaagaatctgtcaagtactccactgtaaattaggtgtttcctatgatcctcctttgcttggcactgaactaagattaactaagaactggttaatcactggacacagtacccaacatgatgcagtctttcttttgtaaagcaaatgttacaagtgacaaatgtgaccagacctgactagaacttaccgtgagcgtggcagcagcctggtgtctcaccagcgctccactccctggaggacaaccttgatgagttacttctggacatatctgcattaactgtacctacatgatcctgaaacatcaacggcaattttacctttttctttgcaaatgagtatttcttctttgcactgacatctaactctgctttgagactgctactgggattcataagacgcgtgtctttcaaatccaggtctgaaaaccttaaaacacaggcctccaggtcatcatctccttggtctggtgaagtggaagaaggcatctggtttggctccagccgtggggtaggttcctttctgctaactatcacctaggaagtaagcaagggaaaaacaacaacgtccaagtctttgattactacttgaagtaaatcagtcatgcaaatgagcatggcccagtagcccaaactatccattcattcacttgttcatctaagaaatatttatttagcaccaactctatgccctgcactgttctaagccctgaagatgtagtagtgaaagaaacagagaaagtttcttctttcttagagcttactttccagtggggagagagaggaggtaaacaaatgaattaaactgctttttttttttttttaaagtcagatggtagaaagggctatgaagacaaataaacaaggtaaggagacaagagtgatggaaggactctttagaactcagagggtagttcaggtctttttgaggcagaagcatttcagcagaaacctgaatcagagggtaagccgtgccaacatttaggggaaaacacaccaaaaaaaagtacgaggtacaaccaaaatcaaccaag

SEQ ID NO: 25039 - DNA, 2226 bp, Bovine  19866880977493
  misc_feature (1)..(1): n is a, c, g, or t
ncagattttacatttttaaatggctgggaaaaaaacaaaaccaaaaacaacctaaagaagataatcaatcatgtaataattaggtgaaattcaaacttcagggtccagaaaaaaagttttattgaaacatagccatacccatttatttctgtgttgcctggggctgcttctatgtgataagagcagagtgagaatttgagtcagaaacctgacacccgacagggcttaaaatatttaccacaggaagcatttgctgaatcttgctctagactctaggcatctgggacttgggctaattgctccttgtgatctctagcacccagacttgacaagggcctgggggggcactctgcccgagagtgtttgactggagtctgggggttggcttgggggagccaggggtgagcccggagtgccttggcagtgcaggggaattgctccagaggggctggccatgacaaggcggaggcacttaccagggacaaagttgtaagcccctggactcccactcctctcacagcccagcatccttgggtgaccaccctgctccccagcagcacaggtccccagttacgcacgtccaagacctccagctcctcctccaccttgctctggagacatcccaccatctggaagaaggatgggctcaccaggctctctgcctcctcctcagtgaaggccttccagtccagcagctgcttctggaagggggcgaggcagagcccggcttaggctgatgggggcttcacctcaggactggtcctgccccgagaccaaccctcccacccatctccatgaaccttggcagaaagccccacagtggcccagtcaggccagcttcatctgcccactgtgtccaggtgctgagtaccgcccctggtcactgactctgccagaggtgttctcattagcccctcttggcagataaggaaactaaagcttggggagaagtgaagggacttgctggagtgcacacacctggcaagtggtgggcctgggatctgaactctcctacttccgatcctacaggcataaactgccatcctacacaccctcagcattgctgtaagccagacagggctcccatttcctgtctggagttatgccaactggaaagccagttctctatattaatagacttgatttatgcacaaaatctagaataaatcaacctcccccaattattataaaacatgaaatgtgtctccagttgaacacttccaatgctgctgcccaggaacaccaggcgccatctgtcaggctcaaagtgctcctagggtccgtggtgacctcagcactcacaccctgcatatgcccagcagagggccgtgagcaggggcacaaggaactgacgctagggccacagggctgtggaatcccaggggcaggggtgagtgaggaggtgagtgctggggggcgtggtcttggggaggctctctagagcacaaggcttccctccaggctttactcttaaggtccgatgtccctaaagggctgactaggaggcatgtgatggcccctaaggccccagagcaagcaggcagagccctgtgggctgggacagcccctggatcttttgcaaactggtcttctcatcttcagatggggccagcgacacccactctgtaggaccttggaggatctgatgagagtggtgcaagagagtggcacagcccccagggaccacagcacccgcagtgcactggaaagccctccgctcccctgaactctgttcagagtcctgatggcagagccaaaacttgacagacacacatgtgaggcagcaggagcgtcttggggcctacaggcaagaccgtcatggcctggggactcctacagccacagccagcatgttagaccatattcaaaatgattaggtgtgggggattttcatctgaacagtcttacaaaggaggcggggaaggggccttttgacataatatgtcctcataccccaggaaaccacaccttgtcattgaagggggttgtgggaggtctcactgtctcacactctaacagcggcgggtgggtgaagaacagaggctggcgggtagagagtaaagttggctgtgacagcagtggcagcactgtttataaaagggaactggtggaataacgtccatgacataatctccactgaataaataaagtcaagtgatacagagggtcaagtgaagggtgaggtgatcagagtgctaaattttgtctgtggggtcaaggaaggct

SEQ ID NO: 25040 - DNA, 740 bp, Bovine  19866881107467
  misc_feature (1)..(1): n is a, c, g, or t
ncttttgagaggtgaactgaacgctgaaaaagtgcctccatccccactacctgctccaaaacaaataccaccactcaaagggtgtccagcagttatgccaggagactttaaagagaaagttgcagagctgttggtgaaatactcaagtggtctttgggccagtgcactcccgaaaacatttgaggacatgtacaaagtgaaattacccgaggatgccttaaaaaatcttgacttgctttctgacgtatgcaccgtagactacatttctggaaatccccagaaggccattctctatgctaaacttccatcgcccgctgacaaaatcctaaaggatgcagagcaagcacatggcaattatgatatcaagtctacggttgaacaagaatatttgcagatagaagaaaacattgctgaaagtacggacacctttatggagactgtgacaattcctccgttaatcattccaactgagacatcaccatcagtcttggtggttgaactgagcaacacaaatgaagtggttatcaggcaagtttattttctaattctttagaatcctggtaaagatctccaggagaaggaaatagcaactcactccagtattcttgctttggagaattccatggacagaggagcctggcaggctacagttcatggggttgcaaagaggcagacacggctgagcagctaacactttcactgtcactactcttgctacttggcttttcttcacatgggtg

SEQ ID NO: 25041 - DNA, 806 bp, Bovine  19866881130431
  misc_feature (1)..(1): n is a, c, g, or t
naaaaagatttagtgatgagcctaataactttcccattttgaagcaatgatgcacataaaagctattttgaaatattcatagcagctgtaataatgaaaatactgtgattctattgatgacaaagtcacaagtacatccaatacacctgatttgcttcttacattcataattgaagtgctatatttagtgaagggttatgaaaccaaagatgaaattattttccagtccaaattcacaggcccctttagtacaatattaccgactccaggttaagaccctagatttagcctattagttcaactcttagcaggtggacagagtgagtgcggttattcccattttaaaggacttgtctaactagtaaacaatagagtcagatcccaacccagggctcctaatggtcagggttctgtctgccccagcactgcatccccagctctggtgggaaatggtggtcctgtgcagtcctttcccctttatttgtcaagcaatcagtactggcctgccttccagaaggttaatacagaggatgtgcctgctcaggagttgcggttctgagccagtgctgacctacccgacactatgtcattgttgaaggataaggcataacgctcatcgaaaacaaacaacttccctttgtaaaaaccatcaggaaactcctccaggtacttgtggatgccacccttgagctggaacacttccttgcacactccctgtgtatggaaacacaacaggaaatttgaggagactagcagaggccagtaggaagctccacagagaagcgacatgtggtaggaatgccaaa

SEQ ID NO: 25042 - DNA, 2868 bp, Bovine  19866881216932
  misc_feature (1)..(1): n is a, c, g, or t
nttatttcttatagagctgaaattctgatggttctatgagtccttagtaaactacctccctgaactaactctgatactttcacagttgaaatttaattctctggaaatatcagctaagcattaatttttgcatattcttattgattgagttacagagataaggaatcttcattatggtattcaatcataggtctttgtgttttagagagcatagtttttaaggttagaaagttactttttaaaattatgaatatcacaaaatttagaacactgaggtctttctaaatagtagaaatgcatggatagctgtcgaattgagtgctgacttgtgattcccttttaggtgatctttgcagagctgtttcaacttccggcaccgcctcatatcgatgtgatgtacacgacacttctcattgaactgtgcaaacttcagcctggctctctaccccaagttgtatcctttcctttgtttttaaacatactctatttggcctggctttacaagattattaaatatttctgctggtaggtttaaatcacttcatgaaaacagtttggcatttctttaaaagttaaagatcacatataccatatagtcagccactctactctttgactgttggcctaagaatattaatgtttataactttatgtgtaacaaccccaaactggaaaccgtccaaatatccatcaatacatgaatggataagcaaattttgttacaattatacaatggaatactactcaggttaaaaaaaaacaaacagattttcaatgcaggcatcaacatgagtgaattgcaaaatatatgttgaataaaagatgctaaacaaatatgaatttatagtatatgataccatttacacagaatcctagaaaatgcaaataatgtaatgacaacagaccaatatttgcttgggggcataaatgggaagaagggaggatggattataagaagaatgtggcaattttggaggtgatgtaaatgtttattatcttgatttcgtaggtgtataaggtcaggtgttactgtatatcattgatacctcaaagatcagttacttgaaaagaattactagtcatttcatagacttctaggaaatgttactcgttttttctatcacagatttattttcaaagagggtatggtttccttatcctgaaattcacagcttgcacaggcaactgaaatgttatatatgcgtttggacacaatgaatactacatgtgtagacaggtatagtattgccccccccccccccccgccttttttttttagtatttggctgcggagggttttagctgctgcatgtgagatccagttccctgaccaggaatcgaacccacgtcccctaaattgggagcgtggagtctcagccactgtattaccagggaagtccctgccttatttctatagagtgttagcagcttctactccctatactttataaaagtatttgatcagaaaaatatttgcccttttaagaatttccaagttggtttttctttcttgccttctccaaataatcctatatataataaagctcatacttgttgtaatatagcatttcactttctagtcttaattttcaatatgaaatgatacccttgctgaagttttctttaatttcattgcttatttgtttggtgctttggtatggttacactttccctttgtattaggtaggtaagcttttaaaatagactttatgctaattcatatgtagaagcagagtctaatcctgtatatttattatgtttatatattatgtatttgtttatagatagtgtctgtttctaaaataattaacttctctatgactacaacttcaagacttggtttatacaaaagaccatattggatttttacagccgtgttaattggcatgcccactgttgtcttttgggtgagatcttactgcctctgttagctaatatgctctcttactctgtcactttcccaaattagctcagaacagatagtgcatattttccataatctgtcatgtccattgttcaaatgcagtatttgaaaactatcagaaaaggctaccctgagtgttgacctattatcttgagtagttttaatgattgaaattatagggacatagggatatgctttaaggtgtctgctgaggttttatccagtctaattaataaactaccagttgctctgggcattccaactatgccattcattcagcaagtatttactgggctcttacaaatttcccagcattatatagtatactaaagtgatccttatctagttagatcaggggtgtctttaagagaaaaagggcctttgatggtatgttttgttgtttgtggtaaaaagggcatggtatgataatgaaagactgtgctttggctcttgcatttataaaatgtttttaatctttttttgcacctcacagctcggtttcattgtcaattaaatggaataatatatccctcagcagttactgtgagaattaaattatataatataaacatatataaggttcttgatataaaacaggcacttgagtcgtatctgttattctcttgaaaaggatagcactgttaggaggagtgagatggggactgttacttttttgaagtagatgatgagttgcaggatttgcacagagaagggtaggtggcaggagaaagtaacagctataggtagggtgaaaatagggtcttatttgtctgaagaattatgtgaattcctattataaactgcaaccattcatccttttccacctcccccccttctttgtgtaggtttattaattggttttcccatcatctaagtaacttccaattccgttggagctgggaagattggtaagtagtgttatatctgtcttttctctacagttt

SEQ ID NO: 25043 - DNA, 513 bp, Bovine  19866881338935
  misc_feature (1)..(1): n is a, c, g, or t
naatgatgaatggtaaccctctgttctgtcttttgcaactcttacatgaaagcttttccaaaataaaaacttataaaatatatttgttgcacaaagaagttcatagccaccatcaaggatatctcgaagccagtgagaatgtggaatggctttatggttctaacgcatccggttctaacacaacagtactctaacacaatgctgacaaacgtaagccttcgtttctcagatctagtttatattattccatgttgatctttctaacagccaagagagtgaagtcagatggcatagatgaggaaaccgagacacacaaaatagttcccactttctcattgaacagatgaagggactctatcccagaaaaagggaaggatttgtcccagtcacagagcaggttaaaaggccagtccaggagtaagatttctggctccgctttcttaaaaccatcttggctgctgtttcagggcagctgtagacaaagcttaaatgtggactctttgggaaggcaaa

SEQ ID NO: 25044 - DNA, 1055 bp, Bovine  19866881386367
  misc_feature (1)..(1): n is a, c, g, or t
ntggtctatttagtggacacatcgttgccgacacagatatctggattcatgattttatgtcagagtatctggtagagctttcaaaggtcaattaatcactgattctgagaccttgacaactaattcagattttttagcaataacaaaaatgtagtaggcttttaaaaaaaaattacctctgctacatggctttgactgctgtgggaagttgaaaagaatatgcttattttttttttttaagcttatgtttgatgaaagatatttaacaagttttgtcttaacagagttgactttcaaagagaattgcacttgaattactactataatattagaattaaaatgtttatcaatacaaaaactgattatcttataatttctcggctttatgatcttaaagacccctttccctttcctgttcatgttttcttccttgttgtgctcagttcttctcaagttagcttgagaatttcatgatttaaccctgccttagtctagtggtgggtcccaaagcaggtggtcaccacaccatgtgaagtctctcccaagtcttcagcacatcagcattactactggtggtgctgctggaggaacagcccaggcaaaccagcacatccctcaccccagatcatcccaaatctcgagtaacttctcattgcccagagagtgtggactgagaaccatctccctgcccaaccgcactgtccactgcttctccctgcaccagtcacactaaaccttcatctggttcccaaaccccatgcgtgctcatccagaactgctgatgttctaaagcaagtcttcctcccctccagaccactcttgctgtcttccctcagcctgcagctcattttgtctccaccagtcttgtctgtcggtatcctccctgacttcccaggcttatctggttccactccccgattcccctcctactgcattgtacttccaactccgcctctcatagtgcccagacctcactgagcttcctaccatatcaatagttgtctgcaccaatcactccaaatagattgtgagcaccttgagggagggagggaggg

SEQ ID NO: 25045 - DNA, 2201 bp, Bovine  19866881543513
  misc_feature (1)..(1): n is a, c, g, or t
natagaggcaagagtaaaaaccaaaagtgtttcttgccatttctgtgagcaaaactttcctggggcgtggaatgtctgtgcctgggaagctgtctgtctgagaggcgcgtcacgggcccttgtgtccctgcagctatcctcggcatgcacacgctcatgagcaaccagcagtactaccaggccttgggcagcagctccatcgtgaacaaggagggactcaacagtgagtaccggccccgctccctgcccactgcgagggcatctcggaagtgaggaatcctccagagtctcgctacctcccgcccactctctgcaatctcattgcagaagatttcaaattctactagctaaaactgctcacctcttctttttactctcctgggatccttgtgacttgattacaaaggccttccccatcccaatattatcagaacatcctcctttattttcttctgtaagttttagagatttacttcttattctccacttcttaatcctcctggggttcatgtttgtgtgtggtgtgaaatgagatcaagctttcattttcttatatcaatattccattgtcccagcaccactcctcgcaaagtccgtcctctcacctctggtttggggctccacccggatcataaatgtccatgtgtccacacgggtctgtctctgggcgcccctcctgctccacaagtctccttgtcctttcctgtgccaacattacattgtctgaatttctccactgtgttgtttcaagctggtaatttggccccaaagagaaatgaaggcacccacagcacaattaccctttcctctggaaggcctacacgtttctttcccacccagtcttcgttttatcctcacaggaacccactgggtagaacgactgttcacaccctactgtgaggacaccgagcttcaggcagtttagtgaattcacctggttcttgcaggttggcagatgcattgtccaagcagggcccagactccaggccccatccatcgccatcctcctccaacccgtcccctcagtaacccccaagaggcccagccttccatgtccctgagctccaccgccacttccttctgatgtccttgtgtcgaggggaaatgacgccccatctctgtgagccatctccctgttgtcggtcactctaggtgtgatcaaacctacacagtacaagcctgtgcctgacgaagaaccaaatgccacagacgtggaagaaacactggagaggataaagaacaatgacccaaaacttgaagaggtcaacctcaacaacatccgggtgaggcccccttcactccacttcccctgttgtgggagtgtgggggaagccgagtccactcagacccagacagcccagaccagactgcacacagacaccagtgtcctgcttggactctgggtccttctggatcaggaatagaggcaaaattttggggtaggaggacagtataaaccaggacagcccatcatcttggtttccttcggggcctgacatcagacccagatgttcaccacagccaacccaggttcgactttggaaacccaccaccttatccacaacactgagagcttctcagagataaatcatgagtcagacacatatggctacacgggatctgaaggctggaaaagcctggtgcccaccacgttcgtggggtaacccaagcctggggaggggcctaaccctgaacctgtgtctcatgcacgtattcagcccattctgcaaccctagatgggaaccattggcccagtgtccaaagccatactctaggctgttggcccacatctctttggacccttcctgtgtgaccaccaggcagagcggagacgggtggacaggctgtgggaggaatgcaggagcaggcccagctgcctgctcacctgctcagcccgggagccagagagattagttctcagggggtgtggatgtaagctaagaagtgggcccctcacttcccagctcgcttttcctttcttctccgctttcttttaagtggctgccagcctcgtggcataatcagattggaaacctgcgcctgcagtgtctcctccacctggcctccctgagctttgctcccatgggggataaagtgacactctgaaatgcgagatccattcgggtgcctctgctatctgccatgtgcgccgtgggagacactggcacaattcagaactgtgcaccctggcaacgtctatg

SEQ ID NO: 25046 - DNA, 870 bp, Bovine  19866880419537
  misc_feature (1)..(1): n is a, c, g, or t
ncagagaacttagacattatcgttcacacaactgattgaataacatttagagtgattggctctttagcccttgctttggatttaaataatctttcatttctaatttggctgattttttttaaagcccccttccccctcttttgccatcgaagagccagctcagctgctgggttcgttggcactgaatgactaagggcaaatgcttattttggtaaatgccctcaaagtctaagcttaaggagagtagactctcaaaaactacttccgtttcttgatttcaggtagtgaatgctttggcttatagagctattttattccagtctcatggtgttggcatgactcagtgcagatgattcccacaggaaggtctggtttttttattctttgactaaaaactaaaaatagagccttcaacttgtcctggactctcagctgtcatctgctgtcaaaacctgggctcttggcttgcttacttgcttgcttctttggaagtattactgccttctttgggttaaaataagaaacaaacaaatatacatacatgtatgagcctggaatgttgttttgcttcctattgtctttattcggggtgaattatacagcggaaggtggtttttctttccaatttatttaagtgcaattcttttcaaaggtgactataggaggtatggccaagaaaaaagtattctgactcatcacatcttgttaactataccttctgaataataataaatgctgatgggattgactgtttacagtctccttttgtgtggacaaagcatgttatcatgctcacttcgagaataggacaggttaaggtttaatgagtcctttgcctcacatcacagaaataagagtcaaagaagtaga

SEQ ID NO: 25047 - DNA, 2768 bp, Bovine  19866880458563
  misc_feature (1)..(1): n is a, c, g, or t
ntcgttgtgatgggcttcccaggtgacgcagcggtaaagtaatctgcctgccaagcaggagacctgggtttgatccctggatcgggaagatgccttggagaagaaaatggcaaccactccagtattcttgcctggagaattccatggacagaagagcctggcaggctacagtccatgggtctcaaattagagttagcaactaaaattagtcgctaacttagttagcaactaagtctaatttgctaattagacttagcaactaaacaacaaaatacacaaacacagattggtaaggctggcatcagagcctctggagagatttgcctggactggtgagtttttcttgcaacataaatagccacattagatgttctttgaggggcacccaaatgcgggtgacaccccacttctgcaggaaggtgagttaggcatgcatttagggtgggggctggaggaaaaaatgaaaacctttaatttactttaactatgaaacagatatttcataggctatggaggattgagagcaaagattttcaaataagaaacatttaaaactttttcttaaattatttataattagcaaatatttcagatttaggcaaacgatatttgccttaagtagtatttgaagacttaagaagcaaaagttttgtgcctttcttatcttggtttgttccctacggtttccctgatagctcaattggtaaagaatccacctgtgatgcaagagaccctggttacattcctgggtcaggaagatccgctggagaagggataggctacccaccccagtagtcttgggcttccctcgtggctcagctggtaaagagtcggacacaactgagtgactttgactttcaattttgtttcctggacaatttagcctcaactgaatgtaccatcccacccttgccaaaagaagcaatgatgtaaagctcatctactttgatgtatgaagttgatgttttaaagagaagcagtgttaaatgtgttgagtaggattttcccccctttatgtattttcttcctgccccacctcccttctaaaatgttcttctaagattcaagtacatctgggacctttttgaatacaagattctgaatgtcagtctgtcctcatggtcacacacctcagaccctctattggacccactaacatgcatcctaattcctcccttggtgctttgtctacttcagaagacaatctatatggagatttgagaatccctaatgggtagggaatttgagttagcatatttgctaataatcatataaaattactccataacccctttcacagctgatgattggaagctgaatatatttcaataagcctttcttttctactccttgacttagaaagaactcgcatcatctcctggaaagaatctcaggtgaagcaaatataacggaccatttgtctaaacagtgctacgcttgtggacttcaagtgtgaaaacagatccaagacgcaatcatccacctccaacagattcaggacgcaatcagctacctccatactagggagcaggatggtgaggggacaggtattttgggtgatatgacaactaattgtaattaatgtaattaattacatgtaattgtaaatgtaaatttacatttacaatggattgtttgcagggtaggtatacattttcatggtcctgataattgacaagactcaggtgtctgtaaatactgcttattaaaaaatctctatgattcacattgatttttgcttcttgtgtccagtctgttcttggcaaaaaaatataatctggtcacttctttctgggttgtttttctattcagcttctctgtcaacacatctctacaccttattttgttttctatcctacattccaatcccaagtttgacgtccacaattctcaaacacagtcaaatgaaagttctgccctttccctaccttttcctggagggtagatcgagggaggcatcagggttcaggggaaatgaaagtatccgtgcataggggtggtccatagtcacaggtctttcacgatagatggttatttctctggctgagactctgccccaacctcagctctaaggccaggggaaactcagggttacaaggggcacagcacccatcccctaactccctcatcaccttctctgtgagaggccacccaccggagaggcaactgaacagacgctaaggttctcactagctttctcaatgtgtacagtaagtttccctcccatctcttgtccccacaagaatttgaaggggttgactggaagagaaatgttcttctaccataaaatctccccctcttgcttcaggctttattgtctcattcccaaagtgtcaccttacaaagctaaagagtatggaacagcctctacaatatcatgggtgttctttagtttagctgccagttggggtgggggtaggtgtgcacctaatccagacaagcaggaagaagaacactttcccatgttatatcacaatacgaagctgtttgtatgaagttgttaatatatgctgttaaggattaaaagtctgaggtctcacatgagaataaaatattgggttggccaaaaagttcaggaaaacccaagctttttggccaatccaagatattagtaattgagacaatttgtgcagtttataatctaaattccaaaaatcaaattaaaactacagacagtaaagaaaccaggctgacctgggatatatatagtttaaaggtagatttttataaacgtataataaaaagaaaacatagagtcattacaagct

SEQ ID NO: 25048 - DNA, 3559 bp, Bovine  19866880528126
  misc_feature (1)..(1): n is a, c, g, or t
ngcaggagctacttttgaatctaatgtaaaccatatgcatgcagtggagtttaaacagcttggcagaagggagtgtataaagggaagagtctttccataacattctgcagaaaatacacgatgtgtgttttgaaaagtgagaatcacagtattaaaatattgctcaattttgagtaaaaccatctgctactttcttagtgtgttttatatcatgggcaaatggcattttcattgcattgagaaatggtgttctctccctatcttttggaaaagttaacagttaggttgattattttttgtgttatatgggaaaaggaaatgtgcttatgttcacttatgaagcacttatcctttgagtttctagccccttctgctgataaatttggtcattacctctaaagtattaaaagatacttagagtgattttctggtacttaagaacttaacatagtccccttagttattatatgagtgaagaattgagttttaggagttatagtatgaaagcacattaatgcaaacattccaaaaaactaacttttatttttggttttttttcccctctaatattagtctaagtagtctaaattagtccacttagtctaatttttaagttttttgataaaaatttatcattttatgatctttttagtctctgctgtaatttgttagtcttttcaaccttagtattgctcatttgtatcttctgttttgttggttttattgatcagtcttaataggggcttatgtattaaaaaaattatctttgaagaactgttgtatttatcattctctaatctgtcttattctttttctgtaatgtctttaatttcaactcttccttttttctacaatctttgcttttattttgtaattacataatttttagcctttcttccattctaagataaaaattttaggctatatgttttcctttgtttactgctttagctgtatccagtaaattttcatgagagatattttcattattattcagttttaagtctatttttaaaaagtcattgcattttttctttggcccttgaactgtttagcagttccttttaaagtatctgatactataggtttttaaaaatttatctagtagttgtcttcttacttaattacatggcagtcatgtacgttcaggcttctctggtggctcggacagtaaagaatctgccagcaatgcaggagacctggattcgatccctgggtcaggaagatcccctggagaagggaatggctacccactatagtattcttacctgaagaattccatgaacagagtagcctcctggactatagtccatagggttgtaaagagtcagacatgactgagcaactaacactttgactttcatgtacacttgggaaggttatttgttgttagatacaagatttcatgtgtacttcaggatatccattcagtacaaacagatgacacagatggagagaatacgatatttgtgaattggaagaatcaatactgtgaaatgactatactccccaaagcgatctatagattcagcgcaattcttatcaaactaccaatggcattttccacagaattaaaacagaaagtttataatttgtatggaaacacaaaagacaccaaatggccacagcaatcttgagaaagaaaaacagagctggaggaatcaggctacttgacttcagactatactacagagctgtagaaatcaagatagtatgctacttgcacaaaactaaaaatatagaacaatggatcaggataaaaaagcccagaaataaacccacacacctgtggtcacctaacctatgacaaaggaggcagaaatatacaatggagaaaagatagtctcttcaataagtggtgctgggaaaactggacagctacgtgtaaaacaatgaaattagaacactccctgacaccacacacaaaaagaagctccaaatggattagagttgtttaaatcttatttattcttaagaacttttctctgtacttgaaccaaaaaaaaaaaaaaacactgacaaactgtgttaaaatctcccactaaaattgtgactttttccctttttctttgtatttctttcagttatttcatgtattctaggcttctgttttgagcttttatattttcttggtgaattaagtctttgattattatgtagtaaccctctttacctctaataaataattttcctttgagtactttgtgcctgatattaatcttgtcacatcactttcttttgttgaatggtacacggtaccattattttatttacagtctatctctgtctatagtttatgtgaatctcttgcaaacagctgtgagctaccagtttctgtcttttcatggtaagtttggtccatttacaattattgtgattattggcatattcatgttccttttcacagggtattttatgctttctggttcttcttttttaaaggcttcctttattctcctttccagagttttttgattgagtttgttaacatcagtttttctcttttaatattttgaaagttatgcatgatatttttagggtctaatgtttaagtgtttgacatggatatcttaaagcctaaatttataattaatattttaactgcctctttatatgaggaacttaagaacattttaaattctagcattctacttttggattattatagttcatttttgtctattattgtgtcttacagtcagtgttagtttagatttacacacatgtgtcactatgtactgttttgggtaatttagaccttccttgtcattatcattgtcatttttcaaagatatcctttagaagttctctttctcaggggccattgttgttaaacttaattttttgaggtgaaaaatatctttaatttgcctttgaccttgaaggatacttttgtttattttagatgggcagttatttcagcattctgaatatattatactattgttttctattgaaatatcagcagtcattctaattgtttccctctatatgtgatatatctttcctatatggttggtgtcaagagcctctcattgtctttggtgttctctggattcattgccatgtatccaactgtgaatttttcaaagaaatgtactgagcttcctgaatttgagtgttcataccttttgcctgtttgggagaactttcagccattatctgttgatttttctccattctctcctccacaaactgattggatgtgtgctagactgaatcagtcaggaaaatagaatcaataccaagtagttcaacagaggaaatttaatatggtgccatggtctgaatatttgtattctccccaaattcgtatgttgaaaccctaactgccagggtggtggtgttgggaggtgaggccttggggcagtgattaggtcaggaggacagagcctcatgaaggagattagcatcttattaaagagaccccaggggggtagcttgtcccttccaccacatggggttacagcagaaacaccgtgccatctataaaggggacccacatctagtgccaagtctaccagcaacacaatcttgggcttcccagccccgggaactg

SEQ ID NO: 25049 - DNA, 3176 bp, Bovine  19866880595661
  misc_feature (1)..(1): n is a, c, g, or t
nctttggcacagtcagtaaagcagaaatagatgtttttctggaactctcttgctttttctatgatccagcagatcatagaaatttggtctctggttcctctgccttttctaaaaccagcttgcacctactgacctggggagttcttctgtcagtatcctatcattttgtcttttcatactgttcatggggttctcaaggcaagaatactgaagtggtttgccattcccttctccagtggactacattctatcagacctctccaccatgacccgcccatcttgggtggccccacgggcatggctcagtttcatgggggagtttggggggagaattcatacatgtatatgtacgagtccctttgctgcccacctgagactgtcataacattgttaatcagctgtagtagtagtagtgttagttacttagttgtgtccgactcttgtcgactgcagcctaacaggttcctctgtccatgggattctccaggcaagaatactggagtggattgccattcagctatattccaatataaaataaaaagtttaattaaaaaaataataattatgtttggaaaacactgtaaactgtttacaagttttgtaaatcccaagcaacctaggatgttggtttgtttagcctgttcaaaaaagtgttggtcccatctgactcttcggcaccccatggatctatgctcctccatgttttggacaccatgctctggacaccatgctcctctgttcatggggttctccaggcaagaatactggagtgagtagccactcccttctctagaggttcttcctgacccaggaattgaacctgggtctcctgcattgtaggcagattctttaccatcggagctaccagggaggaacagtactcttccattctcactccatgaagcatttcctgatgccaggaatcagaatgactttctcttaactctggctttaggaattcacttaagtctgtgactgcactgactcatggtttatttagttgcatactgctctgaatcatctactgaaataagagccccatgagggcaaggaatttttttgtttccctctttgtccctagtttctaacagtgtgctttgctctgagttcaataaatattggccacattgaaatgtttgattcctaatcatcttctaaaatacacttgaagaaaaacagaaacccaggagttgactgaagtcttgctgcagaatttctaaagtgttgaatactaaccagttttccacctcctggcagtgtttaaaaagttcacattatggctgaaccccattaactctctagcattattgttcagtcactaagtcatgtctgactctttgtgcccccttggactgcagcacaccaggcttccccatccttcagtatctgctggagtttgctaaaactcatgtccattgaattgctgatgccatccaaccatctcatcctctgtcagcccttcccctcttgccctcaatctttcccagtatcggggtcttttccaatgagtcacctctttgcatcatgtggctaaagtattggagcttttgcattagcatcagtccttccaatgaatactcagtgttgatttcctttgggattgactagtttgatcaccttacagtccaagggactcttggaattgatttgtcaccataaggagggaaaaacctaaggtttgggacacggcccagtttgttagagctataaaaacacttccatatggcataaaaagtcagaaacatttaatttggctataagaactttgcttttagttatttgaactctttctggaaaataaaacttggtgaggtctatataaaatatccgcataaaaataaatactgctgctaggctttcagatgtttctaagacatgagattgtttgaacaaactggatgttttactgacttgagaatttcttatccatatattttaggttacatagatgtagtcatgatttgcatgcgtataactctaaagtttccatatgtgaacagaaaaatggtggattgactcagatcctctcaagatgagtgtttaagtgttaaaaaaaaacctggttaaggtattaatactttggtagaaatttgtgaccttgtttatccaccttttctgtgaacctcctggtaatcttcctccaaatgaatgggtctggtccattaaaagctgaaaacattgttccctttggccaatgcttgacctttttggagcatcttaagtatcaaagatataaaaataacctgacatttacatttacagaacctctctctgcagctcaaagagctcattgttctgggaattctcagtagcatcttactcattcctcctaaaggcacatccctttctaacacctaatcttatgtattgccccctccctttttttttagtttattatgagagtacttatatgcttatttccagatacacttaacataacacaatcctagtaatcaagttgcttcatttgtatcccaaacataaattcaatagaaataagttattccatatctattaccatttagcagctacaaatttttttttttaattcttcttttaagcttcctctggcggatattttggtttaatcatcttgtttttatttttgttttgtagtacagcagagtgctgggtgaccttttatttgttaccttagaatgttttttatcaaactaacgagtataaagaggttgacttcttgctcctaactgctctgggcaatatgaggaaagaaaaggatgagttcagggattcaaattcccacctgtagcaccacataaatcacccaaaagtttctatgtctatcttaaaagagatgcttacctcctgcagacacagagtaaaccagatacagaatctctgcagttagctgctgagttgcaatgcaaattaaatttccaactttacagcgtgttgaagtcaaggcattaattgggaaggaatggagtcctgaaaattcaaatggggtgtgtggctggatcctgatgaagctggggacattgggtcttcttcaccagtacaaccagcccttacagctccacctggggagagtaaccctgctttgccggataaagttgtaatggcctccactgtaatggcctccgctgaagaaatttacatgccttgaaaacatagctgattctccttaagacatatccccatcactcctctttagt

SEQ ID NO: 25050 - DNA, 2141 bp, Bovine  19866880596549
  misc_feature (1)..(1): n is a, c, g, or t
natcagactcagaaaaaaatgaacaacgtgtatgaggaagaggctaagcaagaactatatccggtgcaggatgcttgggcagaagcaaacaccagtaacaagtatatgaaagacttggaagaaaatagtgagataaggaaaataggaaaggaggacacagtggtccagaatttttatcagaagtacacagaggaaaggaattttgaagacttgaaagcagcatgtctagaacagaaggccctatcagaaaggccaagttacccaggactttggtcagcagacaagaagactccaggtcctaacaagccttcttgcaaaaagacattagacccttgtctcagcgagaggtcggtttgtcaaaatgaaaatagcaaggacaaagaaaagaagacatctgtgatcacccagaacacacctgtatgcagccgtcagaggagccatctgagccacggggcagtccaggagaggcaggtaaaaccagccatgcaagcccaggaagaagacagagccgcggtgttcattcagaggaaataccggggctacaagaggaggcagcagttacggaaggacaggatgtcttcttttagaaatccaaaggtcgttacaacaccgacagaagtagcaagaaatactctcagtttgtattcctaccccacaaaacttgaggactcctgtaacatcgggatgaagagttataaagatgcaaaagcaatttcagaaaaagaagcgtgtgacttggcaattttttcaagacaggtaggtaaaggaacagatgtgtttactagtacagatctctaggaactccacaatagctgagttaaacaaacagttggtaactgtttcatctgtttttatgagactgcaaaccttttcaataaaatgtttcagaggctgtgctattcaaatagccatgtattttaaaacaattttctatgataaaaatagtataatatatgatagaaatctagtatagtaaagagactagtcattgagtgatacagcctactaaaatgctggcatttgacagtgaaaatttccatatttctgagatctcccattatagtgttaaaaaaaagttttcaaaatcttctagagtctatgctttctctaccccatattttaagaagacataattatgcaccagaatcaggtgagtaccattactgaacacaagtgcagtgaagatgaacatctgcatgttctatcataacaacagtgaggaaccataaagaaaaatcacaaaggaaaattccctcttgaagaatatctcatgctgttcgtaggtgtgtttcagctgtttgtaaaaagggcgatagaacttctgagtgtacagtaagtcccccagatacaaaggagttccgttccaagtgtgtgttcataagtccagtttgttcctaagttcaacagagttagcctaagtacccaactaatgcaatcagctatatatattgtaatgtcacaggtttacaatacttttcacacaaataatatataaaacaaaaaaaaaatttttttaatcttacagtacagtaccttgaaaagtagagtagtaccatacgacagctggcctacaggggctggcatcgagtgaacaggcaataaataaagatactgcagtggtgtactctacacagtgctgtacagtaaagtacacaaaagcagagctactggtagaggatgcacgcacgtgacagtgtatgccagacgtgtgaccttgtgtgattggacatgtgaacgcacgtttgcgtctttgaaagttcacaacttgaaggtttatatgtaggggacttactgtacctggaactctgatgaattagtgctacagagagatcacagggacggccttgtccctgcccccttcaggctctctctctttctaggtatttgaccttgagaagatccctttaggtgtctgctgctgctaagtcacatcagtcgtgtccgactctgtgcgaccccatagacagcagcccaccaggctcccccgtccatgggattctccaggcaagaacactggagtgggttgccatttccttctccaatgcatgaaagtgaaaagtggaagtgaagtagctcagtcgtgtccgactcttcacgagcccatggactgcagcccaccaggctcctccgtccatgggatt

SEQ ID NO: 25051 - DNA, 699 bp, Bovine  19866880598928
  misc_feature (1)..(1): n is a, c, g, or t
ntatttatcatagagtctgagaattcaagattgtcaggtccccaaatctcatttccagagagggaaaaaccaaagcccagccctcatgagcctcctgttatcgattttactgactttcaaacactagaaaatacagtaacataactctgcactgcagtctaagcatttcaggatattggtttttgtaaaatggaataagatgcatttttctaggattgccttaaaataaaatgagaaaattctgctacatctttaaaaaaaattagctcttgttagtctacatgggttcactgcctagaaaccaagttctaaaagtgaaatccttagacatgcacttatatgaaatacagctgtagaaaaagtgcaaccattaaacttacacagattacttttccgactattttttcatagattaatctttaagctatcatctgttgagaaggtttcactattctcaatgaacacagtaacatatataaggactacaaaaaaatctccaaaatttaatacaaaatggcatatttaaagtatatattcagttctcattaatagtagataaattcataaataagaatttatgtacatcataaataaagaaatcatgttgaaatgataaaaaactatggcaatccaggaattggctgtcactatatgtctacctcttggagaaggcaatggcaccccactcctgtactcttg

SEQ ID NO: 25052 - DNA, 1359 bp, Bovine  19866880634349
  misc_feature (1)..(1): n is a, c, g, or t
ntattaaataaacagtttatccctccgtcccccacaaatactgcttacctcaaaggaaaagattagctaagagactccctacatgaattcttgcctcataatatatttgttttgcataaaaatctttcatgtaacaatttatatatccattctaccatcctgcatattaactgatcattttaaaaacaataattaatgatgataaagaattgggcattaactataggatgctggaggtcaagcccttggaaagtggcaggaattctgctgactccatggtttgtttctgattttccctgatcagtacacagcttatgagctacagcagactttcattttgaaaagtcaatatccaagggcatattttaaattaatcaaacctgtttctgagagataagctaaattagttctttaaaaggagaatgtgaaaagcaaacttatgtgttcatcatatttagcttcaagaaacagtcttacataactccaaagtggatttgactgaaccaaaacccagcttcaagtttgaagctgatatgaaacctcaaaagaatgtgttgtaaatttctgaactcacaggttgcactcattatgtttcttattgttccattcatttaaatcacaatttaaattatgggagtcaagtcaataaatatctattaagcttccttatctactgtgaattgaaaataggagtgtaagacagtttgtctacccagaaagtaaagtcttactgaggaagaagacttagacatatggaaacagttacagatgaataaaaaaattgtatagaaatgactcaaaattcatgacttctaaacggtatgatgtgcttctacaatctttctgttacttcttgactctgtcttctcatttaattgtggcccaagctagctctttccagtttaaccacagcctacagaaaccttagacagaggcatgtttttctttatcaaatgggagattataactttatcaaatgggagattacaactactctcaaaacaagggagatgataatcccttgttttgaaagtagttttaataaaagattagcacacaagccttaagcagcgtatagaaaagaagagcttcagaaaaaacaaatgatgtgtctgggaccatttcaactggtagccaacttcattctgcaaatatcttatactctttagatattcattgatttctttcttaaaaagtctttgttgaatttgttacaatattgcttctgttttatatttttggttttttggctgtgaggcatgtggcatctcagctccccaaccaggggatcaaacctgcatcccctgcattagaaggcagagtcttaaccactggaccacaaaggaaagtcccatccat

SEQ ID NO: 25053 - DNA, 1015 bp, Bovine  19866880723579
  misc_feature (1)..(1): n is a, c, g, or t
nctcacatgctgtggagcagctaaccctgtgtgctgcaagtactgagcctgtgctctagagcccagggagctgcagctgctgagcccacaggccacaactaatgggcacccgtgtgccctagagcctgttctctgcaccaagagaagagaccacagtgagaagcctgggcacgacagctaaagggtagccctgctcactgcaactagagaaagcctgcatagcaacaaagacccagcatagccataacttagtaaatacaaattgttttaaaaatcaattaatgcttgcagatatgtagtacactgagtgtttgtttactctcaaattcaaatgttgaaatctaatccccgacacgatggtatctggaggtgatgacttttggaggtgactaggtcatgagggtggagccctcatggataggattggtgttttcataaaagagaccctgacaagctcccttgctccttcttccatgaaaggacatagcaagaaggaggtcctcaccagacaccaaatctttcagtgccttgatctttgactttccagcctccagaattgtgaggaatgaatgtctgttatttaggtcatccattctaagatattttgttaccacagcctaatcagactaagacaagatgcatgtagtttcctaatgcagtaatgggagtctagatatttgcatcttgatcaatacatcaaattcagtacatcaaaagccaatttttctgttgccacatctcagtaaccagtataagttccctcttcatcatcagaacagccctcgaaagtgagtcccaaccaactccactgtgcttgacccagcaacatacgaaaaaaggttgggcaattaccacctgggagcctggacactctgagagtgtgtcattatgggaatcattttcatagaggttgctatggtttctgtgctacattctctatagttggatgattttagttaatcaatggcaagctacagtgtaattattttctcttcagagaacacaaggaagaaga

SEQ ID NO: 25054 - DNA, 921 bp, Bovine  19866880792922
  misc_feature (1)..(1): n is a, c, g, or t
nacccctctttgtttacctgttcaggtgacacgggccaaatgtgttcaatatgctccagacctggatgaataactcagaggaggccagccaacaccagggagtctctaggttaaaaaggtgagagtgagtcacaaatggatgtaaaaaattatatttgcaagacaacatttggatgagaaaaatatcccagaggaagagattggtgtattctatgacaccctagtttagaggaaatattacttcagagtagaaactgttcctaaaatacagttccattttaaatcagagaactcataatgagatgttttctcatcatttttcaaatggaagtcatcagggtgctttcaaacagctatgtagcaagaggagctctctccctataaaagggaactcactccctttttaaagagagcccaagggtgcctaggtccatgggggctgatgagcatgcatctttgtttgttctcaaacaaagtccttcctgccagaatcagtctcaactgttagggaattacttcacatcagcaacatcttccccattttcctaaacacagtagtcaaaagaatgagaacaaaacaaaaccagaaagacaattaatgatactatatataaagtagataactaacaagcatgtactatatagcagagggaactctactcaatgctctgtggtgacttaaatgggaaagaaatccaaaaaggaggggatatgtgtgatcatacagctgattcattttgctgtacagcagaaactaacataatatcgtaaaacaactatcctccagtaaaaatttatttaagaaaacaaaactcgaagacagcatagctataatctagggtcttcccagtgagtggcagagaaatgcccctaagtcacaggttggcgtcagttacggcaggagtgctgtatgaggaacca

SEQ ID NO: 25055 - DNA, 1833 bp, Bovine  19866880854643
  misc_feature (1)..(1): n is a, c, g, or t
nttcctatgtgcttattgaagttgtaagcttcctttttctttcattttctactaggtgattgcatgtgaacagcaactggatacaacttacgatgccagatgtgacacgtggtccctggggatcacagccattgagctgggggatggagatcctccactagctgacctgcatcccatgagagcacttttcaaaatacccaggtcagagggctctcacgtgggtccagtacctgccaattttctctcttcctccagccactgaatccttgtcaagctcttcatggaaatatccagatatattccaaaaggttgggagcagagtggcctggaatatcattctgcttctttcaagacactgtttttgtaccgtagttttattttccctggtctaagtacaagagctttcttttggtattgtgtgtgtgttttttttttttttttttctttagcaaggatttgagcttggaaaacagcacttcctatcactcttgattcactcccagattcgtcagtgaggctccctggtccacagtccgtgtaacagtaatgtgctctgttctgctcttatcaatctaacaattttttattacttgctaacacttccctttctttagagctttaaaatgatagtattaataaagttagaagtagaatttttgataaaataataatgattttaaatatgttagtgttttgaatatattaatataaaacattaagcttagaaaaataatctctttggagccaggaaggcactttcctgtgtagacacctccccttttatatgtgttgtcagattttccctcttgcttatcactaattaaacactgtgtatgttttggttagttcctagatatttcagaaaactgacatgaaaagactgcctatttttattatacatgtattatcttttaaagactttcttttcaaaatattatttattttttatttttggttgcattggatcttcattgctgtgcatggactttctctagttgcaaaaaacaggggccagtctctagttgtggtgctcaggtttctcattgtggtggcttccgtttttgaggaacgtggactctagggcacgtgggtttcagtagctgcagcctgaggactcagtagttgtggctcgtgcattagttgctctgcagcatgtggaatcttcctggaccagggatgaaactcatgtcccttgcattggcagctggattcttatccactgtatgaccagggaaatcctaaagactttcttatggattttgcctgctatcttaattttaatgaaatgcacagagagggcctatgggaacatgggtccagggtggagagatgaggtatgctaaaatttgttcctacactctccattaaataaattgtgggatcctaatgcctgtagaacattgaatcatatgtaaaagcctggtcgggggtggttccagtccgaaagaaataatgccaatatgacctattcatttccaaatagatctatttagaatatttgggatggaattaaattagtgtaaaacattcaaatttgtttttaagtttaccttgtaattttctgtcctgcctgtatttactgagttataataccttaaatatatatcatcctttccataacaatttcaatgtatctctaaggtcttactgtttataaaatatattgcttattaataagtggggcttcccaggtagcactagtagtaaagaacctgcctaccaatgcaggagatgtaagagatgcaggttcaatatctgagtcagaagatctctggaggagggcatggcaaccgattccagtattcttactggagaatcccatagacagaggag

SEQ ID NO: 25056 - DNA, 3527 bp, Bovine  19866881019335
  misc_feature (1)..(1): n is a, c, g, or t
ntaaatgttccctgactggccgctgctgaccgccattctcaactagaggaatgggatctttcctggcatctcgtttcttcccaaggtcctcacaccttgagtgctgggggtggggtgagccccgtctgtcactcagctggaggagggccagtactgctcaaccctgtggaggagccgctgcgtattgtcctgcttctctccttcctcttatgagtctgttggcgccaaggtcacattcccgagtctcctcctcgaggatgcctcggtctctcagagacaggcgcagagactcatgggaagtgagctgctgctctcccgggaactggaggaggaagagggttgagcaacacggtgagtgagaaggagagaagttgaaagaagctgcaaaacttggcagagatgatacttgattggccttaaaagattaagtatcaataggatgtaactaactaaagccataggaggtgacattccaggaagaggaaatagcaccaggagacccaagatcatgagaagagaattttctgagaactaaacagactttggtgtgatgaaaagtggttcaggaaactgacaggactccagcctgggatctagtgtggggacaccatgagccataccccacagtttggaattttggaggcaaaaggaagaggagagatctgtaagcagaactagaaaataactatgatacccggtggaggatgaaatggaaaccaagtatcaggtaagacaatatatccagattaaaataataatagcagtttttattattaaaggactctgaatcaggattgtggtttaggagtttcaaacaacataaccccctgagctgagcatcgctgtgactggtgagagagtatcctgcttaccaagggtgttggaacaaataggctgaaagctgccatgggagccacagtgtatcttccctgcagtccaaaaggatatctgtggatgagagaagagatggaagcaggatatgagctagctattgtaaaagaacacatttgaaacattcagtcatcaatcgagtggaaagaaggaggaactagattgggaaaagaacaaaattcagcagcaaaatgagccattgctctgagctccagggcgctacagttgggtcagaggcgggaacactgaaggcacatgagggaccccctggtgccctgctctgtggtggccaaaggagggaccctggacaggctggtcccagtcatcagagctctcagaccaccatggagctgaagagagataccagccttcacctgctctctttgtagacaaagggaaaggttttagattttggaagggtccccctcttgttttgtaagttagcgtcatgctggcgtctgagaaacagtgccaaaaaacctgagccctcacaaggggtcgtctgagcctgtcatgggtgccaccgtcttcacctgatttgtttcctttagggccaactctgtgacctggaatccacataagatgatgggcgttcctttgcagtgctctgctctcctggttagagaagaggtatgtctttcctcactcgtggccacatctgcagttgggattggatacagtaatgtgtgtagtgacaaaattaagatcattttacagaatggaacagtgagccacatccacagtaggggaaattgtgaatgaggatagctgtaaggccctgctcttatgtccaactataagacggttatatcctgactagacgagacagtcatgttccatgtgtggctgaattattgtgcttgtgaaaaaggcataggacattaggttgtactctgctgcagggtcaacagtgggtcaagagagaaataccattcaaaaattagtcatgggattgaaagaagtggagtttcagggtgagggaggtggcagtcccccactggcctctggttaaatcacacttggagtggtttgctcaggttagcatctaatcgtataggagaccccatcaagcaagacctccaatagtgaggaacattaatcaacatgaacagaggtagttgaaagaactaaagacgtttaatctaatctaaaaagagtttaacttaaagggctgagaggaaagcagccttcacaacataaatgactcaggttggagagatttgctttttatttaaggcttcagggagctgggttagtcacattggatggtacggctttgatgacagaatcacaataaccacgatttgaagtctgacttggggtcaataaaaggaatgcttttctaaaaattaagctgcccaacaggtaatgaatgacttatgtaggaataaattcatcatcaggggagctgactgagtggagattggacaagcgcttgttagaaagaggatggaaagatagaaggggcaggaataggaactgatctggaggtccagggttaggactccacgcttccactgcaaggggcaaggtttcaatttcttggaactagggttccaagaaattgccttgtggcatgaccaaaaaagatgaacagctctaggatccctttgaaatccgagagttcataacatttcttttatagaggtccaaggaataataccatgctatcagatgatattctctgatttgtttaaaaaaaaaaaaaaggagagttcttggtttaaaaaaaaacttggaatatattagcttaaagagttgaaaacaagtttcataatttcagggagtatctgaaccttttattgctgaaatattttataaatatctgaaaaaaatgatatttatgacggtttctgaagtttatttgatcaggggaattttttgacagcagctcttttacagccagaagctattcatgtattttaaatagtttggaatataatggctccgaatcaggatatgatctcaccctttttatctgacttctacttgtccttttgtacaaggagactggtgctgtcttaccttttagaggtcacgtgctctgagttgcttttcctatcccagtagaagctgggctggtctctccatcattccacactccctgggtggtctcccttaggattgaaggcacctagccatgagcttgcatggctgggggaaaaatggtgccaagtgtctgtgaccatgaaacaaaatagattcacctattgcaatttttagtcttattggttttcgagtccaattcaatgtcattctactgctctaatataattacattgtattgaatttctcccactctcaaacaaataacttaatgaattccaccaaatatgatgtccagactacaagactgagcccaaatctgttattaccatctggggacctagtcttggtctttcaggatctagaccaaattttagctgcattttcattttagtttggagaactttcagaaggggctctcacttctaacttcaaccaagtgatcacagtttagtcttttcttctcttgtcatgagtcacaaagggaaaagtcaatgtcaaagcttctgtaaaattacaattacactgtagataaccaaagcgtcaaagactttctgtggttcgtgacaaattgcaatgtggtaaggagg

SEQ ID NO: 25057 - DNA, 867 bp, Bovine  19866881067596
  misc_feature (1)..(1): n is a, c, g, or t
natttctggtttggtcagcactaatagacattagctgatataatattttcttaaacaatgctatctacacagcacatacacccttaatctcttgcaaagggtaaccacactgccacgtatgatcatttatcacaacactccccttaatcattcatgctgctcagcctcatcagacatccttccatcaaagtatgtctccatggtaacataagccagatttggccatttggcctctgtttggaacacaaaggtcacttgagtgtttatgacatttggattttggactgtatttccaaaactacaaattccacatggttttgacatttggatacactcttcattaatagcattgtctcttggtgtacacatatgtttcaatttgaaattatatttgcttattggaaatgaaagcagccaacgtaaccaattttaataagattcatttttgtttcttcattacatttctttccagaaaacaatactctgtgctttaaaagagtgctctgtaggaaaatcattgtaaaatgtaaatcactgagattgctaaaaaaaaaagtctcaaactaacaaaactgaaaaatgtttattgattattttataatgttctctttttctcaaagtataattacatcttgaatttttgttgaaatgagataattattcaagttgtcagcatattgttacctttcatagacagaaggtattgaattttaggatggaaataataaagtgcatggttgtttctggataataagactcaatatcacaggatcaatactttccaagaatatctatttaaaataataatagctaacacttactaaacattttctacatgcctgattctgatctaaatgatttagatat

SEQ ID NO: 25058 - DNA, 1359 bp, Bovine  19866881127657
  misc_feature (1)..(1): n is a, c, g, or t
nagactttttgatttggacagtgaatgatcaaaatcatattttagtgttttactcatatgaatatgtgctcatgtcaaaatacacatgtattaaacatcaggttatgaaatactgattttagtctgtgggtcatcagctgatcctgaagatctctttctctctcttctcatcccacaggttgttattttgtactttgagccaagcacatttcgctgtattctcctaagatgggtccgccttctcggttttgctactgtttatggaactgtcactctcaagcttcacaggtatattttattagttctcattcccatgggaggatcaaagtgtttcgcttagcatataattgcaagctcagtcagccactttaatggttaaatttcaggaatttaggtagtaaaataatatgtttttcattttcaaggcaatatctttaagattctctaggaaaacctttaatacaattgaatttgagcaacatgctttagtagaatgtgccattggttgtggaaaggttaattctgaacaaaaaaataagtttacaatgaatgtgaaatagtatttactcactaagaacaggaagaaagacaatacagctgaaataatcaagcccagagctaccaaagaatcctatatagtagaattcagcaatatgcttaccaaacaaaaagctgctgtcctccattcccaagttccatgccccaggggaatcctgcttttattccttgggtgaatttccaaaaaatagtgttcttggtttccttccttatccaatgttctccagtgcttatcagccttataaattggagaacatagtaaattcccttatattttagtttcaaaatcacctacttttaaaaatgtagggacttccctggcagtctagtggttaaaacttggccttccaatgcagaggggatacaggtttgatccctgattgaggagctaagatcccatgtgcattatggccaaaaaaccaagacataaaacagaagcaatattgtaacaaattcaataaagatgttaagaatggtccatatcaaaaaaaaatctttaaaaaaatcttttcagtgtatatgataaatattaggaagaaagaggcaataaaataaattaccagtccacaaagagtaggggtagctggaaatgattatccagggctttcccttgcctccacttcccatatggtagtggtgccaaagaacataggaggtaaaatagaaatttctcctgcaggataatactgtagttcagtagaagaaatcctttatgttgatcaggtttaaagctgctttaataatcacagtaggccattcatatgttcatgctaatttgaccataagtatttctcaataaat

SEQ ID NO: 25059 - DNA, 948 bp, Bovine  19866881155057
  misc_feature (1)..(1): n is a, c, g, or t
ntgagtcaagggtgctttttaggatgcatccaattacaccatgttcacagactgtcagaaatgattctgtaaagggaacagacattcaaggtgtagaagagagaggggacagttgcaggacaatgctctggtgaacacagaaggactaggattcagtgcacaaacggaaggtttggtcttagccaggagtacagacacgcgtctggctaatcactggctacctgccacctgcttccatttattaaaattcacaagacactcaactcttcatggctgttgtccctgatacccagacctgctcataccttcctggtgtactaatgctaatatttgggatgtatatgttcaaaatatatataaatagatgtaataaattatcagaataatgtaataatatttacacataaatatgcactgaagtaaagtgaagtcactcagtcatgtctgactctgtgaccctgtggactgtgtccatgggattttccaggcaagagtacaggagtgggttgccatttccttctccaggggaccttccccaccaagggatcgaacccaggtctcctgcattgtaggcagatgctttaccatctgagccaccaggggagtctaaagatatactatatattgctatatattggagaagaaaatggcatcccactccagtactgcctggagaattcaatggacagggtggcctggtgggctgcagtccatgggggtcacaaagatttggacatgactgagcaactaacacacacacatatttctatacagtataaatatataaaagatgtaatatatttgtttataaaataataatttaagatatataagatgtataaaatattccaacagatagtttggcctgaagcttctctaattgtccccaaagatcctttagagctgtttttctgtttttttattttaaagccaagcatcctatcaagg

SEQ ID NO: 25060 - DNA, 1728 bp, Bovine  19866881166605
  misc_feature (1)..(1): n is a, c, g, or t
naatagtttccactcgatttaagccttcagtaggtaatccttcactgcaatgccttctagagacacagagagaaaacagtttgaattatagtctttaaaataaacaaaaggatgaagtgatctagtttaccaaatcccaatcatttgcataccactctcaagattcctgcctgtatctgcgtaccagctaatattttctttaaatttcttctatttaaaatattttaaagaaaattttacattgccactttaaaggaagaactgatagataattcacacatagaatgtaatgatgaaaatgaatacagtgaaataaagagaatagatttcatctaggtcgtattgcaatgggaggctctaagcctgaagtttgatctgctctttgttgtaaaggaaaattagcaactgctgggcaggtgttaaagatctattatttccaaactaatttttctcctggaaataatcagaaggatagaaagagaacctgaatggaaggaattttcttgctttatggttctgtgttatttattggattggcaaaaagttccataatgtcatatggaaaaactagaatgaactttttggccaacccaataatgttgtgtttttgtcccatgatcagcctcttccagaccatggtgtcatatgtttcagacacttgaggacatgcaacaagtcaggggaataggaatgtgttaggtgtggagggaactgtgggaagctgcttccaattctgcagctgacattttcattcattcatttatcaattactaagcattaagcacccaccatgtgtcagtcattgtgctaagagctggggattcaatgtaagaccctcacttcaaggagaagataattagttaaaaataaaaaacataattacataagcaaactgtagcatataaaagaggaccctaagactcacagggagagaggccattctcaagtctcaagaggccatctattcttttgggaattccagaagtcttactgtccacgataggctgtcaatgtcaatagactgtcaatttcctttagtgagcactggttgaaaaacagttaccatataaggagtagagattgaaacggacatgagagcaaagtgagctgtgatatggaaataataaagtcagcatcaggaagaacatcagagacatcttggtggtggtttagtcgctaagtcatgtctgactcttgcacccccgtggactgtagcctgccaggctcctcagtccatgggattctccaggcgagaatactggagtgggttgccacttccttctccaagagactcatctaatcctttcttttgtaggcaatacaggactataatttcctagatgctaaactcagatttaaactggacctcctgaagttactatacgacatacataagaaaggaatcttgagagagttaaggatatctacatttgttccaaaaagataatcgggagtattcctagttgttaaagtaagtacaaaaaataataagagaaatggagcggaatgaattggcagagtggcactgacatgaattcactactagtgagaagctacagtatagcacagggaactcagctcagtgctctgtgatgaccttagaggggtgggatggtggaggggaggtgggagggaggctcaagagtgaggggaggagtagtagtgtagtacctagtagctgattcacgctgatgtacagtagaaactaacacaacatgtaaagcaatt

SEQ ID NO: 25061 - DNA, 1565 bp, Bovine  19866881167714
  misc_feature (1)..(1): n is a, c, g, or t
ngggattactgatgtctcggaaacacaagtggaaactgagcggcgtggagaggtacgtacatttttctccttaacaatgtaccatgtgaaagctatatatgaaaagcaaattacacccaatatccaagaagtgttggtgtacaggtgagcccattctctccttgctcgtgtgctttgccttgtgtggtcataaatgcatgagtattttgtgtagacagcagagacatcagatcctatccaagtgacccaagtcatatgtctctcaaacacagagatcatagagattcccaactggcctccatgcttgaccagagtactcaggaatgaccttcctggggtctcagaaccaacaactatcaaaattgttaaaagcttcatgcaggccactgttttctggggggacagaggtcgctctcactagaggataataaccactgctttaaagaaaccaattaataattttgtgatgcaaagaagcaccttgtaatttattagtgttgaaagaggggtttgtggtttaacgtggtccattgacttaaagtgaaacctgcttgtgataacatcgcctgatggcttcatctccataatggttctttctggtgagttctgatggatcctgcagtcacctttacttaggatactaagaaggagaccactgagaaaaagctgcaaagcacaaaggagctgatatttgattagcataaagcctactcagggccaaaggaaaaagacaaagaatcacagaatgcagaattggtctcaggcttcggttcctgcccctatgcagagggagctcagagttcccagttctcccatcacaacgtggcaggtcaaggatagcagggagcctgacatgccaggcaactgagaaagcctggattcatccaggactgccaaatgcccactgtgcccagccaagtagccaggtgttgtcaaggggaagcttcccccggctctccctctggacagctcagcacaatttctgtaccaagatgaggagactgacagggcttgaaaacatctgagcgcaccaatcacacagggcagccgggccagaatgaatggacagggtgtgctgtgtgatatccaggcctacccacacgcagagagcgcatgggtggggaaggagggcgtgggatgactgaagagtctggggcaccctgcctcatgagcagaaggagggctggagaagactcgagacagaccagccaaggaccaggtcccccagtctgctgcccacattctgactgcaggtgcctgttcaggtgtgagtgggtgaggattggcctgtcctcttcccagggggagccagctttaggtctctgcttctggttagttgatcggaattccttcttgtcgtgaagatctgcctggaactagaagctaaagaaggagtgaactaaacaggaaaagagaatgaagaaaagaaaaccatccagaaggtgctagttcagaagatcggaacaaaaattcagatgacatgctatcagaagaattggcctgtgtacagaaccttctcatcgttgagtccccttaaactgaccagcacagaacgtgagaggctg

SEQ ID NO: 25062 - DNA, 2788 bp, Bovine  19866881216011
  misc_feature (1)..(1): n is a, c, g, or t
nagatagtagggttttcctgggctgtgtttattctcttgttcactttagcattaataattctgtcctacacatatatcatcagaacaattttgaggatcccttctaccaatcagaggacaaaggccttttccacctgttcttcccacatgattgccatctccatctcttatggcagctgcattttcatgtatatgaatccatcagcaaaggacagagtgtcttcgagcaagggggtggctgtgctaaacacctccatagctcccatgctgaacccctttatctataccctaaggaatcagcaagtcaagcgagccttcatggacacagcaaggaagactgtatttttctcaagtaaatgaaaaataaaagtcctgttttatgaattagacccataagatgaaaagcaattaaatgaaaatctaggaatttcaaaacctcttaatattcacacagcctccctagattcatttttaatcattcatatttttattgccagcagtttatcaaggatatttgcatatgtatattttcttcttgccatttaaacttgaattcttcatatatatatatatatatatacacacatcatatacacaaatatatgcttatagagtatacagtttttttccattcaatttgcaatccttttctcatgtacttttcttcctttagggctggtttttctagtctgtaactatgggagtgattttatttccttctttgaaacatttttttatggtaatagaaaaattagttttttttatataaattaatttcattatttcacactaatttttagaaaattaaagtcagaaagaggcagaacaggtgctcacaagagagaatagtgttttacaatctcaccagaaatcaggttttctagaaattaaatgcatattaaatcatatttaatcttatttttaatttagtacacagagactataaacataatccgacagtcttattagaatcttgcacacaaccttccttttcatactgtggcctactttgtaactatgtgaaaaacagtacaactaaaagaaaaatgtaattacattttcttgagaaatcaaaaaacgtttcccattatggagtttaacattttctgtgctgttgttcagtcactctgtcatgtccaactctttgcgaccccatggactgcagactccccgggtgcagaagactgcacccaggtttccctgttccttactatctcatggaatttgttcaaactcatatccattgagtcgatgatgccattcaaacatcactgtattattcttcaattcaaaaaactattataataaatagttgcttagggaaaattatgatatagaccctgctttggggaaatgccaattttaacatatatataataactattcttttaagaagcctgaagaaactggcaacttaaaaacttgagagctgtgtgttaagtttttaggtgggcaatatgagcagcccaggagacagtgtctcaaataactctgagaaactgttccaaagaggtacgggggaaagatagtgtatatgtgattttgatatacagttaagcacacatttattttagaatttctcctggtcttatgaagcttctgccagtcatgagaaacaatttgtaccatgaagaattttagtacttttctagatatgaggagatacaagaattgggctcataaaattgactcctgaaaatgtctaactatctaaagacctgttctgccagtttttgcctgagcacagagtgcctcacttctgctctccaccctgaacttcttttaggttctattcatgtacagaagcacatgactgattccttgtggaggtagatggcaagtgccaatttgtagctgacagtggtcacccttagcttcaaagaagtctgggatatagtcttccatctaagcagtcgtgtgctcaactgaagaactgggagaaggaaatctgcccattgtgagatctcatctctgccatgcatgtgttttttatcttcttttagttgctgattcatattttctgcattttaatgcatatatattatctttataaaaataagtgaaagcacttttatctctaactctgcctaaccatgacttttgtagagagaactaaggttgctgaggtaccgattatgtaactcatgatacggacttcacctggtgaaaaactgcctgtcactattaattgtaatctttatatagctcttcttcttgtttctttcacttgcctggaaagaaagtaattatgtaagagatgtgattcagacaggggaaaaagtccttatttaatccatgaggctattagataactaaaagagggatttgggcttccctggtggctcaggggtaaagaatccacataccaaggcaggagattcaatcccgaagttaggaagatcccctagagaaggaaatggtaacccactccagtgttcttgcctgggaagtcccatggacagaggagcctggctctactgtccatgggatcacaaaagagttggatacaacttagtgaactaaacaacaaacagggactcacctaagatggattttctaataagacttttctgttgatagctcaattccttttagggtgcactcatttcaatggctcagaaaccttttggaagttattttaagctatagtgtaggcacagtaagtatagtgtgctaaatctgggagggaaaaaactgtagttttactctaagctttgttccctttgcgatgagttatttattattttttttttttagggaagataatgttgccacaaatcgctaattt

SEQ ID NO: 25063 - DNA, 1224 bp, Bovine  19866881374501
  misc_feature (1)..(1): n is a, c, g, or t
ntggtgagagttgtatttctcgttaatcttgcagcttagcataaatctcagaactatcttgaatctcaaaagcgacttgaccaccttcttcctgccaagtgggagcagagccagtcatcacaatcccttggcatgtccagtgggctggggtgcctccggtgctgccctcaaaccttctactgggccagcatcctttgttcctcttgagtctcgggctggggacaagggaacagcatcttacagaaagttggagccacctgggagagcttgctttgctttacaaagcagtttcttgcatttcttttcatcagcttggtaacccctagcactacgtatcgaatggccacccctattgggatgaagtccctattgatctgatgagtgactaaaacagaatttttcagatcataaggacacaacagacttgatcccacaagatactggctaatttgtcatctgatacacccctttactcttgttattaaaaacattccctttaagaaaagatgtctaaggatattaggtatatccagcatacgaatgagggcccatggatccttgcacgatgagtgacattgttttgaaaaaaacaaaacaaaactatttcccaatataaatttatagtctatctatagaaatgtaaattgttgcacatgaacaattgtctcatattgggactttgcaccaggagtgaaattatttctatttttgtgagttgcagaaataataaacatttaaatcctggcctcttggaaacctgcggaagagaaacttggcaaaataaaggcacaatgattatatgtcattaaaaggaacgaaaatgtgttctgtaaattctcctaagtaagaggatattttttgagatattcagaagtgtgtttgaatgggacacatttttccttcctagtgatggcatgtgctttataatgatgttatatgataaggttctggtgaaggaattggttttctgtgtcccatttgaacttatttgatcaggcatttataaggaaccaggattataaagcaaggcaataaacacaatcatgtcacatcatgttttcttaatgttttttcattctattgtccctgcttccttaatggagaaattatttactctatgttggtatatatttctttttgctttgtgttccagaagaacatttctaaggtcacacatagggagaaacttactcccataactaaatgaagtgcttttcaaatctg

SEQ ID NO: 25064 - DNA, 1065 bp, Bovine  19866881445638
  misc_feature (1)..(1): n is a, c, g, or t
naattagttatggccatcatttaataaaaattaataaatatgtaaaaaagcaagaaaaggtaacccattgtcagaagaagaatcagtcaaatgaaacagacccagaaataatcaggataatggaattagcagataaagactttaaaatagctattataatagtgttctcgaatgaaacttcaagaagagttaggttaaaatgaaaaaaggaaaggagaaggcaattcagattaaaaccacaatgaaactactagtatacactcactaaaatgactaacatttaaaagactgatacttcccagtgttggtgaggttgtgaagcaaactgaacttttttagattatttaggcagtgtgaaatggtgcagtcactctgcaggcaacacagctaatatcttattacatctgtggttaccttatgatccaaaagtgtcacttgtaggcatttgctaaaaattggtttctataaaaagaatcaaacacttttataaaatgagcagagtaaaacctagatgagtgtcagaaaatgagtttcagcttttgtggtctcacatgggatgtggtcagactaagtgagggtcttagagcattcaatataaacaaaaagcaatgaaaaacagcagaagtcagaaatgccaactgcagaaatcagtagtccttttccagaaatttgagtaaaaatctcatatcctgtccttacatagtaaagacagaatgcaccgtgaaagcttataaaagctgtctttggaagtgagttgtaacgatctgtttagagatttagtttttttttctttaatgtttgactacagcctgagtagagaattcacttttagggctgctctgttctttcattagtgtagctctggtttaagaaaattatacttcaattttgtttgatgagagaacatgaaggccctattatagcactgtgttatgaagcgacacttaggggtttttcggtctcctgctacaaatctctttttagtctgtcttggtgatttaagaattgcatagggttaatatgacccaattcatttccccggatgcagttcttttttagtggaaa

SEQ ID NO: 25065 - DNA, 1176 bp, Bovine  19866881518809
  misc_feature (1)..(1): n is a, c, g, or t
ngggatttcaaggaatgggtttgaatggacagagatgagtttggttttggacatgctgagattaagtcattcgtgaactctggttatagaggagccaggtctggtcctcagaagagaggtcaaaactagagatagatttgcattgtcatgatggggttgtcactgatgctgtgagaatgaacaggaatcccagagaaagggtgagaagaacaggggcaggcttattgtgtatcactgaagaagagttttcgataagaaagccctggttctgtctttatccacaacttgaatcacctgaaagatttatattttaagattcaggaaggcaatgtaatcaaattatttttatgtccatttgctctgatttatttattctgctggtatcaagagaactaatgtttgagatgccttaaaataatttctatttacagctctctgtgagcctggaagtcacaaaatctttgtaaattttgcaagtctttgagaaaagccttcatgagatgcactttcagaccacaggcatatggtgagagtgcctgccttccaaagcagagactaagaaatagaaaggtttggttatagttcagatagtttttgaactggtttggcaataatgggtcaattctgttttaatgactacattttattttcttgatggcatactttgtctatggatttccatatatatctattatagagcttttaatattttatctggcatatggtcttctcatattaatgatgagtgtgaggtttaaaaatattcacaacctataagttgagagttatgttttattcagcaagaaattttaggacttcaagccccaagaggcagcatctcaagtagccctgagagaactgctgcaaggaggcggaggcgaggagggagctaggttaaataggagttttgcagcaaagggcaggtagtttgaacatcaaaagattattgtaaattaaggaaagccagatatcccaagttaagggattgagcgcttttcttgtcagtgagaagatacaagagtctgggctcactgaagtcattcctttgatatgtacctcagctgtttgaggccagtatcctgtgttttcacatcctgagtttcctcaggactcactggccccacgctggcgggcctgcagtcgctgacgactgtgacatccttatttactgatacg

SEQ ID NO: 25066 - DNA, 674 bp, Bovine  19866881679960
  misc_feature (1)..(1): n is a, c, g, or t
ntttttaaaaaggcagctgagggacttttggtggtcctgtggttaaaactctgtacttctactgcagtgggtgcaggttcgatccctggctggggagccaagatcctacatgtggggcgttaagatcccacctgccttgtggccaaaaaatcaaaacataaaaatggaagcaatattaaatataacaaattcaataaaaactttataagtgggccacatcaaaaaaaatctttaaaaacattttttaaaagttatctgaattagtttccatttggcaagagtgttcttaaatcaaaaccattagtcctaacaggtataattggctccagatgattacccacaggtctgaggccacatttggctaatcacacattcctacaggtaggtaaggtggggatacgtgtgcataagtgtaccaaagcccaagatatacaaaattcctcctaaagtcagtgaggtgaaatacattcgacttttgatagatgaacacacaaatcatcccaaattgctttcatataaatatgttttattgcagagaagttataagtatttacatgctgtaacacatcacaacataaatttaccaaatattttatgatgagatgctgcaggtttcagataatagtttcagaagaaccacagattaagtgaagagactgacagttttattgact

SEQ ID NO: 25067 - DNA, 1145 bp, Bovine  19866881818998
  misc_feature (1)..(1): n is a, c, g, or t
nttaaatattggacacatgcagatctgcatctgtacaggtgggggcagcctggtctcgtccctgcctctgtccttagtcactgaccccccagcctggcccctgagaggatcaatcctaacaactcatgtttattcacttcccctttattttatatcatgtctgcatttatcatttcctcctgaaaacatgacatggtgatattatcaactaactttcataaagaaatatcaggatgcttgccctttgtttacatatctgaagagctaaatggtgatgtcattttgtcatgaactcgctgatttggcatctaagttcttcgttcctctctcttcaatctcctatcaagccaacctggaataccgttgcttcttggtcctcaaaccaccatgaccctgtctaaacagggacatcagccttcgtttcattaattccgaagcgctgggacacagagacacagggacctgcagtcacctcttgcctgggtatcaggtttgcagttttatttgcagtgactgagtctggtcagcagatggcaacgaacatcttgcaaggaaaagacattatttaggttgtgttaaaaataaagagaagggagagaaagaaaaccggacatgcgcggaagcagacagcacaaagttgcgcctgtcttgcaggacagggaagcacactcatcgcaggacctgggcggggttccagtcccacccaccttgattcctgagcccctgcccctctttctagcccatgcttcttattcattgttcaggagaagttgtttaccggagatgttagattcacagcacatgcagactgggggtttctgagaaagggagatggaggctggggtggtaaggaagagtgcccccgattctcagtgccacgaagggctgggctccgccggctgagtagcccctctggccaacctgcatctgtggcctgcctttctggtccttccctgctgctctgtatgcatccagcatctcagtctggctcccggctgcaggaacagccctccgccttcccgccccagccccgagccgctccgggtgacaggagacagctaatttaacctgtgtgtcatctcccttctttcttgggcgggtgccatggcaacccccaaggctcctcaggctttctcattgactga

SEQ ID NO: 25068 - DNA, 1880 bp, Bovine  19866880297755
  misc_feature (1)..(1): n is a, c, g, or t
ncatgaaagtgaaaagtaaagtgaagtactcagtcgtgtccgactcccagcgaccccatggactgcagcccaccaggctcctccatccatgggattttccagtcaagagtgctggagtggggtgccactgccttctccaagttaaataagcagggtgacaatgtacagctttaacatactccttttcctatttggaaccagagtgttgttccatgtccagttctaactgttgcttcctgacctacatataggtttctcaagaggcaggtcaggtggtctggtattcccatctcttgaagaattttccccagtttattgtgatccacacagtcaaagtctttgacatagtcaataaaacagaaatagatgtttttctggaactctcttgctttttccatgatccagcagatgttggcaatagtgtatgctaaatgcctgccatggtaccagacagcaaccaaacttccaaaaacaacacctgttgttcgtatcctttgtggtcactctgctggcaaagatgcccccagagatgccctaaaatagttcagttcaaacggggaataaggaagaggctcaaggtgataagaagaactaagttatcatgatggtgattagcatgccctcacccctacttgtttcctagggagatctaaagcattattttctagctggaggtcagtcccacaaaacaaaaagaaatggagctacactaaggagcaagaaggaggaagtctgagttgctgaagctcagctgtctaaataacaagctagacagctggtgggagaggaagtcagggaaagtcaaagaataatacatactgcaaaaatccgatgtgtgtatagagccacagtctggagaagtttccaaccttcactgtgctcattctaatcacctggtttgacagagaaaacctttgccctggtggattctataaaaagattcagggaatgaatgttctacagaggctgtgtaatgatttttagtctggaagcaatggttgggaaacaaagtctaccctagaatcaagtctatttccagggataaaattgggtgcactccaaaagcctccaagtgcttttcagggggcaggggggaaatagagttggaggtattgttcatcagcacaggtaaagacagatacgcacagtgttgcatttagcccctatttgtggaagtaacgctgtgtgcttcatcattaagcccgtggagaccaatgtgaacagcatttttccacttccatataaaacaataattggtaacatttactgagtgcttatggtgctccaggcacaaaactctttaaggaaacaggatagaatttgcttttgagtgagcagagtcaagacatatgaagctccttccagagactctgcagtaactgttttctcctatcacatgtccatacacgtgaatgttgttcaggttctcacgagaccagaaaggaaggattccaccatcacaacagcttccagttatttagattctttcagattagtctttcctgaatgaagagtttgttccctgataccaagcctgcaaacatcctcctgctgctgctaagtcacttcagtcatgtccaactgtgtgcgaccccagagacagcagcccaccaggctcccccatccccaggattctccaggcaagaacattggagtgggttgccatttccttctccaatgcatgaaagtgaaaagtgacagtgaagtcactcagtcgtgtccgactcttcgagaccccatggactgcagccaaccaggctcctccatccacgggattttccaggcatgagtactggagtggggtgccattaccttctccagacatcctcctattgctttgcaattattaccttgattttccactctttggttagctgaag

SEQ ID NO: 25069 - DNA, 1025 bp, Bovine  19866880376505
  misc_feature (1)..(1): n is a, c, g, or t
nctcatgtctccagcattggcaggcaggttctttatcactaacgccacttggcaagtccagagtagtttactcatttacaaagtaactgtaactgttacagtgaataattccttatattattatttttttctgttcaaatatctgcttgctctctgtctcctgattcaaccctagctgagaatggtttcaggagatagatatgcaaagttgagattctgggttgcttcggttgtgtctttgaacttgagggcagcgctgtatttttttgctgatagaaaatgaggtgctagcaattcatgggatgcaatggtgttgccattagtccagctgtcgcctgtggttgaatgtgttaaagtgccaattgaagatgtggcctatgtggcagtaaggatgacaatggggacagtggtgtgggatgactcctcagagtgcgctcgagcaattatagaaagaaagtgacaagctctagtcctataactgtcagctcaagtcacagattgaggagcaaagagcttacaaggtggttctaaaatatgttcttatttcttatggctgcagggctgatattgtgaaaaaatcaccaaaaaatgtattatgcaagttgctaaattacagttgaactcagagtcttgccaagtttcttatgtgagagtgaagacactcattcagaaagattaggagactaaaactagggttcagaacatctggttggccccggatgcaactgacaatcttgagctgccaagtcactctgggtttcccttggcactgaaattacctaattctcctgtacacagaagtcagacttacattcctgtacctgaaaatcttattatttaatcttacctgaggtaggtgcttttatagtggacgatctctctttttaaaatcttccacaatcaccttctgttgccaacaaacccatagttagtgctaagttgcttccgtcgtgtccaactctttacagccctatagactgtagtcctccaagctcctctgtccatggaattctccaggcaagaat

SEQ ID NO: 25070 - DNA, 2044 bp, Bovine  19866880494013
  misc_feature (1)..(1): n is a, c, g, or t
nagcttggcctatgacctactttttttttttttttttatggcccaagagctaagaatgatttttgcatttccaaaaggctgtgaagaaaagaaagaatatgcaccagctccaaggtggccctcaaaacctaggatatttcctattcgaccctttacagaaaaagtctgcagaacttgggactaaagtgaccctgctgttccctttctgagctctatgggaagaacaggcacttcttctctttatttttaattttttttattggtgtatagttgccttataatcctctgttagattctactgtacaacaaagtgaatgagacacacacacacatatatcccctttttcggatgaattagaagaacaaattctgttcatagtggtttggaagaaagagccaggttgaccgaacttctttgcttcttctcctgggtcctctgcctgctggcaggaagtctatattctgagaacagagtgcatgttgggaatctctgctctgaggatggcctgctgtggtccagctgatacagtgatgaggtaagtcaaggctgaagtgagtctgctttccagccaatcaaaggcaaattttcccaacagctttatcagtaatcaaggtgatagtctggcctctgctacattcttccatctgtatcttagaggttctgagatgaagggcggagggtgctttttgaaaccccaaagccaatcctctactgtttcctccatgaagggcggagggtgctttttgaaaccccaaagccgatcctctactgtttcctccatgcatttcctctgtctctgtctcctcgttgaactcagggcaggcaccgtgcctgcagccagggctggcatttcgcacctgactgatggactcacgtgaggcccagggtcaacaccctggtgctgccaaatgactctgtgtcagcccatgtcaccgactgattgccacatcagagggctcattacaagtccaagccaagctctgggctcctgtggagagcagccatcagccactttgcagcaatggcccgaatcacaggaaagcgggcctgatttgacaaaagcagcagccatatattttttgctcttggaggtgtaaccatggtaatgagagcagacaaaaaccgttccttaacactggcgatgctcaaatgcacacagcactttggggtagtggaagtggggtttaattttagaatctgagcatcacttcagggaacaaagggcattagaaccgggcctgtcaaagacctgcaacagcttcctctccttccaggagcgcatatcctgttgcaggcagagtttgcacccatccattggggtgtttgctttgttcatgacattcttctacctggtgcagctgctgtgacggggatgtgcctttagaaagtctctctgttgtgactgtttccaggagtaataaaagaactgagctcaagaagatgcagttgcagtaatcattctgcattcaacctagctgtcaatatcctccctacaatctttataggataggtgtcaatgttattcccattttacagatgaggagactgaggtgcagaggtgatgtgacctttgataagtgacctggcagagagcctgcactcttccgtgatgtcgtgggagacaaaggtttcctgggagatctgtgagagacatttggaatatttaagttggtgctggaaaggcccgtctctgctccctggaaatgcaagtctgttgttactattttgagtgcagatgtgtgtcctcccagagtcccagggctgaaggagaggagatgaaagggaaactttaacctgtgacagaggtaggaagtgcatgtaaaaccagtctcatttctctgaaagtgattttccaatatgtattgagagccttcacatgtccacatgtgtcaatccactacttcggttgttacaaatcagcctaagagaataaccaaagtttaagaagatttttctaacaatatagaaaccacagattctccatattttcaaattatacaggaaattttcaaaataacctacacaatcaaggatggggactca

SEQ ID NO: 25071 - DNA, 2063 bp, Bovine  19866880511435
  misc_feature (1)..(1): n is a, c, g, or t
naggagtatggagactatattataccaccagctgccctcaagagaactgcttgttatgtatttttatttttgtttattctcccttcaccacatctttcttacagtggcatttctgttcttgttgttaattcctacagcaacataaacactatcaggagccatgtgcatagaaaattacagccctgagctccattatccctcacaagctcaggtgtctgagtcacgaattagaggaatgccttcagcacccagcatgagatcgcagctccatcagctcagttcagttgctcagtcgtgtccaactctttgcgaccccatgaatcgcagcatgccaggcctccctgtccatcaccaactcccggagttcacccagactcatgtccattgagtcagtgatgccattcagccatctcatcctctgtcctccccttctcgtcctgccctcaatccctcccagcatcagagtcttttccaatgagtcaactcttcccatgaggtggccaaagtactggagtttcagctttagcatcattccttccaaagaacacccagggctgatctccttcagaatggactggttggatctccttgcagtccaagggactctcaagagtcttctccaacaccacacttcaaaagcatcaattcttcggtgctcagctttcttcgcagctccatagatatatgtaaaatgaatgaaggcattcattcattcacatagaatggcctcctgaagaagaagttttaatgactagagctgagagcaatagacacgttgctatttatttaaatcagttcagttcagtcgctaggttgtgtctgactgtgaccccatagactgcagcatgccaggctttcctgtccttcaccatctcccagagtttgctcaaactcatgtccactgagtcaatgatgccatccaaccctctcatcctctgtcatcaataatgactacatttccctattctttcagcttggggttgcagatatgtcacagatttgtatttctctgtagggtggattcaccgttgccaatgcctcaggctgcagtttcattgagaataactttttggatgttataccttttcatttttacactcatgaagtactaatctcataactattgaaatgtcaaatcgcaggaacctctgacttacctgggaaacaggacctcttgtacaggctaaaagggattcctgggagtgtaaatctgttttctaaactcttttccttgggaactttgagaaatttacctttctggataggtaatttaataatgccctcactattctgcttccattgacatagtatgttcgcacaccaatgggacagaaatcaagcaaggattaaatattaactgtaaggattctggggattagtgaaagggaaaggggaaaaaaaaaattctagaatacacctgaactctgcctcctatgaccattacccaattctttgaacaataactcattgctaagttatcacttgtcacctagcataaaaatactttctattaggtcttctgatgtagttataggggttcaatggtatttatgcaaatcattcaaaaatatctaagcttttaaaaagtatgttttttatactgctaatggtgtttggttttgtgttccctctcctaggcttgctgggatgggaaacctgctcaaagtccttaccagggaaattgaaaactacccacattttttcctggattttgaaagtaagttccaaaaattaaaagattatgatgaaaaagcttcactttctttatagtttgttgataggggagttataaagattgttatgtaattcttaaaccacatccaaatgtctctctacatttctctgagtcttcaaagaccatttcctcctttcttttcatatattattttttttaaaaacaaaaagtatctttttaatatgtttatgcttttctttgattttagaagcagttattgtaagcctaacatcaatcatcatcatgtattttcctaataattttcatgaattattatgtcataatccaaagaaaaatagtatacatagtaatttacacagattaatat

SEQ ID NO: 25072 - DNA, 1061 bp, Bovine  19866880528575
  misc_feature (1)..(1): n is a, c, g, or t
ngaatctaggcatttggtccggcagtgctgggaagagaatgggtaatgatttttaacagagcctgctgcaaacacccactcgttctttcacgagcaactaatcttaggtcttagcaatgcaatatcccagagagtaaaggatgaaactgactacaaggtgaaatgctgccaataaaagaagccaaaaagaaactcactcttcaaggatagctcattggtgtcagctcaggtcagaatggtgttgcagcaccctcatcattgatgactgatactctgacctctttagctcggagatgggatgggagctgatgctgttagcttttaatataatgcctgggcaatttactggtaagtagaaaaggaagttggtgaggatgagctcacatttgccaatgaacagtaatgtgcagaaaatgtttaatcagactgtgaaagtttaacttcaattcatcaatcaagcatttccaagatactgactctatgattggcactaagtaaaaggcctgaggggaatgaacacagtccctgacattaaacagcgtaccttttaccaaggagacagaacaggctaaagaaaatgatcaatggatgaaaagacccccaaacagaaaaatatgatcagttctgacaagcagaagagtttaatggcctggcaggcaagttgtagagccaagtaggttcaaatttcagctctattacttaataaccaaataactccagcctaagctttttacttaaccattgtgcaatagtttcacttaaaatacggggataatatggttatttcaaagtggtacacgtgaagtacttagaacagtgactacaattggtaagaaattgatattagctattattaagaacaattgagatttagagggacctttagtttgtttgattacttttctcatcaaatattcctgctgtttcataatgttcctattaggatgtgtgtaaatatgatctcttttggcacactgagaactctggtctggaatctggcactcacgattcaccactacctcgggggtctccctgtggtttccagaaggatgaaggactgt

SEQ ID NO: 25073 - DNA, 1195 bp, Bovine  19866880576229
  misc_feature (1)..(1): n is a, c, g, or t
nctgaaagtgaaaagtgaaagtgaagtccatgaaggtgagaacatgttaattctcaaaatttgttctgaaatttcaaaagattaatgattggcatttaaaaggagggagtgtcattttctacttttatacaaaaataaaatagactttaaaataaagaataaaaaatttgtagaatgtagcacattgaagtcattatcaaagatctttgggaagactggaacagagctggatactgagggcataataattccaggcttcagtagcaaaccataccaggaatttctgaaaggggtggcatttcttagtcatctttacatcttcagcatcagtcacagtacctaaaacaagttcttgaaacatacatttattttaatgaacagaatatatggtcgttttatttgtaccatttggcaatatgggttttcattcaattagaatgaaaagtaagtctccatgccaataaacaggaaataaatctaataacagtcagtcatttgcataaatgcctaattaattccatatttgaaattggctgatggaatgtagtcaaacagtcatcatcagacaaagcaaacgaccgaatggcaatagcacatgccacggtgccaccaagacaccaagcgatgccaggtgtgttctcagatttgtagtttcctttggtttctgtctaatcatgaggcttccttgctgaaatttgcaagaacaaatattagctgagactttggtgaggatattcatttaagctatggctggctaaaagacaaaaatcattgattttcaaaggcagtttaaaaaaaaataaataaaaaaaaattaaaaaaaaaaaaaaaacaaaggcattttaaaccatgactgaagtatggtcagagttcgcaatggtcagagtttgcaatgattagcagtacgtcaaagagggcaattttttattttttaataactgtgcagataatgatagcccacgttgccattcagcagtcaaatttttactaacttagaaattttaatttaatatagtcccccctcttcctactaacaggatttatagatgtaatcacacttatttcacttttatattctcattccccgctcaagaattcctgatagatttctctgacttaccatgttgttttgatctcagttatattttcccaaaattcatatgttgaagccataacttccagatgtgcctcaaaa

SEQ ID NO: 25074 - DNA, 1354 bp, Bovine  19866880606745
  misc_feature (1)..(1): n is a, c, g, or t
nccccccccccccatcaatcatgaatattttatagcaggtctctctggctgtcctagattatagagaataatggcttcattatggagaaaacgaatcaagctcatttctatagagcagctactgcgtcgccagtcagggtaacttcctttgttaagatacaggctgcagattgaattagattggcaaagatacctaaaagagattacacaccattcattgggttgagagtatttgtggagcttgaattctgttcccttaccttgacaggggcattgatgattcagataattcaggccaattctagaggctttcttaacatcaacttcattctgacttggctccacaatgatgattattatttccatcttggaataaatattaacttaaatataaattaaatatctggaaggaatgccctcttacatttgaacagagcatcacattttagaaggcactcttgatgccttggcactcccaaactttctgccttgtagatggcattatggggatctcatcaggtgaggaaaccaaggtcagaccacttgtcagtgggcacagaaggggctacaaaataagtagaataaggggaaacctgacactggagtgaagatttcctcattactatactgcctcacctcaacaactcaagcatttttaaaatccagcaactaatttaagtacaaagaaactgccacatgcctgagagagagattttcattatcatttttataatagtcttaccagttctactcttggttttaaatattctctcaaatcttttctccagcatacttatatcgtctctcaaatcttttctccaatatacttataacaatacccagtcatttaactcaatccaccatttgatctgcatacaacttctcctgcatctttgattcaagttttgattctgccatctaacaagccacgcgatctttgggaagatgtcagttaaccaatttcagccttgtcttccttagctttaagatggggataactacacctatcgccagagttctttatgaaattaattcagttaatatataaggaaatgtttgacgtgctaacccaaacgttagaagcggtcatcaccaccatcatcactgttagagatacgtgaattcttgacatggatacacctctgatttaacttacggagtttccagcatgactttacaaacacttgtcatcgtactgaggcagtctgtggtgttctctattggcaggggttttgttctaaatgggagacacaaatgtgttagcctgttagcagctttgatgggcaactgggcggaaggcactttgttgctcaacatcacttacttcggagacaaagtgcatgggtggcggttg

SEQ ID NO: 25075 - DNA, 1592 bp, Bovine  19866880690054
  misc_feature (1)..(1): n is a, c, g, or t
naagaaactgctgagggaagagagatccttgaaggaagaatggtgaagaccaaggccctgggactggccagttcttcgaaagggcagggcattgaagagggtagtcaagcagagttaagagatgagttgagaggaagatcaaagtcagatcatgcaggtcctggtaggtctggaagcgtttagatttttttctaagtgcagtgttagcggaagcatcaagtcagagcacattaaaaaaaataatctagcttctgtctggagtatggactgcaaagaagtaagagtagaagtcaaaagataagctgggaggcaaatcaaaccagattagcgagagaagatggggacctgagccaggaaggtggcattggtgaagaagataaatgcatgcacgtgtcatatattttgggtagaggatggacaagggcttggtggaagattaatctgggtacatgctgtgctgtgctaagtcgcttcagctgtgtccaactctgtgtgaccccatggactgtagcccaccaggcccctctgtccatgggattctccagacaaaaatactggagtgggttgccatgcccttctccagggaatcttcccaacccagggatcaaacccgcgtgtcttaagtctcctgcattggcaggcaggttctttaccactagcgccacctgggaagccaatcagggtaataggaaagaggtaattctgagatgacccctgagttcctgtttattggataacctggtcatttatggaggagaagaaaacctgagaaggaaagaatcatgagtcacaaataagataacgcatactttgtatgaagagcacttaaaactgttcctgacatacaacgtgctttcaacaggtgcgactgaaagaaaatgcctctattatctgataattcaggcccattagtttcccttgacaacccattacaatttaagatcttcccaaagtattttccgtttcatgtttctgtgctcttattgttcccttttcaataacttaatgtttaaggtcgatatattccttattttcagatccaatggggtaatgaaggcaaaagtcgctcttcctctattcatttaaaacaaacactgcaagccaaaatgattactctggtttgttcttcccaacaattcttacctttctgagattgacagaaagcctctttggccatctgcaacaaaggcactgcctgagccgaccatggaaagacagttcttctagttcaacgcccacaagtgggaggcacagaagtagagcaataaaagttgttaacatatgcagggaggttgctgcaggctggacacgatgcctcaagcactttacagcaagggctgctgctgctgctgctaagttgcttcagttgtgggcaagttgctcattgtcctacagattttgatagttattatggcaattttccagcagagggcagtaaaggtttcctaaagatggggaaacttgcgttaacattgctgttgagctaggaccatgtccctacacccagtcctacagggcaaagtgttagaggctgtgttcttccagtgccaaacagatgatcaaaactagataccacttagaattgaaagagt

SEQ ID NO: 25076 - DNA, 3770 bp, Bovine  19866880700115
  misc_feature (1)..(1): n is a, c, g, or t
ntgatgtggatattgtgatgtggggccctggacatgcaagggctccgtgaagcctgggtcaggagaaaacagggtcagggaccaccctcttcctcccgctccatccctgcaactctctcacccccaccatcctctccctccccaaggaccacctttttcctccccccccaccctctccataatgagactatgaaaaccaaaatgcaccttctctcaagttgaataactattcaacaaaccctctgccaacactctgagacttaaatccctttctaacagatttaagttgtaatgagagaaatgaaaactatttaggtctatgatgctgggaaagattgaaggcaggaggagaaggggacaacagaggatgagatggttggatggcatcaccaactcaatggacatgggtttgagtaaactccgggagttggggatggacagggaggcctggcgtgctgcagtccatggggtcacaaagagtcggaaacaactgagcgactgaactgaactaaactgaaaagggcgattagaataaattcatcaagccctccctcccatggattccacgcagggaaactgaaacccacagaggagacatgaccacttcagtcatgaaaaaaatttagtgtaactgaagctcttcattttaactgaaggatccattaccccaacctttgcaggggccacttttagggttagttttctggaacaaatgggataaaaaaaaattagaggaaggaagggaagaaagaagagggaggcagagggatcaggtaggtctaaggaaaattgccaagtgtaaggaagttttagaaggctttcagcaagggagctcctggaaggtagatgagtctgcagagctgtgtcctctggcccttattgctctgatttcatctcctgtaggcaccccatccaccctctactccagggaccccagcctctgagatctcaagcctgatgatctagatggagctgatgtaataataataaaaataaagtgcacaataaatgtaatgcacttgaatcatcccgaaatcatccccctcacccctgtctttggaaaactgtcttctgtgaaatcgatccctggtgctaaaaaggttgggcaccattctactccattgacagaccctaggacagaccttgtctcctggccattgcacatgctgacccctcgcagtgtttacctgggtgatgatcaacgagccttctcttagctcagacatctcggcctccctgtgtgccccccaggactcactctggcttataggcttggcacttgccatcctgaagcacaatggcccatttacttgactgtttcactactagactgtgagcccctgaagggggcttatcatctcgatttccccaatgcaatggcatccaaaaaaaaaaaaatttgcttactcaaattagtgagtctgtgtcagcttgaagatatttatttctgcagtgttcttactaaagccgtgtagataccttcataaatccttcatgcataatgcagtgcttattacatgatgaagtcctgtccccagagtgtctctctacccaggttattccattaataaacagtatttataagtgatgagtaaacagtatttatgcatgaaagagattgttattatagacctgcaacagggcctattgggaaataagtttggcagcggtaacttcatcagaggactcagccaggccacacagcgactctatggagatctctccctctccactgcctcagtctccctcttcttcccttcctttcctctccctgttctctcctctggtggctcagtggttaaaaaaaaaaaaaaaaatctgcctgccaatgctggaggcacaggttcaatccctgggtagggaagattccctgcagcaggaaatggcaagccactccagtattacttgcctggaaaagcccatggacagaggagcctagtgggctagagtccatggagttgcaaagagtcagacataactgagagactcaacaactgtcctctccccaccccagtctctctccttcccatctcaccccctgcaggccaagacttcagcaggagctggagccccaggaaggaacttcaccatgagaagctctggttccactggggtttgctgaactctgctatgaaccctcaaaggtttatgctcagcctgcctgctggctcttcctaaagacacgttcatgattgagctgtgctcttaactttagggctcaggaaaagacaggccaagcaggaaggatctaccccacagcccagaagaggtgtggactcacactcgcaccctccagtgtccatgaggaaatctgacatggatgaaatgctatgaggacgtattgtccaccgccaaccaaacacaacaagcgtgattatttttccatcatgctgtggatgcctttccaggtaggggctccagtttattcatcttcaggtcatcgggactaggcacagcatctggctcagagtaaatcctcaaaacatgcactgagtgaatgaatgaatcagtgagagcatgaacaattgacaaggagcatgaatcaaaagtaatcggtgtgacataagggcagcctgaaccctcagcctggcattcaaggctttttagggctaagaacttcatgggtatgagccaggctggttaagctagcctgagattttttttgtttgttttaatttatgacaaaaatatttgataatcctcatggtgggctgcagtctactgggtcgcaaagagtggacatgactgaagcgacatagcatgcacgcaggcacacatggtagttaaatgaagcaaaaatcaaaattcaccaaaagagtactttgcactcttttatcctgaaatatgggttttctaatgcagggtgtcccagattttagccctaaccttctctggcctgcggtggccacacacggctggttttgacaggtttgccgggatagctgggtgcagcccactggcttgtgctgtcttgctggagtgagctcagggatctattccagaaaagacaaaaacagaagaggcatggatctaacttcctgagctgggtggacaggggtctatgtttagccactctggagccaagatcacagataaagtaagaaactccctccagcttcgtaggagctgatagcgtccttgttcagggccgggtgcacatgtcagaggaacatgtccatgtcacacaacctggaagttgctgaacaagagggcaaaggactgccttggtcagacatttccaggtccaggagaatcaggaacaaatcctgcagccggaatctcctgccaacagcatagactatctcgcccctttgagcagcagggcaccaattacaggttcttcgcaagcctccttaggccacattgtgtctccgcaggcacttacatttcatttgatgacagtgacattgatgaataatagtttctgcccccgcaaatggttacagggtctatagctgatataatagagtttcctgtgaaagttaacactttacaggagaatattctctcccttatgtgcagtgtttgcatcggtgatcttatacctcatttttccttttcctttattaagatattgactttcaggagaaaactctaagggattttgctaaaaactccatttgctctctttcagtctggaatagagattggaagcaatgcctgaggttcactgaatgatgactacctgccaagtaacccacacttagtaaatcatctgatcctagtggctcagctggtaaagaatccgcctgcaatgcaggagacccagg

SEQ ID NO: 25077 - DNA, 1032 bp, Bovine  19866880723697
  misc_feature (1)..(1): n is a, c, g, or t
nttattgcatctagagcggagactcagaaatattcagtgaatggagtgaggctggagctttacctgtgtgcccatttggctatgctcactcacagagaagatgaggagacttcaggggaaaaagtcttgaacctgactagtgtggacacatatcaggtgtgtccaacagacagaggccaatgttgccagaacaaatttgcagaggaaattagaaaacctctgaaagaaaattcaccagaagaaaaaaatgaatatgtcacagtaaacccagctcataaacaatgaataaggatcagaaggaagagggagaccaaggcagagcatcttaactgttatccaggccagtggttttagagacaggctgggaacgtgcttcctggagagtaacagaactgtagacgttcaatgaaagagctgaagaatttgggaaccaggcaatcctgcttgggaattctactcactccaccaccccaactaggcagtaaaaaaataatacagaaggaaggagcactcccttattttgcaaaaagcatgggaaagggacagggagttgggaatgagcacagaacgggtaggagcagaagtgaagttttcacaagcccagccccaacacattctcagggaactgcaactggcaggactggcagaaccacctctctctctgggcaacaaggatgtactagaggcagaattcccactagagtggcatcaggcagtaaaggttgggaaaacattcattcatttactcaacaaatatttattgaggagttactgcttgccagacattgtgcaagatccttctgttgactggcaatgagacaaacagaagtgtttgaggctataacagataatgaaaacaagagctgtctcactaaattcagtaatactttgactccaaaagcccttttggaaaatctcactttaccaagcttccttctttgcaaatgttctaatcatagccttcattaatttatttaacaagttgtccttttcttattgaattattgcatgtgctcagtgcccaagtcgggc

SEQ ID NO: 25078 - DNA, 2303 bp, Bovine  19866880898435
  misc_feature (1)..(1): n is a, c, g, or t
ngccagagatgtggtcgttcctggagctggacatgccagtgatggggaggaaatgagtgaggagacgagcgggggcctgacatggagaagactctggaagaggacagagcagaagctgggaacagctcaaaaccaatgttcctgagtttgccaagctgatggcaccatctcaacccagctggcacatgacgttggggaggtcagacaggctccagcgtggacctggtgttgaccatggattgtttcctagttccattttatggaagctggcttgggaagacaaactgtatttgtaaaatggctcacctctcctggagtctaatggagcttttcggggtggatgacatctgcaatggggcttacctgatgagttgggagttccataaacaggtctcttctgtcttgctatgtgcttggaggggaaggggcagcacccataattggtagggtctctcagggattgagtcatagccagagtcttcatcactgaatagatcagtaagcaggaccttccaggacaagactagtcagataaactctagcaattcccctccctgggtatatatctggaaaaaatgaaaacactaattcaaaaagatccatgcaccccaatgttcatagcagcactatttacaatagccaagacatggaagcaactcaaatgtcggtcagtaaatgaatggataaagagtatatggtatgtatatacagtagaatatttgttgttgcttttcagtcactaagtcatgtctagctatttgcaaccacatggactgcagcacaccaggcctccctgtgcctcaccatctcctgaagtttgcccaagttcatgtccattgaagaagtgatgctataaatggaatggaatattatgcagtcataaaaagaatgaaataaagtaatttgaagcaatgtggatggacttagagaatattatgcttagtgaaaaatatcaaagacaaatactgtatgatattacttatacatggaattgaaaaaataatccacatgaatgcatacacaaaacagaaacagactcacaaatgtagaaaacaattaccaaaagggagagggatggtgagagggacaaattaggggtgtcgggttaatagatacaaactgctgctcctgctgctgctaagtcacttcagtcgtgtccgaccctatgcgaccccataggcggcagcccaccaggctcccccgtccctgggattctccaggcaagaacactggagtgggttgccatttccttctccaatgcatgaaagtgaagtcacttagtcgtgtccaactctcagagtccccatggactgcagcttagtaggctcctctgtctatggcattttccaggcaagagtactggagtggggtgccattgccttctatagatacaaactattgtacataaaatagataagcaacagagatttactgtatagtggggaattttactcaatatcttgtaataatctacaaaggaatattatctgagaaaaattccaaatcactatgctgtacacttgaaactaacacaatatttgaaaccaactatacttcaatcacaaaaagaaagtgaaaaagaagaggaggactatacgaagacaaacatgaagatgtcatgctcttcgaacataaggggcaattttgttttataaagttcttcctttttatgtctgcagtcagaaatctcataaggagggacacagggaggatgtggccttcaaggttatgattcctcgacagaaacacttacttttgtttctctaagaaaactgagagcaggctggagcctgcaggagagcactctagacagagccagggcctgtgcacgcttcccaggggtttcctgggctccccacgtgtctttgggcaaatgccttgccctctctgggtcaccctttgcaaaatcataaactgaaaagtgcctttcaattctgaccctctatggatctatttttaacaaaaccagactccctcccacactctaagcttgccatggcgacatgtgtagctacacaagcttctcagaattagaaagaaatagcatctgtgaagtgtcagctcatcagaaatgactggcagctggggggttccaagcccctccctgaaacttgctcctgatgcaaacacagcccacctcccctccctgggctgctgccactcctgtccttgctgactatgccgtgtgttctcaggaacagaaatagaagccgtctgccactaagcaagtgtgctcctaagaagatagtgttcgtgcgtaatttttttcttggttctttttttttcagctaatactctgtcaa

SEQ ID NO: 25079 - DNA, 1078 bp, Bovine  19866880943896
  misc_feature (1)..(1): n is a, c, g, or t
nctaatggatgaagacagtcttaatagctaaaaatccgaaggttgtattttaaactctgaaataataattaaattaaatcttaataataatgatttaaattaattacataaataaggttgaagagaagaagaataatattaaactaattttttcattttttatgtagggagccaatgtttaaacaaaatgtataactacaaaaatggatctctgagtatatagtttagaattgcaagaactaccaactttattaaaacaaaccaacagttaaaagagaatttaaatgaagagtgaaactgtgagtgtaaggaaggaggtgaaatatttaaaatgctctttaacccttcagtatagacattttaaccttgtgaacatactgattttattatgctgctgctaagttgcttcagtcgtgtccgactctgtgcgaccccatagaccgcagcccaccagggtccctcgtccctgggattctccagtcaagaacactggagtgtgttgccatttccttctctaatgcatgaaactgaaaagtgaaagtgaagtcgctcagtcgtgtccgactcttagcgaccccatggactgcagcctaccaggctcctctgtccacaggattttccaggcaagagtatttattatgctaaaatatataaaaacattttccaagatacatcctcatcatatcattttttatctcagttttgccagttttttcattttggttataataaatttttcttaaaaataattttgaacatctgcaagttaatctctgcaaacacaaagcccctaccagatgtttctgtctggctctgggcccagaaatattaatggaattataatggagaaggtcttgagcaaatatatttgtcaatctgcttgtgctctcagtcttaaattgtactaaaatggatgataggatggcattaaataaaactgctgtggggtctcagcagtttatctgaacatgtgattgattctatttgcctctgttttctacttcaaaagccaagtttatccttatatcattttttataacttgagattgagattggttttgcagagaatttaaaaact

SEQ ID NO: 25080 - DNA, 1389 bp, Bovine  19866880969428
  misc_feature (1)..(1): n is a, c, g, or t
ncgagattgcttgtttctccttctgtaattatttgattaggtagaagatctatttgtttaataaccaaaatataaacttctttggaaggaaggatcgaatattaaatctgagactaagttggacactgaagtgtggctctttgtgtaaagaatggatgccaagtttgatttctaaatatcagctgtgcctctcaagccaaagatgagctgacaactctggtcaaagctttctcagagcatactgtttgcacactgtttgcacactgactgccgtcattttctctccatccaggttcactacaaagcacttgaatgatgaatcgacttccaaacagattcgagcgatgcttcagtaaagccttgctcaatgaagaggatctttgaactgacctcagaagatgtatatgtttacataatttaatacagattgatgttaatacttgtgtatttacataaccgtttccttcttgtcactgaaatatatggaccttcatttgtatcctgactgactcaacccagagatcataaattgactggagagccttaccttcgatgtctaaaacaaaaaccccttctccaaaaggcagaatttgggagacgttgatctttgctactggagttccttacgcctgtaacaatcagaacttcccaacagtttgtggtcatgttttaattctagattaaattgatctctctgggaagtatagttagagaaacacaaagagtttgatttcctgggtcagcccagctacaagaaacacaactgttatcctgacagagagacagggggaaccccagaaaagaaaaattccagtggagatataagccccagtgtctggaattcagcacacccccctctctttcctcagaaggcacagcacccatcaacttttctgtttgcacctattttatttctcagcattctctcttcctattttgatttataccctgtaacattccctttccatttttcaagaggaaaaaatcagcatgtttgcatcagtttgtggaggagaaaggagaatagaaagatgcactcttgtggctgggctggtgactgtcgtggaagtggggacaggtggggaagaagggcatccaagcaacagtggcagtcatctctctgcttcaaccctctgtctccaggaccagggaagtggagctctggctaaaattgtgggtgaggttgctaatgttccagttgtctgtggagtgctgggcacacaactcctcctaataggagccatggcctctggggaccattcatgtggcagcaaagatctagctagaacttaactagttatcagaaagcttggggactttagagaggagatttttattttctgattacctgatatttaaaagacagctcctccaggacctaactgccag

SEQ ID NO: 25081 - DNA, 656 bp, Bovine  19866881045809
  misc_feature (1)..(1): n is a, c, g, or t
nacactatgagaacttctgacggcaggtgacacctgaattaagttagctatcccctcctcccacctctttccctccacatttcccctgacaactccccagcattgtcaagagggctgagcaaagatcatggtcctagtgggtgaggcaagaagggggaactttcttagcatggttgcagaagggaggtgtttgggtttgcaagttgagatctgtgcataattaaactggagaaaaggtctaagtgggctgtcaaaacaaggagggcccgaggcttatgggaggagtcagataacagagtcagagtgtgggagagacagtgaaaatgagcaaaagtcacagtaggagggaacccatggaggaggctctctgggtgactgtcaaagcatgaccgagctcttcccggtgccctgtaatgggctgtttcgtggcttagagccgttcaaagggcttaagatgaagtccatccactatcttcttccctcagctccttttttttttaagatttttttgatgtggcccattttaaaagtctatattgaatttgttatgatattacttctgatttatgttttttggctgtgaggcatgtgggaatcttagttccctgaccagggattgaacccccaccccctgcactggaagccagagtcttcat

SEQ ID NO: 25082 - DNA, 1683 bp, Bovine  19866881096309
  misc_feature (1)..(1): n is a, c, g, or t
ntatttaccagtatcctgacatagaagttttcaaaatatgcatattatgtatgcatgcatgtatgtttcatgtatttttatttccaataaatataacttccaatgaaatgaggactttgtgagtttgttcactgtcatacacccagcatctagtgggtgcaaagaaatctttttgaaagcataattaaataacacctttgaaattattcaatgcagttgaagaggggactcaactgagagttcaaatggcacaacaccacccctcaaccactggaaactcaattcagaacctcatcttacaaaagatttgttcatttctttgcctctggtctccattttcctagttcaactcaaatctttgctgagagccatacactcaactagcgttttttaaactaagtagtgaatacaagcactgacttaaaaggcagatttttgtcgtagaataagctcagggaacctagaagcctggtccttgctcaatcaacagctgtattagtttagacacatttcttatgcaatgctgctgctgctactaaattgcttcagtcgtgtctgactctgtgtgaccccatagacggcagcccaccaggctcccccgtccctgggattctccaggcaagaacactggagtgggttgccatttgcttctccaatgcatgaaagtgaaaagtgaaagtgaagtcactcagtcgtgtccgaacctcagcaactccatggactgcagcctactaggcccctccgtccatgggattttccaggcaagagtactggagtgagttgccattgccttcttatgcaatagccatattcaattaatcaccaaataatcaataaaaaggataaaaacagatttgttctaagagaccttccaactttgacatcttagaatatcataaaatattctcttaggttattttcttcttgcaactggctggtgtaattgattttagtagtaccatcacatttgcaggccttcaggaaatttgttctttaccacagcgatggccgaggtcctttcaaggagccaacatgccaagccacaatgaggccccatttatccacaggtccatttcccagcaatctgactcattcaggcccttttgatcctgaactcatcaaaagagtcccctgggtgcccacatgagctggcagaaagcctcagcattaaagattatgtacattgcttctcatcccctctatcaaagcattacagggtctagattcctgttttccatcaatgactcaagggtgctatttcctctcctggaaattgtcttcccagtccatacttgctgatgaacccctatgtgttttttaggctaatctcaaattctcactgttctaagacactactacggcctcctgctgcccacagaatggaatgctgtaccttccacactctcaatctgacttgtgtatcccttcttaacagcctggccattctgtgtcatcgtcatgcttgctgagcatttagacttgttgaggtcactatcgtgttttatttgccccgttccctaggatggagtctggcacagagtaggtgtgcaaatactgttttctagagacttccagtgatgccatgccctggaccttagtgaaagaaacccagtaatccaaaagggaatgcttggagaaggcatttgggagagacaaatacatgattcttaagcagaataatag

SEQ ID NO: 25083 - DNA, 2772 bp, Bovine  19866881105071
  misc_feature (1)..(1): n is a, c, g, or t
ntaaagaggaagaaaagaagattctcttgctgatgaagaccactccagcaaaggccctagggtgggtctggcaagaagaagtgaaatcgagagggtcagcagagtagcaattaggacaatgtcttgcatggtgtggcaggttatggggaccattgacagctggccagaagaccttggattcagaaacaaagtgccaaagcgtgagtagggaaattaactagcctagttgctactacatggtcacaaatagcttgatggtattggtatgggtgcaggtgtcctcataaacctactaaacttttattaatgctgaagatggtatgtaggtggtaatagaaaaacctagaggaatagatgcaacccacttcagtattgcctggaaaattccatggacagaggagtttggtgggttaaagaacatggtgtcacaaagagttggacacgactgagcacacacacacacacacacacacacacacacacaagagggacggaaggaaatggagaggagagaataaaaatatatatcatttatttcacccaaaaattatatttaatttgtatatttagctgatcaggtgtttactgaatggagcatttaaacatcatcaagatgctgtgtgagacacagaccttgaccttaagctagaagataggaagacaaactcgataagatagatgttaacctggcttgctacactgaaggcagggacattaagcaggagatgtctgtagtagttcaggtgagaaattgtatggaaataaacacaggatggtcacggcaggggttgcaaaggagaaaacacaaggcacattgagaaggaaaatacgatagaaggggtttggtgatacgtttttgttacttaatcatttcattcctttagttccttttgctgagctcttactgccaggctctgcagcatttcctagaaatataaggatatgggcatcaggataagctgcatttgctttgtcctcccaggaggcagacacagtattaagaagtctacatacatcatggcatgtgatgttcagaaggttcctgtaaacagatattgtcactctcactctgtagtcacagaaatcagagctcagagacagtaaacaacttgctcaagccacacagctaagctgagctgggattaaaatgcaggtgtgtggattctaagcctggctctctcatctctgctacagagatgacaaggaagatgtggtttgtgttactgccagggtcagagtcttgtgagggggaggtggaggacaggcaggatggaagattgcaatgggggcacgcccagagcctccagaaatggaacacgagttggaggagaaggaaaatgccaagatatttaagctgctgactctgaaggtgtttgcttgcctccaactatgtgagaagattcagaggccatttgggaagtgctctcggttgtgccttcaaggattggggtgagggtaggggtcctggttccaccacgatattgagcaactgaccttccctcttctggtctgggttttcccatcatccagaagtttcagactaagtgttctccaaagttcctttcatctctacactggtggtggagaaactgaattccagtgggctgatgaacaatgaaaagtcaacaggggagggagggctcagttggccttttcttggtattttttgctcctccatgagatatttcctccactgctttccagttcatctcctagagtgtgagacacagaatgagtaggggtcttggtgtttcaccctgaggaatctcaggggaaacaaggtaggaaccctagactaagtctttttctctggagctcataaactcattcccatttccctggagtttagaggctagaatcatgcattcactttatctgaagagaggcagagctgtagaagatagaatgcccatagcctggccccctgctctcagcactaggttgggaaatgaaggagcctggagatggggctagagtggagatggatatggagaaagtacacccttctcccaactgactctgtgcttccagccatcaccccatgtgggtgactgagaaagttgaataccctgccatagccagaggctcagctattatacgagtctgggcaaaggcaaaattgggacagagaatggacttctgttcaggcaggactttcaaagggtttggtgcccacacggatagtttctgttggcacaaacgatgtctgttcagttgaaactgaacttctcggtaaactcggtttcctcctacccactttccctgtttctcttttcttatactttacagaataacatccccacaagtacgttttaaaatccaacttctgatggaaatatgttagattcttctcagtggcatgttcaagtcagctcataagctgatggttcaattttttaaaaatttgtgagttgattattaaacatagccattataaaaaattaaattatagaacttattaaataaattatagtgaaaacaacagtaataaatactcaaaattaacactaattattttactacattttatatttatttatcctcttgaggttctttactttccatcaagtctatgccctgaaaatattatacaatggtgtacacatatttttgcaattcagtgttcaataagtttatcatggtagctagaaaatggtcatggggtggacttattcacaccatgggaaatctgcaagcatcagagatcaaggcttgatttattgggtttggtgattgccttgacataagagagtgatggataaaatgttaata

SEQ ID NO: 25084 - DNA, 939 bp, Bovine  19866881129014
  misc_feature (1)..(1): n is a, c, g, or t
ncaaatatcaattaacttttaaatatcttttatccagtcattttgtatatcaggcatgggcttggtgagaggattcccagtagaaaaagacttattaaaccctttaccttcatgtctctctcctaaccttccaaatctttattcaattgctgtacatatgctaacctttcatcttttaatatcaattcagggaagttaaattactagaataaaagtttaccttaaagtgtggttgatatctttatcattaaagaaagaatttcttgaagtctgtaaaataactgaaatgtttggttctaagggacttgagtgtttgcctggtgtctcagtgatgcaatgacttcattagttaaatggcagtggcttcttcctgaaggccaggaactggtccaaaccatggttggcaggttcttggtgttctgaagactatgatgctgggacatctggcctgggtacccagctagcctaatgttacccgagcctgtgctgtataaactcttactcctctgagtccatttctgtgtggagactcccaagacgcaaaacaattgcatgagccactgctggttagcttaattggcacattcaagttagtcatataaaccagattctttttatattttgccaatcttcatagtgtaacaggactgttcccatgttaagaatttcaagtaagtgtttcctggagtgattagcatctgactagactgtgctcagcaattacccacaaacacgttgatgcctgtgcctgatggtggatagagagttctgaaggcatctccatgttatccttcagtacttccttggaggaagagagggaccagctgtgctaagcagaggctccaagaaacacttctgggaagagatttgagggctctcaatctatggcctcagtgactgcaatagattttaactcattcccctcaaatacacctgcat

SEQ ID NO: 25085 - DNA, 796 bp, Bovine  19866881156627
  misc_feature (1)..(1): n is a, c, g, or t
nctttcttaagaaaattaatagcgtaaacaagtttgcacagagaatatgttaatgtgccttggattatgaagagtatttgaaagcatataactgtttcttttagatagagaaaaagtaatatatcattttaactttctgctcaggtagtttaaattggttcacttctaaagttttattaaaaaaatgtataaactttgtgtaacctttcctgtctttgagttatacaacatcaatttatttggggaaagtttttctagtcgatctgttggagcattagagaatcacaaagatctgacctgcatgttgacttttttctttcatttctctcttaaaaaaaaatagctgtaagacaagggtgtctgccacccactcgttctagagatacctttgctttgggcttcaaaaagtcaggttgaaagaaattgcagttatattggtctcctatgtgtaccacagaaaaatgcaagacaagaatgagtgttttatttttttgtaatttgatgaatttcttcttccccagtgagagactgtcaatgaccctccaatgattagagtctaaatatactttccccatttatttttaaatgatgagaaatgttacacatatatacaaaaggataaagaatagtttaacgaatgtccatgtacccaacgcccacctttcataactattgacatagtcaacattgttcatctatgctcatatctctttttttctcatagccactctttagattatcttaaagcaaattccagactaactgaatttcatctgtaatacactctcatatatgt

SEQ ID NO: 25086 - DNA, 1528 bp, Bovine  19866881195456
  misc_feature (1)..(1): n is a, c, g, or t
ntgggagacctgagtttgataccttgagttgggaagatcccctggaagaagggaaatgctacccactccagtattctgactgagagaattccacgaaatgtatagtccatggggttgcaaagagtcagacatgactgagcgactttcactttcatggtaaatttatatagttgtatgccatgcagcatttaaataatactatagaataatgacataaaaagctatcagtgaaaaaagaagtgatggcattaaccccaaactcatcatttgtgcttgtgtgactgggtttgtagaaaccttcatttattttgatttttcaggaagcatcaactctctacccataaacaagagataggggaactcgaagacatattctgaacttgcatgactccagcttcagtgacaggtgtttacactcagtactgtttcttgcaatgtacaggactgtggttaagatggaaagttgtccaccaaatacttctgccccttcctggatgttgtagaactgggtgcctgtcagttttacagctctgcaaaccgactgccacctccttgtgcagacaagtaactggcaaataggagcaaaaataatatgccatttccagacttgacccctaaatactcttgctccttcgtggtttttccccacttctggctgtccccagtggatgaggtgatcttgaaaaccacatgtcccagataataaggtttctgacagcctaggtctttgaaggagtgcctggagaggagccattcctccgacctttacactagtctaagaccggaagaggatctattgtgcttgacgtggtatttactttagggattagctgttatagcagtctgcctaccataactaatacactggaatttgatagtttacctttttggtattttccaagccctgagcacaatgttatattttatttcctgctatgaaagaaagaaaaaaaaaaaccaatccaatctcatactattactgagacaattttctagctatatttggttatctctgactcttactggctgctcccacagaggctactcaagcaattttctggacttgttttcattttataagatcttctaatcaaagttcttaaatatatatttaaagtgctttcatgatagataccaatataaatcttttctaagtaattttccatctctctcattaaaaaaattatatcaggatgtgggaaagagagcacataatcaaaaggataaagtaagaaatgaccttgaatacaaagtttatgtctttcatcaaccttctccctgagctttagtgagatatttaattttacaaggaactgttctgtgcactaaagtgaaatgcataatttaagttccctaagaaattctttcagcatttttgttttgttttgttttagttcttggcagacagccaaaacttgaagtaagaattatagattctgaagagtattaaggggggaatttaggaatgtgctatattcttacattttagatttcaattttttaaaatgaagtaaggaaagtgagaata

SEQ ID NO: 25087 - DNA, 1988 bp, Bovine  19866881197237
  misc_feature (1)..(1): n is a, c, g, or t
ntgatatggacacttttaaatattcaacctggcctgtataattgcttgcctgtttctgatggaagcagagagttatccagggaatgataaatgccagaagttgggtttgttatatcagggtttgatgacattgtcccaaggaatgagctgtcacaccattactttctggattttggtagccagggtggcagtcccttgagtcctctaagaataggagagacatatttaggttttatttttaacaaatccattcagtggcagaacggatttccctggtctatatctaaatgtcagtcagtcaacaaagagaggaaaagcccttttccttggagcttttcaaggctgaacaagtacagctggttggatgagggttctgtcatcataacagaaatgcactaaatggctttcaaagacctttccaaacctagggattctaaaaccctagaggaagccagaagttgggataacactggggtgaacaaattcattagatactcagcttcttttacttggaagccacatgttgtctttgggcaacaactgtcaagactagaaaatgtagaagtactcaatatttattgtcatagggtctattttcctcccatatcagagaaaggacttgcagagtaaatggttgagcacatttataatttttaattcaactttctcacaagtgggaccaaacatatggggtgaggagctgccggcctgccccaatttagccaggccaccttgtttcaaagccaagattcaccagaacatggattctcaaaagcccagggcctgaactattgcctccggttagcagcaggacaggttaactgaatgtctgtgatcactaacaggtggtgggccgtgggtccactccagagctatagtgggagacagattcttttaacaggctgtccttcaggtgtccttgaacaatcacatttttgtatgctgcatgcatgtgtgtccaggacccatgagctgttcaggggaaagtgctagccacggtatccatgtcaatgttagctatatttcatatttgaggtctcataattttcaaataaaagtgtaccccattattcagatatttatttttgggcaagtgacaaggtgaaaatgacatttcttagatgcactgctactttggcattataattttgttctcggaaacgttttatgtgccactagacattagtttaaaaagaaagtgaccatgttttaaattgtggtgacccattggagctggagttttaattaagaaccagaaagaaactcctggatactatcctttaactattagttaataccatgcttcatgggtgtttgctcctagtcaccaccattgtatcaagatattaatggtaaactgaggtttttaatacattatcacatttaagtaacaataatttcatgcttcttcaaaagaaaaatgaagcttactcagtcttgggatctaactgtgcagtagacatcagagacttttcattcaatcttgtatcccagacagctacaaatttttgtagatgttaataataaacattggaattttgtcttaaagaaacaaaaactttggaacccaattttccctctacatctataaaggctgttgcatacacaaagctgtttaaaaattgtcatatgttgtttgctgaagtcattgtaatttttttgcctgctttgcctctttttgtacagaagttttgagtgtgaaatgaaaattaaagtttggtacatatatttaaaaatacacttcttttatatgatgttcaaggttgagtgggtaataagcatacagtcatgaatacttgctgtgctaagtgttagtcgctcagtgtggccgactcttcgcaacccatggactatagaccaccaggctcctctgtccatggaattctccaggcaagaatactggagtgggtagcattcccttctccaggggcaaacccaggtgtcctgcattgcaggtagattctttaccatatgagacaccagggaag

SEQ ID NO: 25088 - DNA, 1467 bp, Bovine  19866881208387
  misc_feature (1)..(1): n is a, c, g, or t
ntgggctgacacgagaaagaaagagactatgaaattgcagaaatgaatattagttttctatcacatctaaaacctttccaagttggctaattaaattactaccttccaactgagaatgcaaacacaatttcaggttctaatctctcagtaatcaagcgttctattattaatgtccttttcctttttctgggcttaattgctcattgtactacatgtggcattgattagcagtaggaagactgtattctctttggttggcttgtgaggaaactggctataaaaagacattgaattggaaagcaaagcaggctctatccagctgtgatgtggtgagtcgggggtctgtgtctgaggaagcaaagccagccagcttgtttagtttgaaataacagcataaagttccgtatctgccttgatcaaactattcttgaccaaacatgaccgtaaatcgacagagaactttaacgacaatgatctggcagagctttacagtttataacatgctgttttacaggtatcattttagttaattgggaccataaatctgtgagttaaatattcttatccagactttgcagatgagaagtctgatgcttagcaacgttaagtcactttggtcaaatcaaatagtgtggtgaagatagaatttaaacacggacattgcaagttcaaatcttgtggtcttataggacactgtctctcaataatagtgagtcaactcaatgtactttaacgaacattgggcaaatactaaatccataaaacaatcgatgcacactgagaggaaaaaaaaattggtagaggcacacagctctaacaagacatgtgtttgatgagttgtattacagatacaagtaatctgtgcagctaatgtaatacaagaatcaagggggggaaatgtactcaggaaggaaatatctttaaagaggaagagatatttcagttgatctttgaaagataagacatattttgacaaccagaaaaggggaagagaatagagaaaacattgagtggagagatatggtaagaaagatcttatgttatgaaaaatataattaccacaatttataaaattgtaaattacctgagagactgattgaaatgcaaattgagctcatgtgaaggaaattgacttcattgtgtaaacaacacaaaatttggaatatttctccagaaatatcactgacacaaagggtttccaaattgacttttttaccatatgtaatcagagtgccattaaacacaagtgtgccactccaagtgtcccactgcactacaagtgtgtaactagtggtgtgacagtgtgcttggacataacccctctaacaggaatgcgcgtttttacacatcgagcctcagcagcaaatgcacattccctttgccactagtatctggggcctgcagtttcctattctgggtttgtggttcagttgctaagttgtgtctgcctctttgtgacctcatgga

SEQ ID NO: 25089 - DNA, 1273 bp, Bovine  19866881288303
  misc_feature (1)..(1): n is a, c, g, or t
nacatatatcctctgaaaggaatacaccacatctctgagcagatccttgaggaaggctctcctgggggcagctggaccacctgtaggtgcactggaaactctagtctgaagttggcttactcttgactctcaaattatgccacctatttagctaagagtcagccctggtggctcagcggtaaagaacccgcttgccaatgcaggagatggaggttcgatccctaggtcaggaatatcactggagaaggaaatggcaaagcactccagtattcttgcttgggaaatcccagggatagaggagcccaatgggttattgtccatagggtcgcaaagagtcagacatagcttaacaattaaacaacaacttccttgttgatgctacagccaagacttccatgcagttttcttttggcttcagaattcactgaagaccatgtctgactctccaggatgcattcaacaaatgcctgctctgtctggtaccctatttgattccaaggacatacctcctcctgctgtgtgtgtttagcccctgtgaagccctggctgtccccacaggaggacgcgatgcctcccctttgagctgcagccacagctgtcccagatgtttatgcctttagaacacatgtcgtatttttttctcaatctgggtcagtccctggacttaatgacgttagttacaatatatgatgtagctaaagatatctgaagataaagaagactttttctgtccccaaattcataaacttctaaaggaaaagttatcactctagtgtgatgtctgatgtcttcaactaaaaaaatgtatcttttagttcacatttaaaaaatttgtctaaagaaaattatctattccctgaggctgcagaggaatgaaaataccaccatgtgagtttattagtctccaatatgatttttatcctccttttatttctcaataaggaaagattctccaaatgacgtatttcagaggctgaggagaaggaattatgattagtttcgttatggctatgatcaactgtaagagaaactgctgcgagtttgcaactttcaaagaagtggagagattactttgttaatgtctattcagttcatttctatttggggaacagaaaatttgagtgtggtttcagggaactgagcgcagaaagcttaaattgcaatattaggggcgttgcttcaactatagccctcctttgaagttgcttatagtacatgtgggaatgtgactaagaactgtagccttgttctcaatttgcccacttatcctaaa

SEQ ID NO: 25090 - DNA, 1256 bp, Bovine  19866881377891
  misc_feature (1)..(1): n is a, c, g, or t
ncaaacatctggatggaatatgcaaaagccagaccgcatatctgggtgttcttcacatgccgacagaacacagatcatctggagactattgcagtttcactctttacccttgggttaaggttcagttactttaaattcaacaaacacttgtttactcaagctttttgcctttttttttttttttaatcttttcaatagagagatgaatgagtcccaccatgaaggaactggcaggctagctaaggtcacaggtaattctacccaaagctcaaagtgctctgtgaagatgcttgatctggatccagtggctgcttcatggagggacccccaacagacaaatcagaggccatcaccactgataaactggatgttccaactggaatgttggaagttgcagtctgtcaatgcaatgaaactcagcccaaagctcagttgtttcctctgtagagtgaggggaacactttgagttgtccaaggctgggatggacaataaagaaaaggatttgagatcatggcatagggggagtaccatccttatcagcaaataggggatgtgtatgtaatttaaaaattctctgtctttaaaagtacaatttagcccatgggctaatcagatataggagctttacctcttttgaaagtagatccttcccctgctctccctacaggggaaacatttactcatcacttaagatgcagcataactgcccccaccttcctgggagaagtcttctcgactgtgagtacactggccgcttttgtctgtctgcagccagctctcaccagactaagctctgccactctgtctacttcaccgtgttccttgcttatgaaggggtcctgacccagaccagacagaagggaatgcatgtcccctccctggacacttcgggatggagcatctttcacactccagtatggtgctttctccagaccctcgccagggagctggacctgaagggaagatggggaagggccagaaggaccccagagagctgggacgaaggatgtgggaacaggcacaaggtgccaagcccttgggctttctctcagcaggggccacagggcacagaggatatttggggacatgcatcagtctgccatgggtagaaccaggacactttgagtactccatccttccttcgttttccaggtcttccatgatacctgcaccattttgttttaactttttattttacatcagagtgtagttgatgaacaatgtgctgtttatcagttaagtctctcacttgtgt

SEQ ID NO: 25091 - DNA, 686 bp, Bovine  19866881391421
  misc_feature (1)..(1): n is a, c, g, or t
nggcaagacatacaagtttcaggtttgtgatctctaaagcaggattaataataaacataagtgagtagtgaggctcgaatgagataagagggtgacttacaaactctgttctatggagactcgggtggagagaggtcaaacgaaaggagccacagcccccttccactgcttggctccagagaaaatcaacttttaacttttcagatctcagcttcaggacttcagctctgcaattcagtcattagtcgaccacatcagtggttgtttccaatatgaacgtgtcctcaccgttatccagtgctgtcgagttcacagagcacgtccacatatgttatctcttgtataatccttaccatgacacaagataattctctctcacttggatgctgaaagactgaggggctaaagcattaagtgacttgtcctagttcccaagacgaggcagcagtaactcccgaccagagagaggcgtgttctttctgcagctctgggcagccttcacattcctgttttctccaatacacaagatactatctttaatttgaaaactgtttgcctttttggataacctatgtccttacaacaaacaaggcacattctcatttttcttcaaagaatgaacttctggtttatcttaagaaagaagttaaaagcattgattcaaaatctgataggacttagagcag

SEQ ID NO: 25092 - DNA, 646 bp, Bovine  19866881459225
  misc_feature (1)..(1): n is a, c, g, or t
nttgcagttttctattactggagatgatcagaaaagaccgtgaggcaggatattacagacagaaagtacacgtcagtcggtaagctgaacaagccatcttcaaaaagcccttcccactctaagatcttctccctcattagcataatctttccttaatctgaattttctattattcaaagcagatcagaacatcgtcaatgccattttaatcactatgtgcccttgccaataaggtagggctagcagagtctgatgacaaatttgcgcagccaaagaaatggatttgaagttatgtacactggtatagagagacccatcacccatagggagagaagtgtgtgtgtgtgtgtgtgtgtgtgcgtgcgcgcgtgcatgtgtgcatgcatactaagtcgcttcaatcatgtccaattctttgcaactctgtggactatagactgccagtctcctttgtccatgggagtctccaggcaagaaagaatactgcagtggattgccatgccctcctccaggagatcttcccaacccagagattgaacccacatcttttacgtttcctgccttggcaggcaggttctttaacactttatgtatgtgggttctttgttttctaggtcttatttttgctgttgttgttaaatgatag

SEQ ID NO: 25093 - DNA, 2560 bp, Bovine  19866880344939
  misc_feature (1)..(1): n is a, c, g, or t
nggggaagtctagtctgtctcattttgtgctttaatattgataaattcaggtattttaattttgatagaagagaagaaaataaaatgttggaaggttgtagaaataacttttccccaaatttaaaattttgcatgtgtgtgcacatgctcggatttgtgtgtgatatgatatatgcatgtttaagttccctctttattgcccttatcttttaaagcaaaacttaaaaaaaaagtcctcaagaaacaaaaaaaaacaaaatacaaataccaaaatgcatttccttatggtaggataaacattcagctgtgtcatttgcaagaactcaataacataaacaaaaataaaccaagcaattttcctagctagtttttgtgtttagtatatggaatatttctggattgtcatcaagccagcatttatgaccactttagagaaataaaaattttagtaacagaaaattataacatcgtccggctcttgataggggcaagggaggagaggagactacaaatgatcttaaaaaatagagatacagtttctgaggctcacaaggatggaatagtgagaagggactgctgcccttatgggggtctgaacccaacatcaatataggattccttggtgtctggtccagcttcaaaggggactgaccctctgtggctaatgaagtggctcgctgatttcatcttagaacatatcctgcccaaatgcaaaatgggaattctcttattgttcatgtccctggggctaaggactaaatcaaatcagcccaagtgtttatcatcttagaaataaagtccataaaatttatatcaggtctcataagacatataattgcaaaatatccttatagttaaaaagaaaagaataggaaaaaacactgaaacctattcagtttaactctgggaaaacgttaggacatgactaaaagcatacttttcctgataccctgaataggagggcagttccttttcctttcacttttggggttcctctgcccacttcccttctatatatgtttctttttttttttttttttagattgaagtataattggagaaggaaatggcaacccactccagtgttcttgcctggagaatcccagggacgggggtgcctggtgggctgccgtctatggggtcacacagagttggacacgactgaagtgacttagcagcataattgatttacaatattgtgttagttccaggtgtatagcatagtgatttgtggggttacaggttatcacaagatattgggtataactctctgtgctatatggtaagctcttgttgcttctctattttatgtttagatgtttggatctcttaatcccaccctcctaatttatccctcctcccatcctcttctgaatatcccaccccgagtcagcatttccctcatgccagctctgattctacccattatcactcactctgattctctccagatcatctaaacagcttaaggacctcttactcccacaacttctcagaagtctgggcggcatagtctctttagcatgaaaccttcctgtttgtctcctgtttccttcagggcattcagattcatcattcgctcccttccaggtggcagttttcaaagtgtggtctgagagttgttcttttctaatgctcatgtttccaacatgataaggtctgtaattttgattctggcaggaattaataatctccttgttatattcctaattagtttttcatcaaaatcactgttagggtctattcgttcctttattctgttgaggctttccttcccctcaggtgacaagccagagttggtggcagaggtattccaaggaggttttagctctattaaaggctccatggacgtgtcttttcctccatccaattaagaatttcccctaaaactatcccagcaggaactaggtgttttgtcagagctctctgaataactcaacttttcaagaccactataatgtccttctcacttggattcacttcctgggttctagattttggaaaacatccacttatcacgcagatggattccaaaactgtcttaggaagtttctttatctacttgcaaaagtaataactactgtgtaacctcaacatggttaaaatagtgatagaaaaagcgttttggcttcaaccaagagaattttgactcaagattggcttgtttcttctctctgggtgggtagtaaaattagttgcttttggtccagtcaaatttgtagtgacatatccttgttgaaatagggttgactcgtgttatttctggtcttgtcaattccacattcttcttcaagaaccattccttctatccagactctcattgtttttattaactcctgcaaagcttgggagtaggaacttgtaaaggaatcccaaggaaaggcctcagttggatggagaagcttacttttgtggcccttactgttttttcttctactctgtctgggccattgtgaatatggaggttacctacactggtcaagcctagtcagggtgagaatctgaaggacttgatattcttaatgcttggaactagagctcgggaatttctgatagtctg

SEQ ID NO: 25094 - DNA, 1912 bp, Bovine  19866880381474
  misc_feature (1)..(1): n is a, c, g, or t
naggaactgggtgttcccattgatggaaaggtattgggtcatcagcattgttaattttattctctggttttactagttttacttcattatatggcagagttttggttacccaaaagaatcttctctttcaataatccaataaaaggtttcctcagcttttacagttcttaaattgaggttaaaattgagattaaagtctttctttttttaaatttctttgtaatcaagacacttatgagtataacaggtgcagtgtaccctaattgaccttaaaaggttagaaatgaattcgtgcctttaagtatatttatagtttaattagacagatttactgatataaagctatacataaataactatgaacaagtgtggagtaaactctagactatttaattttggttgtctgtggctagtcttgttttcgaatatgtagacagaacctgttcaactatagggagcatgggcttaacctatcctgccttgtggtatctcaaatccctttaattttaagcagactgcctttgaaaccagtacacttcccatcccctctattccagggtagacccttgcttcagcctttgaaatggattgaattttagggaagagctcagtagatttccagacgtggaaacaggacatattcccagctcatcttaaattagattttaatagtatggcctcattgcttcatcattttgcttgaaggaaattccctgggtatcagacacacccctattcaaataaaatcacaaaaccatctttcaaagctaaacaattaaaaaattttcctcattctgacattatatagctgtttccctctgttagtaagaataaactctgtcctttaaactgaatactgaaagaatagagaataaaaccacttcacagatagtatgaagaggaaatgaggtgatgaaagtactttggaaattagagaagtcattgatgcaaaatatttttacctcagatttcagtttgaagcacagataattttacatgttgaatcagtgagaacagaaaatagaaaacaaaagatgcagtaatgttctaataggttcagcatgaatgaagttttcttaagtaaaaggaatatgttgtaattttaattttattttgttgatttgagtaaaacagaaaaaaattagtccttcactattgtgattaagagctgctaataggcctgctgacgatccaatgcaatcgataaatataaaattcaataaaaaggaagaattattatatgatatttatatctttttttcagtgtgaaattttgtataatctccatggaggtcaatgtatatagagtatgaaattgtgtttctttgtgtgtacaaggatatttattttagcattttaaaaaatgttttttaaaatttatttttaattgaaggataattgctctacaatgttgtattggtttgccatatagcaacactgtaccattttttaaaaatggtaaaacttaactacaacttaaatgtccagcagtccttagagttgaaaagatgttcatgatgtaatatcaactgaattaagcagttttctaaatgtctatttaatataccaagaagtacatatgtttatatgcataaaaatggctagaagggaacatgtcaaactgttactagttctatctcagtggagtgagattgaaaacccactattttataatattattatgtattatatttttaatgaaacaaaaaattaagatctttcttttaaaagtcacatctattaaaaacttggagaacttaatattaagaaaacctcatacagagttaggcatgtgcgtaaataatagttgctaattctagtcatagtactgacaggagtatatcttcgtttggttcagttacccctttccaattccctgagttcttattcatctttgtatctaatttatata

SEQ ID NO: 25095 - DNA, 2736 bp, Bovine  19866880425406
  misc_feature (1)..(1): n is a, c, g, or t
ncatagccaaaaaaaagaatacacagtgaggagggaagaagcacattggcttgaaatgagtaatgccagggagagtaggagagaatgcccgaagtacaagggccgaagaagcactaagatgtataggagactagatcctgggagaagatcggaagcccaccacggacgccctctcctcactgtattttcttttatcaactttattgaggggtgaggttgctcagtcgtgtccgactctttgcgaccccatggactgtagcctaccaggctctgaggagcctctcagtccatggaattttccaggcaagagttctggagtgggttgccatttccttctccaggggatcttcccaacccagcgattgaaactgggtctcccacactgcaggcagattctttaccgtctgagccaccagggaagccttattgaggggtaattttacataaataaactttcatcaattttcagtgtacaattcagtgagttctgacaaatgcatgaagtcacatgggagaagatcctgggaaggtgggagaagggagactcttaggatggccctgcagactgggtcaggctggcacaggaggggaagaaggacagaaccccggggaatgccagcttctaaagggcaagggggggaggtggttccagccactgtggttttggtcagccctttacagtaagctgtggggaagtgtggaggtactcgagtgtggtggtacttttggacttgagccccacacgtgggtcactttcatcagaacaggaaaacgaaacagcctcccctgaatgatttatgggagggcttgtatttttggggatgtgatactgcaatttgtgccatgggatcaggacatctgtttccaggggaggtgtgttctcttaccccgaatctttcccaccggggacctcttatcccctcagatagttacacgcttttgtctgggttgcttgttagcataccggggactctggtaaaagtggcctcaatggtgcgtgagcatgagtggtgtgggggccaactgggagatgagcaggaactgcctgggtcccaccctgtccctcagatggtgtccagcagtgcagtaagctgtaggattagggagtgtgccatctgtcagatggcataggcagcctcccatttaacaattgagttttagccatttatttgattaaattccagttgtgctgtctccctgcggattcatgtcccttgctggggaactctactgccagcagatcttggcctacaaccctttctctccaagaggcacattccccagggcaggtctgaagtaagatggcatggaatcatctaatattctgactagagggacttgggcaagctttgtgttcagctctgcatgtcactggtggtcacagggagccagttgggaagggacttgctcagtgtcacacagcctgtcacgtgttgagcaggacctggtgcctcccgcttggaggttctttctaggtcatgcggactcattcctcttggtttataaggagcgtgggctggccgggcatgcatgcgtgtaaacagaaacatgctgtatgcttatggtggacaggtactccctcttttagctcttctcagaagggggatgggggaagttttgccggtgtccacctttccctgtcagcctagttcagcaaaagagctttccaggataaattcaacttggaagggaggctcagtacacatcttttcttttatttcttttttttttcttttttaggtctaccccttctgcttttaaaaggaaatatgaattctcaattctttttaaaacttattttgtattggagtatagccaattaacaatgttgtgatattttcaggtgggcagcaaagggactcagccatacatatacacgtatccattctcccccagattctcctcccatccaggctgctacataacatttagcagagttccctgtgctatatagtaggaacttgttggttatccattttaaatatagcagtgtgtacatgttgatcccaaactccttaactctctctctcttcccctcattcttcccccatggcaaccataagttctttctctgtgagtttgtttccctttcataaaagttcatacagatcattaattcttagtgaagaagatcttgtctccttttatctcagggattttgttttgtccaaagagtgtttgtgattctggaagccctaccggacccaggttttccccactaatcctttcttacctgaggctttgtccacacggtgctcatggtctcatagcatgtctgggtgaatcctcccagcgcccatcctgaaaacctcctataacccatgaactccaggagcatattatgcatgaatgtaagtgtgcaagggcctccccctaccctgtgtgtgggatcgaatattcattgtataagtcaaattaaaatctattaactttccttccagatgccccctgatagcaagtttaattactctggacataattaaatgaatttaggagattagaaatataagggggtagtgaagagcataaatttgtggagaaaaaaggaaaatttaattctggagtcttttgtcacttggtgggtagaatgctggggacccagaaggatggaggaagtgctggggtagaggcagagggaggattttgggatgttgaaccagtttggatgtattaggatgtatcagtctcatgtcacaaatgtagaaatgcatttttcctcctaatcagggcagtctt

SEQ ID NO: 25096 - DNA, 2527 bp, Bovine  19866880488289
  misc_feature (1)..(1): n is a, c, g, or t
naaatgtagaattaagaaactctttctcaggcaacttgaattcaaacctgtattttaaaaaccacctaaaacgctgactccaaatttctttctggcgctcacattctagttttatctttagaagatctttaaatatctctccattatccagcattcccactcgcatgctggcagcaagatgcctgctggcatctcatcagcaggtatcttctgaaatgcaggacaattagccatctttacatggggtggacatgttgagactttccactgagcaaaactcaaagctaacaagagccttccacatcaagcaaggaggtgaaggcactgatgacctagactcatcgtcaaggtcatccatgacttgttcccccggcacgatctcaggcacttagaccagcactgctaacccagtgagtccctggtaccgaggtatgagatagatgggctccagcctgagcagctggagcttgtcaggactgagctgggctccgtcttctgctgacatatcaaggtaaatgcattggcaggagcagggctctgcttgagtcataaaaagataagacaatcacgtttctcattcctaaggtctaggagatagccccaactacataggcacagaaagcctcctcagggggataaaaagggaggggacactagcctataacacagtctctcgactgcccagagacccttgtgttagaatccatctcagcaaaaagatgaaagtgcacaactggaggggccctgagtcaggtcagaaaagggaatgaagtaagatgattatccagagaaaacaaccacctgccccagtgtaagtgacccaaactgccccttgagcgctcctcactagtgaggacatccacgttcccctcttttgagtgtgttttgcttctgtcctgaataagctgtgctgagacttccctggtggtccagtggctaagactcagcatgccccgtgcagggggcccaggttccatccctggttggggaactgggtcccacatgccacagctaagagcaaagatcctgtgtgccacagctaagatccagtgcagtcaagtaaatataaacaaaagccaacaaaactgctcttcgtgtgctctcccatacgtactgtgcctctaataaacatgtaagtgcctgcttactctctcggtctctttgcaaaattcttttttttttttttcagagaaagcaagagccagggctctgcttctagcccctagccactgggggtctatccgttaggattcctggttttcactcaggtggcccacatttggttcctgggcagggaactgggtttgcttcaagtcacttttgacacccccaggtcagcacaaggtctctacatcaaagaaatgccaatcccaaggacatttctggggaataggtttcttccggtaaaaagatggactgtttggcccaagatgatagggaatcaatattaggaatttatagaaatcactgggcaggaagtgaactttttccgaccatgcaatccagggtagggaccaagctgtactggttcttccaagagcagagaagctgcccatgtcatctggattaagtgtgaaatagagcattttagaaaatgttttcaaaagaagataacttcgaaaccaaatttgttatttctgagtgctttgcgaataaccatggactttgtaataaagagggaaataaaatgcaatgaacacagactctcacatacacacaaaaattgatggaaaatatacttcaaaataagagaaaatattatgataattataattcaaattagtatcagattgattttattttttgtgttatatttttcctctctgtttctacaagttgagtctgtgaaaataaggactgccttcctttgatatctgtaccaaattggcatacgggatagtacaaaggttaacaagtagctctgctgtgaagaaaatacatttacgttattgtcgaaatccatgcatcatcttccagctgccttcatctcccatgaacccaaacagctcaggaaatcttcctggggtgtcactgactgtggatctccagtaagttgagcctgcccccaaaaggggaccagcaagtcataccctgtgggcttccttggaagctggaaaacaatctgcctgcaatgtaggagaccctggttcaattcctgtgtcaggaagatccactggagaagggatagctatccactgcagtattcttgggcttccttggtggctcagctggtaaagaaatcacctgcaatgcgggagacctgggttcgaaacctgggttgggaagatcccctggagaagggaagagctacccactccagttctaataaaattagtactgatactaataaaattgcagcgtctagtttctcaaaacccttaaaagaaggaccctttttggacttagccaaattctattctggaaaagtgttagggattcctcccaatagtttaggtcttccctgcctgtagtactctagggagtatgttggaggcagagggtaagggaggggtaatatttaacaaat

SEQ ID NO: 25097 - DNA, 5251 bp, Bovine  19866880501729
  misc_feature (1)..(1): n is a, c, g, or t
nacaggagatgcccagaatggaggcattagtctcagaggatctgtctcagtggggagaagaaattaggcaagatgggaaagaaacatacctacagggtaaataataaggaaacctttataactgcctgaattacaatagacactgaatgaaattatgattttcatcagatacctactaggtgccaggtactgttctaagggggctggaaagaaagcaacatgaagtttgctttcatttatagtgaatgaatgaatgaattactgaggatattttttgctcagcaaggaaggtctttgtttcttgttagatcaggtatcaagaccatcaagaagagtggaccgaggatgtgcagttagaaatcagagcaggtgctctggttggagtggggtgtgtgcagtggaagaaggccagccattacacagctggaggaggggaaggggtttgcttaactgagtgattcttggcccaagctgcacaatgatcatctgggatgctttaatcaaatacccagaccaaccctcagagatgctgattcagttagtcgggtatctaagtagtgtagcctccccaggtgattctaatgtgcagccagggctaagaaccacttatttgtactggttcttatttcttaactttgttattatttcaaacaaaaataatttgttcttatttcttaacttctctttgtgttgattgctgtatgatttggagtcagtggcatggcatcccactccagtactcttgcctagagaatcccatggacagaggagcctggtcggctgcaatccaaagggttgcacagactcagacatgactgaagggacttagcatgcacacgtgttgtcaacagaacaggctcaatgagtgcctttaagctgtgtgatctagtgcatattatgtaacttctctgggtctccatttactcatctataaactgaggatagcagtatttataaatctctgtaaggattaaagaagaaaatatttgcaaagggccgactatgatgcttggtacatcgtgaatagtcatatgtgatccttaaaatttttcactaagttagggattattgtgcccattttatagttttgggaattgaggattagacacatccagttcacttgttcagagccacattattagcaaatttagcccagacctccttttatgacctaattctacccattgttttaacagtgatgcattaaagcccagccaccccactcttttccctttgacctctgtggctatgaatgagctggccactgctgctgctggtctgttaagaccctggtttcccctcaacacctcggaatttagggtgggagagaagcctatgtcaccatccctcttggctgcatctcttactctgagatagagtagacataagaatgctgtaggctaaataacaaccctctaaagatatcaggtcctaattcttggaacctgccattatcttatatggtaatgtctttgcagatgtggttaaggattttgagattaggaagttcttctgaatactgcagggggtacgggaggggggcggctaagtactatcacaagtgtcctaataaggcagagagaaggctcaagaggaaggggatgtatatgtatatctgtgtgtgtatagttttgactgatttgcattgtatgacataaactgacacaacattgtaaagcaattttgtgaaccaattagaaaccattgtaaaccaattaaaaaataaaattaaagaaggcagaaagagttttgacacacatacagaggagaacaagatgcgactctggaggcagagattggagtattgtggtcacaagccaaggaacgcctgcagctgccaaaatctggaagaatggattctctcctctttctgaagggagttttggccccatgttactaattttttacttatggccttagaactgtgaaagaataagtttctgttgctttaaaccaccctggtatgtggtaatttgttacaatagccataggaaagtaacaccagaggttctctgtggacaccccagttctctctctgtgtggggggtactttcaagtcacagtaaacccagtgggggtctgcttggatctcttttgggtgcctggctgctgactcctactgctgtgccagcaggaagctggtgctcttgtagcgctgcgcagcaagcagagttcacctcatcctcacacccctgtcctttcctaccagccaagcctctggccagcagccgatgtgagttgtttattgactcatctgctggaggagacagacagcctctgtaagtggtggggtagggtgcagagccacaggggctgatggctcccattctctgcctgctttttggcattgagggtccccagttcagtttacccctgtcttcccagcgttgttgctcaagggcagggactttctggaacaattttactcagtgcaccaggaacaaaggagaaaccaaatgccttgcttaggaaggacccatatggaggaggcaaggctaggcccagtgacaggataattgcttaaatatctgctctaagtataaaggcagactctacctccagctggagttcaagttcccacaggtcatgaaaacaaagaggggaatgggagaattaaagaggaatagaaatggaaatgattaggaaagattgccactacttactgtgggggaggtggggaaatgggaattaacccttttgggattgtgcaagtagggtgtggcctcccagctcttggggaagctggaggcctgagcctggggctgaaacgctgtgctcctggacagctctcctaggacccagagaagaggctggtggggcttgttcaggcgctgggctgtgggcagtgcgacttggtagttggctttgagtggcaggactgagtctgtgggcagcacactcaggtttcagcttctcacaatccctcccttttcgctgtcctctcctggtggcgatggcccctcatgcttcatgcttctgctggcccagctttctgacacccctttggtggggtgggcatgctctgcactcactcccacagcatcctcagtatgttggcaattgttaaattaattgtagtgatcttatctcctcaattataagaagcagaaattttcaccttttcacagttctgaagtaggtcctgtgtcacaatcagtcagcaaatttaagggatgtattagacatggttccccagagaaatagaaccgataggatatatatcgatatatcctgttacatattgtatcctatctatacagttatatcctatgtctgtctctgtgtatatatagagagatttttttttggctcatgtgattatggaagctggcaagtctaaaattcgtgggatacaacagcaggctagaaactccagcaggatatttgtgttgtagtcttcaggcaccgttttttttaaatttgggaaatctttacccttaatgccttcatctgattgggtcttcctatattatagagataacttgctttacttagagtcaactgatggtaaatattgatcatacctaacaattaccttcacagtgatatctagactagtgtttgaccaaacaactagataccgtagcctagccaagttgacacatggaattaaccactacagtgggggtagtcatttgtttgttttttttggtttattcattccctcctccaaaatatctactataaaagtgtgtacagtcttcgtgaatgtcttaagaattgggctatagaggcatttgttttcagtctgcccttcagtacgctgtaggcctgagaaagccagaggtctacctattttggtcacacaacatcctcaatattggttaattccctcgactggccgtgtggctgaacagtaaaagatttagatttgggtgctgctttgacttgtaatctcctccctttaggagtgtctcaggacctttctccacttcctttccccttttgtgcgggcttcatacacctctttcttctcttcacccccccctgtctttctggctccttgtttcccatcccttttatttggctaatgctctgtgcctaatcatgttagccagcattggcattatagagatgtttgcaatccaacccaggtctgattatgagcttcagcagccccaggctactttaagaatgtgttgattggtgggggttgggaagcccccagagggggccagcatttttggctgatggagccgcccacatgtgtgtctgggcaccgcaagagagcctgggctggttgggttttggttctctccttgatcaggctcctggtggggtatttatcctggctgggtgtctaagcccttcctgattgtattaagcctcatgaaagtgaggccccaaacaatccagctagtgtggctagtgctgtaaccacagcaaagtgtgccctgtatttcttgtcattctctgtttgagctcatttcaactttctcccagcactgggagtataaagaaactgccacgtgtttctctggtttgcaagcattacctcatttcccttgtctcggatattaattcagaaatatttattaagtgatttcaggatttggggcaattctgaaagcattcagttcagattccaagaaggatgccatgagtttaaaggaaattagctacctctctctttctattttctcaaaagcaccctatatttttccttagtgcattttgctttcttgtcattgttcctttaattatttacaatcattccctgaatgtctgtcttctctatcagtcttttacaatttccatctggacaggttcatgagtggtgtcttcatcactgtattcccagggggaggcacagtaagttcttggccagctattgcctacattttgattgacagagatattgcatcctacctggaaggtataattatatctttgaaagtttgtacatagcacagaggaatatgtagttgtacatagttaaggatccatggttgtattcttggaatcaacttaagagcccatgctgtatcactcaaagagccttaaagtgtttcttccttgcatttcttaaaatatctgagacaagactacctgagtcaccattcctagaggggctggtgtgaaatgaaattactttgggttgtacagttgtgaagacacatattcccacgtgtgtgtatattgtagtggactgtactttgctaaaattgggggctctgtgaatcccacttcctggactcatatcctgctcctaccagtttctagatgttccacataacatctagaaggccat

SEQ ID NO: 25098 - DNA, 1335 bp, Bovine  19866880504118
  misc_feature (1)..(1): n is a, c, g, or t
natgattaattgcttatacagaaattgatctaaccactattttatggaaaatgcaggatttccatatctttaaaggaacttctccaagaaatttgaattagagaacaaagtaattgaattcttccatctttcctagcattttcatctactgattaatatagagtcctgagtgttgaaaagaattctggaaatcaataataatattaacccttatgaaaaggtttgctgtgagaaagaattgtaaccgagagtcttcaatggaaaatagccaaaggtaagagttcatggatgccagtgctattggcagagggcagcatgggggacaaacttccatgctactgtgatctttaatgtttccccaggatccaagctctctcctggtccaagggatagtaatctagtaatctggtcctataacatgttgagatcaggagagagaggcaataagcagcattggtgaccacagccaggcaacaatatcgggtccaaacagcgccctccttcatcaccctcccagccaggcagactaccccccagctctgtcctattaaaatcacccctgtctctcaggctgtagttggccatgagggattaacccctcccaccccccaccccggcattgcccctccttccaacagtcctttgggcagacatgactgacaagagtaccacaggcgatgatgtcacaaagagagggggcagtgtgccctgttagaccatctttcactccagtggactcgccttcacagacaaattgatttgcaaaggttcaggctgccagcctggcctgctttgcatacagaacgctccctggtgacacaataaaaagtggccaggctaacagaggagcacagcggggtctggccggttcaaagtccaaactccacaccccccccctcacctcagtctggtttgaaaggtcactgtgtgtctgggaaaatagttgcaggatacaatcctttattaaaggtcactatttttcaacagcacttaacacacacttacacacaaattgagactggagagggggggaaaaaaaaaaaacgggggctgcatcgtattgtatattgtgcttgcaagatttatgtcttgtggtcaccagcaataaatacacactgcttcagtattaaagttcgcattaatccaccgattcgccctcccctggaaatcagcctcttctttgccaggcagacaggggcaaccaagacttttgtttgtctcttttgttcctttcccatctcttccttcccctgttgcaagatttttattttatttttttttcaattattgtggatgttcctattatcactgatgtgcacccacagaactttgctc

SEQ ID NO: 25099 - DNA, 1661 bp, Bovine  19866880514001
  misc_feature (1)..(1): n is a, c, g, or t
nccgtaagttgttatgggaacaatgtgcctgtgactcaggtcatatctgttagagacacatggttgcttcccagcacagtggagaactgcgtttctaacgcagtctacctttgataatagacggtcctatacagttcacagtcttcccaggtggctcagtggtaaagaatctgcctgcaatgcaggagacgtgggttcaatccctgggtcgggaagatcccctagagaagcaaatggcaacccactccagtgttcttgcctggggaatcccatagacagaggagcctggcgggctatagtccatgaggtcacagagagttgaacatgacttagcgactaaacaacaacaataatatatggtttagtgttttgggtttgagtgttatctccctaaaagtattgtaggaccatggtgttaggactgaaaggcatattaaagtcatctggttcaatgtctttattcagtgtatgaggaaagtgttgtcctgagaggtagataactcactcaaggtcacacagtgagttatgggctagcagtggaatctgacctctcagcccttagtctagtgctcgttcccctttctgatgccacctgtgtctttgtggcatgctggctgtgtatcctattcataaaaggaccaagaatgcatatgccaaacctcacctggatgccatgtacataaaagcaagaatgaattaaaaatagtcaggaagtctccttgggagttttaccacattgcccattcttttcttaatatggctgagatttctactcagccttttttatatttgagaatacttagaagcaactcaacagtccaaaaacgagattggtaaatgatggtacatgcccataatgcattgtcttgcagttatttaaaatgatgctgtagaataatagctatcaacacagagaagtacagtagaatgttatgtgtaaagcagcagaattcttaagtatataggagtataaccttagttcagaaaaaaataaatccagtatacacaaaaaaagggatatcaaaatgttaacagctgttataatatctggatattggattatgggagtgatctttattcttttctgtatttccattttttcaatgaagatttattacttttatatcagggagaaacaaaaggtgttatttttttaagaagaagtcggcactagaaagatttatacacagtcctccaaaaaagtcagttgggaatgcatgctctcctacaatacaaattcagatctcaatgtggctcctgacagcagttctgataaaaggataggaaaggtgaatttggaatttgagttttctttcctttattggttctgggccagatcatttgatctccctgttttcagtcttctggtgtctcttatgggtgtaatccttctaccttctctggggaaggagagggcaatatatgtaggaaggagccatacacactcagaagtccttgggaagtcttaaatccttggccataaagaggtcaaagtgaatgggtggtaatgaccgaagggagctgcggaaactcagctcaggcttccggaatgtgaaataaagataggactggaccctgctgctcaggattctcctgctgtgttggaagtgaggcgtggaaatcccctcagctggtgtttggcaaatttgcatggaatactc

SEQ ID NO: 25100 - DNA, 1184 bp, Bovine  19866880528877
  misc_feature (1)..(1): n is a, c, g, or t
nattgaacctgggtctccccacgttgcgggcagacactttatcatctgagccactagggaagcccagctatctttgagtgcagttaatctttcactcccaactatactgatgccacacctctctcttcccagaccttcttctctgtccttgttcaccctgaacttagttctcccttcctgtcccaagtttcctggctacctctctgcatcaccaggtgacggagagttacgatcctgcctctgaaggtgcctcctccctcttggcttctctcctagtgacaagttcatggaggctgagaaacacagtgagtggcctttctcgcctcacttactgcctgggagagggctgttcataactttccgctgacatctggagaacgtaggttttggaggagcagagcccagactcccgcaagccagcggagccaagtctttttttgagtttccagcacaacccatgttataataggagttggtcattgtgtttaacagtgaagcaaagcccaagtgcatgtcacaagcacatctcttctttgtgccggggtgagcagaggtgaccctccctgagtgtgtaggatgatacgaagagcattacagacatgggaaagcatttcagagcacccaaatgtggcatgagtaatcacaggcatagagcccacaagactgccttttcagcccctgcctcccctttttgtactccagttcagtcagttaagacagaaattaagtggtaagaagaggggccgcccgctcttcagactccaaggtgtttgtagcccaggacccctgcgtgggcatgggcccagcagagcctagagaacatcccctgctgggatctttctcagactgacttgctaacttcccgttcagcccagcccagaggtggctcggtaatccccacggggtaacctcacagtgggctaagtggcctgggaacttatgtgtccagactcaagtcaggagcataaatggggcagctgggaagttgggtgatcagggagtcagttggaaagccctgtgtccatgccagacccctctgtgcactgccacagtctccctgcctgaaagcactcggcgacatttcacggcagaagaatgtagcctacccgctacatctatgcactgaaggctggcttctggattgccttcccttgggctgcatctctgaggccctttctgcaggt

SEQ ID NO: 25101 - DNA, 680 bp, Bovine  19866880567258
  misc_feature (1)..(1): n is a, c, g, or t
ntttcctatgatttttttaaaaagaaaatcataaaatgttgccagttatttattggaaataaccacagatagcggccctgatagggtgccggttttagagagcacacaattgtgtaatgaattgtaattcagaagactgttaaatgtgaaccacagaacctttcagaggtaataaagtcattactttttacactacagccaaccctgaaaagctttatacacaccattatatataaatcatacatatatatttccgcaacacacattcgctcatttatataccttctctatatatggacttttatggatggatgggaaaaatatttaaatttgaaaagctcggttccggaaagaatcggactcactattgttacctgaagggaattttatttatttattttttatttttcaaaggcctcccagttgtacttttttcttccctctcctcaccttccctccaaccattctcctccacgaccggctccccccaccctctcccctgcaatgatattcttttggtcggtctaaggctagttgaacaagatttaaaaaaaaaaaaaaaaagacagtagtggaaaagagatgctgacctgctctgaagaactcgtgaaaagggggaaatggtataacgcacacgctacagagctttactgcaagtgaatcttcctgcttcttaaaca

SEQ ID NO: 25102 - DNA, 1275 bp, Bovine  19866880605307
  misc_feature (1)..(1): n is a, c, g, or t
nattttcaacgtcctgggcaatgagatattgatgtctattccatgtctgtttttctgatttgggaggacgttaaggtttttcagtttttatccctcaatttattcaggcaaaaggaaactgggttttagatactacagattcagcagcaaagaggttcctttccatttgtgtttataagaccatgtctacagctccatgccagtgaggaggagcccctggaagtcctagagggtcaactcagaagacctcagtggactctgttctaaccagagtaggaattgcacgcatataaagacccaaggcctccaggacattggaattttgtctcttgggctctgacttatggacagtgagttggcaaaggcagggggtagcatagccccttggtaaatgcccactagaaaagaaatcggactggtctatgagtgatgtgggggttttaaatgatctccatagactcagtcatttcaaactgaccttcccatctcaagaggtgctgtttcctaaaaacagcaaatacagttggaactgcttatgcttcaattttgagtttaccatccagagttcatctgaaatgttctaaggtttctagaaattcctctgaagaggcacagtacaaaaggaaggtacaaactggtttacaaagaggtggaaatggctcttcgtaccacaactttaatatctaaatatacagaccatgagacagcccagcacaccaggaaggctgcaacgcctttgaagacttggacttctgctgatgggatattactttatatgtggtgacacttcatagtttttacagtattttcatatacattccctttttcaattagtcatgctttcatctctcttctcattgatttttggcttgtttgctctttaatatttttgttgtgttgcttctaactgataagaatggggtagtgtaaacatcacacaggcatgtttgcacaatgctgccttgtaataattaagtgtatttttcaaaggtctctaagcaggtcataaaaatctgctcagagctaagcgtggaatgttcgggtcttatcctaccagcaaattcttttaaacaccataataacctgaattttggtcatttagaaatgtacataagggcttccctgggagctcagtggtaaagaatcccctggccaatgcaggagacacgattcaatccctaatccgggaggataccacacgcctgggagcaactaagcccatgagccacaactactgagcctgtgctctagagcccaggaactgcaactaccgag

SEQ ID NO: 25103 - DNA, 761 bp, Bovine  19866880633449
  misc_feature (1)..(1): n is a, c, g, or t
nggagagtgggatccctgaaaaggtctgggcactggtcagagaatttcaaattacaaggaggaaaaataatttgaatgaagagttcagcacgagatctccaccgatctaaacagtaaagacatcaaaacatgaaaatctacctgccagtcttgctctcattcacttgaggcaactacatgcatgtgcttagatgcagaaaataaaatggccctgcagtcccttgaaaatctttcctcaatcttgatgttactttaaagccaccataaatcacacaacctgccaatcttgccatgttttataaactgtggggagaggtagagtatttctggcccaacgatctcccagtaacaaatgccagttctaatgctgtggtatttcctcaataccactcgacctcttaaacaagcctctacaaatatattaactgtcatattctcaatttcttttttacaatgggaagtgatatcctcttatgactagctcgatggagccaagggcagcagccatctgggaactgaaaaaaacacccgattgtggtgggcaaggctttcctgctcaccacttactgcccctaacattcttatgggttccctgttccctgcaaaatcccccagggtcacaccccactggttcatcagattccagcctgcccctgcaactcatggccatccaaatgagtgccaaaaccaacccccatggggccacactctgcctggccttcaggataagtcaaaaaggctgaacccaggcaagcccaggg

SEQ ID NO: 25104 - DNA, 952 bp, Bovine  19866880698931
  misc_feature (1)..(1): n is a, c, g, or t
natactaaatttctcttttcaagttttctttatatatctcagatgaaactttatcagtatttagaaaaagctttatgattggatttataaatgtcttcatgttaacttcaactcatttaacagggtcaaaccaacaaatttcaacgtaggaatgatcagagtagaatagcgtagaataatcattagaaatggtaaaaagcagaattaatcattaaagatccttaaaaaataataattaaagattctaatcctttgatttggtagccttaaatttcttattcctccatgtttgtggttcagactgaacagaccaataaatagaactttagtgtaaaaaaaattttttaataaataaaattatgtgagtgcataaataactacctattaaaccttccaaagcttggaatttaagtcatgataatagtgatgaatatagtgcaagcaatagaaaaaagccagtctcaaaaatggtaactatttccttaggattttttaaaagaattgtacaaggtcagagccttcccagatttcatatttttttctggagttttagtatttgaagttagctgaacataagattatcatcaggcttgctctaattttttaatgtattgctgcatttttagcaaggacccaagtaattaccttaaaaagtacttaggatatatttgaggtaaatggtgctacatcacttcacagtattaatgtaaaatgaatgcagctgctgctcctttctagttagctgtttgtgtaattcatattaattttcctgctttcttatttggattgtcttaatttcttagttgtacacacaagcctcattatctgtctggaataagtaatataataaacttgctttgataaataggtattggtgattgactgatattatttgggagtaacttaaaagtaccagacgtctttacttatatttcagactgacagccagtta

SEQ ID NO: 25105 - DNA, 1370 bp, Bovine  19866880705867
  misc_feature (1)..(1): n is a, c, g, or t
nttgaaaagaccctgatgctgggaaagattgaaggagggaggagaaggggatgacagaggatgagatggttggatggcatcactgactcaatgatcatgagtttgagtaaactccaggagttggtgatggacagagaagcctggcatgctgcagtccatggggttgcaaaaagtcagacatgactgagtgattgaactgagtatgcaatctgaactgaactgagagtcaaaagcgaaagtgaaattaaaagtgaaaggtgctcagtcgtgtccccttctccaggggatcttcctaatccaggtctcccacgttgcaggcagattctttactggctgagccaccagggaagctgaagaatactggagtgggtagccaaacccttctctttgtgaccccatggacaatacagtcaatggaattctccaggccagaatatttgagtgggtagcctttcccttctccagggaatcttcccaacccagggatcgaaccctggtctcccacattgcaggcagattctttaccagctgagccaccaaggaagcccaatacaggagtgtgtagcctaatccttctccagtggatcttccccacccaggaattgaactagggtctcctacattccagacagattctttaccagctgagctactagagatttgtccagaaaaaaacacaatcacactgtatttgaatactgctgcattagtgcaatgtgaaagcttcactccccttgcccccaactttctgcttcctatagataagtggttttgtgtctggaaaggaaaagatatacatcttacaaggttgaatctatattaatccgtcaacttaagtgacacaggaaaaatattttaaggcacaatgcttagctttgaagaagaaatgatgcgacgacagcaggaaggattcaagggaaccttccctgatgcgagaaagcaagagatacggatgggtcagatggcgatgggaggtgctatgggcataaacaacagaggcgctatgtcccctgttcctgtgccagctggtaccccaggtcctccaggaccagccactatgatgccagatgggaccttgggattgaccccaccaacaactgaatgctttggccaagctgctacaatggaaagaattggggcaattggtggaacccctcctgcattcaaccgtgcagctcctggagctgaatttgctccaaacaaatgtcgccaatactaataaaattgcagtgtctagtttcccaaagcccttaaaagaaggaccctttttggacttaatcgaattctactctggaaaagtgttagggattcctcccaatagtttaggtcttccctgcctgtagtactctagggactatgttggaggcaga

SEQ ID NO: 25106 - DNA, 1432 bp, Bovine  19866880709146
  misc_feature (1)..(1): n is a, c, g, or t
nacattcctataaggaaggacattccaggggcctagagatcaccccccagaagctgaggacaaaggccaggactgtctttaggaaaggttaattcttcattatttagctacacataccataccaaagtacccagccaaagatagagctagaaaaaaaaatgagagagagatatgtatgagagagataatctataatttcaattttagagtcaaaataaacttcaaaagagcacatgacctagcctttcagttcaggtaagtaactgcacctattttactgctgaggtctagagaggtttacaccctcattcaagctgtggacagaaacaatctcacatcctctaatttctactaaaaacactcattccccactgatgccatggactcccctccctatcccattggcactacctgatctttcccacagtaacctggcatcagggagtgtccacgtctctcagtagacaacgtgctcaaaatgcccttccttcccacatgccactttgaagcagaaggaacacacagtgatctgctcccatccagactcctagctgatggggcccatgggcttctgtcaagagttctgggggtccccatccacccagagcatctgacagatactttgccccagaaggccaggtatagtcacaggagggtattttcaactaagacccaccccaaccctgccggcagaacgggtgcagggccatgaccacactaaagacaaaaagaatcaagactcttctctgccttgacaagcttcttcaggtctctgggcctccctttcacccttcataagacttagcaagctactccaagtacagtccagtaaccagccccagggcattaccaagggagttgtttaggcagacattccaaccctaggccaggactgcagcattcaattctgcactttaacaagatctctaggtgattcaaatgaatagtaaagtttgagatatactagctgagaccctatctaggtccttcccaagatctaaattctgagattctaaaaaggcatctcacggctcaatttccagacctcagcgttgagatgcctgttggaactgggggaatccaagcttctaatcaggagtggtcagaagcagagtcacagaaggcgtctgtgaaacccaagcccttggacaggcaatgtgggactgaggagcaggcggaggagccccttcattttttccataggcacgctgtgtgtgccagatgaggtctttaatgtaaaccctcttgtgccccgacctaaacaatgagcataattatgggctcgcttacccccttcagatgcagggctcagggtcggccctccacagggtcctgcaggaggtcctgtttctgagtcagggagggcctcggttaaccagaacagacccaactctgaggggcaaagttgacataccagcgtaattacacatag

SEQ ID NO: 25107 - DNA, 1857 bp, Bovine  19866880739937
  misc_feature (1)..(1): n is a, c, g, or t
nagtactggagtggggtgccactgccttctccgtggggaaactgaggccttgagaaatgaagtgactggctcatagctagacggatggttaatcacaaagtgaagatcagaatcagtctcctgactgtccatccagtgctcttttctgggatatccatctctctccttccctcttgtggttcccaccatgttctgcactgcccaagaagtaccagtgaggagggatctctttctcttgaaccactgggaggaataaccgctcttggaggagaatgcagcccagaggtgttgagtgggcctttcaaacagtctgaatgaactgacttggtttcaaaattagaaaacaacacctgatctgcttcctgcgcctcctggctcacctccactgttgtcatcctctacctctgcttcccctctgagagtcagcagaagagaaacaaaaccattcctatgagccaaacaagctcctgacactgtctctgtgagtgagactcatacttgcatttctcttcccccacgaaccaaaggcaatgggcagccccagctgattctgcagcctctcccaccaaacatatctctaaacacattctccttggtaagcagaatcaacatccccacaggaactggaaatgctaaactgttaatagcctccctagggcttaactttttgctatgatgctttcaattatttcatcacggtttagacagagtcgagtctcacaattaatgcttctaagcatcaccttcaaccagcagctctgcccaccccccaggctgcccctgactgagggcctcttctcctcccacccacattttcattctccccagggggaggtggactcggctggctggcagggaagtaggcagttgacctatgctccctttatttctttggtagtcctctcagggcagtggttctcaaagtgcagacccaagcccaacatcagcatcacctgggagcttgtttggaaatgcgaagtccccccaccccaccccaaaaaaaggaaatgcaaagtcccaggcccttccttagacttactaaatcaaaaactgggttgatggggaggggcggagtggagtacaaaaacctctgtctagcaagcactcccagggatttgtatgcacaatccagtttcataagcactgtcttagggtaagaggaggcatggaagctggaagctttgatgttctcctggcagagatccactggctatgaggttgtctggaactcacctcctttaggaccagagcaagcttgggaaattcctaaggataccttccatgtgggagtccaaggttccacccttcctcattaaccaggaacagccccagactcaaacagggaacgctctttgcataacttcccaaccagcttttgccaggcagatgatgtcctcactgcttccacaaaagtggaagtgtttgtgaatgcagctgtgccacgctgcatggtgtaatgtagccagtactggactcctgtttccctttctggacttgcaaatatgtggccctcttctgaatcaatcttttcatatgccttgtactcctctggtgaaaagcactttaacctgttctgttgcataaaagtctctccagacccagcatttccatttagggcctcagaaatgccttatgcatttgttgttgttgtttacttactaagtcatatctgactcattgggactccatggaatggagcctgctgggctcctctctccgtgggatttcccaggcaagaatactggagtgggttgatgtttccttccccagggaccttatgcattattaggttacaatggttccttatggctgaataataaataatgaattttatttttctcaagtctcattaaaaat

SEQ ID NO: 25108 - DNA, 704 bp, Bovine  19866880752632
  misc_feature (1)..(1): n is a, c, g, or t
nccctttttttaaagaaaattccaaataaactagaaagcagagaaagaaggggaacaccacagcacctgtgttctttctgaaagcacctctgcaggtttcacaataattccattcttcattttaatgggaatttttaaaccaatggactcacctctatctaaaactgagatcaaattgtaggtgtaattgttcatcactcatgctaacaacagcaaagacacaaacagaaactcattgtgagtgaccacaggtccccaggtatccccttcatcaacaggcctgctccaggtccccactgggaattccctggcgggccaattcaattctgagtaacatgctgccaaccctatctggaaaagtggaaaagggtgtgcacagcgtcttctcgcctcttttacaggaagtttaaacctgatcatctcaactttagtggctataatttgttgtctagagttccaagaacttggtcttttatctatctaaagagatcaaaaagaaaaaaggaaggcagagagtgagcaagctgtggcctggcctagcccctagcgaggctctagctcagagcagtaacctgtgcaggtaagccttccagcggcattgcatcagaccggctcacatcagtctccagggtgaatgggagaggtgaaacacttctggtgccctgtctgcaaactcctcattctccagttcttggcagcttatt

SEQ ID NO: 25109 - DNA, 1773 bp, Bovine  19866880777531
  misc_feature (1)..(1): n is a, c, g, or t
nttgtaacctgtgcggccttagtgagtttccttccctttcttaagctctctgggcctcagtctcctggtccgcaggatgaaggtggtaatgctggcccctccctcatcgttatgagggtgagactagtgaacatgtgtcaggagctcagaatagagcttggcacagtttcctctacgagcagtggcctgaggatgactcgcagtcctacgaatggctgcactgttacttatgataacagatgcctgtcctcaagctgcatccacactagggaggagaccaccttctaatttcttattcaactgcaagactgacaggcaagtgttattttaataattttcccaactcctctctagatttcaggcaggggtattgctgcccccttggggctgtcatttcttgatcgactcctttttccctcccctcttgtctcccactcaacagccaggctccagaagaggaggtggagataaccactgtccgtggggtgggggcggggtacgtagctaagaggaaattatgatggagcctgatgactcacgacttgccgtggatttggcccactggggtgaggtcacggtgcagacagggactcaagccgaggtctgctggtctaagaaataaagctgctcacgtaaacatgagggctgctcccagctgaggtggtggtcatgggccctgtgcaccacgtcctcttcctttccacgctcatcacgtggaatgatgagcctggctggtgtaaatgcaggttggatgggttcatctggttgttggcatagctttcagaggcccagcttctttgttttgtgtccagtttccaaaagatcctttgacttttctggaaggttattcaatgatttattctgagtatcacaggctgagctccccaggaagcaggctctgcaacagaggtttgcctgcacaaagtttcctggggagtgaaccccaggaagcgggggagaggcgaaggagcaggatggatggaaggaaaagttgaactttgatgctgtcccaacagaggcttcagctgatgtcatgaggagctctggagcaaggatggaacccagggcaggctttatacccctgcactgaccactggatacagacttctctgggaaggcgcagagaggccatgggggaggcagctcgctgtagaccagggccagctctaaggatcctaccaacgcttcccgaagctgggttaaagaacccctcaacccggggcgagacctgggcaatgcccctcagtgtccagcacactaagcatgggtggttgacctttctacctcttgtgtgtgtgtgagttgctcagttgtgtccaactctttgtgatcccatagactatgcagtccatggaattctccaggccagaaaaacggaatgggttgacatttctatccccagggattgaacccgggtctcctgcattgcaggcaggttctttaccgtctggaccaccagggaagcctgcttcttgccgctgtccaaatccttctcattttctaagacctacagagtacaacgactgaaggtataggcttccagtggactcaagttcaagtcctgtttctactgttcatttggtgatatttatagtgaatactgtgcggtagtttgagcattctttggcattgcctttctttgggattggaatgaaaactgactggaaaaatgaaaatgtttccagtcctgtggccactgctgagttttccaaatttgctggcatattgagtgcagcactttcacagcatcatctttcaggattcgaaatagct

SEQ ID NO: 25110 - DNA, 1707 bp, Bovine  19866880811535
  misc_feature (1)..(1): n is a, c, g, or t
nagtatagtatgtgaacattcttgaaaacaccagggccaagggacaatggaggaacaaatcataatgaagaacacacggattacaaaacattcataggaaatcatggagcaggggagtggtttaaaaaatgaaaattctgaatttcctccctcactctctgagagtaaagtgtttgaagcaggacaaggtggggcctgaggcttctcaactccttttcaggaaggcctgacatatcccagtaccttttaacaaacttttagtgtctgtgaacaaaccatctcatttccttatttccccaaatgaaatgatatctaacccccaccaccacttcctttcaagttctcacttccagcattatgaatatatacaggatgaacttattgcatatacagaaatggtatttaaataaacatttctatcacagaatgccctgggaaaaaactcggctacttcacacttcctgccagtgctggtacaaatgaagaaccaatcttacttcttagcaacctttaaaatacgtccatctcactctttctgtaagtcctaaacagagagaggactgtatgtggtttgcggataaaggtactacatgtaaggcagagtgtctcggttaaaatctgtgagacatagttatttactgtactcctgtttattgttttcaaaatgaagataaaagagaacattttaagcaccaggcattcaagtatgtagagaacattgcattcaacacatcaggggtgtcacataaatgtaacttgagaatcctgaaatgtgttcatccttattatttctttgttttaaaaaactttaccatgaattcatctactgttggaaatgttttttattatttaaattaagctttttaattttagtgttccggatgcaagatgtcatttataagctatcttcttgttgcctaggttttcaggcttctattattcacacagcttcaggaataatattttataggagggtttcaataactcaggagattgagaaccctgaagaacctgtctcccaataaatttatttaactttgggattatgtaaatcaaacataatttgtgatttatcaccaaatgtttgcacccctccccagtccccgtttgatttaaggaatttgagcatacaagcatagagtatccaccattaattctgtctgtcaggatgcaaaacctcattacactaagagcatcatatacggagaaattaaaatgaatactgtatataaaaccttcgcagctgtactcacagctcctaataaagcagtgataggaacacacagcacttttatggacatttaatatggtgaagcagaagtcaccatatctgaagctggcatggcactgaagactatttctctatgtcttgaacagcattctggttgcgttggtgaagtaaacttgtctaaaacacatatatctcccctcacttcactgccaactatcaccttctgcaagtaccccctcatgccaccccagctcctctactatactctcccaaatcatctcttaccagattcttctctgcctctctgctttccacccaatctgacttttaaaagagtacacctactttctctgtattttagaaggataaaactattcttgcctcagacaaaaggcattccgtgaaaaggccacctcacaaggcaccagggcataagaactgagcaacagaaatgctaccacaagacaacagaatgg

SEQ ID NO: 25111 - DNA, 1754 bp, Bovine  19866880834071
  misc_feature (1)..(1): n is a, c, g, or t
nttgaaaaaataccgtatagactcatggcattctttttttgacagataattttgtttatttatttttggttgtgctgggtcttcgtggcggacaggctttctctgtttgtagagagcaggggctactctctagttgcaatgtgtgggcatctcttgttgtggggcacagattatagggtgccctggcttcagtagttgcagctccctgggctctgggtcatgggctcagtagttgtggcacacaggcttagttgctccatggcatgtgagatcttcccaggtgagagatctaacctgtgtctcctgcattgacaggcagattttgagccaccagggaagtcaagactcatggattcttagagtcaatgcattataattggatgctagtctattactagcattattattctgattttcacgttgtcacaaatttgaccaatccaagccccttcagtggagaaggaaatggcatcccactccagtattcttgcctagagaattccatggacagaggaacctggcaggctatagtccatggggttgcaaaaaatcaaacaggactgagcgactaacacacacacacaagtcccttcaaactgtttacgcctgctctaggctgtgagctccatgagaggagggattgtatattcccattactcatcacagtccttgggacacagtaggaactccagaacttgttgaatgactgtgaatgaatgaataattgattcagataatctctgtgatcttggtttccttatgtcaaaatttgtgtgaatagcactcaaataggattattcagatgaaactatcaagtaatgtgtaaatatcttagagtcctttaaaatgtcaaagaaaaagtgagaaccaacctaagaatctttcaaagaagtggaatacttttgaagagaaatatggttttagggttcaagaaaggattacaagttcaaaatttattttttaattattggaggcagaagaaggaagtgttaaagatattttaggtgttaaaaatcacaaggatggtaaatatgaaaagcatgaacagtaaaacaacagagcatagagggggcaaacacggcaagtgaccccctgttgccaagggccatgtgaagtttgagcaaatagtaatgttattataaccaagttttgcttccttattcacacccacccaattttaatgatgtcatggtttttccatgtgggaacaagtatgactcgtggtggtaggggagttccccccaccatcctctgtactactcctatgcaaattagtaatatttgtagctgttgagaaattttccataaatgacattttgaaactgtttaaatattattgttagttttaaatatctgtctaatgaaaaaatacgtagtttgatgctttcttatgataaacggttattataacttcatgtgataaggcataaaacatattccactgctgctagtagtgaagtcatttgtagtcagaaaccagatgtctgtggagtggagaggctgaggtatgagaggactagcaggcattgcagccaactggagaaccctgtgtcaatggggccgcaaacttagctccaggcaggtgtttctgtgccagtctactgttgcttttaaaatattcaagagaaagcaggaatgtttatatgcagtttcctgatttttaaatgttggtagtctgcacacattttaaaaacatgtagtcagcatttttataactcagcaaaactatacatgtaggtgtcagccttgggcag

SEQ ID NO: 25112 - DNA, 634 bp, Bovine  19866880838066
  misc_feature (1)..(1): n is a, c, g, or t
ncttttcaaagagaaaactttaaaacctttactgtctctctttagtctaattttttaaatatggattatgcttgaattaaaatgaaaatgtatagattacacagccaggaatgctggtatatattaccttcctcagcttgcactcaccatttagcgggtctagtagggaaaacaaaatggtacgtttgaatagtgcagggagaagcccttggttgtatagtttataggacacacgggatgccatttagccattggagtcatagttcatttcttcttgcaagccctttaccattgagctgaaatgacttgaattctgattgtcagagagcagtatccttcttctcccctcctgttcctgacccctacctacatctctgaaatggaaattctagtgtttacttctaagttttcctttgtgaaagttaaagaatagcaaggagaaaacaatggttgttcccttatttattttgtacataggaaaagacgagaatgaaatcccatgaccaaatggtagcttccttgcaaagctgtttttttagctgacccttgtcctttattcaggtattttgagctttgttttataaatattctgtttgagcaaaagtacatgattatgaaaggactgaataactgt

SEQ ID NO: 25113 - DNA, 3668 bp, Bovine  19866880838159
  misc_feature (1)..(1): n is a, c, g, or t
nggtttggtcccagctgggggagggcagagcagggcagatgagtcccgggtgggggtgggcaggcgggctggtgtgcccctggcctcgcccctggctcccttcctgtcgctgctggtgcgggaagattctgcctccccagcccacccagtgggatctgcgcgctggacagcgcccctgccgactccagggctttgcgggccactggctcttcccaccctggaggcagtccttctcgaccccgagggatgtgcctgccagccgtccctcctccaggactcccttccttggtgctgcccctccccgctcacgggtgtcagacccacagggagaggggctccctcctggcccaccctgggatcccagcctccccgcagcctctccaagtcagggggctggcgtagggacagattggggggagggggcacccacatgaggagtcaggggacgagggggtggctccgctgcccctccacacgccccagcccagctggcagtgggcgggtctgccctgcccctcgagtgcccccgtgtctggaggccacggcagaagcagggatggggctgatgtcgagggcggggcagggcaggggcctctcctctagctgagcagcacggggctctctctgccgtggtggacgctgtgctcctgttgcctttccggcagagggggcctgcggggccgtgtgaaggacagtgacgagagggacgtgccgcagggtgtgagggagctgggcgccaggagagcccgcactgaccagcgtcagcgtgtgggacagtgcggggtggaaggaggtgggctcgggctcacgtccaggctggactctcgagggccccctccccaggtcaaaccacagcgccctcacacacaaaccctccttttatttcacgggggcaggtgcctggataggctgcggggaaaggggcgactgcctcgggctgtgggcaggcctagtggcctccgtagttctgcatgagctccgagactgcctgaacgatcatcagggagccggtggacacgaggacgatgaggacgacagtcagaaggatgcccaggaccagggagcagatgttcaggcatttggcggtggaggcgtagctctgggccccagtgatgtcgccgaccatcttccggtccctagactggaggaggagaggtggtgagggtccaggtgaccgccgggcctgtggctcaggccctcccccgctggtccccactgccccgttcttcccagcggggacccacgcccgcctgtcccctggagtctgagcgcgacagtggccggtgagcgctcctcccctcctggggtctccatctgctttcccgcagacagtcagcctctccaggaggcccagggctctcccatcctttctctggccgcctcactggcccctcacccaccaggggacaaaaggctgaccctggtcatccccatgcaccccctgcagcctcatcatgacctgcacgtgtacacacacacacacacacacacacagacacacacacacaccatgcagcagaacaacacacacgggggctcccaaccccacgtgccgtctgggcagggcctctccaggctcacacacacttccgtggagacgccccgggtgcccacccaccttcacagagtaggcgaatgccacgaagcccaggcagcaccagttcatgaagatggtgttgaacagggaccacacgatgtggtcgggcacggcggtgtcgctgcggatgttgatcaccgtggtcgtcaggggcgcctggctctggggcgcccccagcacggccacctcgtgctcctccttaagcacctcataggctgggggcaccgccccgtgggccccagtgaacaagggctgggatgtgcggttcatggtggggacagaggaactgcggtctagatgccagaacacactccgggtcccctttttttactcaggagtttcgatttctctgaatttccgtttcctggcttttggagtattggggatgggctggtcctaggaggcgtgaggaaccagtgagtgtcaggttacaccgggtgggtgggaaggaaggctagggcctagagggatttcctgtcccagaggctggaaggggccgatttccctctcccctcccccttcttttgtaataaagagctttaatagaagaaatacaaataacagtttaagaacttgtaacctcctgtgtatgggagaggcccaggaattgtgagtaaacagttttctgtaaatgagaaaatgtggagaagtttctcccggagatgctgaatccacccgttaaatgccactgtgagttagagacaaaaggcactggggtggacgagaggactcttttgggagatgaccccgaaatgcataaaaataaagctgattcctgcagaggccaatccttgcctcctccatccctgagagttttctaggaatgtggccccacccccacccccgcccacccccatcctggtacaagagaaaacaccctttcagggcagtttctcttgttgactgaaattaaaaaaaagtacaacttaatagatgagaatcgtctttcattcgccataaacctgagcacctaagtccaagacccagcacgctcgttcactggggagggaggcccggctggaggccccgcgtcttccatagttgcgtttatagctctcaaatcttgtaacaatctccattttcctgattttttcttaataacaaaaatgggagtattccaggggctattagaaggctctatatggccggctgccagttgttccataactaaatcctcagctgcctgtaacttttcagctgttaaaggccattgttccaccaataccagatcatccgatttccaggtaataggggtggcagcgagagcaacagcctctaggataaatttgaatatcccagaccttctctgttcttgttgggaaccacctctaatggcgaaacaattccctgctgatctttaccaagccccttatcaggattgtaaccttttcaactgggctatataaaagcattcccatctgagataatatgtctctcccccataaagaaaaaggtagtgaaggaaccacatatgggcaaaaagtgccttgcgcccccttctcatctgaccgtgtcaaaatctgtgagctgttagcaaccgagggcactgaccctactcctacccggccggtactggtcaagcgggctggccaggatgagggccaatcttttccagcaatgcaagagacgtctgctccagtatctaacagccctgacattttatttccttgaatgaaaagatcttttaaaggcctagaagctgtaatttcctgcagccaaaaagctagatcactagatccaaatcctctggggcccctagcttgagaagttaaggtttttcctgtctgataataaggtaaaagcaaaagctgtgctaatctttgacctttatttgcacagttttggtaggcagcgagatcaaaactttaatttccccagtataatcagaatctactacaccaggcaccaccaaaattccttgaagggaaagcgagctgcgccccagcacaggtcctacaatgccctcaggtaggggccagccactccctttggaatcagagtaaccctggaactgaggtccagtcctgcgctgcctggggtgatggcaggcttgttgtccctgcgggcagga

SEQ ID NO: 25114 - DNA, 1068 bp, Bovine  19866880892361
  misc_feature (1)..(1): n is a, c, g, or t
ngatgagacgttttttgcctcttaacttatctattttccaagttttcatggtctgtttgtaatagtgtttttggttctttgcactactttaaattaagtttctcctgtgggtcttattatacctgaatgctgctcagttatttgatgacatagctgtaaatcctcaataaaaagatctttaataatcagttggcatttatttaatataccacccatcttattaaatctaaggagttagtttattgtatctttgcattggaatagtgatggtctagttatgcttgagaaagcactttcattataaactcctgtttttaggcacttataattttctcaagtagcacatttatttcaatgtgcaatcattttctgttctcgtctccctccctctctccatttgtaccatttctttcatttttttaaaagtctaataaggaagtatatcgcaaactttagggagaaaagctgtgtcattggctgagaatagctgagcaaatctgtcaggctcttgaaatccagattcttgtttggtaccttcagtcaatttcatgcaaatgttggtgaaggaggctgctggtcccaggattatgctcctataatgtgggcaatgttctcctaagtgcttcaagtgcatttgttccttttcaggggtttatacattcttcagctttttctagtggcaggaaaccgggaattgagcaggcaagaagcagagcagaatggactaagatggagacagaccttccaactcctcacctgctgctttctgtctccaacccactcgtatataaaccacagtgggctgcgctccactgtctggctctttgctcactctttgcctggtggtggtggtttagtcattcttgcgatcccatggactatagccctccaggcttctctgtccttgggctttccaggcaagaatactggagtgggttgccatttccttctccaggggatcttcccaacccaggaatcgaacccaggtctcctgcattgcaggcacattctttaccgactgagctacaagtaaagccatatcacttcgtctttgagatcccggcacaa

SEQ ID NO: 25115 - DNA, 1008 bp, Bovine  19866880904900
  misc_feature (1)..(1): n is a, c, g, or t
ngtgaagagttgactcttggaaaagactctgacactgggaggggttgggggcaggaggagaaggggacgacagaggatgagatggctggatggcatcactgactcgatggacgtgagtctcagtgaactccgggagttggtgttggacagggaggcctgatgtgctgcgattcatggggttgcaaagagttggacacgactgagagattgatctgatctgatcaagtggggaaggagataaagtcacaggaataaaatctaacacaccaagaggtaattaaccaggactgaggatgaacaatgcaccttcagatgtccaccaatgacacagtcaagaaggctttcctaccatctctcgggtgagttaggaaatgggggctgagcaggaagagaaggatggaaggtgggtaaacctctgggaggcaaaagcaaccaaatgctattccagaggccccgaccctaaggcagaggaccatcataaagccgctaaagagtgttgggatgggccctagggacacttccctgcctgtgtcccctccctgccagcacccgccacagaagggatcatgaaatattaattctatctgatctggggccacccaggcaggatcatgttacatgatactttaatgaccacaattcaggcaacacagtctggctgtgaaggaagaattcctgtcccagcccaaaggtgctcatgtaacaggagggaacaggaagtaggactcagaaatctagcatgagacccctgaatgctccagggttccctgagagcctgctgtgcctttgcaggatagacaggcatctactgcctctcagccattcctcatcaccactaacgtgagctgttcttctgtgtatggtgtcactccagaactaataaaatggggaaagtctaattgtattagcaatttcccatcatattctattaatatgtatcatattggtatccattttcactaatgtgacatgaaaggcagtaatgtgattacttttttagtgaaaaca

SEQ ID NO: 25116 - DNA, 736 bp, Bovine  19866880930635
  misc_feature (1)..(1): n is a, c, g, or t
ngagcacactgcccatgtcccgtgagctgtctctgaggccttgcccagcctgcagtgtccaggagagccctgctgtttatcactgtgggcattatctccactcaccacctctgtgcccagggctgtggtgtccccttgaagaaccccacacccatctcccagaggcccttcttgcttagagtctgacccaatccagctccccccaccccgacaccttccagggactttgaactcaccccagccttgcttgaagcaatgtccttccccagaggaccagatctgcctctctaggggctgccctggggatccctgccatctcagcagtgcttgaaccttgtgggttcttgtggtggcccttggctgatgtggtttcatttagaaccaagcacagcaccctttggagcatttctctactagagcgttatcttctcactggcaaagagagaaatgggacaaaagaggttgcagagccctctgggggaaatgtgtgctgaagataaggtggtaacacagagaaagggggagtatgagactggtctagaagaccttccaagaaaggacaggttgttaaattgctctgtcagctgtatagtgctcttcagtggcagctattgttattattaccatcatggccattatcatcaccatgagaggatatggtcatgaggtaggtgctaactgtaagtgctgattgaattttcaactgatttcctgattttagaggccacagatgtgt

SEQ ID NO: 25117 - DNA, 994 bp, Bovine  19866880998972
  misc_feature (1)..(1): n is a, c, g, or t
ntggtaagtaaagaagaggatagtgtcttgtagttttaaagtaactgcaaaacacatcgaacataactataggagctcagagacgtggccataaggttaacattatcttcataaaacagcctcaactcattatttgatgacttttttatggatatccaagtaactttcaatggaatcagttggaaaaaatgagattggatataaagcgaattttgctaaacagcaacaattttgtaaaggaaaagatactgatatcatcaattactcatgaagtacagaggcaggacaaggacagtataaaattatacaaaggctattatgcaaaagcacaatttcaccacacacagaaaccgccaaccccacaaaattcagtaataaaaatagttaaggccatttagactcataaacagttgactccttttttaaagagagatttattattattattatttattttgactgcagtgggtcttcattgcagcacatgggcagcatgtaggatcttagttccctgaccagggatcaaacctgagtcccatgcactggaaggcagattcttaaccactggagcaccagggaagtccttgactccatttttttaaaggggcttcatcaacctttactaacacacacagtctacacagacaaaccattttaaatgaaaacaccttttcagagaacggcatctttggttacttacctctggctaatttgaaatacagtcaaaatgtggagaacaatttttggaaataaacggagagacccagatatgcttccaccctgactccatgcccagtctgtcttgtgaattagtttgaatgttggcaatcaagcgagtagaaaggagtaaagggaagggaactctgacttctgtgaataagaagtcatgattaaatgccagtagattataaagagctgaatgctacagccctgtggattcaacagaaaccaaaccagagactaagccttttcacgttaaagagagcttcatttt

SEQ ID NO: 25118 - DNA, 1014 bp, Bovine  19866881003709
  misc_feature (1)..(1): n is a, c, g, or t
nattgcctaccgatttatatcgctagcgggttcccaataaatgccactgacagactgtcgagctgaggcagctacacccggggtaacaatttgctgagaggtccggcaggcgccatcatgtcacacggagcctcagcagctcacctggggtgtgatccagcttccagggctcctggtcccacatctcccaagactccaccaggataaaccaagtcataaccattcagtgccctagacactggcgtgaggagactgggctggacaatgaggcttaggtttttctgcttctcatagctgctgttacaaatagtcccaactctaacttcccaggctcttaatgagagtcttatatttgcaagagtaggggtaagaggtggaacccccagaagagtctccctggggttcttcattccctggattattctacattctatgaatgtaaaataattaaatgaattgtgaaatgaatgtttaagaaaataaggtttaaaaagtaactatattaaatgatatcttgaaacagccatattatgaaaaacactacctcacaatgtcattataaactagaatttgaacactcaacattattaaatttaagtagtatattttgataataaaggggtttgtttcttaatatctttcactttttaaaaaactttttatttgtatggcatttatttttggaaatgtctttttttctgtattaaagttttaaagcttgcctaaaaaaaaaaaaaaaagaaagaaagaagcttcctattgatgattggcagtggccaatattgtcccctgagagtaaggcatcagcttgtggccccgttacaagggagatacctggtggccagattcccagagtccctgacgttgttctcagactcagggcttgtgcctgcctggagttatgtctcgaccatgcctagagagccagcttgcaccccaaggcccacagcacccccaactgaatagcatttattatttttgcccagatcccattatatacaaatttccccacca

SEQ ID NO: 25119 - DNA, 1259 bp, Bovine  19866881106093
  misc_feature (1)..(1): n is a, c, g, or t
ncgctaatccaaaataatacacagcagtcctcttacacttatgctctctccctccggtgaagggtacccagcgcatcatggaagtgacacggaaattacaccttttaaaaattataaaatacctacttaattacaattaaaaacaaagaaataactttttctttaaaatagtccccgaggtcttttgagctggagtctggctttttgaaaaagagaagccagtcacttaatcacagagttgagtgtggaggcagctcacgttggctggtgtttggcgacccccctcccccagccctgctctgatctatctcaggggccccatggctccctttcccaccagcccttgctgcagcctgctttgaagtgtcccctttacgctcttgcctcttgctacactcggggtctgctagatgtatccccgttgaatttcgctgtcacagaacggggacgggtctttgaggtcatctgtctaattcgctcatcttcctattgaggaaactcaggccaagagatgcgaatgtgcctgagatctgacaattggcctgaggcccccacgtttgtttgtttgttttttaaattatgtgagaattatatggttgtctgaataactgtggctcatacttccattgtgtttattgctaccttgttccagccactgttgtaagagctctgcacaattaagtcagttgatccttgtaatgatcctgagaggtcaatatcattatctccccattttatagataaagaaaccgaggcactgcagtgttgagtagctcacctgaggtcacatccctaagtggcagaactagatttaactccgggaagactggctctaggtccacgctcttaaccactccattaacctactcttttgtagactaattagaaaatacagagagaaataaagtagaaaatgagaataaatgtcacgtgtaataatgcttttcagaaaaatataaccattattagaattttggccatatcctaacataatttgtcctccttcttacatgttaaaaaatagaattaaacatatccacgtgctttcctatgattcacttgattttgcttttttttcttaacagtgtacctgtgaacagctttccagtgcctataaacacacgtgtgcagcattatcttcagtggctgcaatgcatcccactgaatggatgtgccacagctgagttaacctatgcactgtggttgacatttaggttgcttctttctctctcatagcgtgccgcagacatctttatttt

SEQ ID NO: 25120 - DNA, 820 bp, Bovine  19866881200705
  misc_feature (1)..(1): n is a, c, g, or t
ntgaaaattgtttatagcaccaagacttcttagattttcaatcttgcaaaattgatgatgtaaaaaaattaaagccgtgttttttcttctcaagattgaaagttcaccaagagatttgacatatttaatttacatgatgactttgcactccttcattaatgcaatttgcatatgaagctgttgttaatcacttttgatcatgttttgtgtattagctgcctcagtggctctcctcctcagatgccccagtagaaaggagcaaaatgatgcatcttcttgccaagtttcctttagtgaattgaggaattagaagtttaaccttgagtaattacgtatgtttttatccattttcttttaacgttaagtacagtttgtggaagtgttggcctggaagttgttctcatttggggagaagaataaaatttaagtgtatgatggaggcatatccagatatgcacagaaatatgtatggcttgtccctcttcccccctgaaggttgttgggcagtttcactgttcacagtttgatggcggagagactttttcagtgtattaagacatcaggtgcctttagaagagagacgcctactaacgacagacctttgggtctgtaacaatgctttgggtctctgctttgaaaaggtgacttgcccctccatgtcttgggtctgagtttgactaacttatcttttagctcaagtaagttttgctggggccttctgctctcagctgttctgcctgtgtcctcccctagtcactaaagtaaatcgtggtctctgggctaccagatgcctctctcaaggtacataagtgctctggtt

SEQ ID NO: 25121 - DNA, 3525 bp, Bovine  19866881212605
  misc_feature (1)..(1): n is a, c, g, or t
ntttggtaagttttttggcacagaaaatttctttctgttaaatgtggaaatctagcttctgaggccttataaaggtatttttgaaatgtgaaagataaatgtcagaatttcacttaatgggcctctaaatattcaaaatcatttcatattctctttcaggagaaaatggagggatggaggaaacattaaggatgattgagaaatctacataaatttctaagccatattatgatataactcacactaatggtctataaaattttcagaaaaaaatgtagtagtatatttaattacgtattatatgactgctgtacatattaaaccaagaagcactgatttaagaacattaaaagaaaaaaaaagacttctaattaaccctggataacaatctaaaccagaaattggcaactttttttccataaaaagccagatagtaaatattttaggtttcgtgcaccatgcggcctctattggaacttcttaactctgcagctctaatagtacaagaaaagagccataaacaatatgcaatcaaatgagctgtgttctagtaaaactttacaaataaatataggtaattgagcaggtctaaaccatttctttcatgacatactgtaattagtacaattaccaccataggaatgaaatgtaatttctcaaacaataaatcccaaaacataattcacagttgctaacaggactttcagaagctgagatcaattcattcaatattcatagcatgaaaaaaatatgtaggaatggaataaatcaaagactcagttttcattattaagaacagaattcgagtatattgtgcaaaacactggtctctctgatcacaaggaatactctattgggcataaaataccttttttgatgaatcttccttctccagttggtcctaggggactaggtctaggtctttcaggaaaattaactcctgtgataaattttttccattattaaatgtaatttgaaaaacaacagtatatcagttaaaatttgaaaaactgaaaaaaaaaaacaaaaaacccaaaaccaaatttacttaaataccaatcaaaccaaaatattcttaccacaatcctgccacagtttgtggaaaagcagagttgttttttgtttctttgctttatttccatatgtgtctggttagaaagaaataaggaaaatgtgtgaatcatcaatgagtatggttcctctcctttaacacatatatagatgttttattcctacatagaaaatgctttaaataaatgtacataacatggatttctaggggtcacaaagtatgtcccaagtcagtaataaagggcatttttctcttagtaaaaaatagtttataatattcatcttgttttattacaatacctacaggttaacccatggtcaattaatgggccaagggcagattaggaccaagattggagaccactttctgagtggcaagtttgccatctatcaagaaggcacaataaggaccaaaacagaatctcaaatataaaacaaattctaataaacagttgagatatgttgaaattattctagattcctttcctaagaaaaagattcaaagagcacaaagatgagtcaaaaatcaacaaaaactttaaggaaaagaaaattgtgaataaataatatgactgtattctaatatatcctacaagacaatattcttagcaggactaagaaccatataaaacattaacacaaaaggtcatacccttttcatctggcaggtatctaaaatccatagattcactaacttcctgatcggaaggtcgccgcaactgcatctttactgttaccggttctattatagctttgcagtatggtggagtcttgaaaacaatggctacttgacggtgtacatcagcttgtgaaaagacaccttttgcttcccagtcattcaacacaaaccgaacttctatgtcgtctagtgattacaaagacaaataattcgaacacaaagtaaaacgtaccaatcaatttaaaatatattctgaattcaatgaaacaaacaaacaaacaaaacccaaaaaatacctttctgaactttgtcacagagtagaaatatttcatctcctcctttgacacttccacagttcttgtttacacgacaaatccttaattctgcagtattaggagcacctaaatacaaaggatttctttttaatgggttgctaccttagtgagttagacaaggctgtggtccatttgatcagactggttagttttctgtgactgtggttttcagtctgtctgccctctgatggagaaggataacaggcttatggaagctttctgatgggaaagactgactgagggagaaactgggtctgttctgattgatgggcaggaccatgctcagtaaatctccaatccaattttctgttgatgggtggggctgtgttccctttctgttattcacttggggccaaactatggtggaggcaatgaagataatggcgacctccttcaacaggtctgatgaacgcactgctacactcagtgccccaaccctgcagcatgccatcgccgacccacacttcgccagagacttctggacactcaggggcaagtctgggtcaatctcttgtggggtcactgctccctttctcctgggtcctggtgtgcacaaggttctgtttgtgccctcaagattctgtttccccagtcctgtgtaagttctggcggctccatggtggggttttgatggtgagctcctccaagagggtttatgccatacccaggtgcgctgcatccacagccttgtctaactcaatcaaactatgagacacaccgtatagggccacccaagacggacgggtcatgggggagagttctgacaaaacgtggtccactggagaagggaatagcaaaccacttcagtattcttgcctggagaaccccatgaacaatatgaaaaggcgaaaagacaggacactgaaagatgaactctccaggtcggcaggtgcccggtatgctactggagatcagtagagaaataactccagaaagaatgaagagacagagtcacagcaaaaacaacacccagctgtggatgtgactggtgatggaagtaaagtccgatgctgtaaagagcaatacaccataggaacctggaatgttaggtccatgaatcaaggcaaattggaagttgtgaaacaggagatggcaagagtgaacatcaacattttaggaatcagcaaactaaaatggactagaatgggtgagtttaactcagatgaccattatatctaatactatgggcaagaagaaatggaggagccatcacagtcaacaaaagagcgtgaaatgcagtacttggatgcaatctcaaaaatgacagaatgatctgtttgtttccaaggcaattcattcaatatcgcagtaatctaagtctatgccctaaccagtaatgctggagaagctgaagttgcgtggttctatgaagacctacaagaccttctacaactaacatacaaaaaagatgtccttttcattatagaggactagaatgca

SEQ ID NO: 25122 - DNA, 1123 bp, Bovine  19866881251804
  misc_feature (1)..(1): n is a, c, g, or t
natgtaatgtttataaatatttaatcatattaacttcaaaaatgtttttctaggtatggaagtttcttaggcttcctgggagttcttgctattgcttttgataacctttacattgggctgatttttaacccttaaaaaattcattctgccaatcttgtgaaattagtaagggcagttatctttatttcacaggtgagacctattaagattctgtactttctccaaaattactatatacctgtcagtggcagaagtggatcagaactcagaaataaagtcttttatacccataccctatactagacaagagtgagttgtctctcccatgctattactaaagtgggagttattgagacatgctctaccataataacaatgttcaatcagtactaatggaatgtattttatatgtttactggtgggtaaagtgtgttccctagcctcaaagaaggtatgttcttatgagggtcagttatataaacagatgtggaaagtgctatgataaaggtattttcaggacttcctcttccaatcgggagggaataacagggactgggtttactctcccacccaagcaactgtaaaactggacaaaatatatgaaataatggctttcaaatcattagttataaggcaacaaaggacagtatccctgaaatatgggaaacaaatgagatgaatcctatgaccactccagcttatgtctaaaaggaatctccacaggtacagggaagaagaactcagtggatcccataagtttttctgagttttgaatagaaaacttggaaatttatggagtcagagtctggagttcacagggcaaagtagcaggatggagagttcttcatagagaaaaagctccagagatctgtagagggtcccatcatgttgtcaattgagtgttactgattatgcatgtgaggaagctgtacaaggctgcagaaagggtcactgaaaaggattagaggaagcatatctttgaagatcatacaggggcaggaatagtttctgttttcatcatctggagcagagaactagagaaatcacaggacactgaggagaatattggaagagttttgagtcagtagggaaaaaaataggcaaaaattaaatatggtcccac

SEQ ID NO: 25123 - DNA, 1335 bp, Bovine  19866881269337
  misc_feature (1)..(1): n is a, c, g, or t
ncagatgcactaatgaaagatagagggaaaaaatagctatagccccactgtaccttgtatacacttctccatgaatcttggctgaatcatgtgcttctgccttccatatggacttcctccacaaaactgcccctcctgtgaacatgagacaatgcccagattatagtacacatgatgactcactacaacctacctttaagtagtattataccacttcaggtatagtgcaaaacttgacagtggtgtacttctatttctctcctcctgacacttgtgctactgttgttataaattttatttttgtgtaaggtatagatctaacaaagcacttaataattgtcaattatcttttaaagtaatttaaataatatgtttaaaagtatatttttacccatttagttaatacttctagtactcttcatttctttgtgtagcttcagatttatatctactatcattttccttctgtttgaagtcattcttttaatatttttataatgcaaatctactcatagtgaattattttaccttttgaatatctgaaaaaaatattcattttcactaggtaaagaattatatgttgacagttttttaccattcactccattgtgttctagtttgcatcacttccaaaggaaaatctgtttcaattttttatctttgttcctctgtatgtaatgtgtttcccccaccctggctgcttttaagatttcctctttatcattgaatttaagaaatttgatgtgacttggtgtggttttcctcatgtttcttgtgcttggagttctttgagcttcttggttatgtggtttataattttcatcaaacttggatatttttcagccaatattctttttaagtattattttatgtccttctcccttccagagacttaaataacatgaatattcagcctcttataatcttatgtctctctccctttcagagatttaactaacatgaatattcatactgtctcccagttcacaggttcttttttttttttttttccattttggaaggtttctattgctatattttcaagtttaccaatgctctcttttgcaatgtctaacctgttcttaatctaatctggtatgtattttatctcagtttttatgtttagagtttagatttgagcctcgtctatacctctcatgtctcaattaacaagctaaattattcctttaccttcttgaacatatggaatatagtttcaacaattcttttaatgtctttgtctatgaattatattggcagtatcaattctgagtcaattttaatttattcttcttctaaactttggttatatttttctgcttccttgcatgcctg

SEQ ID NO: 25124 - DNA, 1660 bp, Bovine  19866881324195
  misc_feature (1)..(1): n is a, c, g, or t
naatgctaatcgccaatgtgccttccaaccagtaggatcagcaaatatgttgtaaattaataatgcacccttttagtagcaatagcctttcgaagaagtctggaggagggttatttatccactctcctttccatcccacctcccttaagagaaggagctagaacagggtaggtcccttggagttttgtttcagaatgacccctcccccccacccttactttattaaccatgtaacattttcaggttgttttttcctccctgtctcctccagcaagtctctattgatcactgtttacagttataatccctttcaaatttatcatccatgactaacaccccgtgtattgattagtggtgacggatgtccctctgcagtatagaaccaccatgatcccagcctgtgatataggaggggtggaggagacagaaatactcatttccccttcttcattttctttgggtaattttctgctccctgttttgttcatagcctaggtgacttctttcctatctttgtgaagaattgctttgtgtattttagggataattcctgtgcttttatttaagtctttttggagggaaaggaagtagccttgttgcccctgggtggttcctggggggtggggtcaccgacaggtcctgaaggagatcagatatatgagggacatccacgtgtcttaacctaaagcctcaggtaccaaagatataaaggctggttgtttagggataaattacatgtcacttgtgactaagaacaaggtgtctaaaatatagactctaaatggagtcgtttgtcaatagtgccatattggggctcttttttctatactgtccataacatccccttggcctcttgtggacaaaaggtgagtggcagctgggttgggaagctgtgtcctcatccgccctgcctgagcatgtggttgcctgagcacgtggtcaggtttcctgtcttggagagttctgctcgtgcatgtgaggtacccaccccactcgccaaccaggctggcacagaattgtggagcggtccggccacccatgattgagcctgcatgcaagtcctgagctcagctgccttctctgtgcaatggagccaacagtactttccttgcccacctaacaaggagtacatgataccaaccatgagagtgcttcaaaaaatcccaaagggccgtgtgaaccaagagggtgtaatgattactctggcaactttctccttgctccttctgagcctcagtctctctctccctaccacaagaagctttggttacttcgcaaggtatttgcttctactccagggaactttaccaaagggcccaaggactggtcttgagaatagaaggaaggatagaattcaccaggaatttggtggtcttctagctcagttcagttcagtcgctcagttgtgtccgactctttgcgaccccatgaaccgcagcgcgtcaagccttgcgctccatcaccaactccccaagtccatcccaacccatatccatcgagtcagtgatgccatccgaccatttcatcctctgttgtccccttctcctcctgccctcaatctttcttctagctcagctctttcatttgacttgtgaggaaactggtgaagcctaaattttggagtaccttattcaatgtgtgaaacgtaagcctagaaaga

SEQ ID NO: 25125 - DNA, 781 bp, Bovine  19866881325142
  misc_feature (1)..(1): n is a, c, g, or t
naactgcccagctatgcactaaattcagatggaaactaaagacaggcaggaaagtaacacatagaatcaaacataaaacgtttttgtcaaccagaaaacaacattcattactgtgatttccaaaagtcgcccattcagcctgtatgatgactgagaacagtgtcagcccggccagaaaggcattagtaaccaactgagtcattccagcccattaccccaatccaccaggtgatgctggtcggggaggagtcatcagagcacaaaagagaggcaggagcactaagaaaccaccttggatacttctccattaataagcactttcacaggctcaaaaagggttttaggagtggggatttagaaagtaagcaacgatgaccactaagaaatgatagcaaagcaaaaagacaggtttttcttctagaaaacttaagacattgtcttcttactaccaggattcccttttattctcattatttatttcctttgctctcttttcaatgtattatctgaaaaaatcaaatttacaaatgacatatattaacttataaagtccaatgtaatgaacacttgtgaattcccatccaatccaaaatttagaacattttaagaataacctgcaccaacttgcatatctcttttctcctttcttcaccctcctatcctcctccagatataatcacagtcccagtttttatcacttttcttctaaagctggttttaccacaaatgtgtgtaagcttaagcttgttgtactcactcttgagaactaaaaaaaaaaaaa

SEQ ID NO: 25126 - DNA, 1009 bp, Bovine  19866881341465
  misc_feature (1)..(1): n is a, c, g, or t
ncatgtgggagagagaaagaggtagggagtggagaatctagaaaaatgacttaaaaaaacatcacatttcattgaaatggagaaaagatattgtctctgctgccatcacctccctgtcatcttcatcttgcctgggtttccctgccaggccttgcagcttggggtgattgggatcaggctgaccacgctgccctaccaggggaggtagaacttgctttgagcctggaaagcaggttatatgcttgtggtgggtgggtgaggtggatatgtgaagaccacaaagcaagggtgccaagggccgagtttagctcttaggagatgtagagggggcctgggggtctgaatggttttgcttttcctgggatccctgcctcatttttgttctcagggtgtacgtgtttctctcttgttctccggcacatcccataggcaggggctgggcttgggcctggggctcgggctgggcagggacatgccagtcatttggctgggaagccctggtcccgctgagcactccagggctttgcaccctcttccctgccctccacagggtggtgccaggatcgaggacagtcgggggatgaggcgtgggctgctgcaggcagcctcctgcatatgaggcggggaggcagatgaggtcatccacacagccttccacgcaccttccagagctagccttatttacccttttagtggagcaaaaccatgtgatctaaagaggattccttgaactgaaggactttgcactgttccctttctcagggcagaaagatggggctgtaggtaggggatgagaatagaggaaagtgtaggagattactgaaaaaaaaaaaaaaaatgagatgatgaaggagaggaaaggcagccggactaggtaattgggaccaattcatcagaaggcttaaggaaatttgacatctattgtaactcttctaactgtataattacgcagcgttggaaagtgaattattaactgatgtctataagaccatgagtaaatatacagtca

SEQ ID NO: 25127 - DNA, 716 bp, Bovine  19866881381410
  misc_feature (1)..(1): n is a, c, g, or t
nttcttgcaaagggcaaggcctggaattgaacataaacaaacacagcccacgagtttaaaatagaccattgagcggctcacagaataggccccttgtttttaaaagagcagtggacgctctcaagaaataataagaaataataagtctggaagctgggtagaaacctctgatgctttctggctgcatttgtccttcgaactttatttgtgtttggcacgcctatgatggagctgctgccagcctcggccagggtctgcaggcaacggaaagtttatctgggctgctggagggaagtggaaatctctttgaaaaaagggttgttctctggtggttgtgctcatttctaagacacagactccctttcgcagaggcagtttggtgttcatccaaagaggagcatgagatttgaggatggacgtacgtgtgacctagggacatgttcttaacatcacgtagcccaggttttctcatctgtaatattagggcattaatacctacctcacagcgttgacttggaattaaatgatgtgattgtagattctgtgagttgacagcttgctctgatgggttcacatctctccacccagagcctcacactgtgtctgaggggtggtgggcagtgctaaccctcttctacagagaagcagccgaggatagcttgggttcctttgtcagcaatatgaagacataaatagtgttctattccctttcttcc

SEQ ID NO: 25128 - DNA, 1036 bp, Bovine  19866881389666
  misc_feature (1)..(1): n is a, c, g, or t
ngccctcaaatactgtttcccatcttttcctctgttttcccctcttgggactccttttaaacatatggtgggggcttttgagctgttattcagatttcttaacttttttttcatgtttcccatttgactgggtctttattccacatttgggggcatttcctcagctcagatttccagtgtcataattcttttttttttcttcttcttctttttttttttttttttttgctgtgtgcaatatgctatttggtctattgtgtagggtttaaaatacactggcaaatcctttgacagctttttctccaagaggtggagtctaactcctctctgcttgagttagggctagttttaatgactctcatctagtgaatagaatatggtgtaactgacaatgtataacttctaagacttggtcataaaaagcattgttgcttccttcctctgtgttctcgcttacttgctctaggggaaaccagctgccacatcatgaggacaatcaaagcgaactacaagaggcccacatggggaggaactgaggtcatctgctaacaggcccaagaaggatccatcttatctccagcctcaggcctttacatgatggcagatcttgctgacatcttcactataacctcatgagagaccttaaaccaaaaccagctagctaacccattcctgaattcctgacacaaagcaactgtgagataacaaatgtttgttttaagctactaagttttgcttaaactttgcatgatttttaactaatccacccatagactcaattgtttagctctagcaactatttcttcattcttaaagtttctaatttttccaaaaccacctgttcttgtttcattgccttctgtttttatttcatcgtttctatgttctcccttatcttcaaaaacatttaaattattcatttttaaacttttttattgttatatagcctcctttctttgaatattgatacctccaattgctcagtttgttatcattcatggtggttggacttcctgggcactatgtaatttttatt

SEQ ID NO: 25129 - DNA, 1739 bp, Bovine  19866881425084
  misc_feature (1)..(1): n is a, c, g, or t
ntagcaagaaatatttccaaatcgtttgagatacagccagcatatctgtcctaacactgaattccccagctttaatacttgcagaaaacaattggttctcttttcactgagcttatattcactccttgtaatttgaatcatcctcttaattcctggaccctaccctttcttctcaaacaagagagtctgctttggttttgaccaagcccatatcttcccgaatttctcagctaaatctcttctaatacttctctttttccaacataaatagtctttgttcactcattgtcccaccctgcctcacctctgactccaattagagcaatatttgtttttcctttttaagaatctttctagcttctactactcagatatgaggcaacccagctcgtgttaaaagcccttcattatggtcacagaaaatctgctctgacaagatccacctcgacaagactgtgttcctggatttccttcctcattttatctgtcatctcactttctaggtcacatcatttcctggcatctaacgtgttgtccgtttatatatatattttaaagaaatggaggcgtggcatgtggaatgagcaccttgtggggttgggatatagaaaaggctcttctaatgtaggggcacctgcaattttctggagaaggaagaggaacaaacacacacaaccgtttctccaaagagcctgtcaattttgatggggattttagttctttgagacagccaatggctgtccaaagcccaaatgtggactccaatcaagccttcaaggaagtgagtaagaatgttttttggattattccagaaacatagaccacaccagcatggaggcgttgaggttggggggcttgggaatatgaggactccgggataggatgaccttgcaagaccaccctcttaggaaatagccagtcaatgcagtaggtcaacttgcatcaggctggtccaatacctttatgctgatatcctggtcctctgaccagtctgtgacctgctttatgataatacagacgtacctcagagatattgtggcattggttccagaccactgcaataaagcaaatatcataataaagcaagtcccatgaattttttggtttcccagtgcagacaaaatttatgtttatactacactgtagtctataagttttcagtagcattgcatcttaaaaaaatacatatactttaatttttaaaatactttgttgctgaaaagactgtcatctgacaatgagagttgccacacacaaaaaattcaatatctgctgctgctgctgctaagtcgcttcagtcgtgtccgactctgtgcgatcccatagacagcagcccaccagtctccccagtccctgggattctccaggcaagaaactggagtgggttgccatttccttctccaatgcatgaaagtgaaaagaagacggacccaatgaatattaagtgcccttttttatctccttgacttgcaaaggtaaccagcttaaacatactgttgagatttacattcagagtgacactctgatgagaatttattgtattttaaaatgcaaaagtattatagtactgttccacaaaacaaaagagtgggtgaatagcagggccgccctctgacttatgaaagctaattctatccacaatcccttccagaagaaaaacatagtattagagatatacccggagaaggcaatggcaccccactccagtactcttgcatggaaaatcccgtggatggagg

SEQ ID NO: 25130 - DNA, 1185 bp, Bovine  19866881526263
  misc_feature (1)..(1): n is a, c, g, or t
nattagccaatatataatttgcctgtttttattatccaaaaacttgtaactgtcaatgagagtgctgacatctacctattaccacactgaattgattttattccatagtaaggccaagaaagttgacagttcagttggcctctgcagccttattgaaggtaattttgattttttttttaactaggctttttgaattttgaaaaaatagctcaaaaaccaaaaatactatcatcacatttatcgtctctttggaactcttaggaacctaagaatgccaaagagatgtgccttgtgtcaacagatgtgatagcattagcacgtgtataatatgcttttactctagcaccaacataaaggtactgcctatatgtttaattactttttaaaatactgtttgtttttggtgggggttttttgtttgttttcatctaaagcatgttatcttttattataggctggttgttcttggtaaactcaacaatctagtaaaagaatggatttctgaggtcagtgagagtaaggtaagactctaaattgaattcatagtttcattgtgtcctggtaacaaaatgcagagttgagaatgatcaaaaatagataaacatttttagtatacttagaaatgaattgttctagacagttgaaatgaagagaaagtcacttagtcatgtccagctctttttcaccccatggactgtatagtccatggaattctccaggccagaatactggagtgggtagccattcctttctccaggggatcttccaaaccagggattgaacccaggtctcctgcattgcaggtggactctttaccggctgagccatcagggaagccctctagacagttgagtcctaaataaatgaggatttaccccagaggtagccagtgtctgactacatttccacataaatgtcttccttgactcacatgtagtaaaccaaactttaaatactgaaattttaaaagccagatttcagaattcttgtgaaataccagatatggcagcactgggcctttcttggggcaaggccagaagaggcttgaatggaattgggctactcccctctggtgcctcatggtccccattactccctgctctctcagacatagcaattgtcgattatcagtttctgtgtttcttacgtgtatactttcctcatttgcttacctgcctggcctag

SEQ ID NO: 25131 - DNA, 890 bp, Bovine  19866881689950
  misc_feature (1)..(1): n is a, c, g, or t
ncttgattgaaggcacagtacatttgccacaaattattttttgttggatagcaactatgactccatctatgcctcattttgtacctaaaatgccttctgtatgcccggctctgttctaggtactcagagattataaaacatggtccttaccttttaggacctacccattcactagtaaaaataaaatttggcacacaaaaccattagagaacaatatacaatagcaggtggttgagcacctgtggggtccatcaggtagcattaaagctaaaaggagctcaacacttgggattaggatactagtaatcataatatgtttaattttatcacattgcttcatcaatcaagcaattacacatattctacctaatttcatcctctggctaactgctgctgctaagtcgcttcagtcgtgtccgactctgtgagaccccatagacggcagcccaccaggctcccccgtccctgggattctccaggcaagaacactggagtgggttgccatttccttctccaatgcatgaaagtgaaaagtgaaagtgaagtcactcagtcgtgtccgactcttcgcgaccccatggactacagcctaccaggctcctccgtccatgggattttctaggcaaaagtactgaagtggggtgccattgccttctcctctggctaactagttaaagcaaatgctatcatcctttcatttgttgttgttattgcttggttgctaagtctcactcatttgcgaacccgtggactgtagcccaccagtctcctctatccatagaattttccaggtaagaatactggagcgggttgccatttccttctccagggatcaaatccagggatctcctgcttggtaggcagattctttaccactgagccaccatgga

SEQ ID NO: 25132 - DNA, 735 bp, Bovine  19866881890799
  misc_feature (1)..(1): n is a, c, g, or t
nattaagtgactacgaaaacctactgcctgaaagggtgataatctgaaagttagttctagtcaagtgatgtcgcaatcttaccatttcctaatgttctcacatctacatcttctcttccagaggaagaaaaattaaagcctttggaaagcagataaagaaaaaaaaaaaaatcagcgatgcaatagtcctagacttacattcccaccctgggtagaaacccaatttgtcttaatctacaggagaatcccaaggaatagtcatcatcacaactctagtcctaatgtctactgaaaataacaatgataataataaatactatttattgagtacttattacatgttagacactgagctaaaattctgcatacattatttcatttattccttactgtaaccttatgaggtaattattaaatgaaagaacaccaaggttctgaaaggttaagtactttccccaaggtaatacaattaaagggcagaggtaaaagccagatctttcttatcatcccatgccaccaatcccatgggaaagccaaaggcagagcactgtttggagaaaagccctgctaccaaactggctacaaacttatggtgaaaaatctgtcttctttttcttaaaacaaaagaaaacaaaataaaaacagtatttgagaattaaattccatgaaaggaagggaaaagaaaaagtttgactctaaaagcaaattcattatataagcaaacttaagctaggg

SEQ ID NO: 25133 - DNA, 1372 bp, Bovine  19866881890880
  misc_feature (1)..(1): n is a, c, g, or t
nataatcctgcttggaggatcgtagagatagattccaaatggcattcaaacttgatcagatagcaccccaagattaattaataatgtctgttacggatgaggaggtgtagaaggggcattgctacgatccagtccttttattttccagtcttgtctgcccccggagaaggcaatggcaccccactccagtactcttgcctggaaaatcccatggatggaggagcctggtaggctgcagtccatgggattcctaagagtcggacataattgagagacttcaatttcacttttcactttcatgcattggagaaggaaatggcaacccactccagtgttcttgcctggagaatcccagggacgggggagccttggtgggctgccgtctatggggtcacacagagttggacacaactgaagcgacttagcagcagcagcagcttgtctaccccaaaacacactttagcgacagagaactgaaatccaggcttgctcattcctagtctagtgctttatttaaaacaatttccattgtccatagtcaggcttatcagaaatgctggtttctagaaagcttctagctggtgtatggcagaaaaagccaacatttactttacttgaaagattaaggcaaatctaccctaattgttcctactcattaatgcctcagccactaaggcaggtagagtattttattccattattagctataaaattttaaatactgagatcccttgagaattaatcaagaaaaatcatgtgtttaaaaaaaagcctagtacagtttctgacttgggtttaaatttatactaaagaatgtaagatcttttcttgcaagtaggttttgatgaaaatacagagcataatgcataactggatgcctaaaggatagagttcatcactgagagagggaaaatatacaagagagggcatctagggtatcaaggaaactgtccacttcacaactgtccctagaacagcctggtcagaaactatacccctaacttcctcagctggggccttaggcaagttacttagtgttaatttccccttcggtaaaatatgggtaataaatcctgcctctcagggttgttttgagaatttactgagaaaaaccttatgttccagaaagggctcagcacatttcgtggcatatagttactcaataatgtttatcaatctatgtgtttgatttgcacaaagaaattcccatgaactgatcccatgaacatcaaaactgaggtctgttcaactcagggttctatttaaactatgagatctataggtcatctaagactaaaagccaaagacagaggttattgagaggcaacattcactgtgcaataggcttaagatgtctaagctggtcactgag

SEQ ID NO: 25134 - DNA, 908 bp, Bovine  19866880351424
  misc_feature (1)..(1): n is a, c, g, or t
ngttgcaaagagtcagacacaacctgagtgactaacttttgtcacttttcactttcataacttaatagtagataaaagtttagatcccaggagagttccaaaaaccagataaggtaagcaaaaatgtagagagcatggcaatcagtttaaagaatgagatgaattttagaaacctagaaaccattttaaaaaatatttattaataattcagaagcaatacaagtaaacggtacatatttgtcaaacatgtttggaggattatgagaaactcttgaaggacttaattaagcttgataatggagtaaacacaatagcagatgatgctcaatggagagaagatggaagtaatatacaatgaacggtttagagtcatgcattgaatgagttatgaattagccatgcctctcaggaagagaaattaatacacaggtcaaggacagtaagcaaaaaacctaggtcagtgaattacaacattcacaaaaagtggatggaatttatcaattcaaagagcattgctttaagctatttttaaactggcttgtgggtaaaattgcattataatgagttttctctggtactttagtaactaaaacctcctccttattgttgtttagtcgctaagttgtatttgactcttttgcaagtcgtgtctgactcttttgcaattccatggactgtaggctgccagactcctgtgtccatggaatttcccaggcaagaatagtggagtgggttgccatttccttctccagggtgtcttcctgacctagagattgaacctacatctcctgcttggtaaggtggactctttatcattgtgccacctgggaaaaccccctagttcaaccctaatgtggtggtggtggtgttttagtctctaaatagtatcggatctaatgtaattccag

SEQ ID NO: 25135 - DNA, 1334 bp, Bovine  19866880357426
  misc_feature (1)..(1): n is a, c, g, or t
ntcagtcactcagtcgtgtctgactcttcgagacccatggcctgcagcatgcaagaattccttgtccttcattaccttccagggtttccttaaactcgtgtccactgagtcaatgatgctacccaaccagctcatcttctgtcacctccttctcctcgtgtcctcagtctttctcagcatcagggtcttttcaaatgagtcagctcctcgcatcaggttgccaaagtattggagctagcttcagcttcagcatcagtcctttcaatgactattcagggttaatttcctttagggttgactggtttgatctccttgcagtgcaagggactctcaagagtcttctctagcaccacagttcaaaggcatcaattcttcagtgctcagccttctttatggtccaactctcacatccatacatgacactggaaaccccatagctttgactatatgggcatttgttggcaaagtgatgtctctacttttgcatacactatttaagtttgtcatagcttttcttccaaggagcaagtgtcttttaatttcaatggctgcagtcaccatcggccagtgattttgttgcccaagaaaataaactctgttactgtttctattttttccccacctatttgccatgggtcagatgccatgattttagttttttgaatgggatcaaacctgcatcccctgcattggaaggtagattcttaatcactggaccaccggggaagtccctcgttcatttcttgcttgcactcatcctcactcgttcttttcctcttcccttatctcaactaatctatttactattcccttttctctatttctcagtcttctgtctttcctttccacacaccgccttcttgtttccatgtcttcttttctctcctcctcctgctactgccctttctctcacctagccctctatctctttatcactgatacagccacaaatgtatttttcccaacatcttctcttattccgtttttttctttctcatcactacagaaggatgtttgcccacttccataatacattcaggagcttgttgctcactggcactatctatagaagtactattttctacttattgtatttttagagaaagaaatgtcacagcctttttggtaatgaagctgcttccatttgacatcattaggctcagaaagcattctgcaggctgccttggtgacatttgtaaatattataataatggtagaatcggagaacttccactgtgtttctttgtgtttttctcaaagcagttcagaacccaacctaggtgatttttttgtgttttcagggaaaggaatttgttctttaccctagcggagag

SEQ ID NO: 25136 - DNA, 905 bp, Bovine  19866880379889
  misc_feature (1)..(1): n is a, c, g, or t
ntaatggaaaaggtttgaccattaatactcgaagtttctgtcttaagatgatttttaaagtagtcagcttccaaatctactctagttggctcagatatttttctagcctacgtactgtttacctttggctttctgaaactcttaacaattctcaacttctgccctgtatatgtgtaacgatgtagattggatagtagctccttgaagagaaatgaaccatgttgacaccttgagaatgaggttagttgtagcatgacctcagacttttcaatttatcacccaaagcaggaaatttttctacagctggcatctaactttcaaagtgtgtaaaaataatggcactagaaaaaataatagtgggtatatatagctagtttgaacaaaagcaattgctaaattatagcaattcatataggcttcatatttggttatgcaatttaacatcctataattatatacaagatagatgttgagaaagacagcattattaacagtaactatacttatcaactacatagtataaccataatagcctttttctctcattcttaaatttgacattagtgatttgaattataaacttgatgctttcaaaatgataagagtgaaggtaaaaaaatgatactttatcattacttggtcattaaactatagtttatgtaaatattggtctatataaaaatagacatgaagtcatcactgatttctggaatgatctttgcttttactatttgtgttttaatatcttatttgctttattggctgcacacttctccataattttgcacaaatgaagtcattacatgcttattttctaaaggtagttttttctgttttgcttgcctctcatctttttctccttgcttgatcctgctcttcctttcatgtaaactaatgaatgttaa

SEQ ID NO: 25137 - DNA, 3199 bp, Bovine  19866880401276
  misc_feature (1)..(1): n is a, c, g, or t
ntgtgacctgtctagcatttcagaacccttcctgaataggggagctataacatgatgtgacagttggaccctaaagaaggctgagtgccgaagaattgatgcttttgaactgtggtgttggagaagactcttgagagtcccttggactgcaaggagatccaaccagtccatcctaaaggaaatcagtcctggatattcattggaaagactgatgttgaagctgaagctccaatactttggccacctgatgtaaagaactgactcatttgaaaagatcctgatgctgggaaagattgaaggtgggaggagaaggggatgccagaggatgagatggttggatggcatcaccgacttaatgaacatgagtttgagcaagctctgagagatggcggaggacagcgaagcctggtgtgctcccgtccatggggtcataaagagcaggacacgactgagaagctgaacaacaaccacaatgtgacttacatatgcagtgtatcatctattgagtatagaaagtgaaagtgaaagtgaagtcacccagtcgtgtctgattctttgcaacccaatggtctgtaacctcccaggctcctcagtccgtgggattttccagacaagaatactggagtgggttgccatttccttctccaggggatcttcccaacccaggggtcgaacctggctcttccgcattgcaggcaagttgttgtttttgtttttgttttttaacttatattttctgcaaatctgaccaaggagagaaaaataagctgtcataatacagtagatagtctaacatggcccctaattatcctcaccccctgttttcctgttcttaagtgatcaattcccttaactgagtgtaggcaggaaccatttcttgtgaaggtgattacttacacacagttgtaatgtttgtcttgttgggagcctctctccctcgtggctttgatgaagtaagagaccatgttaagggggccgcttggctggaaattgtgggcagcctctggccaacaattgacaaggcactgagatggtctgcagctgacagccagcaagaagctgagaccctcagtctgacaacttgcaaggaactgagtgctgccaataaacatccaagtttgaaaacagactcttccccagttgagtatgctgataataatccagccctgaccagcaccttggttgcattcttgtttgattacattttccctcaagtaatccttccccaaatatgtacctctagtcatcatttgctgtaatgtataactaacaagcctgtttaccctggctttcaagatgagttttctccctctctctcttcttaaggtgttaatccttggttgacttttgtccatactcatgccactgtagtaagtcatcaagggttgtgctccatatccatctatatttcatcagccaccgatggactaatctcagtttaataatagctaacgtataaaatattgcatataatttcatatttcatgaagcaaccatatttggacctccttacagcaaccctagggttattgccccaagatgcagaaatcaagtcaagaaataaacacagtgtgttcaattatggtagctagctaaattttctgtctgatctaaattcgttcccttttctgatttctgaggtcctcttgctgctgttccaggttgtctctgtgaggttgttgatgactgtgactttgctccatcccagcagttaaggtgggcacatgacccaggatggccaggtttctcatgacctctttgattagcttagaggttgacagatgactccaataaaatgagtcaatcatccttgaattaatatttaaattttgggagagagagtttcttttcctgggattgctaaaccaaatggaagtgagtcagtctagggctcacaactgccgtcttgtttacaacataggaagagctcacatacttaataaagtcaagcagagaccagcagaactgaaaaagtgggggaggggacaaaaaaaaaaaagaactgaaaaagtggcatcacaaaccatgtcctaagaacattttgtaatcacaggtacagcaagcctgaaggacctctctgatagcttggaggacagactacagggaggtaaagtggaagtcagaaagtagcacagcagaataaaggtggtagctgtggagacagtatgacatggtcagattctagatgtattactttgaaggcatagctgataggacttactgccagattagtgagaaatgtgtaagaaaaaaagtcaagaatgaatccaaggtttttgacctgtgcaactgaattaatagaattattatttattgaagaaggtggaaactggagaggcaaaggcatgtttaggagggaatattaagagctggatttaaggcacattaagttcaggatgcttattagacatctagaggaaatgttgatgaactgattgacatacctggagttcaggaaaaggtccatcctgaaaaactaaagcatgaaaatcattggcatagagatgggcattcaagccataagtctgaatggggttattcagggagatgagtgtgtctaaagcagagaaaccatctaaagagagcatcctggggcactgcagtatttttgaagtagagaaagaacatccataaataatgtgtaacgcgcaaactgagaagagaagtgtttctaaaaaggagggagtggctgaccttgtccaggcagctgctggaaggattaaaataagaactgaaaactgaccactggatttgacatactcatgagtgaccttgataagagacatttctgtggaattatagaaggaaaaaaaaaacagaaataagtttaataaaaaaataggagttaaggtgaagatgaaatatataattaactttttcaagagaataaggggaaaggagggctttctccagtagctcagtggtaaagaatccgcctgcaatacagaagacaagggttcaatccctgagtcaggaaaatcccccggaggaggaaaatcccatggacagaggagcctggcaggctacagtctatagagattcagcaacaaccacaaaggggaaaggaagcagagaactattaataggtggtggttggaggggaatttccagttatgtcagaaaagggatcttatgagtgaagatctcctaatgagtgaaggaaagggtcaaatttgtcatgggcagtgtcctctgcctg

SEQ ID NO: 25138 - DNA, 1216 bp, Bovine  19866880412319
  misc_feature (1)..(1): n is a, c, g, or t
nctttttttgtattgtagtaactctgtcattgttcctggtgatacagttcaaagcaccctgaaatgtatgcttggaattcttagtggatgctggatcctaaaatttgaatgtaagtattggatttgggagaattacaaagggaattaaatagactaatttcatttttttattgcagtattgccagtaattatttaaggaccttatgctaatgttttttacctctgtttagtccctacattttgaaaaagcttttcatattaatggtatcacttaggtgttcttggtaaatatatacaagtatgttctcatttcaaagtcttcctgtcataccaactattttaatccagagtaaatggatcctgtaatagacctgtaagcttaagcaatctgtgttaccattattgttgttgttgttttgttgctcagtcatatcagactctttgtggccatggactgtagccagacaggctcctctgtcaatgggattttccaggcaagagtactggagtggattgccatttccttctccagggcatcgtcctgatccaggaatcaaacccacgtctcctgcttggcagatgaattctctaccactgagtcatctgggaagcccatattaccattgtatgatacatttaactcaataaatgcttgttttaaatatatgactattaaattagtttattgcttttccttgtgatgtctaaaaacttatctgcataactctctttagctctctcagctaatatcatttgttttaggaaggtctttgaaaattgagactgccttgtaccacctgctgctgctgctaagtcgcttcagtcgtgtctgactctgtgcgaccccatacacggcagcccaccaggctcctccatccctgggatcctccaggcaattgtaccacctgattgggggcaattacactagctattctctaaacctctgatgaaaatgtgttcctgttactcctttctagatggtagtcaaccaccttctcctttgatgctgcctttcaccttcccagctctcacctgtttgttttacctaggacttaacaaaataaaaagaaagcttgtacaaggttattttctactcctcaattactaaagtgtcttctgcttttgatatgacagctaaaataggacaaatgaaatgacctttttgctaactgattgtttataaaaagaataatggtctgttaaagagggacctggt

SEQ ID NO: 25139 - DNA, 1632 bp, Bovine  19866880415051
  misc_feature (1)..(1): n is a, c, g, or t
ntgtgcctttttacatccctttgatgtgaattccaaaaagacttaatggagagacagtggacagccgacccataattaaaacaataatggctatgaaattcaacctctaaagtaattttagtgtgaacttccttctgtgaaaaccatcaaaaatcacaaataacacagtttgattttgatcagctgggagtgttctaatcagctcaaattccattacctctgagcaaagtccaaagctgcccttcactgtgaaatcactgaaggcctctttagcagacctgttcacttgaggatgtaacctttaaatgaatgccacttttgtagatgccacttaagaggatccttctaaaagccacagtgagatgccacactggccttcttgttggattttcccaaggctgatttccttagaggaaaggagagagtgctgtctggcaccaaaaccaaagagattcctggggttttaaccccaaactctatgtctgaccgcattcaacctgtaaatttcctctgtgcaaaatttcacaactcagaatagtgtctttacttatgtgtgcctcgcagagtataaagtccctctgtgacaggattacaccttaggatatgtgaaggaaagggattcttaaacaactttgagcatcatgactgattggccagtcccatccccaaagaaggatattaacaatattatgttttaaatccaatgtacgtgttataggcataactcctatcctggattattttgttctgatttcagtatctggatgttacttgattcaaagaaggaatcttattatcatcttactttactcttgatttattaacacatctgacctgctttttgcaaggtgaaacaaaatttagccttccttagagaaagcaggacataagaatgctgagatataaaggcaatagtcactgttgttatgctgtttgtgatggaaactcagatgctttaggggaggtgagaaaaattctcagacactgaaagcctttacagcatccctgcactagttagattatgagaacgcagcagaaatttcttgctaaccaacccctgctgagatgactggctggctaaccaaacagaatcaaggaatgtcttccatttgccctgtatgcagccattcaagaaaaaaaaaaacttacagaagactccaataatgtctaacttaaaggaaatttttctacttagaatgtgaaacatattcatttttcaaaatactgtacattatttaaacaattttctctgaaaatacagaatcctaactcagctcagaaagatgcttaagacagaattctcagctgtggtttcaggttccatctttattccctgaacttgttttataacctggtagaagaccacctactgtgtgaaatatacaagatatggggaagagacccacaaaccctattcctaaaacaaaatccaattttttcattaataagtagtagttattaattaaatatatctttatttggaatttaccatgcactatagctctacttgacattcaaatatagatttgaatcaaacaaatgcaatcacagctatcatggagcacagggtttaatgcgagatgacatacaataatgattaacacttgatgcagtatctgtgataatgggaaa

SEQ ID NO: 25140 - DNA, 1281 bp, Bovine  19866880529040
  misc_feature (1)..(1): n is a, c, g, or t
nttattatcttccaggttcctatgggtcagaaatttggttactacttaactgtgcagttttagctttgagtctgtcatgagactgcagttaaaatttggctagggttgccttcacatgacaccttgactagggctggaatgtctgttttccaggtagattgcttacctgactaatgggttggtaccaactgttgatgaggagcctcagcttctgtctgtaagttgtttcagtgtcctcttgacatggcagccactccgccagaccaagcaatgcaagagacagtcaggtgaaagctgtcctttttgtcacctatcctgggaagcctcagagcatattatctaccatgttctattcattagaaacaagtcactaagtctgacacatattcaggggcaaaggaattaggttctgccttttgaaggaaagagtgtcaaatattctgtgaacacatttaaaaaccatcacatggaatagcaagagccagtggtacaataataacattcactagacattcttgaaatatccagccccatcatggcagagagcttgtctgcttgaagcgatactgcattccttgcacctggcacagatgttcacacatggaagcttcattaaatattttttggactgttgatgttttgtagatgaagatattcattttcagatatttcagtgacagatctcactaagtaagtgttgaagccaagatgtaatttgatcttactacccagtttctctttctgctcaccttgctatctgtcaaacagaatcactcatctctattaaaatactcactttgctcttggcaaagctaacagaatcactctgtggaatattgcagggcatttagtagttacccaacaaatatttgttgaacgaatgaacaaatttggtgcaacaatacatgaagacttgagatatgaagaaatccattcagatttatttacaagtcaaagaaagactggggagtacaggccaaaatgcttgtttcttgtgcaggttattatttcatcatatttgttgaaaggacatcttgtataaaggatagaagttattatagatataaaaattataggagatatggaactccaggattctgtgtagaatgaactttgtatcattgtgccaatattttggatacagtcttttaagagtgaaagtagattagaggggagaaataagtgtggttcaactggaatttctctcctatgaatagtattatgctttgatatttaacccacagacaaagggaaacaaataaatctcagaacaacacggca

SEQ ID NO: 25141 - DNA, 1418 bp, Bovine  19866880575345
  misc_feature (1)..(1): n is a, c, g, or t
ncttcatgaatgtaagaatgggtttattataggattagcagataaaatagttctattgcaatacaatccaaaattcacacagtgctgtttcataaatcctaaaaagaagtaagatattttggatttggggataatgatgaagaacatgctccagaagagatcatggtttacatcccaagtcatgtctttcattgtcatattattaacataatcagtagcataacatgaaattcttagtctctataaatcacaattcagtgagagaaaactgaaggaaaccaatggcaccccactccagtactcttgcctggagaatcccatggacggaggagcctggtgggctgcagtccatggggtcgctgagtcggacacgactgagcgacttcactttcacttctcactttcatgcattggagaaggaaatggcaacccactccagtgttcttgcctggaaaatcccagggacgggggagcctgctgggctgccatctatggggttgcacagagtcggacacaactgacgcgacttagcagcagcagcagcaagtatactagaatgaaaatttgctttttgggagctgaaaaaagacatatatctttgtccatgtccatgtctatatctatacctatatctatatctgtatttatgtctatatatcttcattggacttaattactatgccaacagttttcctgcgttagtagttatttttattattagcatttaaacttcttctgttaatgcctaagtcttacaggtaacttcttgggcaaaaattactgtcagaattgtaaactgtattcagattttattcagattttggttttcagataaacttataagacaagttctatgcaattttttgagaagacaaaatagtgccgtaccagctgtcttaatgattcataaaatatttttccatctaattcaccagatataggtcaggctttctgagtttgctcaggtattatgaaaatcatagtcattaattatatatccaagtagaacttatttgtaattagagattctcaacatacctcatgaagccggaggtctttctcataaacaagcttttttacaaatgcagctataaatacaacccaggcaaccatgagcacgattggaagagagtaagagacactggtaaggaagctgtaaggaaaaacaaaaacaaaaattcagtgaccaaaatgaatgccacatttgctgattgtaatatacaaagaacacactgcctcttacactgaaattattaatatgactattttatttatgaagtgtgaagctgacttaacagtaggtacatgattttcttgccataatgctactaaagtaaaacagttctagattgttagataaaattgccaaattgtttaaagggtgtttaagtatgtcctgttcaggaaaatagttaatt

SEQ ID NO: 25142 - DNA, 1363 bp, Bovine  19866880704698
  misc_feature (1)..(1): n is a, c, g, or t
naatacatgttgcttctgaggtgctgtttttgcaaaggctctttttgacagtaaccacactttatgttcctgtcttttacaatattctataatttctaataaaacataaaataaatttacactcctcttttagagtcagcagttgtaggttctgctatcaatccctcaagttaaagtatattgtgtcatcaggaacaacatgatacagtagcgagtgcattagacaaggtgttagatattctggactgagttcccattgggccatttactaactgtcgatttggacaaggcttttcacggcctccttttcttgacctatatcacaagaataatcatctttgcctatcccatggggttgctttgcacatgaagtaataatgtaaatgtaaattgttagttcctttatagatataaaagaattctaagtggtttttaacactacactagcctttctaaattcagggtttattctatcaagggaagaaattcactgatagatatagaaaacaaagttactggctgtagaagaaatgggaagagtttttgacatcaaataggtatgatgttttagaaatggataatgtctccagaagctctctagtctcaagacatagaattgcaataattgtaaaattattatcagaatattagccacctgtctaaatttgatatatgttatagatttcaggtaataaaaactaaataaaaatcaatggtagttttaaatgaatgctatatactatcaaaattataggtacatatattgttaccaagatacaactattatgcagttctgataatcagatttatggtcgtgagttatttcctgaaaaaggttatttacattcttaggtaaggagaaatgcttaggcaaaagtgttttattcctattccttacatttttttttaaccttatagaatagaaagaatatcttcttgaactgttcttcataattgcatactcttactggtattgaataatcttaaattgcaaccaaggttaatctttacattggattctcagtcatacatagattcaccttcaagaattaaaaagggggagtttgatggcattgactattgaattcacaaagtaatcacatgagaatcatctaaaaaatgcatgtattcttgttcatttcagtgtagtaaaataggtgaatttgaaatttggatctgaacttaaaaacttgcaagactctaatggtacaggaaatatgctctcaaaagtagtcagccatcagaggtcaactcaatatgactactgctactgctgctgctaagtcgcttcagtcgtgtccgactctgtgtgaccccacagacagcagcccactaggctcctctgtccctgggattctccagg

SEQ ID NO: 25143 - DNA, 970 bp, Bovine  19866880741561
  misc_feature (1)..(1): n is a, c, g, or t
nacttgcagcctccaagcccatgagaaaataagttgctattttttaagccaaccagtctatgatattttgttatggaagcccaagcagactaagagagtgtgtcatgctattgacccaaaatgctttttaagattctgaattggtcattgtcctggatatcttctacatgctcctgtagattcactctccaccattctccctcctccagttatgctaatttggatattccatctgttttctattagcaaaactgatgatatgattatcaatatttaagaattgagagattttgcatgaaaataaatctggattttcagattctcatgagaaattagaagatctggcaacagtgttggcaataatacactggcaattcccttttccactgggcgttagctctcaagttggccatgcttcactcaattactttaccaggctggtctctgcggccatctgagaatactacccctatttctcatgagatgatgtgatgagctaaaaggtccagatgcttggaaatctcttttactggctgctgtaggtgttgctggtaacagctcacgattgcaacctcttctggagtagtgttctatccttgggacaatacttgaagccacttggcttgggagtgcctaggaatttgcctccttcccaagacaagaccagcaataaattctaagatggacacctccatcctgcaaggagcaatcatttaccctgatcaggatcgatatgtcttccagagatggacttgcttttactatctacggtgcctcggccagcatcagtctagttcattaagtaatcctgcgtaacattacttggaatcaagggatgtactttacagtcaaagaggtgcaatggtgaacacattggtgaacacatagacatggggtctacagatcatgccatacactgcaccatccagaagctacaggtaggagaagaagtagaatgactttttaaaga

SEQ ID NO: 25144 - DNA, 2008 bp, Bovine  19866880753796
  misc_feature (1)..(1): n is a, c, g, or t
ntcgaaaaacaattaaaccagattgcatttcaacatttgcagacagaaacaaaaggttattcaaggagaaaatagctacagtattgaaaattattcttataacataaaagacaagatgctgctgtgtcatttaattgcttgtttgtctgttcatgcacaaaatcccaacaaagtattcttgaaccatacaggattctaaagcctaaaaggtcttaaagtaaggagtgaagttcacatcagttttttttgttgttattgttaaggtctgaaaataagtagttagaaacagcagtttccaataaaaggatacctctttttttttgtttttaaaggaaaaaaattaaatattggaaattgttttcattaaaaatcaagcccagataaaagatccactttcaggaataattattaattatttgataaatatttatcttttgctaaacaaatgttaattttttttttaaatggcagcttgccctaattagagattgcattctatcctctaagtagcccacaggcactgctccagggggtagctcaaaattaatatccaaactaactggcactgtcttcccagtttttatgttactaataagatgggcagtgtacaccaggaatgaaaaatcagcaaatttactggttcatgcttgagttcattcagtatttccaaaaaatcaattaccgacttaaaaaatgcctcttttttttatctcctattgtcattagtacatttaaaaaatgttagtattgtacaagtatgtttgaatttcataaacactgtgaggcaatatatataaatatatatatatatgagtggtaacttagaacaaaaggctttgttaaggatttgctcttgtgaaattaaatgtagtacatattagctaatagctcttccatatgtatcttagtcaactgaaaggtcacatcagcaacagcatgtgcatatactttctacaatattttttgaatttttaatatttaaattaagatcattttaattttagctcctagccatgaataactattacatttagagcgccaattttttgtatgtcctctaatttctagtaggtatgtgtatggatatataaacatctacttatttataggcttccttggtgactcagtggtaaagaatctgcttgcaatgcaggagctgcagaaagacaagggttcaacccctgggtcaggaagattccctggagggggacatggcaacccactccagtattcttgcctggggaatcccatggacagaggagcctggcggctacagtccactgggtctcaaagagttggagacgactgaagcaacttagcatgcatatttatttataattttatttgcttctctaataattccaaaaagtcaattcattagtcttgttatggaacaataaagttcaaaagttaaataacttacacaaggttatccaaataaataaagctggttgtgtctaatttcgaagtttctgctctttctcctctacattttgactctggtgctttgccccaacatggcagagaagaggaggacagaccatttctgcactgagccacagccattgttagcttgtttttccagctgtgtgtttggccatggtgggatggctgaatttttctcgtctgtgctttgtatacataacagctgatatacctcaggcatttttatatttgccccaagaatctcctggttctcagactttgaattgtttctgaatcctggtgagtatggagaccaggtaaacattctaagactggagatttctgccagccttcgcccagcttggtctgtgcttgactcagctgatcttttgtctcaaagtaacaccttcaaagactgaacatttggcaagctcattgtcagcattattgttattaatatagctaataaaaatgtcagtagacataattcattttttctatcaaaatgtgaccccaaaaatgacacctgacccccatcctctatgagatcctttaaactattgatgaagataattttacttca

SEQ ID NO: 25145 - DNA, 1363 bp, Bovine  19866880766218
  misc_feature (1)..(1): n is a, c, g, or t
natagtttacttactcatctgaatatcctgaatttgtttcagctacttcctattccccatgtttcctcttaaattacctgagccatagcttcagacaaaaaatatttttgagggcatattattatggcaacaaattacctggtataaatttccttaatgagacagtatatgtgaagtgctttacacaagaaccagcacatagtgatacccaacccaggaatcaagtggaggtctcctgcattgtaggcagattctttaccagctgagctaccaggaaagcccctaatgagacctcagtaaatgcttattgcaataatgataataaaatgttatacacaattggatatgtgattctaattgggcagtagcctttttcacaatgattctcttaccagcaacagaatggaaggtttccctatcaaggccagtgcagtagacaattttctttttgtgccgtaactacacatagaggtaactttgtccctgtagggcatcaggtgaagtctcccaaggagtttttgaacagtctgcgggtggaaaaaaggacttgttaattttccctcgccaaaacccttaaagcattaaatggaaaaagagctacttgtgaaaggagttttataatgaagaaatacacattttagttttatttttaaaggtacacttaaagatgaaccattcatttaaagataaacgcaattccgtggaggcccattcataaatacgatttcttgtccccctaatacatgtgcgtgtaagtgtgtatgtgtttacaatggttctttctgctgtattgacacaggatttacttttaagcttcaaagggctaaaacagaattcatccctttacaaggcaggtttcttattgattgtcatcactgtttcatcttttttcttactgtgggatgagctgtcacaaaggctttaggtctatttaaaaatgacccagtatcaaaactgtagtgtattaacttaggaatcttgggttcttgtggctatttcagtagttaaatagctctggcaaatagtggaatcctaggaggatttaagaattccccgagggttgcaaaaatagagaaaactgtccaaaagattagtctttccattaaaaaggtaaataattgtagtgaggtataaaagcacatctcaaaagccaaattggaatctattctattttccttgggcattttgtacatgcccagtcaactactcagttgtgtccaactctctgacaccctatggacccaccaggctcctctgtccatgagattctccaggaaagaatatgggactcagttgccattccattctccaggggatcttcccaacccagggatctaacccacatctccaggcaaattcttta

SEQ ID NO: 25146 - DNA, 2155 bp, Bovine  19866880801685
  misc_feature (1)..(1): n is a, c, g, or t
nctgtgacttttctttctcatgtcctcaggatctggctccttcactgatgtccgaacggccatctaccagccccagcctcatcctcagccgcctccgtatggtcactgtgtcacagacagcggtgtggtttactctgtggggatgcagtggctgaagacacaagggaataagcaaatgctttgcacttgcctgggcaacggagtcagctgccaagagacaggtctgtgttatcttttttaaaaaggggaccaatgactttcttattatttagactttgaaaggcaatacattcatttaccaaaaaatgtaaaacaataaaacaagaaaagtttataaccttaccagcctatgataacaaccatggttggcatttgatatctattttttcagtctttttaatctatgtgttttctttcctgtagtaagtattaagctactgtgtattttttatctgtctaaaatgttacaagtggttactttctgagtaaactaatccgtccctatttagtactctaaatcccaaagttctgaacctttgtgatgtaaacttctttcaacaacctggtgcaactcttccgggctataaaagtggtagaaattgtagcaataataattggtgcacttgacttttcccctagtacagcttcttgtattaattcttacagcatcaacagagccatatataccccctgcaggatcacttgagcagcatccttaattaacctgtagtaatattttgggttggccatagttcattcgagtttttcagtaacaccttagagaaaaacccgcatgaactttttggccaactcaatagctttgcaaatggggaactgaggcatggctgctgaggtggtaacaatggatgtcagaagaagaactcgggtgttgttctacccacaaaaaaaatgtggctttctgagtaaggtattttgataacactatgatctggttaatacttatagctagtcatattcatagtactttttcccccctttgaggacacaaggtcagcctcagttaagtggaaaataaggaacaatagtgggagacaagtgcaactctgtttcctgagacccttttggttatgcttgtagctgtaacccagacttatggtggcaattccaacggagagccgtgcgtcctcccgttcacctacaacggtaagactttctactcctgcacgaccgaagggcggcaggacggacacctctggtgcagcacaacttccaattatgagcaagaccagaaatattctttctgtacagaccatactggtgagtatcccaggggaaaacacaacagtgagaaaaccccatttctcatgctctgtttttattggccagcaagctgggcgttcctttcaaggctacacttgagaagtaccacctttgtgttatctggacccaagggacatggatggaactaactttacagttaaagatcctcccaagtttcccagtcgtcttgggaaatgacaccaaggggaaagccctccagtgcgtttatttttgacacattgggatcattatgtgattaaagatgcttgtatgggaaaatcagtaggcactcccccaggctgaagactacatagaaggcaggcctgagtgctcttgcttttgttttggctaaaaccatgattttttcaaagcgactatttaatctttttctttttggctggaaaaatgagagcaaaattggatttaaatctgcttgaaaggtgaaggtgaatacactaaggaggcttagaactgtattattagacatcttttattctgagacacactctgagttagttgcagaaacttggctagtctagtcgcagtaattccccactgtacattgggaagctcagttgcaatctttttcttctgacatgtgtgttgtgttggacagttttggttcagactcgaggtggaaattccaatggtgccttgtgccactttcctttcctgtacaacaaccacaactacacggactgtacttctgagggcaggagggacaacatgaaatggtgtgggaccacgcagaactatgacgctgaccagaagtttggattctgccccatggctggtaagacgaagcccttgtaggcagtcgtttgtggtgtaagaccgaaaaataatgtttggcttacttctgtttcacgcatta

SEQ ID NO: 25147 - DNA, 668 bp, Bovine  19866880805493
  misc_feature (1)..(1): n is a, c, g, or t
ncttgaactatcccttatctccagacagcatctccctatttttgtattcctcttgtatgtaagatagaaatatgcgtctgcaatgagctcagtgtctagatataaccacttttactaaacttctgttacctttagtgtaaatccttaaagtttgttttacttttctccttttcttcctttttaaaacatttttaggggactcattgcctcaatgctttgacttttctgactcaaggttgtttttattgaattatttcctgtaatctgtaccctccatgctgtttctgattctctctgcaggatttccctcttattcctgacatttgccctcaggctttgccttttatgttttctcctttggttgatacaatgaaaagagatatttatatgcttgttggttcacagacttcctcaggatcttcctgagtataatctaagatcacccccatacttggagggcagggagagactgaagaaagaggcagacccctgcaggttggtggtggcaggattgataagcaagggaacttgcctaccaggcttgtcttgggtggttgcaggatgagtagattgccagaccctcccaccaaatcttaaaatttttatagagaggccttaactgggttctgttgcatgtaacatttagatggtctcaacaacacactgct

SEQ ID NO: 25148 - DNA, 1498 bp, Bovine  19866880809153
  misc_feature (1)..(1): n is a, c, g, or t
ntgacgaacaagggaggcctggagtgctgtgattcatggggtcgcagagagtaggaaaggactgagtgactgaacctgaacctgagactgttaaagactaaccctgctttctctccacttaccctgcctgcctttttaggatattatttgtcattcactctaaagcatcattttggccaacgatgttctattttgagagacagaaaatgccattttggaggctttgaaaagctttttttgactatgcaattatttttaaatgcacattaattgagaatagccagaaataaatagctagctaaaaaggaaatttccagtggtgctatgtagccctcaggtaaatttgctaagactctactgctaggagtgcagatatgtatgagtacaaattctcttctctgtacccagcatcatcccttctaataaggggaataagcataggatgtttattcctatgacattctctttcaatgtcataggaataaactgttcacaaaatatttttcttttccattctccacccagataatccatagtgtatcttctatctagatccatataacactggagaaaagattgttatataaagtgaagagtaggctctctatttggaaaggatttctaaagaatgtggtggtggtctgtgctgtttctaactggcagtgtcagggcagtggttgtggtgcagaggagtagcgtttggtcatatgagatcttcagtccattaaggaaagcataattgagttgtgtcgctgataacaacacaaattatgcaaactaacttacatattaaataatcagtgctatgagaagttgtaattatttttttctacctcactttgccaaactgacttttgaaaattcaccagaaatgaatttgctgtattttcaggggagccaatttgtatgcttgcattgactggtttgaattgtaattcatcttatgcacacatccaattactccttatagaaagggttcagaaaagttcccaacccaccagagcaaagccttgacttgagaaaagatgaatactttggtgtgtttcaacttttttcttaataaaggaaaagaaaaagtaaataccagccattctgtaacaaagtatcatttttcttcaagctgaaatgacattagaaatttttgaactttttaaagaatttgtccataattaatatagtttctctctaatttttaaatattgtctcaaactttaagaagaaattcaataatactctaataactgggataattctcctagaaagacatggagtaaccctaaaagtgaaccagagtctaggccaggttagatttctgggatccagtaaagatttagtgtgaaccagtcagaagttatgtcagggaagctgtgagaaatgaattgcaatttattggtaactgagaagatgggatttaagtcacagtaatatactatgggattggttcagaggttggcactctatttagttctgaatgactacagtaaagcaagctagaaaa

SEQ ID NO: 25149 - DNA, 1545 bp, Bovine  19866880827826
  misc_feature (1)..(1): n is a, c, g, or t
naccctacctgcatgtgtgctaagttgcttccttgcatccgactctttgtgaccccatgggctgtaatccacaaggccttacggaattctccaggcaagaatgcgggaatgggttgccatgccctcctccaagggatcgtcctgacccagagatccaacccatgtctcttatgtatcctacactagcagacaagttctttaccactagcaccatgtgggaaaccctctccaacactaccccaaagtaaaagaagtgggaaaaatgagaactatgccacttgaatacagtagtcaccacttatagtttatatgacattttgtcattatttttgtaaaataaagttaccagaaattaagtgtaattttatttaaacttttttcttttggcaaataaatctgtattaatacattgcagatatgtttcataagagattcacagagcaattctaattaaacctcttgaattcctttcaagtaaattttagaagtcccctttaaatgtacttggaaagagaaaaggaactttattgtgatgtactattccaagaaataaaaagaaaaacaataggatgtgatgaattgagaaaccaaatcacactctttcaatggaatgtagcaaagatcaattgactagtaaaaaattaggaaaaaaagagcttgaacatacacaaggcataatggaaaccaatcagattaattagacatcagtcttattattacattccacagcaaatgtagaactaaaaacaataagacacctgttttgttcaaaccaaagctggattttacagacatggtttgagaggcagagggcaacatcaaatcatctctcttcatttggcttgactcactggagaagcatctagatattctgaaggtgggacaattccactcaggaaaaaagagacaactgaaaagagttcaacaatgaaaactaaacagcaaaacagagatgtctccttcttctgaacgcttctattccataatattttgaaagcatatttctcttttcgtaattttccagttttactcaaagtgaatataaaacaagctttaatgcaacatattattcaagaacactgtgtaagcaaggatttatgagtcctcaaaatgacttcctttattgtttccctcttttatatgaaaaaaaaaaaagaattctgagagttgcaaaggttgtttgaaatgacttgtttgttaagtcccttactataggaccagagtctaaacccacctatatatttatgaaagacaaaggcaagcttcaaagtttcctctaagcaccaacacgaatgcaattctggctgcatttaattggggattaatagagaatgcagaaattacagcacattattaaggaaccactccaccctctgaaagataaggtgcttttctgatgaaaataagcataggacattgaaattttctttaaaaacaaagctcatcctaatgaaaatagagaaataccatttaattaatccattaatttttcaagaatcaaggcctttttattcattattctaaaagtcaaaatctccatttcaa

SEQ ID NO: 25150 - DNA, 1402 bp, Bovine  19866880842977
  misc_feature (1)..(1): n is a, c, g, or t
nggaagatacaaaagaaaaagaccacacacaggaaataggctggatctagctgtgggcctcggagaaggcgatggcaccccactccagtactcttgcctggaaaatcccatggacggaggagcctggtaggccgcaggccatggggtcactaagagttggacacgactgagcgacttctttcacttttcactttcatgcattggagaaggaaatggcaacctactccagtgttcttgcctggagaatcccagggatgggggagcctggtgggctgccgtctatggggtcacacagagtcggacacgactgaagcgacttagcagcagcagcagcagcaggtgtgggctgcagtgggccagtgtatgactcatgtatccttattttttgcttcttcctttttccttttttttttttgtttcttctcctctgtatttcctaatcattctctctctctctttttggccttccttcatttcactgttattctatgtcctcccttcttccttatctctcttttctttctttaaagatcatagccattctattagtttagctaaatgcttaggtggaacgatttcttgaaacacggattcaatcctggggtgggaaaaatatatatatatatacatatatatgagattaaaacaatatttgaaacatggagtcctaatgttattattttatggcctgcttcctattccttcatggacaaagttcaactgtaaaagagtaaaaatgacttataggttggtattgacagaagtcccattactaatatgtgcaagtatgtgggtgggtaatggttattccagtcgggctatttattttgcattaatttgtaataattgagcccctcagttgtttattctttcactccttcctgcaaattcagacacctacttgcaaaaattatcttgactcactaacaattttggctatgctgaataatttttttttctaatttccaaccactccaattcatagctgctaattttaaagatggctttattcaagtcttcttattttcacaacactctcataaacaatttgcctcagatctaccaggtttgagcaatagtctttaaaattcagttaccaggggaatttttgaaagtacagacactacaaagacaaaagtacagacactacaaaaacaaagtaacctcgacaaaaaacctcctttgggtcttgtcaacaaatgttcagagcatgttttctttaaaacaagcagcattttcccccaatgcagcaaattagagaaatttctactttttctttctttctttacaaaattaccaatttaaagaatatgatagaattttactattgtcagaagttgtatagaattatacccataaatcgaaaatgttgttgctttctttctttttttttttttttttt

SEQ ID NO: 25151 - DNA, 812 bp, Bovine  19866880860093
  misc_feature (1)..(1): n is a, c, g, or t
naaaaagaggcctaactatgcaataaaatcacccagttataaatcatcacattatttcagggattaaataatatagaatatcaaatcatttaaactgcccagatagagtaatgcataagccctctctgtataataccggaagcatataatgcattatgtttctgccaattgacactcataatggaattctattgtataagtgtcccttaaatttaagaaaacaatcccttaggcacccctatgagataatagatgtaaagtactttaaaatgttaaaaagctctatgcaaatgttacgcattaatgagctgaattgaaatcaggccacgagagaaagatactatatattttttttaatatatacttactatatatgccattgtcttcaaaaataggaacagtgacaatataatctttactgtttccccaaactaatacttatttctttctttaaattccaatttaaccccttgctataaaaataagcctctgctgatcctatctgcatactttccatttcagacgtatatttttaatttttacttaatcttgacctacagtttgattttttaatcatctgtcaggatctattattgcttgtttagttctccattgctacatttctaattttatgcctgaataatttttcaaaatgtcatttactttaaaatgtaatttatatctttctatttggcattttctgcaaatcttacttttatttccccaaggagtattaaatttcaattaataacataaaactgaaaatgcacttcaataatattaacaaaaaaaatgcattctagcagcagcag

SEQ ID NO: 25152 - DNA, 2175 bp, Bovine  19866880862257
  misc_feature (1)..(1): n is a, c, g, or t
nccctgtctggcctaggattctattgaatatttagagtgggaaacacccatttcagggtacatttttttttatccctgtcatctcaaagtagaacaacaaccttagggaagagataagagtgtgcgtctggccggtcgaaaatgctgtcttccatgctgctgaaagatttacagagtatagtagaggtcttcagatcctgaatccatacaattcatcttctgcttttaatttatgctttgaagatttacacaaaatggaaagaccaaataactcactttccagttaaagcactcacatttccatctggcatattgctctgaatagcatgtctgcattacataatagtacatttttcataccaaggctcgtttgtgatcaatttataatcacaaatgtcacacgatgtattgaaaagaattcagaattacacatggctgctatatttacctccttatatttcttaccagaagtgttttccttctgttagttacctctgcaaattatgaggaattgttccaaaaatatccacttgaagagccagaaacttcacaaaactgtaaaaagactttgtttaaccatcacaatagtagagcatcttttaaacttttccttatctttatgggtgtattttttctttctccctctctttctttccttccttccatctttttcttctttcttttttccaaggaagttttctctcatcacatttatttattttacatttcagcttcatgatggcatagttgacaatattttaagatatttaaagtgtgcattgtggtgatttgatatctgtatacattgtgaaaggatccccccatctggttattcaacccatttggggatatattttcaaatctaaatgcaaagttgatgacagataaccaagaatttttataaccaagtctctcttaatgcttgaaatttttgacagaccagcaggaagagatatgagcatgtgggaattgttaaaatgggttaggctgatacatcatgctaccacaaactctatctttgattgtggcagtcatgtatgttttctgcaaatagagttctaatcaccctacagaatttcagtcttaaaaagtcagagatgtgcccaaagctttctcagatgtcttctaatcaacacaggagagaggtgggaaagccgaaatctcattcctgatcttccagagtgtgttgggctaacgagcatgatattgattttcttgctttaagtgcttcactttttaaaatatttccaaataagaaaagattttaattataaaacagttttaaaagagcccatacataagacagtgagtgcttttatttttatttacctaaattttatttacataagacagtagttgctcttatttttatttacctaagattgctaacaatcattcagccacaaaaattttattgactgtccattcaataaattattcaaataaattgctgctagggatctagtagtgaaccagactgggtctctgctccactagacatcaagtgggagagtcagacattgatgaaagtaattttaagtgccacaaatatttcaaaaggcagagtagaaagctctttggcactgaatgttagggtgtcctaaccaaatgtgggcattcagggaaggcctagaagaactgatgtaaaagttaaatctcaaaggctgagctaagtgaagagttggtgcattgtattccaggcagtggaaacatcactaataaaagccctgaaggggaggagaagctaatgcatttgtgggattggaaggggatcagcatagctggagtagagcaatgcttcctggtatttttcacatcactggacatgacagtcagtggaccagcctgtgcctctgagacctcgatatcttggtatatgtgccatcagtttgtggaagtgctttgagtcttggctaaccagttgggaatctcaagcatggcattcaagagagaacttggcatgaaaggatgctgatgaagtagacaaggaccagattagaggggattgggtggtgagtgagaggtaggaaaggcggagttagaacaggccacacacttaagattggctaaggtgacggaggcctctctgagtgtacttgattatacgaaggacaatggagagttacagaaggagagaagttcatctagaaaggggagggagtgatcctaaaatgt

SEQ ID NO: 25153 - DNA, 1141 bp, Bovine  19866880901919
  misc_feature (1)..(1): n is a, c, g, or t
ntccaaagaacatttcatattttcagactgtggtcagcaggttttacgggggactatttgtagcttcttaactaaaagttaaatagatcctttattaaaaatgaattcctggattatccttgcaggaaacaagatggtcataagccacaaagtcagttttgaagtaaaatgctatagaaattgaggttgtttcttacaccttctgataaggaatgctgcaaattataagaacagactatttactgaaatgagcataaaaatagccagacaggtattcctttgcttttatagacttcaagactccaaaccacttttagaagtcaaaaataaaactgtaacatttctgtcaaatcttaatattcaagtaatgatcacagcaacacagaatatagaatttgataatgaggaagaagatacaatatttctaagggagtgaagtttaaatgcagaatgcatatctgaaataaagttattattttgatagattcagtactttactgttgactgaaatcagtaggccggccgcgattagcagacatttggtaccgtccaaaaccttcataagacatttggtccttgccaaaatgtccttgaaatttggttctttccaaaacttccatgagcatgtttggtctatgccaaattgttttggacaggatcaaataccaagtaccttttgacataaaccaaaggttttatggacattttggacaggaccaaattgttctgaaaataccaaggaccctttggcataaaccaagtgtcttatggaccagacgttttgtgggcactttattcaagaccaaatatcaaagaccttttggtgaggaccaaatgttttatgggtattttggatagaactaaatggttctgcaaatattaaggacctttcagcataagccaaatgtcttatggaccaaatgtctgatggatcttttgtacaggaccaaatgtcctgcaagggatatttgccatatgcagaggatatatgataggaaaagaaatcccacttgactctagaagagcctttctgtattataaaatacttacaaagccagagtgattctcaagaatccatatgtacctaaggaaaatcctaaatgaaaaattatgggggacatattcccaaatgagcagcaag

SEQ ID NO: 25154 - DNA, 1291 bp, Bovine  19866880939127
  misc_feature (1)..(1): n is a, c, g, or t
ntatccttgttaagctttattttttaagtgacattaactgaatcttccctcttatttgaaaccagctgtccctcctcccactgatttgcgatttaccaatgttggtcctgacacaatgcgtgtcacctgggctccaccctcatccattgaactgaccaacctcctggtacgctactcgcctgtgaaaaatgaggaggatgttgccgagctgtccatttctccttcagacaacgcagtggtcttaacaagtaagcattcaagtgtatttgttcaataaatactaggctagcgcataaggaaaagaattttgtgttctcgggtaggagcaacagagattaagacagataaaacagaactacaaactagattccaaatctaatgcacagctctgtaattctgaaagatgttacatttgttgttattttaatatatctttgatatctacaactttttaaaaatcagtggagaaataccaactgtgaagttcaaagacttcaaacaagttctgcttccaaataagcacattaaaaacaaatgtgtgccaagagacgttacatgactaaatctcagtgtttagtgagagaaaaaaatgaggattgaagctagtgtcatggcatctgttttattctcatttaagtgtcagcaggtaatctgtttggtatttgaaacttagaaacagtgactggtcactcagggtagatcaggattttattttgaagaaggagccagaagtttaatttgtacttcaaaaagaatctgttagcaggatttctctgaaggcggaggacttttgaaaataactgacactaaaataaacagccacagtttatggaaattgtttctttctagttcctacccttttgaaattgatattttttattaaagaaaataaaaggagactgctacatgttgcttttcacataaatattgcttctcattatttttgctataatagtaaaatacacatataagaacagcaaacatttttacataagggaacactagctcacacttaggtacactacctaatgatgggctgaagacatcctccatctttcagacgtatttttagagaatgaaatacaaagaaaaagcaactcagcatgaccatagtcctggtttctcattttgtggctgagggtgagaaatccttatgtctgcctttcagtggggctatgattctgttctggagcattctggaatcagtagttacagcatcacccatacacaaggctctgcttcaggagcactgtctgtcccacattagccacagacctgtcacgtgttcaaa

SEQ ID NO: 25155 - DNA, 917 bp, Bovine  19866880987553
  misc_feature (1)..(1): n is a, c, g, or t
nccaggggatttgagaatctaaatttagctgagacagagctggtatttgtgtgatatacccactccccagacatacatatgttcaagtcatctctgtaaaatatcaaataatttctatgtcaccctctaagatgttcatacacacaagtggattctttttaagaactggccatgtgctgagattttcattagaaggagtaagaaacaaatgcagatattgctctggtgaacctatacagggacagatttagggtgcatttcattctggttacgcatataaaattgtgggagatataagagatgctggctcaatccctgggttgggaagatttccctggagaagaaaatggcaaccctctctagtattcttgcctggaaaatcccatgaacagaggaggctggcaggctatagtccatggggttgcagagtcagacacgactgagtgtctgagcatgcacatgtgcacatacataaaatacatgattttaagttgtgatcaacaagatggaactgaaaaaacaacagccatatattagactaatcttaatctatttcttctcctctttccttaacactttagttatataaaaagcttaacccatctgtgccaagtttctccttctgttatcagagtctaacataattataacatttgcttccctccttccttcagtgatcacactgctcttcatcctctcagtgcctcggcagctcttttccacctttccctgtctcctttgtctgggtgtcctcccacctcccagtaattgaaggctgatgtcatctggagggaacatgcaatctctattttcagagctctgtcatcattgcatccatttggcatcctgtcatcacccatctcttgtcagttaatacaggaacacaaaccttcagagacattatgcaaatgtatcac

SEQ ID NO: 25156 - DNA, 1952 bp, Bovine  19866881031395
  misc_feature (1)..(1): n is a, c, g, or t
nggagatggcagagaaaagtcccctaatgcttaactgcttccagctgctatcttagcatccagccaataaagatttataaacagtacattctttgtttcatgctgaggtccctcggtacgcaaaaaaaaaaaaaagataaaattcgacatggttgctttcagcctaagacaaactaataatctatggaagacaaagaatgagaaagtaccactcagaaagaattagtatcagaattaaatggagtaatctcttacagccatcctgatgctaatcagccataattttgttgttgttcagtccgactctttgtgaccctgtgcctgcagcacgccagccaggctttcctgtccttctccatctcccagagtgtgcttaaactcatgtccattgagttggtgatgccatccaaccatctcatcctctgtcgtccccttctcctcctgccttcaatctttcccagcatcagggtcttttccagagagtcggctcttcacatcaggtggccaaagtactggagcttcagcctcagtgtcagtccctccgataaatattcagaattgatttcctttaggattgattgggactgattggtttgatctccttgcagtccaaggaactctcaagagtcttctccaacaccagtttgctaacaaatacttctgctaaagcatttaatctgtacaaatataatcaacaaaagtatacttttttttttctaaagttgcaaatgtatagatttgccaaaatttgctaaagctctcctaaataaaatcagtgctccttctctttttaagaattgggagcaaacaacctttcagacatgattaactgtgagagccagattttatagatgtgaatactaggcataggcatatcataggtgtatacagttccattgtgattaagtaaaatcagcaaaatttgtttcacatgttgaagattaagcttcattataattgggttaaatgatagctagacataaatagctactttttaactttaattaccactgttggtattttactattgttctacataaagtctgttgtctaattttggcacttgttccttcatttactcactcaatagtgtttaacactttccaagtgccatgcactgtgttagacaatgagagtacaaacaatagtgtagtcaagatccctgacttctgcatttcagttggggagacaaacagaaagacaaacacactattaactaagactgctgactttcaaacagagtttcaggatgaaaaggagtcagcactgtgatgaactaaggaaagaacctttcaggcaaccagatatgacaaaggctcttgtgactagacttaggtaaaggagggaggtgggaggaacgctgtaagatatgggcaagtttcgattttactgcaatacaataggcagtcactgaaaggtttctatccaaagagtatctggagataacctctgtttaaccatgattgtttagcagctatgtggagaatgggtttgagagacactttatttcaaaaaagtaatgatacagattcgatgaatattttagtgattcaggtggggaatgttgaaaaagataaattttgcagataggaacacagtatttcttcaggatggcccccagatttctgactttagtaattagatagaaaatgatcctaccaggtcccgaggttgtgactatcaggtcaagataaggcagatgagagtggagatatctagaatgccattttggatgagttattcaacttgagataacagtaggcagttggttgttcaagtctgaggctcagaatcaaagtccagactagagatataaatgtagaaattgtcagtatatagataatatttaaatttatgtgactagcagagatgagctagggtgaaaacacaacaaagaggaaagagggaacagaaaggagtccaaatattaataaatgtcagtattttttagg

SEQ ID NO: 25157 - DNA, 699 bp, Bovine  19866881064763
  misc_feature (1)..(1): n is a, c, g, or t
nctggaatcccacttcatcatccaaatggagttatcaggtaggcaagagatactctttcctactccatcctcctgctggatgtgccccatggaggagacctatgtttctacatagaaacaaaatccagaccctaaccatagctgcctcccacagtccccagcgcacccaagtcacaaggtaaattactttcatatgtgcttaaacttcatatcacagtttgctcatgccagataatcacagtcgtaacttgaaataattaaaaggttgattcaaaggaggctatattaaccctgtctcacagacaattaaaccaagacattcactcctttaattgatttcctcttgaataagaaataagatgagatgaaaatctctaacctctcagccagggctttagtggatataatttcatagcaactgttatggcttgaattgtgtccccccacataaagatgcttaagtcttaaaccccaggacctgtgatcttatctggaaacaaggtcttcgtaaatgatctagggtagatgagatcattagggtgagcactctaatccaatataaccagtattcttagtcttataaaaagtggacatttagacacaaataggctactctggccacctgatgtggacagcccactcatggaaaagactctgatgctgggaaaaatgaaggggaaggagaagagggcgacagaa

SEQ ID NO: 25158 - DNA, 1914 bp, Bovine  19866881066013
  misc_feature (1)..(1): n is a, c, g, or t
nttcttttataggctttatccacaaaaggaaactatgtaaaatatgtttcatgttaaaaagtaaaaaagataacagtggtcagtaaaagactactaaactctctgttctaatgcaatgaatgtcatctataagaagcaggtatttataagaaatacaaagatactgatctcatgttaatagattttagagtcttagtaacatataacataaaatagcaaaattcaaaggtcagcttatagataaaaagtacgttttacttgtttatgactagtagttacttaggaaaaagcatttactgccaagctttatacatgcaatttaaatagaaatacatttttagtaaattatgaattcctacaaagaaaattttatagacactttctttgtgtgaaataaattccacagtaatttataaactaaacttatattcactttttgaatgctttttaacatctatttttcaagttagagtaagatttgtggaaagcttttaggaaatcgcaagctagttcacagttgcaatactactgctgaaaaagtgttaagttaggtccttctgtaattcaaaatgagctaaaaacagcaattaatgcttatctagaaattatgggtctcactatttctttgtaatgtaaatgagatgcattaatagaaatcaattcatgaatacgaatttaatagaaatcaactcatgaatacaatcctctattgtgatatagacatgaaagagatttaaggtcacttcctgtaaagtgttgagcaaaagacagacatgaccaaaaattactgtcaatatttttccttctgcggaattgagagtgatttaagaaaagttaaaaaaaaaaaagctatcctgttctgcagaagtactttaatctgctgttgtcaacactcattacttccttagctttcttgtcctgttggtttctattcaactggtagatgtttttcttccacatttaatgctgtcgttcgatgctcaaagtatcgggatgtagacacaatggctgatttttttcttgccttaactagtatttagtaaattcatttaattcagtagcattcaattttcgaataacttgggtgtcttaaaccatgctactcaaagtactggtctaggaggaaataaggatcttggtaacatatatcatataacccactgcttccttcatcaagaaaactttgcttcaaaaaagtattaactgaacagtgtgctccttgatccattctggcataagctcattagtccatgtaacaaacaactcacagagcagcagtggatccatggatcacactttgagtaggaccactttaaatatctctttcaaattaaaaataattatttaaaacttgtacaaaatttttaagttaactttgttcttttttggccacactgcacagcttgtgggatcttagttccctgaccagggaactaggcagggacagcagagagtcttaaccactggaccgccatgaaattccctaagttaacttcttaaaaaatggatgaaggagagagaatgtaaatacagatgagacatcaccaagaaaagacatttaaatgttgacttacgagtggtgaagactccggtgactctggggctctgctgattgcccttcacggctacgaggcttacagcatactcagagccaggctgcaggttcctcagtgggtactgcgaggctgcgggccccacgttgtactgcttgggctggcctcccgggtcaggcccacggtcagtcggtacccaactatccgggcgcgaggtggagtccaggtcactataacccgtggtatcagtttcattgataaactggaggttggtgggagcatccaattctagaaaaagagatgaaacatgtcaagaaatagctgcacttcagaattatcatactgaaatcctaaagcttga

SEQ ID NO: 25159 - DNA, 1124 bp, Bovine  19866881066289
  misc_feature (1)..(1): n is a, c, g, or t
ntctttagaccctgagaggttcaactttactgttttggggattttcaaaaaagaaacaaaccaaaaatccctaaaagaatattgtaacctgttttattctcccagggaagcaaactattcatggtgcttaaaaagtcttttcagataatttggaacagattgcatattaccatcattgctttaacactattttaccactagtaacctgatgtacactgctttattttttcctcttttttgcctctgttttccttttgccctcctttgctttgtaactcaatagaggtgccccaactcactgacctaagctttgttgatataactgattcaagcatcggcctgaggtggaccccgctaaactcttccaccattattgggtaccgcatcacagtagttgcggcaggagaaggtatccctatttttgaagattttgtggactcctcagtaggatactacacagtcacagggctggagcccggcattgactatgacatcagcgttatcactctcattaatggcggagagagtgcccctactacactgacacaacaaacgggtgaattttgaaaacttctgtgtttaagacatggatggtgttgcatgctgtccccagtcactctggttaaatttggatgtttcaggggaaaacccagcaatttcccaaagattaagagagggtagatcagggggtaaggagtggaaggcatatgcttcactgattggatgaagacatatgccgtagtcttaagtacattttcactgaagccatgaatatgaatttgtataaagctagagaaatatagatacctaatctatcaaattgcagacctggaatttttttaaaaaatctaacatttataccaaattgtatcaagagcaccagttaataagaagaaatgtacttccaaaatgtaccattagactcttccttctactctttcataaactctaccatcttgtttgtgagtgtctaaaaactaattgaaatttaggttagagtggaaggagggtttttttgtggtaggagaaaaagagactttggtacattctaggttttaatgccatgataaggtgaagaaactcctctttaaccacagactggggaccagcatgcaacattataa

SEQ ID NO: 25160 - DNA, 1506 bp, Bovine  19866881118393
  misc_feature (1)..(1): n is a, c, g, or t
ncctcgctatcagacttctagcctccataactgtgagacaataaatttctgttgttctcaaagtcacccggtttttggcaccctgttatggcagccttcagaaactaatacagtaaatgataagaacttaggtttcacagtttgcagaggcctagattcaaaactaactggaagagtaagagaggcatatttgaattatatagtaattaattttctccccaaacttagtaaagctattttctaagctttgtacctgtcaataagttatcctctttgaccttttagcttctgatttgtaaattaagacagataaaaggatcaaaaggagataatgtacagtaagtcattttgcagtccatgagaattatacaacagaaagtaataccagtatcaacatggccacgtgactattaccttagtaaaaaatacacttacattaaatgtgtgtgtctatctatcataagccatcattacttacctacagaagatgtgctcacatccgcctaagcacacaggctccctcagaatattagtgctgtttgaagaaagaaaaataatcaagacttaggtcactgttaaacattttttacccaacatttcacaagtccaagacccaacactactgtacttgtttctcaaaacataagatattaaggtcatattcatttgaaaggctgtaactccctgattaaatattgtatcatcacacatctgctgaattcaaatagcaactaccaaactcaggacaaactgtaacactttttataatgcatatgctgtgaaatcatagaaagaagcaactttgctcagtatctctttcaagtaaaaccaaccactggccacttctttcaattcatgattcaaagtgtagaccataaatctcaaaatgagactcacaaatagaatgactatacagtgaactgtccaaatgaaaatacttctgagagtaaagggtagtgataactggatagaatagcaggtggaaaccaagactgtcatagaaaaatagggcatctggtccccttgaccataaaaatttatggtttcccattaaaaaaaaaaaaaattgctttccagttgttgtcaagtagacatctatttttattctttctatttacaggaaattgttttattctttaaagcaactgggaataggaatcatcaggttggcagtctgcagaaaattaagtatccccagcattgtccatcaaaaaacacctgctaagtttgataatcctaagaaggtaaagctacttaactaataaacacagatcaagtcattaaaatcagagggcgtaatgtggcaagaaaaaacaggagaagtaaagctttttaaaaatgaactttttttggtttattacactaaccctaggacctttaggtatttacatcattattatccaattatctctgcacacatctcacatatcaataaaaatagttttctacgtttcttgaaagatcagatgcatcacactgcacattttaatagatatgaacattaaa

SEQ ID NO: 25161 - DNA, 792 bp, Bovine  19866881200399
  misc_feature (1)..(1): n is a, c, g, or t
ngacatcacacaatctataaaccagctggaaggagtcatccagactttgccctgcctaaccctttctgggtgatgattagacaagtcctcatagatgatacactgtgtgcagaagtgctgatcagaatcaggtttggcatggtacgcgactgtattgatggtttgagtcacatcactgtctggcttgggctttctaataaggatctggcccccaccggcagcgacaagcttaataaggttgtcctttggatggttaccaaagatagatataaataaacaaaaagcacctaaccaagccaggagcttccctggtggctcagagtgtaaaacatctgcttgcaatgagggagacctgggttccattcctgggtcgggaagatcccctggataaggaaatggcaacccactccagtactcttgcctggaaaatcccactgacagagaagcctggtaggctacagtccatggggttgcaaagagtcagacacgactgaacgacttcacttcacttaaccaagccaaatgtcaagatataattgatagccactttaaggcaactattgagagcactataaattgcctaagagccaactaatgacttatactggaaaaatctgacttttacagactttttcagtatttttaatactgacaggaaagttgaagggctgtagcctttaaaagcaagatttcagtcattgagtggcatgctgaaaacctgcccatttttgtttctaacttaatgatatatcaagtcaaaatcatggatgatttttcctttggtgatcatta

SEQ ID NO: 25162 - DNA, 1058 bp, Bovine  19866881226464
  misc_feature (1)..(1): n is a, c, g, or t
nacctcatcctaaactgttacaatgattctgcaaggcagtgtaattattcactgccttaaatattcagaatattctcttattctaagaataagaagctgatgctcagaaaatttaatagtttgcctaaggtcacacagctagcttcaatgtcaatagaggtttgactgattcagagtatttctgttgtgcctcatgaccttcccagaataaacaaggaaatgggtgatacaaggactacccttcttacccaagcagttttccccctttctgtcatcaaagtcctttataaaaacccgtcttctaaatatggaggattaaaaatgaaagaaaatgaaagggaataatatttaatgaacgcctacttacataaagctcagtgctaacaatttaaaaatttttctctacctattttaaaaatagtttatttatttaatgcatttataagtctacctcttttacatactgttgtttattacatacaaacagcagttattttgtattattcaaccagatttggaaatttgctctgccgtattttgaaaatcttcttggcacttttacatctgtgaagttaattgcagaaaaacgtgttcaaaaggtccagtgtgtctccagtgagtaatgccacagtcagttcagaaaatgaaaatagaagtgatagcatcatattctgttaccaccactgcttgaaagccagattttaatgagcccagctccataatctgcctgagcgtttatagaccttgggaggggaactctagagctttaggctaaagcagcagcagagaatgtctctcactagtgtaagaacagtgctgggtatggctgttctgagggcaggctcatcaactgtggcaacttgcagggggcaccactcggggtgggaatagagctggacattatttgccactagacattaagagatatgtaaaatccatcaactttttccaatttcattgtgggaaaatggaaaaaaaatacaatagccagttactacactgccagcatagaaaagcagcattacaaatacctattaacattttttgtgtgggaaatc

SEQ ID NO: 25163 - DNA, 1359 bp, Bovine  19866881255857
  misc_feature (1)..(1): n is a, c, g, or t
ntgattgcctactgtagcaaaagagctagacatgacttagtgactaaaaactgttgaaagattgctaacctgtagtaacaaaaatctggaagattgtggctgctggtctaataagttccagtaagaccatgctttactgctgatatctagaagttctagaaacttctgtaatattaatagccatgcctcaaatgtcactgaagagtaaaacatgaatagtatttataaaacatgttaccctaccttttaaaactatttatacgtcgtttggcctgatttttccccccacataaaattgatagatttgaggggactatgcacaaaaaatccattgagaaacatgttgttggagaagtattcattttaatgcccatgttcttcaggttattggcatcggagcaggacagcagtctcgtatacactgcacacgccttgcaggtgataaggcaaactgttggtggcttagacatcacccccaagtgctttccatgaagtttaaaactggcgtgaagagagcggaaatctccaatgccatcgatcagtatgttactggaactatcggcgaggtaaaagggctgttattgagtggggtttaccctttcctgtgtaactgtcgtcatcactccaaagagaaaaggtatcaggttggccaaaaagtttgtttgggtttttctgtaagatcttatggaaacatttgaatgaactttttggccatcgtatttttcttgaagctttagattgtctaaaattactaatgtaaacaacctctgtctcatttacctctctttggcattctttacccctttctgacaccacagatcatgtcttcttagattatagccactgctttagttttgtgtacttgtacccccgctggttctaagttttgatggcagggactgttgttcacccatcttggatatctgtcacagtgccaggcatgttgcttgctgtgtgatggatgtgtattcaacattgcatacaggttacttgatagcaggtagcaaatgcccctgacattctccagaaactccattaacaactcagtgtacttgtgttatgtttcatgtgctttaatgttttctaccttaaagaaggtatgagggagcattaaaattgcaggtattaggtagcctgctaaaaaagtaggacttagcccagtttctggaaatacaagtgcttaatgggtaatggttacaaaataaaaattaagttctggtcttctgagggggtgagtcaactccactaggttgtccagccagggataggaatccacaatacaatcaacaagtgttgttggagaacatgccttgtaaccaggaggtgtttcaaacagtcttttttaaaaagacgttaata

SEQ ID NO: 25164 - DNA, 5842 bp, Bovine  19866881275880
  misc_feature (1)..(1): n is a, c, g, or t
nactggtgtgagatggtacctcattgtggttttgatttacatttctctaaagtgatgttgagcatcttttcatgtgccagttggtcatctgtgtttcttctttggaaaaatgtctatttagatcttttgcccatttttctattgggttatttgtgttttttgttaattagttgtatgcactatttgtatattttggaaattaagcccttgtcagttgcatcatttgcaaaaaaaaataaaataaaataaaaagcagagatattactttgccaacaaaggtccatttagacaaggctatggtttttccagtggtcatgtatggatgtgagagttggactataaagaaagctgagcactgaagaattgatgcttttgaactgtgatattggagaagactcttgagagtcccttggactgcaaggagatcaaaccagtccatcctaaacaagatcagtcctaggtgttcgttggaaggactgatgttgaagctgaaactccaatactttggccacctgatgtgaagagctgactcatttgaaaagaccctgatgctgggaaagattgagggcaggaagaggaagggacgacagaggatgagatggttggatggcatcaccgactcaatggacatgggtttgtgtagactccggcagttggtgatagacagggaggcctggcgtgctacagttcatggggtcgcaaagagtcggacacgactgcacgactgaactgaactgaagcaactgaacgcacacacacacattacgaaatgatcaccatagtagatttagttaccacctatcatctcatgtacatacaataaaaataaaggaaaaaacaattttctctttgtgatgaaaactcttaggatctattctagcaacgttcctatgtgtggtacagcagtattaattaatagtcatcatgttgtagattgcatccctggtatcttataattcaaagtttgtatcttttgaccaccttcatccagttccccatctacccactccctacatctgataatcacaaatgttcattccaagtggccttttttagtgagtttcagataataagggctacataaacaatgccttattgacacatgtatttcctcagggagaaattgctcttttctcctgaaactttttttcagtgaacagataaaaatcccacacatactatttcattaaggaaagttttgctggctaaagaagtgaattaacaagggacatgatctatgcaaaatagttccaaagtacagtaatttggtaagaagaaaattctgtgaccatgttcataaatggatcatcattcaattctgtgaccatgttcataaaagtatcaccatctaatgggagtatctttattctgttctagaccaaaataagttattattcttaattattgaggaaaatttattcctgaaaatgtgtatagaatttgatatttcaagattttagtacatgacctggctttgccattgtgaaatcataggcaaatgacttaaaatactttttacagtttatgaaactctaaaatgggtctgttgataactgcttcacagacttgtgaagattacattgtgtggaagcatttgaaaataatattctatatcatagacaggactgattgtaacaggaacagtaagagaatggaaataatttgatggatcatctttgacttggaactaacatagtgctttgtttattagtaatgctctgattcagatttcctacaatgagaaaattcctagtaaataattagattttaaagaacttgggttatcattgtatatagttgtgtgatagccatctgtcttcatgctgccaactatacttaggttccttaggagctatatgtttagcaaattatattatatatgctatattaatacatattattcttaatcatttacttccatgataacaaaatgagatattggtaagaaggacagaataataagtggtactgaactatcctctaaaaagaaaacaacttaagcccagctcacataaaaacgaagtcatgaattcatacataagatgaataaacatttctttaatcaagttgaagtctctctcttcgactttccctttggcccttattaattgtacattcttaaggaatttatatagcttcttgagtcctagccttgtcatctattaacttgggatagtaatagtacttatgtctaggtattagggaaaactaagtgagaaaatcaaggtatattctgttagacagtacccagcacatagtaagaactcaataagtattacctagtagataacatcagcagtagaagttatgtctcctaatttgggagatagctataagagtctttatattttaaacacttttaaaaaaaaatttcagttttgccatcagtatggagtaattttaagttttatgatcagtttattttttctgtgttcacctagctgcacttattatagaataaaacaataccataataatttacgtttgactaatctggttagattctactttacagaaaaataacctgaagctggaaaaggctgagtgcttgctgaaagcctcacagctaggaagtagcaggactagaatataaatcagttgtgatatcacattccacatagacaccaccgtttttaaagcctcttttgtttgtttcaactgaacaaagtccaattgtgaacggttaaaattctataacgtatgttaaaaacaattgatacagtagctatgggggaaaagcgttttcagttaaacatggcttccctatgtggttaattatggttatatctggctacttctacatggtgacaaatttgtgtctatagaggagcaaaaactcagaattagcagtcacaaaccttctctttctttctcgaagatttgtatgggaccctttacaagatggtggactgagaatgcccagtagtgatacctcatttcattgtggtgttattaaagagacagtgattaaacatgttctttgaaactgactccctattattgtttgttagaatactctaaggaatccctttgtgcaagtttttgtaaaattctccgtgggacttgatgctgttgaacttttgaaacagatagatgaactcggtgagtccagattcaaaaaaacctttatttacctgtcatgtcagaaatgtgaaaagcattgtcccatataagatcttaaaatcctgagtatatctatccatctttctcctagtaaattgcacagttaaacgtaatgattatttggatacccagttcgtgtggttgttctcaataactataatgcaatgtattccgtgtaaatgcagcttgtccttcaatcacaggtagatttctaccagaggacactttttgggggtaacttggtgaaaagcaagtctttaaaagcagaagatgaaatggtttatttctgctacatttataattttatctccactggccttagtactgctttgactaactcagaatgtaaccagaagaggttacagagtgagaaaaacaaaagcaatgtggagactcaaaagaaaataaacctaagtcactgtacaaggtcaggtcctcctctcatgatcatttaaaagggacagaagaggatcaaagaaagctgtctgaacttatgcattccctctaccacattcctaccctcaacctaaggcatgcaagatatctaattcagtctgtgtctgattcctggttgctatgcaaccatgggtaagaggaagggattgaaaacatcagaatttgccagcagtagagctaatgcccctctttctcctctccagcactactgggacttaagtgtttaaattgtaaaccagtggggaggaattatgcctatttatattatatataattgtatgtattttatgatatcaaccttgtttgattaaataaagatattagtgatttattctctaaaagtatcatttgggtaaggaaacatttgatcaaaatatcagggataaactacaaagttcttatatactttttttcattcctaactttagatataggagatgagtctcagagtttaaaataagattaaaataaccatataagtgagacttgctatctgtataactgtatatttaatttaatatcaaagattttatactgtttgaatttggaggccactgactctttatagctttttgattccatctaccagcatttctgaagaatcctttgcaggtgtgttgattttcagtagccactggaggccactattcaaccacagttttacccctccccccacaaacatctatatcaagcaaaacattttaagttataatgagagatgtccttcaagaagctgccctctgtgagaaatttaatcttctattggatgatgatagagacatgtatgggttctgtaaagaggaatttatgacattcacagccttctcagtattcatgatcaagtcagcgaaaatttaattggccaagtgatttatgaacttacaattttatatttaccctttgtctcagttgatttcctcataaagatttatgaaattgaagagcaattaaattctttttcttccagagtaattacctgaaataaaatcttgatcatctagattaatacagatataagtagagataactcacagaagactttaaatcaaacaatatcagaaagttgtaactatgtgtcatagattgtcacagtctgctaagaagtgcttctgtattacaacttattaaatgatattttttatttgctccacacactctgcatagacgttcgttgcttaaattcttacatcaacactccccaaacaaagcaagcatttctgtttattcaaacttttcacctctagtttttagttttcttcctaaataattcaggtagaataattttaaaattattcacctttagtcttaggttaattaaattgtagcagagtagaattagcttttgaattagcttgtactgagcacacatgcatacattcttcgtatgtgagtttactgtatctataactaattcaaaattcttctcaataagcgtttgtacaactggctacatcttcccagatatagagtatttgacatttttagagtaaattctgcaagtttatattatttataatctagtttaatgtttaatacttaccaaaaaaatcagtatttttgtcccattactactagaaacaacattataatgtgctttgtgtcttttttttcttctttagatattctaaggctgaaattagagaacagcattgacctcattgatcaacttagcatactatcttccctgacagtgaatatttcctcctgtgtattatatgaccgtattcaggcagcagaaagtgtagataaaatggaaagagaggctaaaagactctacaaaagcaatgaactctttggaagtaagtgttattctactagaatttgagcttttctttgtactaaaattggccaaattcttcccgtcacttctttcatccagacctaaaaaaaagtagtcagggctggggcgagggcactgtcccctttgatgtccttggaaataagaacctttcatgtcgtcaaccaactatcttggttgagacgccttcaatatgtgtaattttgttgatatggttaaaattaaagctgaaaagaattacatattacagggtaaagttgagtccatccttataatcagtcaatatgtgtgtttaatttcagtaagtggcttagagtgaaatatttaatgtggccacttagtttgtgattatattctcaaactcctgcattgaatctttgagattgtcactttcaattaacaatcttttctgtaaattaaaagtctgaacttactgtcacattactaactcaattgcctgtttgg

SEQ ID NO: 25165 - DNA, 929 bp, Bovine  19866881388236
  misc_feature (1)..(1): n is a, c, g, or t
nagtggctaataaataaactcaggtaaatacaatgaaaacagtgtttgacatccatgacaaaactcaattcaaaatgttcagagaagggtcaatagtctaagcttttccattagtgaaatgggaatgttttgctcaaaaaactttaaaagttgtcacacaattcacaatctctttcattcagtaaatatttctcaagcctttctatgcttctgcaagtattgtaaaatgaggtagtaaaatttgtaactaacaagcccagttgtttgtctaaaagagatcaaaattcagtggtagagagaaaatatgtacagaaacagaagatacagtctttgagttgtgtttagaaggatagaaagtagaagtgggaaaagaaaattgagtatgtagatactagcaatgtattcagaaaaagaagatggagtaaaatgatgacagaatcataaataaacatcattgacccaacaattctatttctaggaattttccctacagatatgctaacaaatacgcagaactatgtatatataaatttattcatcatagtaaccattcctaatagcaaaagaatggaaataacctaaatgtactgcatttgggactagttaaataaattatgttcataatttataagtgaaacactatgcagccattagaaagaatgatgcagttcactgtatcatatttgggattacttctaatatttgttaagtgagaaatgcgaggttcagagctacatatgaagtatattaccatttaggttttaaaaaggaaatatatttttatgcatatatatgcataaactatttctaattatgaatgcttctgctaaaaaactgtatgtatttgaaggagacttttccctaaatattctttagtaccattttaattttaataaatgaagtgcatgtattacttatggaaattaaga

SEQ ID NO: 25166 - DNA, 1182 bp, Bovine  19866881404973
  misc_feature (1)..(1): n is a, c, g, or t
ncatccaagatccaaaaagaaatcatgaactgaggttgggccctgtgccagttttataacttgggtaattattaaatgtaactaaccaatattaattggaaaacaattttcttttaaactaaatgttttgatacaaatgcaccgttcaaatattagcccagaagagagatgagatttttataatgctctggatttcatcattcagttggttaaattccagtctatggcttctcccatgatacaaaagtaaaggatgatctagcttgagatggctgcctgtttgtgttgcacacaacatggtgatatttatgagttatctgtgacaaatgataagtgatttaaaattttataaagattaaaatatattctggcttctacatattatagttttccagataaacagtataggctcaacttcttactcttttaattcaaaagactgaataaaagacatattaagtatttatacaaatattgatatttccaattggaaaaattactcaaaaaatgaattttagaataaagcactaaagtggtagcaaaataaattttaaccagaatccaaaagttagagaaataaacaaatgtcatttacttacaagttggctttggttttggaggaaatttggtccgggtaatagccaaaattatgaaaatcataactggccataaaatcaagacaagtgtccaaagctgcaaagtaacgacagaaaaaatgttaattatattgctaaaccaaaacatctgacaagaagaacattattctacaaaattccaatacaaactagatatttgcctataaatgttattaataagaaaagaatgagatttttaaaaatgtaagagaccttgaaataaatgcaataaggaattttccaggtttaaaacctttaaatgatcttctgaagcctgctttccagtgacctttcttaactaccccaagaatgatgatcttaaaagtcaagtatgatcaggaaattcctaacttgaaaatcttagagcttcctgggtgtttgttgaataaggcttaacatgataaacagggcatacaaaacccaacctaatttcaaccaagacatatcttaccacttccagtattagcatgctaagcccaggtataaagattagtttgtgacattggataataactcaataaacattattgaacaagtgaatgaatga

SEQ ID NO: 25167 - DNA, 1337 bp, Bovine  19866881496030
  misc_feature (1)..(1): n is a, c, g, or t
nctcgcaatgcgggagacctggggttcaatccctgggttgtgaaggtcccctggtgaagggaaaggctacccagaattccatggactatcccatggggttgcaaagagtcgggcacgactgagcgactttcacttacttactctcacattatttctttatatggttattatacattaaagtttgtccaggtggccaggtcgtactagcagctgcaacaggaatagtaatgtaataataggattagatattacttcatatatcaaaccactgaaacagatggatatggaaacaaagattttaaaagtttcttctgctttaaagcaaacataagactttattttagaacaaaatcaaaaaccatgagtagcattttgactcttaagaaagaagagcattaccttttgatcccctggctaaattgccagtgacatttctcacgcatgccaaataaggaatataaggactatctgctgatatatttaagagggcattttcaaactgttccagtattaggagcctatagaattagaaaagaagacgcaaattaagtcctatagaaataaagtaaagctattttgttgcgatcctgtgagtccctagttgtctggcactggttgacttgagcactgaaaccctggcaagcagcacgtcttcccccatccagcccaactgcacaatggcagcactagtctggattctctgagtatttaaccttttccatgggcattaccttgatatttaatcactttaatatccaatcataagtgatcttacgatcatttctaggcacgtttacttgaaacaaaaatcactgggctagcgttgccagataaaagacagggatcccagttaaaactgaatttcagcaaaataacaaataatttttcagtgcaagtacatcccacaagtcttgcgtgtttctttcctttcctttctcctctaaatctggcaaccctctctctgaacttcagcttcctcttttgtcaaatgagagatgggggctgggtgatctgctgggtcccttccacttataacattctctaaataatttaaattcatgtagttgtgattacaaagaaatggtagaatccaactgaataatgtcagttcctttttcttctttaagcaaccaactcagagttccccaattaaccactttttgtatccctttcaaattgactgcatgtgaggacatagtctaatatttttgaggcaaacctatgtgggtaaatgtatggcatgttacacacgcccagtcacttcaactgtgaggctgcatctctattttgtaatttcttcccttagtgtctattattgaatttgaggtatagcagag

SEQ ID NO: 25168 - DNA, 1328 bp, Bovine  19866881522598
  misc_feature (1)..(1): n is a, c, g, or t
naataaacatattgttttttctctctgtttaagtaatccaaagatctttgttgctctacttcatgatgtcccacatttgggatccctggaggtaggaagtgcagctcataaatccatttcttccctgcttgagttctaaatagatgactgataggggcaaagctgaaggaagtgattcagcatgagagtaaggtaagcctgctaactgtgccctgaattagggagtctcatctgtctattataggtcccattggactggaatgacccacgcagggcatgtgacagcctgagaaaggccaactgcacggaggaacagagaagaaacaaaaatttccatggccaagctccatccctaggggagagaaaagagtgcaggcttgtctggttattcttacatatttacaaattcagtaagtcatcttacttctccagaggagagacaaaatcagaaaaagctcagagagttaccaggactgtgcttatggaaacttatcaggtactgagtaaagatgtcccctttttatttatttattttcgtgtatgtgggatatagttccccagccagggattgaactcaggcctcctgcattgggatctcagagtcttggccactggatcaccagggaagtccccaagatgtcccctttcttaaactattatcataatcattaatagctatgttctctagaaataaacctttgaaaaaaattttttaaatcttaaagaatgccaagatatggcatgtaaaataatttgatacaacttttcaagcagatttgtgtataatgaaatgtttcatggttctacctttgcagatgctctttgcaaagaaatgcatgcatgtttaacatttacctttgatattaactgtgtgagtattactattgcttcctttgacatttgagctttaacatttctatttagaggaattaaaaaaaacacaacctcaaaggagctttaattcattgtcatagtatgagttcatgtgagtgttttagaagacacttcagaaatggctttgagtgaatttcagtaatgaagtgcccattgagacaaagtttaagatcatgccatttgaaattaaaatcctacttgtggaaattgcttcaatggaaatacatattgaggtacaatgtagtttgatagaatgagtatgttagcagaattttcattgtgatcagataaagacctgtaattaaataataactagcaagataagaacaaaacagctacaatcttaagtacaatttgacttttatggcaatagagagaaattatagaggtagattttatttcaacataaagacaaacttcctaatagagctatc

SEQ ID NO: 25169 - DNA, 724 bp, Bovine  19866881535842
  misc_feature (1)..(1): n is a, c, g, or t
ntacattttggatcgttagttggctgaactgagggtaccagataaaaaacatttatctgcattctctgtgattccgaggtttgaacacatgcttttttgattccatttcacagtgcagcctctgggctctatcccacattacaacacagaggtgactgagaccaccattgtgattacatggacacctgccccaaggattggctttaaggtaaattgcagatgttcctaatctctagtgatatagccctgaggtgccctcgtgtttctggatgtggttaaaacaggatgtttcaagaatcgggtgacttgggttttatcctgtttctgttcatacctctctggccacattgtcagggcatcacaatacttctgcctccctgaattgctggaaagatgaattgaggctgtaaaagtgctttgcaaagaagaaaacattagtatgaagctgttatttgttgttatcttattttctctatcccttcccccagggaattacatttaaagatatatatagggaaaccacatttgttgtgttgttctaaataggtatcaagttcacaaaaaccaatttagggagaccaattaaactcagaatagctcaaaaatcacatttttattcaatcagtttcatctcaacttgttcagagccccttgggtgaatctcttaatagaagttaagattaagctcttccctatagatctggatacttgtttttttaaacta

SEQ ID NO: 25170 - DNA, 1338 bp, Bovine  19866881650429
  misc_feature (1)..(1): n is a, c, g, or t
ntaagactgatgtagttactgatgctaccaaatgtcctattttccagcagcagaaactaatactgagttcctcaatatggcatcatccctcaaagagagcagtcagctatttggtagcaagttaattacattacatcatctttactctgaaagaagcagctgacttttttgacagagagagagagagagagattgcaggcattgacttacctttcttgcccataaggcctcagctttatatagtgtttgctccattcatgtggcatcttatatatattgtgttagacaaggaacccatttgatgacacagtgttggggtgagggcatgaccaatggatccactgggcatgccatactctacaccagcaagaaagctgacatcaagctgaatgacagcccggaggcaaagctttgcaatgatggaatatatcctcaagtttttgccttacagtatgtatcagtgcttttcagccagaggcaaatttgtcccctgggagacatttggcaaattctaaaagatgttcttggttgtcacagctggggattactgctggcttctaatggatggaagccaaagatgccactacacatcttatattacacaggatagccccacaatgaaatatccatctccaaaggacaacagtaccaaagttgagtaatctgactttaaattgatggactcacggtgcaatttccctggagttgtaatacaacttactcacggattccagatcaatactcatctgggatccatgaataagaaacagaagtggcccatttaccatcacttccacctattctctatagcacttgcaatctcacaaacagtccctaataaatcccatgcatataacctctattgcagtctttttcatgcggaaccccatctgtgacagattataaattgagccaaggcagtagcaataacaataaagcctgcatagccattttagaatattttagggaaaaatagagttcattatcaattggatataaaaggaagggaaaatggaagacttaattataacttctaggtttacttggacaactgggttggcaatggctcattcatcaagataaggaatatagaaataggagaatttgagggagaaaatgaccgattttttgtgtacattttcatcatgtatatagaggaaaatgcaacaacatgtataaagttattaggccaaatcatatgaacttgccatttttataggtcagaaaactgtcaaatgttgccaatttcaagtggatcaacctagtaattacatattagctgctacatgggaaaatttactatttttattgcaacttatgtaggccatataagatttt

SEQ ID NO: 25171 - DNA, 674 bp, Bovine  19866881662312
  misc_feature (1)..(1): n is a, c, g, or t
ntcttccgcacaacgtgcagtatctgttctgatatcttttccgtaaacaaagtatggtacctgccgaggccccaaacagtccagtcaacatggagctggaaatgaagaaaccataagttaggtgtgaaccaaaactttgatctaggtttttggactaaatatatctcagctgttagcaaaaaatgttacggtgtgtcttcccagggcaggtcaagctatgaagtaaaatcggattaattgggagtaaaaattaaaattgcttttaagctcccaatactttagtgttacagaagcacatgtgatgatgatggtggtcgtggtggcaataatgacagaaagggttgggctttctaattgcaaatgcactcccgtcttcagcaagctcccacacatccctggcatcaggtagttcccataggccattaagcctcaaatttctatttcccacgtgaactttggtcatcttcagtcccccactctaccctgtgacttgaatattctcacctacagaactcctcatcgtacttcagatggtcagtaaactgggcagttatttaatatccatcttctccactaaaatgtaagccccatgaagtcaaggaaaggacattttttttttttttttgtaccactcttaccatctaactagtgtcttacacataacagatcttaaa

SEQ ID NO: 25172 - DNA, 724 bp, Bovine  19866882077813
  misc_feature (1)..(1): n is a, c, g, or t
natttgcttcactatatcatgttaaggatttaagtcaaagccttaatgtatattaaaaataaaaaaattcagttataaatattgccacagagtattaattttacaatctgtaagggaatttaaagattcttttcagttttagttataacaagagatatatggtggtggtggtttagtcgctaagtcatgtccaactcttgtgaccccatggactgtagcctgccaggctcctctgtccatgagattctccaggcaagaatactggagtggattgatatttccttctccaagagatatgtaataattggcattttcacattagaaaaaggatctagatacgtttattagttcactgaaaggttgaacattttgtcatatcatttgacacttaattgttcataagatggtcatccagatgaggtagaataaacttactttagcttttcagagtatcataaacatgaaaaacccaaaatattaaatcttcaaaaggaattcatgggcccatgaaaatatgtcacagattccagaatagtctacccttctactcaaactgccttggctataggaaacagaaaattacagatctcatatattctgctttatgattgaatgttactatgaatttgaaataattgctatggaattagtctcattatattccatgattttcattgttctggaggttccaagtgatcaagcattattttagccagtaataata

SEQ ID NO: 25173 - DNA, 959 bp, Bovine  19866880395118
  misc_feature (1)..(1): n is a, c, g, or t
ncatcacagatgtctcccagcttccaaaggcaacttcatttttttatcttttccttcccccttttaagcatccttttccaactcaggctcctaccaggtttcttctggaagccccatccttccctcctgaggatttgctccccaaactcccagcgtagctagaaaaatgaagcatgctgcctccggcctgcccactttgcctacaaagttcagcctcctcgtatctatatgggcttttggcaggataaacagataaaaggcagacggctttgtcatctcagaaaatgaaaacaaaggaagcaaggaaggaaaggaaagcagataaaactggaggtggttagagaaagattctcctgaaagccatggtccagagagctggaaccttccctctcccgccctcaggaagagttcttgtgcacagttatccagaggctgcaaccccgggactaattagagctcacaccctaaatagtaggcaccaatgacgcaggatcttatttgacctgtgcccagtgcctggcagagcacccaagaacaccaaaggtactcaataaatatttgtgttttgagaaaccagattcaaccaggaagaagcctgtggacagatgcaccttgtcgtcagcatgaagaaagtgtccactgtggcaaggcagggcttccatgcctgttttctcatttaatcttcatcattctgttgtgaaggatcagagaggtttgttcacttgccagaggtcacacagctagcaggaagcaggtgcaggcctggagagagatcctttcgtttattcattagttctttcgttcttctagtcctcactgagcacctactatgtgtaaggctctattttggctcagagaacgaaacacagagccaaaagagcgtttcccagtgatctgaataaggggtgggtgtttgaggaattggaaacatgtgggatgagttattaaaattcagtagg

SEQ ID NO: 25174 - DNA, 2435 bp, Bovine  19866880509941
  misc_feature (1)..(1): n is a, c, g, or t
ntgaaattcaccagggcttttttttttttttttggaatagaatgactagaggagaggctagagttgaatatttctctccctacaagtaggtgaggctctgaagaaaccccatttacaagttaagccctggcaaaatggtgtctcttgaggacaagccttgttaagaacagaaggttgtggtgtatttcaaaagggttcctttgctccatcccttagcaaaagcatgagcggacttctctctgatattcattgtaagagctagattggacttctggaggtaaaaactcacaaaagtgtgccttccctaagaccccatgccaggtcacgcctgggtcagtttggagttttcatctctcagatttgtccacattgagcctccagtgattcttcacatacagttcagacttctctaccccaacactggtttccatggaggttgctgcacctgggtttctgctcagtaagctgtgattctctgtatctgctgtctatctctacagttttggggggcagtaacttttccccatggcctcatttctctgaagaatttaggaagagttgttgatttctcagcttgttcagctttttatttgttattaggattgactggcaatatctaaattccttaccttcccaactagaaacccaaagtccatattgcttaaaaaaaaaataaaaagaatagaattagggattggaggctaattacaataattacagtattgtattggttttgccatacattgacatgaatctgccacagaggctaaagtatttaacctctaattaaaataaataaatttatataaaaaattaagtgattctagttttacatctcctgcattggcaggcaggctctttaccactagtaccacctaggaagcccggttaataacatcctatctttagaggagccagaaggcttctctcgaatacttctccagggactcggacaataaaaccctttatttctagctagttagagttgaatagcaagctgagttgatgcttatctaggtgggacataagtttttcagttctctatgatctgttctcagcatggcttatcctgttatttttcttgctttagcccttggagtcatttgaagttgtgattctttctttagattttgctcttctcccagctctcccctccctgaccccgcctgggttttttattttgtgtttggtctcagaatcgactctgagttctaaaccacatcatgactgttgtagcatgctttctctctctagaccagctctggtgtctttgatcccccttgctgaactaaaaacagatcagactgtgtttctccaggctcatctcaattgggctgcatgactgggcacatcagaaggttctcacattagggcatctgtatatttctggcccctttacctctccctgcctctctcctgggcacggtcctgaggtgatgggtggaacactggcagtacacagagcgccactgtgaccataatgatctgctggctccctgcccctgcaaacgtctaacctgcacagctgcagccacttagcccccagcagcagcctctgccccacggtgattcagagctcaatgcggaccacgctcagagaagtattaggagctcttggcaaaaagctctggcctcacgtggacaatcccagcaggactgcatcccagcacagagactgcggggttactctgaaatcagtgtctcctcttggatgtactttggaggaacaattgtagcatcttgctggaggctgacgagaacaaaagcaaataaaatcagggagtgataaatcaggtggaaggctcatcttctctgactggaggaaaggagcttgagaccccagtgtcctcagacagaaagagattaaaagagccagtagcctcttccctcctttcccatcccgtgaggcagaaatgacagatgctgattgaatcatggtggctaaacagggtaatcctgtaagagggctgagaagggatttaatcattgcctgctagtgccagtgtttgagtgaaaaagaacagtcactaatcaccacttcctccactccatttcactgcttttaccatccatcctacccaagtggcagaaactctagcccatactggaaagaggatggtcagggaatttattactgaagtccagaatatggtctggcttcaggtatggtttgattcagatgctcatataatgtcataaattctctcctttcttaatttttctgggttggatcccatttcggaatctctacctaggggatggcaacttggcttgatcctcatatccttccaaattcaagtccagtgagcaagaaaagagtatctgcaaaaccagtttggcgtgtggagtgttaatcacagaaggcccctatttcaatacagcagagggcctcttagtgctgtatctcttactgcatttttataagagcaatatat

SEQ ID NO: 25175 - DNA, 3363 bp, Bovine  19866880529739
  misc_feature (1)..(1): n is a, c, g, or t
ntccctacaccaaaagatctctgtcagttctgtaaccacatccacctccttcaccccagcaatcaattccccccagcttcatggagacataattgtcatataacattgtataggtttaaggtgtacaaggtattgatttgataattcatatattacaaaattctaatcatcatagcattagcatccatcccatcacataatcatcattgtttttctttttggtggtaagaacattatcagcaatctatttttagcaatagattcattgctaaaatatggaactgattcattggaaaagaccctgattctgggaaagattgaaggcaggaggaaaaggggacaacagaggatgaaatggttggatggcatcactgactggatggacatgagtttgaacaaattccgggagttggtgatggacatggaagcctggggtgctgcagtccatgggatcgcaaagagtcggacacaactgagcgactaacactttacactttcaattaataacagataaagtcataatttgaatccagagccatctgattccagggaaccaggctcttacccatttctggtccctgtggataaagcataaatgagtctatctgggagccctttttcaagtgggtggtttttgcagctgagacctacccagagtctgccatctcagggtctctctgccccacagcaatgccatgttttgagcgtttcctcattattcctaaacaaatttaatctcaagaaaataagatgtttcagtcctccttggaaatggccagctacgtagaagggactcaacaaaaccttaagttctagggtactagagtttaaataccatttaagaaattcttccagttaagcagccccttttagaaatgggaagaggcagatcagggaggttcacatcccctcccctgggtagaatattggagcattgggctggttaaacggcctgaagctcagaagagcggcctcagaccagtgagggagcccatgaacgcagcggacctggttttcagtgagatgactctggccttggaagcccattggtctgtcctgtcccttggggtctccagttagagtgtcttgaattaattctgggctgcaatcaggtactgctgctaagtcacttcagtcgtgtccgactttgtgtaacccatagacggcagcccaccagcctcccccatccctgggattctccaggcaagaacaccagagtgggttgccatttccttctccagtgcatgaaagtgaaaagtgaaagtgaagtcgctcagtcaggtactagaattgaattgctgaggttattctggacatggacagcaaatcttgggtagcttaagcctttaaacccccctccccctccacttaattgtgtgtgtgtgtatgtgtgtgtgtgtgtatgtgagctctgtattttgttctattgggaaggggcgtaagtactgacaacaaggacagggaaggtaagttttattgcaggatagaagagatttcacacgtggggcatccactctttcactgactgagtaccttgcacgccattggaccaagcaattgagacacttccacatgaccattgtaacaaccacccatcacagaagtccttatcaattccagctcacattttggggacctgacaatagagaccaaagtgcttgagccaaatccccattttctaggcatgctagaaactatgccatgtgaccctgaaggagttagtggaaagctgaagaatgttcttcagctcatcttagaagtcaaattaccaagtttccaggtctcctgaatggggtcatatcctgcaaataaaccctgttagcacattttttaaagtttatttttaattggaggataattgttttacagtgttctgttggtgtctgccattcaacaaggtgaagcagccatgagcgtacatatgtcccgtctcttttgaccctccctcccgcctcccacccaatcctgcccctctagggtgtcacaagcactggatttgagctccctgtctcacagagaaaatttcactggctatctaattttacatgaggtagggtatatgtatcaaatctcctctcaattcatcccaccctctctttcccgtcctgtgtccaccagtcagtcctctgtgttagcacatttgacagatacttgggatttactggcgtcatctcatcttcccacccagccttgccccttctctaagccaatgtcttttacaaatattgtgctgtgacactcgtctctgctcccattaatagaaaagccagctggagtccagagagtacaagtgatgtgcccgagctcacacagcagtgagcatcgcagccagaatttcaacctggatgggtaaaactcaggagcacagcgctcttccgatactaagctgctcttctccttattagaaacacaatgtaattaagtgctcggggcttgccataattcaaaatacacttgacaccacaatctacccgagacaccatccataatggaacaatgacagggaactgccctcttggcaggtgagattctattggtctggctccatcaccaccattactcgttctgtatctcgattatctcccccataagacatatttacagcaatattaaaagggagatgaagggatatattatcttccttatgtacaacatatattacacgcccatgcccgtcacagcccagatgatgcctgacaagtcagcctgcggtgataggagcaaagtctttctatcacttttgaacaggccgaataccaccttgtgtgatgggaggaaaattaccatcactgtcatcagccccatctcacagggaagaccaccaaggttcagaggagtgaagtgattttctgtaggtgtcccccacctctaggactagtgaaagcaggacttgtccccagaccttccagcatatcctttgagatccttgtattacaagatgtctttggggatgtatttattcacttattcattgattgatttgtttaatatatattgagtgagcacctgcttcaggccaagtgtgaggtgctaggaggaatttgtgaaggaggccatctagactccctgctctcatagcgaccagagttgggggcttctccagcttgattctccccaggcaacattgcacaaagtctggtgacactttggttgtcacagttagaaggatgctactgggtatctagtgagtggatgctacatatgcttccaaacctcctacaatacacaggatggccctccaacaaagagctatccatcctcaaatgtcaataatgcagattattgagatacctcggcctagagcatattgaagaggacaggattaatcaaatgtttcattcaggaggataggttacagtaaac

SEQ ID NO: 25176 - DNA, 2474 bp, Bovine  19866880620039
  misc_feature (1)..(1): n is a, c, g, or t
nctcctctgttcatgggattctccaggcaagaatactggagtgggttaccattcccttctccaggggatcttcccaacccagggatcaaacccaggtatcgcacattgcaggcagattctttaccatctgagccaccagggtagcccaaggtccccatgaaagttaagaaaggttagccccaggtgttctacgatggtggaaagccctaaaaatattgagtttagttctggcagcttcctccaatctttatctccaaaccaccagatggttggctggtagggagaccagataataagggctctggggtacatgactcctgaggagagtttggacattatcccatctaatcctggcagcaaccccaggtagcagaagttttgtccccattgtgcagatggagagactgaggctcacagaccataatccttgcttggaatcacacagcttctaaataggaaggcaggcattggtcagtccaggtcagttgatggcaaaatccaggctgcttccatcacacagacaccctcttctgagagtttgccactccaagccctgtgacctctccccaccacctccttggcatccagccccactcctcctgcccctaattggccaactcagtgttcaccccagtgagaccatccccctttatttaaaagctcttcagtagatggaaggcaacttggcagtaacctctgcacagagctttaagtacacacactggccaatctttacagatttaattgtctataaaattactctgtgcgcaattcccatatggatcctcagtgtcccgcatgcttcttggctggacctatctcccaggctagggtacagttggttcaacacaaaacaagtctaccagacagatgtgtgacttgagcaactgataggccacccagggcctcagtttcctcatctgtcaatggggacaaccccagaaacttgccacaaggtttggcaaattcaatggaatgatgaagagaaagctttcagtcctgtgcctggcacacacataatgtggtagctaatatttctgagatttcaacccatgttctccccctccttgatttcctggaagcctttctccccccattccccactgcctcccatatttggtcatacacttatcatctcagggtacaggtgatttacaggatgatatgagatgcaagaaaagaggctttaaagcttcagaacactgagcctggatgaattcaagatttcacagtttccatcataagaaatattctggagaaggaatagagggagaaccagcacatgagcttggagccatcctcctgcaagtaacagaccacccaacacaaactggctaagaaataagtcaacgagaggactgacagggccagagggagggcaactccacgggtagttgaccaggaactcaacaacgtcactcaagttagcccaactgtcctccctgccttcaatggaagctgctcccaaccaaggctggatcccctggtagagacaagatggctgccaggtgcttccggggcttcctcacacaagggtgggtgggggatgggacagcgtgtctccagatagctccgcccaggaaaccccaaccaagatcacctctcacctcattggccccaaatgggccacgttcctgcctctgaaccaaccactgcaggaatgagttgtgccgattgggtaaatccttcccccgtggggttacaggtctctcccctccaaaccctgagtagctattggagtaagagggatattctttagtgagggtttcaaggcataaagcttatgccacaatgaacagactggacagagaatagatgaagagcttactaaaaaccatcttctctatactagattactcattgtctgaacaatatttgtggagtatacttcaacatttatttattgggaagtttctgtgggactttctcagccaagatagttgtcattatgtctttgacagtgtgacacccagaggtgacaccgtcctccagggaggtctgaccagcacagagcaccagaggactgtcagtgccagtggtgataataataataaatagctcacatttgtgaagaagttactatcttctgagaactgggctgagcatataactataaatataattcttttaatccttctgaaatgataaaaaaaaaatccttgtatgaaagtaggtcctcttattatccctgctttacagatgatgaatcagaggcacagggagtagaattaacctgcccaagatcacacagtcagtaaaacactgggatttgaatccaaacagggttactcaagcttggatgttaaaatgcctttccttctatggtggcgcagaagttcacacgagaattttgacaggagtcactcattcacttggcaaacgtttattggctgtgatatgccaacctataaggcatttaaaattcattcatttcttcaactagattttttggaatgcttattttctaggaatca

SEQ ID NO: 25177 - DNA, 752 bp, Bovine  19866880673934
  misc_feature (1)..(1): n is a, c, g, or t
nagagaaaatcccctggatgttcttaaaaatccacaataatagaaacaaacaaacaaacaaacaaaaaagtgtgaagttgaagtggtttctggagtgtgtctgactctgcaccttcattgtatggatgagggaactgggtcttcagggagatgtaatttctcaacatggagttggatggatgaagactggaatctggccacctcattttggtctgagaggtacccccccccccccactataccatgctgcccagaatcatattttaagctcacacacttttttgttgttgttgttgctgttaccaaaccacaagcagtgtaatatgattataaatctcagaggcatggactggcattagtttggagctttgttatttcatctaactggttttagcaggcccactgtattttaatatgtatttcacctttatttgatttcacggacaattgattttttcgcaaagcaaaacaaaataaaaaagttttcccctgttcttcccagcttgcacattttccagggaaaggaagtccattagactttgtggaaggcttatctggagagcccatcttcccacttctgatgatattaacatggcatacaccaggggtcttaccagatgctctcagggacacaataccaacagtgaacactaaaaatttgggcaccgtgggagtgaccagtggtcagtgccacctggcttctgcggggcaaaagaaaccaacctctagggctgataagattgttcctgata

SEQ ID NO: 25178 - DNA, 990 bp, Bovine  19866880751268
  misc_feature (1)..(1): n is a, c, g, or t
ntatatgacagagcaaccccagccttgatggactccaacgtaagaccagggacaggcttcagtgatgactttaccaacaatcaatccagaataagacaaatttaaaaaaattccccccattgtccttaacacctcatcaagcaaaaacttacaaatggaatataattaaaatcacatcttctttgacccaattcaaagaaatcttcttaaaggcatgctggaattgtgatacattgagcaaggttctctgggtgccaggagctgctactggaaatatagaatgaactggagggtatccagacagttgcaggaacccccaaacattaattttagtcacagttggctgcaccatatcaacctataaacacctctccactttcaattaacattgctctgtctcctgtctcgctgaatattatatttaactaatttaagaggattggtaaagagagttttcacacttcacaggaaaacataatgaaataattatacctctacctacaaaaggcatgagaatattacataagcagccttcaaggcttttcaactaaaacctctttcctgtatcttctgtctgagggttcctgcctgaactttcacttaaatgcactttgtttttacatctttatgttgcaaaatgttagattacttcttggaatttcagtacttgtatcttttttggccacagaaggtactggctgagttgtacacatcaggtgtgaataggtgcaggacaagctgggacactgggcacttgtgtggtggagagaaatggaattgagattggggctgggaaaagtaatccgtaatgctattcttaatatagacagggcctgtgaaacaaagcttaatgttagtatcgtagtccacttatcagtcagctaatgacacaatagtgccttttctcatgtttatggtttctggagaccagtgatatctcaaatgactctatcaggttgcagattgaccggccttgcttccaggctatag

SEQ ID NO: 25179 - DNA, 831 bp, Bovine  19866880761292
  misc_feature (1)..(1): n is a, c, g, or t
natttcattctgcgcatttatagaggaagacacagtagtgcagaaagacagcatgatgtgatggcagtagtgcagaaagacagcatgatgtgatgcaggtcttcaagaggggtggcatgacacaagcaaagccatggagctccatgtgggcacctgaggctccggcatgaaggcaggggtagaggccacctggggtcccagtggccaaacatcgctgggagtcaggttctgaggtgttcgcgcttgtgggcaatggggagccctcgaggcatctttggctgtatttctgctgtgtcttaattcttttagtaaggctaatttcaactccatcaacacagtaactccttgcttgattaactctggtttctctatatttgattaaccagcctcctcactctacaatgatacgagagtttactaagttacttttggaaattcaaatgctgttctctacacagcttggaaggatccacagggagataggtttacataacgttgtcactaaaccacttggttatcttaattttctcacttccttccttgactgaattcaaaaagaaggtaagagcctggaagctgggaaacagcaggaaggtgtattaaccatgattacaaagataacttctattttctgagtgctaagtatgtattgggctactgctttgcctgcatggctgtttccatcatcacagtggccctgggggagttgttatttacatttcacagaagaagctagctgacagaggtgaagcaattaatcaaagatcacagggttagtaggcagcaaagatggaatgtaaacacagcaatctgagtcctgggctcttaatt

SEQ ID NO: 25180 - DNA, 1068 bp, Bovine  19866880792856
  misc_feature (1)..(1): n is a, c, g, or t
ngcctttgttttctatgctataaagaaaatgcaaaaggaaatccttactgccagaaaataacccccccaagggtataccaatgaactctttgcctaaaaataaactcaatttggcaagagccacctgctgtttcttgtaaagtagcaggggaagcaaatttgaaagcctcagggattcgtcctctttcacgtttctttccaatctccctatattctcttcattttaaaatcagcatcactgagatacaattaacatacaacaaaatgcatgtattttaagtatacagttctatgaatttggcaaatatgtagacctatgtcaccaacatcccaataaagatacagagttcttctttcccttctgattgcttgcttatgagcctttgcaggaaatctcctctaacttcacattccaggcagtcactggtttgacttttttcactatagttttgccaagactttgaattaatggaaccatgttttgttttttttttaaatctgacatcatgtactgagcataatattttggagtttcattcatgttagtctgtgtatcagtaatttgttcttttacattggttaaaaatacgtcatgtacaaacacatcacgtattttaatgcattcacctagacatttagttgtttctagttcttggttattatgagaaatgtttccataaaatattgatgtggaaggtttttagggaacatagaatttgatttctcttgtgaattgctaggtcagatgagaaatacatgtttaactttataagaaacctccacatctttttccaaagtggttgcaaaggttgagggttgtaatttcaccacatctttttgtcactgtcttctcccaatatgtcctcaggcaaccactggtttgctttctgtccctagagcttacgctggccatagcattctgtacgctataaataaaggcaaaaggagaagagggtggcagagaatgagacggttagatagcatcacccactcaatggacatgaatctgagcaaactccgggagatagtgaaggataggtgtgctgcaacccacggactcccaaaaag

SEQ ID NO: 25181 - DNA, 922 bp, Bovine  19866880815649
  misc_feature (1)..(1): n is a, c, g, or t
natggcagtgtgacacactcgtcttgcctggggccttttgacaaggtttttttttttttaaagtgctagtgtcagaacttgaagaatgagtgtctacttgagataaaatctcagagactgtggtggaacactcttttaagaaatgttatatctcctaagctcttgatgtctcagaagatgatattgtatgaaaaacaaacatcaatgactctgagttgaaaagagactcacaaaagtcaaattccgaaggcaaagatgttgtgggatgacttgaccaatttattttgctgatgtttaccattttatatatgcacaatagtgacatatgataaaaatctacttttaaataagtctaagagagccctttcaatacacataaaataaaaattctaagtgataataaagcattgtgtcttggtttagttggcagtgttctttctttctcagtggtacataaagatgcatcggacaatcagtgacatctaagatttgttgaaatatggtccttgttgatcccaggaggcagaatttggtaccaccattagctgcttgggttggggttggtggtgcctggaccccttgcagagcctgctactagagttggagggcctggcaccattctgggggatctgttctcagaggccccttctgtgcctgaggaactgggctttgactttcttctctgcagattctctttctgacagctcctggtttatggctgctcagtggagctgatagagtttaggataaacgcaggctccacagaggggatgaggcatcctcagaatgtaataaagagaaagagagagagctccccaggtcccttccagggaaatcaagtgaaatttctggaatgaagataaagacagctggctgtgctcagagggtctgtggggccagactcctacggaaggtggggagg

SEQ ID NO: 25182 - DNA, 1319 bp, Bovine  19866880832086
  misc_feature (1)..(1): n is a, c, g, or t
natttgtaaatcacgagagggctaagaaaacaagtctgtgtcattttgggcccacctgctgccttgtcataacctctggccaggaggctggaatccgagattagttccactagctttgattaagtcctgctgtttttgccttatagaattcttccagcactgccttaaaaccaatcaatgggtgatgatatttctccagattctagtggatccagcccattgcaaacctggaacctaaaagttcctgttaaaagtcctaacccagcactgggaggagcaagaaatagctattatttccaacgccttcatgtcacgatcagaacattctctctctagtctcctggctaatgatgctcatttctggatctctgatctctaaatctcacctctcctattcatcttccacatagcatcagtgggatcttcaggaaatgcagatctgatcatatcattcgtctgccctctgaagagtatccattgccttcctaaaaagatcagcctccttagaatcacagttaagatcttatgtaatctgaccagtgcttagctctcctgcctcatctcccctgacctttagcctcgcataccttcatagctagggatctttggaagcggcaggaagcgggtcccactaaccatggcagagatggaacaataacgactgctgtcacctgactgtaagctgccactgtcacatgcctgcatctctgtttctccacatgcccgattcaggctgttctcttcttgttcttcttttctttttctggctgcattgctcagcttgtgggattttagttcctcgaccagggactgaaatccggggccacagctgtgaacgcatcgagtcctgaccacgggaccgccagggaagtcgcaaggttgttcttaatataatagccaaagtgatctttttaagcttgaatcagtcagtgcctcacccttgtttaaaatcctccaaggactctttcatttcattgagaataaaaatgaaacctccatcatgatttgcaacagtagctgacatttatggagtgcttatgtaccagacctttttctaagcaattgacatgtattaacatgccacaacaacctcggggggggtaagttctattattaacccccgtttagcagatgaagtgaagtgaaagtcactcagtcatgtccgactctttgccacacaatggactatacagtccatggaaatctccaggccagaatactagaatactggactgggtagcctttcccttctccagggaaccttcccaacccagggatcaaacccaggtctcctgaattgcaggtggattctttaccaa

SEQ ID NO: 25183 - DNA, 1625 bp, Bovine  19866880832127
  misc_feature (1)..(1): n is a, c, g, or t
ntgccaaaggggaagggggttggggagggatggatcgggagtttggagttagttgttttgttgctgttaagtctctaagttgtgcctgactctgtgaccccatggactgtagccctccagactcctctgtccatggaattacccaggcaagaacactggagtgggttgccatttccttctccacaggatcttcctgacccgaggattgaactcgcatctcctgcattggcaggcagattctttatcactgagtacccccttccaggaagcagccatcacagaaactggggttaatagatgcaaactcttgcatatagaatgaatggacaagaaggtcttactgtatagcacagggaactatattcatatatcctgggataaaccataaaggaaaaacaataaaaaagaatgtatgtatgtaaattgagtcactttgctgtacagcagaaattaacacaaaattgtaaatcaactatacttcagtttttttttttttttaaaagaaaaaacccaaagcaaaaaacagtgcatcactgagttgatagattcctgctgtgggtaagtggggctcagtcctgctggggaccctctgaaagaacatcagctgtgtccccttgtgggataagcaagctaggatactccacgcagctctgttcctctggtcgggggttggtcagggacactgacacccaggcacattccggctgccccaggtgtgggctgagcattctgacttgagctcagaccaccctcagaaggagagacactgtctgcaggtgacctccaggtgggctcagtggatgaaaagagcacgtgcttcctgcagcgaaactgacttcagagttttaactgaactcccctgggtcggattctgcctgtcgggtgcattacttagcatgctcagtgtttctaagacacggaatttgaaagcaaaacctctaattcccacactccctctactccatattttctgagaaacatctggcctgcttcatctatttcgccttcctaccggggccctaaaggcataaacctgtaggacgctgaatgagatcgactgtgacaaactcccttccaccccgtctgcaccagagtgcctgcgaggtcaggaatgtgctggcagccccagtgacctctgggacagagcagggcagccttgcgcccccagcatcattagaatttccatgtcactgctgctgcttctggctttggagccagctccttccaagtagtgaattaatgcatgccagtctctcagtcatgtccgagtctttgtgacctatggactgtagcccaccaggctcctctgtccatggggttttccaggcaagaataccagagtgggtggccctgccttcctcgaggggatcttcctgacccagggatcgaacctgtgtctctttttgtctcttgaattggcaggtgggttctttactactagcactccctgggatgggagctccttccaaagcacatcgataataataatacttgtgtagcactcatagattgtacagaactttacaggtgctgagcagcagtggggctttttatatctccatgtgaaccagtcgagaaagtaattcaaacccattttgcagatgaaccaacagaggcttggagag

SEQ ID NO: 25184 - DNA, 2704 bp, Bovine  19866880846144
  misc_feature (1)..(1): n is a, c, g, or t
naggagggcatggcagcccactccagtgttcttgctggagtgttctctcatggaccgaggagcctggcaggctacggtccaaagggtcacaaggagttggacacaactgaagtgacttatcacgcagcacatacatttccacaaacccctaagattatggatggagataagcaatgcggtcatatcttgattctcatttgcctttgtttcttgtgggaaacctcacagggaggagtggctctggtttgtgataaaatgcggtttggatatccctacattcatacaaatggaataatataagattaaaaaccaagctatgaactattgccaagggggttctaatcacggcaggcaccgtgtagtgaaaagaacatgaattttgcatccaaaagcctggttctgtcatgtcataggtgtatgacccttaggccaatcacttgacctctctgaatcccagctttcttttctgcaaattgggaaaaattaattcttatttttcaggatcattggaagaattaaatgccataacatacaaaagtgtgagacacataataggggcttaacgagcatttgttctcattcacctgagtcttcttgagtcacgggtattttggacatcgataattcacattctattttggatactgtccttcctgctttttaaaaattcaatttttttctgactataaaataatatttactcattgtagaagacctaaaagattatagacgcatataaaaataaaatagaaatctcccataaaaccacccattaaagatttcaactctatatattgtggttcacttccattctgtctttctttctgtctgtctcactttatcttgtatgtatgtgcaagtaatcagattcatcttatatacagaattttctgatttttttcatatagtattaaagttcttctctctgtgggttcccccctcaccatgtttaagagtaagaacataccaatccttagagtgagaccagcgtggatatgagaattcactgtgtgatcatatcttgggtatttgacccttggggaatcccaaatcttctttcacagggttagtgtgggatttaaatatcaggtccatggacatcttagcagagtctctgaaacttagtaactgcttataaatagtgctggctaatactatattgattagacttctgtgtcagtctaggttacactacaatgacaaacaggcagcatctcagtgactctgcacaacaaaactctgtttcttaccgtagactgaagccacgtgccgtcctgggcagctgtcttcacgaggtggtgtggagctcccgggtacttccatcttagagcatttccatcacgcacatgtttccatgaccgccaaagcaaggaagaaaaattggaagatttcacactggcaattaaatgctttgatccagaagatatatgcatccattctgcttacaaccaattggccagaactaattgcatgaccccaccttgcagcaggaggtgtgtgtgaagaaatgtgatcctctcgggtacccagaagaggaagagtctcccaaatcattgagcacggagagtccctgccgtggaattatctctagcataagattatttgcttttgtgggaactggtgcaatttaattcaaggtcagtcttactgtatttatgcagaatgagtcctcaaccctgacctggcaaggagaagaaaaagcagctgatctcagatgcacaaatgtctctgggtatgtctaaagctgaggttcccaccagtgtaccgatgccagttccctctctgggtctgagttactgccctgatgctcagcgctgtgaacggtgcagttaagcgaaagggtcgggttgaccacagtgcagcattgcatcagtgccccgtcatcaccctgatatacagcttgtcccgagggccatcattcctggaggagaatgcatcaggtcaagctctggcatttaataccacatccatcacagtgcagagaacactaaggaggtctgagccctggtaagctagaggctgggaaagggctcagcggctcctggagaatcatcacatctcccgaaggacctgcaaaaagtttcgcttcttggttttcattcgtttttccttctgaccatagtgaactccccgtgactaaaggtatgcaagttgaagcagactatttggttgtcatgagtatcgaacagactacttgtggagcagtgaataagtgctgtcttagttggagttccctttgaagtaaatcctaaggtgggaatttgggtgcacgtagttcattatctcaagatgccaagacccacaatgggggtaggtcgtgagacggaaggaagaaaaccaatagacagtgcagggcaagacaaacactatttgatgccacataaatgcggaatctgaaatgcgacacagatgaacttacctgtgaatcagacagactcacagacgcggaaagcagactcacagacgcggaaaacagtctcacagacgcggaaagcagactcacagacgcggaaaacagactcacagacgcggaaagcagactcacagacgcggaaagcagactcacagacgcggaaagcagactcacagacgcggaaagcagactcacagacgcggaaagcagactcacagacgcggataacagactcacagacgcggataacagactcacagacgcggataacagactcacagacgggaaaac

SEQ ID NO: 25185 - DNA, 1086 bp, Bovine  19866880870044
  misc_feature (1)..(1): n is a, c, g, or t
ncccctctgctgcagccacggcaaactcccttctatttgtcaaatgaaccagtcccttttcataccactgtgtctctgcgtgggaggctttccctggtttttaaaaaacgttatgtacttagctgcagtgggtcttagttgcagcatgtgggctctctagctgcgtcacatgggcattggctcatttcctctgcagcagcatttgggatcttagttccctgcccaggattcgagcctgcatcccttgccttggaaggtggattcttaaccactggaacaccggggaagtctcacaccttccctgtcttatccttcagaaactgacatagtcatccttcagggctgacttagggtttactctttctaactgagctcctccagccttccagcccccttgctcctaaggcaggttagtcatgaattcctctaaaacttaaagctcttggcacgagttctctagttagaacattgtactgtagttatcagtggtaaagaatccgcctgccaatgcaggagatgcgggttcaatccctgggccaggaagattccctggagaaggaaatggcaacccattccagtattcttgcctgggaaattccatggacagaggagcctggtgggctacggaccatagggtcgcaaagagttggacatgacttagcaactaaacaagaacaacaatagttatctgcttgcatatctgtttctctcactagacaatgagcttggaggagaagagtattagtaatcaagtagtgtatttacatatacaaaatatatgtaaatgaatacatgtgtaaatagcaggtacttaacacacacaaatcaactcaatcaatagaggggaggagggtgtctgtctgtaagtccaaatgcagttcagccaaagtattggccccgtgccggtgatgagatcagttattcccacaatccccaatctgggaagacaatggatgtggtctgaaagaggaagaaaatttattctgagtggtcccagaggtcagaactaagaccagtagctggaatgatctggggcctaatatcagttctgttacagatacaatttcctttcttcactaaagacat

SEQ ID NO: 25186 - DNA, 1746 bp, Bovine  19866880870785
  misc_feature (1)..(1): n is a, c, g, or t
ntgggttgagctccctatgttatacagcagcttcccattaggtgtctatatcacatatggttatatatatatatttcaatggcattctctcattcattccatcctctccttcgctcactgggtccacaagttcattctctctgtgtctctattcctgccctgcacatagtttcagcagtaccatttacctagattccatataaatgcattaacatatgacatttgtttttctctttctgacttacttcactctgtataataggctcttggatcatccacttcattagaactgactcaatttcattgcttttaatggccgaatttctcaagccttggaaaatcttccttatgtagatgtgagcaggcacagtccttgtggccgactcttttcctgtgtaaggaagaccttctctacttcctctgacgttccggttcactatccctctgacattctcctgcttctttcatgtggatcctgctagaatttcaaaacaaaaagctgtctctcaaattggccccatccttcctctcccacatgcagggctaaagctgcttcctggagcctcttaggattcgcctcatctgctttcccttttatttctctttcctactgtttcttttctaactaaaagatagaattttttttttttaaacacctccattcattagagtactttttttttttcaaagtccaagccatagttttctgtctgcctaccagcactgcatctcccctgctaactgcgttcttttccaggttcctgggcaaacctgccttctagagtcagaatgatacaagaacttaccattttagttttgtttcatcccttgggtttgcgataactctgctgaaattttaacagcaatcgcaaccacaatatgagggtgccatctgttgcttctcatgagccaagtactgagtgttaagcactttgtggtgggcagtatttgtttttctttacaaatgtggaccctggggtcaatccaattaaaaaaaaagatattctgtctacaataatatccctattcctatttatccatttgttgataaacacttccaacctgtgtgcttgaatataccttctcgatgacccatccccaccatcctgaataaggcttagtagtgtgttacctcctcacatgtgaataaaagcaaaaaaaaaaaaaaaaaaatcagaaagaaagtacatggtagagatttccatgtggtaccccccaaatccctagctctaattcataatcctggctggattaaagtgaacttgacctggctggattagaaagggatatggatgatcacaggcttccctgatagctcagttggtaaagatttcacctgcagtgtaggagaccccggttcaattcctgggtcaggaagatccaatggagaagggatagactacctcctctagtgttcttgggcttccttggtggctcagatggcaaataatcacctgcaatgtggaagacctgggttcaatccctgggttgggaagatcccctggagaagggaaagactacccactccagtattctggtctggagaattccatggactgtatagttgatggggttgcaaagagtcggatatgactgagtgactttaactcactcactaatgaatgatcacactataggctctgaacaaggtctcccaactgggatctgggctctgtcttcaagggactttgtctaggacacagctgtgagatgaaatttaaccctccttttgctgaactccctttg

SEQ ID NO: 25187 - DNA, 3060 bp, Bovine  19866880959188
  misc_feature (1)..(1): n is a, c, g, or t
nattgaggcaatctggagaatgcaagccgattttctggcttttcagaaaaatccagaaattcaaattttcatataaaaatcccaattaaaaaaataagcaactaatttaaaatgatttgaaacactatataggccattaaaaaagtgaaagtcattccatcatgtccaactctttgccaccccacagactgtagcctgccaggctcctctgtccatgaaattctccagacaagaatactgcagtaggtagccattcccttttccaggggaatcttcccaatccagatgttgaacccaggtctcctacattgcaggctgattcataaccacctgacccaccacggaagccccaacatggacagtacaaattcataattctagtatccatgactttgagatctctgccataagacaattaacaaaatgaaaagacagcctacaatttgggagaaaatgcttgcaaaccacatatctgataaggggttagtatccaaaatatatactcaataaatcaatagcaaacagatcatcagatttttaaatgggcaggggacctgaatggacatttttgcaaagaagacatacaaatgaccaacagggacaggaagaggtgctcaacaccattaatcatcatagaaatgcaaatcaaaaccacagagagctatcacctcacacacctgttagaatggctaccaccaagaagagaagtgacaacaggtgttgacaaggatgtggcgatagggaaagcttgtgcactgttggtggggatggaaacttgtacagccattatggaaagcagcgtgaagtttcctcgaaaagctaaaaatagacctatcccctgatccagcaatctctcttctgggtttatactcaaaggaaatgaagtcagtatctcaaagcaatgcctgtactctcatatttattgcaccattattcacaataaccaggattcaggaacaacctacgtgtccatcaacaagtgaatggataaagaacatatacagtaggatattattccactttaaagaagaaggaaatcctaccatttgcaacaggtatgaacctggagattgtgctaaataaattgtcagatgcaaaaggaaaaacaaactgcatgatcacgcttagctgtggaatctaaaagtcccatacatggaagcagaaagcagaacagtggttatcaggagagcgagaaggaaagggcatatgttgatcaaagggtgcgaagttgtagttacataggatgagtaagcgcaggtagggtctactgtataggatgaagtgaagtgaaagtcgctcagtcatgtccagctctttgcgaccccatggactatacagttcatggaattctccaggccagaatactggagtgggttggcctttcacttctccatgggatcttcccaacccgggtattaaacccaggtctcctgcactgcaggtggattctttaccagctgagccatgatgtgcgtgctacattgcttcagtcatatccaactctttgcaattccatgaactgtagcctaccaggctcctctgtccatgggagtctccaggcaagaatactggagtgggttgccatttcctcctgcaagggatcttctgactcagggatggaacccatgtcgcttaagtctcctgcattggcaggcggattctttacaactagggccacctggaaaacttgcagcatgacgactaaagttaataatattgcatttaatactgaaaatttgctagatctcagatgctgtcatggcaaaaatgctaactatatgtggagatgatactgtaattagtttgactatattaatcatttcactagatatgcgtacttagttgttcagccgtgtccaactctttctgaccccatggactatagccctccaaggcacctctgtccatgggaattctccaagcaagaatgctggaatgagttgccatgccctcctccaggggatcttcccaacccagatatcaaacccaggtctcccacattgcatgtggagtctttatcgtctgagctacaggtatatcaaattcaccatgctgcatacctcaaatataagcaattttcattttaaaaattacattataaaataggagccaggaagttaggattgggacccaggggttgggtttggtttctgcagggtccccggagtttttccctgatattttcgaagtcagagttattcttatggtgtctgtaataagcagcccctctttccaggcttttgagagctgtggccatggctgacacccataaccttcgcagaatagattcttcacttcactgtttatcctgtctggactggcttctgtggtccagtgatttttaaacctgcatgcgcttcagagtcacctggaaggcttgttgaatcataaatttctagactcactcatgaagtcactatttcagaaggtggggtggggtctgggaatttgcgtttctaacaagttgccaggtgatgctgttgctgctggtacagaaacctcactgctttaaccaaagtggcagtgtcttagagatgaggagagatgcttgacttggggaaagcactggaactcattaaagggagagactttttattacagccctaggaagagggcaaagggtcctttggcatggcaaacagctggctctggccacacagaggtgagaaagggagaggctcagacagaaccgtgtccagccagcagaggccagatagaactgagcttagcaaagctctcagccacttggattggaattctgatgatcagatcataaagaaacatgaacattttatgtgttcttgcatcttccttgtttacttcccaatcccctcacacattttcagtgatgctctttgtggaaatgtcagcctgtctcagctctgctcaagggaacaagaaacagtggcggctcgacttggactaagtgttgaagggggagcagctccccctaggggccagcaggatggagtgcacaggggaagtgttgagctgggaaggggggtgcttcttccttcagtggccacttactgggcacctgatgtatgagtccaggcaagg

SEQ ID NO: 25188 - DNA, 916 bp, Bovine  19866881028190
  misc_feature (1)..(1): n is a, c, g, or t
nacttggcaaagactccatgctgccagtgcaggaggcctgggttagatccctggttgggggactagatcccacatgcagcaactaagacccatcacagccaaataaattaattaattaaaataagataaagtaataagaggaaaaaaccttgacttatatgaaatctgagaggaaaccacaaatattaggaaaacagcataaataagctcaaggtcaggacatagcagggaatgaagaactatttgtacagggtgctggtttggggcatgaatctgtaatctcttgcttgtagataaagtgctagtctggccatgtctcatttcctgtgtcattcttgtcagaatctaggtttggaactttaataacagcaaagtttttactgtgagattgatgcatatgaaataatccaaatgaaaactgaaaaaaaattgggagccatttgtactgtacagaaaattgatccaagagttaaatgggtttgaagagttagtctcagaaataatttctccttgaaaatataggaactatattagaatcttgattagaatagttaaatcatctctctgtcttaatacttacaatggtttcaatcactcttagaatgagttctgagctcttatctaaatagtacatggtctggttcttgccaacctatttgatgatgtggtttatatccgctttctgcctaaataacctcaagtcacaacagcctctttttgttccttaagagtcaatcttgttcctattcctttgtacatgctcttccctctgcctggagtgctgttcctcatccttatcgtgttcccggtgcaagcatcccctgctcagagaagccttctcggaaaaacccacctaagataactcctacattcactccctgttccccggatagtgtttttcattatctgaaatcct

SEQ ID NO: 25189 - DNA, 1131 bp, Bovine  19866881068651
  misc_feature (1)..(1): n is a, c, g, or t
natgttattactttgtctatcagcagtttctgacttacatctattttggctgattatttaaaattgttactgctttattttggttagtaattgtctttatccattcttactttttcaatctatgtgtgtccttagatgtaaaatgagtcacttgtacacaggatatagttggatcttgtttggtttattttttaattcattttgctattctgtgacttttgattgaagagtacagttcattaacatttaaagcattagctaatataaagaatttgctattgtcatttttgttaattgtttttcccatgctttgtaacatttttgtttctaattttcttctctaatgatttcttttttgcttagttgacatttttatggtgactttaaaaaaaatttctcatttccttgtgtgtagtctgtagatattttctttgtggttactatggtgattacattaaacatcttatagctgcaacaatctattttaaactcttaacaatggacttcagccacatacaaaacccctaatccttttcagccttacctcctatttctggtattgctgtcataaattgcttattaaatatggtttacctattaacttagatgtatagttctttttacactttttttaatctataaaataattaaaagtggagttacagaccaaaataaaaagatacttatttatatttgtccatgtgtttacctgtaccagagaagtttattttttcatatggctttgagttacagtctttggttcttcttttttttttctatttgaagaaattcctttggcatttaagtctgtggaaaagtctggtagtaatgaacttcctctacttttgtttgtttgaaaatgtcttaattttttactttgtttctgaagggtagtttaccggacacagtattctctgttgacagatattttttttttatcagcactttaaataggtcatcccactgccttatggcatatatttcttggtttaagctgaaaaattcactcataatcttattgagaatctcttttatgtgaagagtcaacttcgttgctttcaaaattctctttgtcttcacccactgtttatttgtaatgtatatggtgttgatcttttggatttaccaaaa

SEQ ID NO: 25190 - DNA, 1376 bp, Bovine  19866881089388
  misc_feature (1)..(1): n is a, c, g, or t
nccttgaaacctcttggtaagatggagagtgtctttccggatgttccagcaaagcctcactgcatcctgctgactctggttggaccatgagaagtcacttctgggaccagagggaatcttttgagatgattggataaagcatggccacaggctgcaccccgagcttcgggcaaggagaccttaaccgaatcgtatgaagtgacaagaggaaggagagggtccccaatatttggaaggagaatgactggatgttgggggatccattacaaccagacaagataagagcgagggcaatagagagaaaggggatcttggccatacagagagggacagagaaagaccaaggggaggaaaaagagagaaatcctgatagcacctcctttcgtagtctcctatcctttcccagaaatgccatgtggaagcacctttgtgttgtcacagtgaactccctttcttctctagatagatttctgtttcttatcatcaccagccccaaattcagacagagaaacggtcatttaccctggccacctggacagatggctggattgacgcaacagggaggggagcctcgtgtctacatgcactttagcagatgaatcatgagttcccaccatttcagcattaatttcatgaacggtgattgtctccccagtaactaagcactgttagtcctaattaaccagtttgcaggcaatttttcaacctatcaaggagtgaaataaaataatgagctcagctgagaagaactggaaaagcagtgagttcactggggaaatggtgttttattaccaattccactcagggttaagctacagagttccccccccgacccccactttccttctaatagtacctttgagtcaggagaatcgtgtcaggatattaagatgaaagatgcttctatatttcccttataaacgagcttgatttaattcatgattacagtcagttaatttggatgccttaatgatccctttctcagggaaaggaatccaatgaatgagtcatgcccgcctcgtcccatggcatttctaaggaatttctctattaaaaaacaaaatattaaaaaattatgttctgtttccagatgtgtttttagactttgacatcctctcattttgatgatgggaatcaacagaaagttccaggagaaggagattgagggcaggaggagaagggggtgacagaggatgagatggttagatgacatcaccaaattttttttttttgagcaatctctgggatagagggtgcttcccaggtggtgctagtggtaaagaacccgcctgccaatgcaggagacataagagatcctagttcgatccctgggtcgggaagatcccctggaggagagcatggcaacccattccagt

SEQ ID NO: 25191 - DNA, 659 bp, Bovine  19866881113154
  misc_feature (1)..(1): n is a, c, g, or t
nccctttaagggtcgcgggctagtcttgaatccaccagccacgggcaccccgacacctcgactctattcctccgtgggaccctttctaactaatcaagttctctcccgagactttccaaggtctaggagtggccgctgggctgcagcaaagagcttccttcaatgcttcaaacgtgattcttaaaaaaaaataaaaaacaaggagaaacctttcctggattgttgcctgcggcagacacagtttaaattaacttaaaccatttccttctcccacccccacctcgttatcctttttcacggaggcgagaagagaaaaccttttcaggaaaaagctactggagacgcttctctttctcttccctccagcggatgccaggcccggagatgctaaagtttgcagcccgcgcgctgcagtcgccgagagggaggtagcttttagggccggttgctagagaacgagggcggctcgggtcccgggggaaggtggccggtgccaagtccagccgccgccccgcgctgcagtgccgcgctcggccgctagggtgcagcagggccctgcggatggcgcggctccccgctcggcttcttgcatgcagaccacgtccccggcagcggcggcgggatgcaaaagccggcggcggggcggcgacccgagctgg

SEQ ID NO: 25192 - DNA, 2460 bp, Bovine  19866881115796
  misc_feature (1)..(1): n is a, c, g, or t
naaaatgtcatgggtttctgcccaggatcacagatgcagaaagtggcagagccaaacctatatctgtctgaccccagagcctttccactgtcttaagctttgcctggggcttacctggtggctctgatggtaaagaatctgacttcaatgctggagatctgggtttgattcctgggttgggaagatcccctggagaagggataggccacccactccagtattcctgcctggagaattccatggacagaggagactgacagactacagtccatggggttgcaaagagtcaggcatgactgagctgctaagcatgtgtgcatgcaagctttttctacagccccctctttgatccacttcttgaagattctctctctctctctcagcaacatctcctcttttttcctcttcttgtgctttcagtctctgcaaagacaccccctctttgggaagctttccctgacttcctcaggctcagtcacacgtaccacttttatgcttatctccatcctggccaaatcagtcaggatagggtgagctgtgctgccgtaacaaacaacccaagatcttgggagcctaaacaatgatgtttaatctgtctcacagactacttgaacatctaaggttgccagcctcactccagtgccccagtgaaccaagcagcctctatctagaacattcccaggcatcgtggcaagagtaacaagggtcactgtgtggggattggcatgaaaacactcataagactgaacttaagtaagaagctcacagtttagcatctaaagcaatagattagacttcgaggaggcaggaagcctagccctcatgtacaaccatcctattggtaaaccacatggagtccaccatcagaactcccatcacattataacatgggaatctgctgtcttctccactgtgagcttcttcaggctttggttttatatgcacgcttttgcctcgcacagcttctataccaaatagagacccaccatctgcatgttgaatagacgcatagagagatgcctgaatgcagtccagacaagagccctttctccatcctgactcctcttaccacctttaccacctactaccacacagaggaagctcatttgcataatgattccttgtccacaaacatgccaggctcattctcaagtgcagggcctttgcacacgctgtccgttcttcctgggacacgctccctgaaatccctgtacactggagatgccttcctggaccccctcacttaaaagagttcttcagctgcagccctccgtagcctcacattttgtttcattttctgcacaggcattcttgctgtattacattgtgcgcatgtatgtgctaagttgcttcagtcatgtccaactctttgcaacactatggactgtagcccaccaggttcttctgtccatggaattctccaggcaagaatactgaagtgggttgtcttgctctcctctaggggatcttctcaacccagggatcaaacccatgtcttttatgtctcctgcattagcagacaggtttttttgtttttttttttaccactagtgctgcctgcgaagccattacattgttgatttgcttccttagtgcttgtcttcctgatgaaaatatggctgcctgagcctggacccttgcccatgaggtttatggctctattcctaaaactggtataacatttgaaatgagtcaacagacactaaatatacatttgttgaattgatgaatatgtgaatgaataaataaatatgtaaatacacagctgattgccacagtatggagagcaaactatcaaaaaataatctctgcccttctacagaaaataatgtctagagaaatataaggcatgagctctagtttccctgaattttttttaagatcctcaacccttcagaattagccctatgccctaaaatgtaagatgacaagcaaaatgattgcaaattaaatgtttaattaatgtttattattgctaccatattagtttgcagtcaaatttatgacccgatagatttgccgtctttatgaatgacagggttgatgtcttggcaccgaggcctttggcataagcagggagttcagtgcatttctgccatcatccagtctatctcctcatgagggaggcaactcttcaaactgagagacatacgacccctcactcattcatcctgtaaagcctgattaacctatcacactccaaattattccaggctctgcaatgagcagacagggaatgagtgaatacacacatgaatttattcatttatcaaacattagtttttgtctccagcatgtaggaagtgttggctaggtggtgaataaaacagaaataaaaatacaaggtgtaggtctggttcagactctagttgttcagtcactgagtcatgtccagctctttgcgacctcatggacttcagcgcgccagtcttctttctctgttcttcactatctcccaga

SEQ ID NO: 25193 - DNA, 1044 bp, Bovine  19866881177790
  misc_feature (1)..(1): n is a, c, g, or t
nagggggtttctccatggccagcaagacccactgcagggctgctcttccccagggacccgtcctgacaggtcctgctcagagtctgaacagggctcagcttccaggtaattctagtgatccctgctgatgtggagaggaaccaagatacacgttcatctatctgatagatgaacaaaggtaagtggtgtaaatgcctgtatttgccccctcagataagggtaacaataaaacaaaggattagattagatgcttcagaaatcaccagattctacccagcttacccgcccccgcaagcccaaataaattgtgcacaaaagaggtctccacgccccctccatctctgtatgatttaactcttggggaagtgcattccacagaccccagactctttatctacaatgaagacagtcagtgctaaaactgttcaggcagcacctgctggcaacgtgcagagtgcagacgcctggaccctgcgcccaatgaatattacccagaatgtattagctgataacacaggcatcccaaatcaatgaggaaatcatctcctgcacacaatcagcacaaaagaaggatatttgcagagtccctccaacacagtctggctattgtcaactcaggcgcggcaaagtgattaatgcacgtgtgagtaggagcccagatttcaattcttaggatgatgtgcacacaccgttccccgtcccccaccctttatggatgctcaacacttaacctactcaatggtttttatttgcattgatcctattttatggtatgattaaatttgtatggaagagaaccaattagttttgttttacacttattgaatgcactttatagtcagacgaattaactctcaacagtaggttgatttatccagtggagggaggcttgatgggctgtgcagggtcatgaggataggggcactggagggctggaatctccaaaaaaaaaacgagcttaaagtgctgatgatgatggcccagctcatcaccgcgggggtccgggtgagagtacaaggctgtcacgcaatgtaatttcgagaa

SEQ ID NO: 25194 - DNA, 988 bp, Bovine  19866881190992
  misc_feature (1)..(1): n is a, c, g, or t
ncttttgatgcatattgttaagctgttttcctgaagagtccctcagttctgcctgtgacatgagtagtctcactgcatcccgccaggatcggcattatggcctaagagttgttctccccagtctaatagatggacatggctcctgtctcttccagttggagctgattattgactcagacactggctttgcgtcttccacaaatattttgaacctggttgatcagcttaaaggcaagaagatgaggaagaaggaagctgagcatgtgctgcagaagttcgtacaaaacaagtggctgattgaggtatttctcgctgtgggttttccagcttggctcactttttaccatgaatcacactgtttcctccaagattgtatcgtatttaatgggtgtctgttgagctgaggccgttcaggtccctttatctcagcaatcccagacctctttggcaccagggactgattttgtgaaagtcagcttttccacagactgaggaggggggatggttttgggatgattcaagcgcattgcattgcattacattcccttctccaggggatcgtccgcacccagggatcgatccctggtctctggcactgcaggtggattttttaccgtctgggccctggggaagcccactgtgcatttttacgtcagctccacattcagatggtcaggctttagatcctggaggtcaggaacccctgctgtctgcatgaagcccacagtgaccctgcaaggaggaccctgtttactcaagtgacctgggtgggaaggtccaactggaagtggcagagccagggtctcaggcagctgtgcaggccctggactctgagccccaagcaggcggtgtagtgcggtcggcaggagcacggtgctgctgccagattccgccgcaggtgccccgtgtgcctcggctgtgagaggggaggaatagctccacctccaggtgagtgaggagcgggatgagggcgtggagtcacgccccg

SEQ ID NO: 25195 - DNA, 1033 bp, Bovine  19866881219290
  misc_feature (1)..(1): n is a, c, g, or t
nagaagttggaggacttcatcaacacaattaacagtgtcctggagtccttgtacatagagataaagaaaggtgtcactgaagatgacgggagacctatttacgcgctggtgagagcagacagagccccctggtggatgtttagggaactgcagtggagacagcctctgccctccttcctggggtgcagatgaaggtgcacccgcctcaccaggggcgtggagggcgaaagacactgggcctggccacctccctgacccagtctcgtctctccatgctcgctgccggccccctggtctgtagtgtcctctgcagccatcacggttgggggtaatagaacctgggcctggctctcaacgcagcgctggctttattgccccacctggaatgccccctctaccctgagactgggcagcatgccttagcttttattttggttgttgccaggcatctgcaagtcaccctagatgaatggaatattaggggtaaagggataaaaatgccttttcgtttagaacaagacatagaaactttggaaagaaagaaacgtgaggtcactaaggattgagacctcgttggggcctcctgctgtgttcacattttttttttttccctcctggctagggaaaaggatgtgagatacaagcccccatctttgggtagggaactcctttaggccttcagagtaccacgcttctaccagccaggcccacacagaacagggctttagcccagggtttcccaaaccctattctgtggaagaaagggctgtggaaatgttgggttaagtcggtgaatcagtattgtttactgccagagttctcagtgccttctgcatttgaagccccactagcatgcagacaggcttcccgaattcatctgagtttggagctgtcacacaaccttgggaattctgaaatctctgaaaattagacatattgattgagctaaagatttaagcttgtaagactggttccaaatttatccccgtggcccacagtgcctggacacaaagtgctccaggactggtgaggt

SEQ ID NO: 25196 - DNA, 2031 bp, Bovine  19866881304107
  misc_feature (1)..(1): n is a, c, g, or t
nacaaaggaacttgctgtggtttggggttgagggaagctctgtgggggaaagcgacacatgatgtgagattcaaggaacttagaacatggaggggaagagggaagagcatctcagtcagaaggaacagcacgtgcaaagccatatggcaagagccacaattgggaaagcgactgaaagtgactgtgatgggagagcagagggtggaggtggaaatgaagctggagggtctggcagggtcacacactgggttttcgaaccagtgaggggtagggtggagggtgtgttctgatcagagcagtgggagggtctgacctgggctttgaaggtgccctctagctgctatgtgcatagagggggcttgagcagaggaaaggacacgagaggaggacactgcagggctaagagatggggccgacattactggaatgcagagaagtggacagatgtgaaaactatttaggaggcaaaactgtcagatgtggtgatggatggggcattggggcagggtgatgggtaatgcattgcttgtcctctgcgtgcctgactgtttcctgaattaacccaaaggctgttgccggaccagcactggagactgctgggaagggctgctggcctctcccacccctccttgaacctggaggcccctgtccctgctcacagtcccagctgcaaaacctaggagcatcatgatgctgccttgctctgctgacagctttctgtttgtgctctcagatgcctctaactcacagataattaatgtcagccggctgtcaccacaccctggctaatcacagtgcgtgggggtaggcgcactggtcgatgagcagcccaaggacctgtcagccccaggaaagggcgtgtcactcgcccagtcattggagaatgtgccgtgaattttagcgcacgcctttctgcttgggaggcactggcggtctgcatcccatgggaagcagatgctcaaggtcatgtcggcacgtccggggacccaggccggacagcaggagagggaatagggaggtgggggtttgctcttgatgggtgtggacgcagcccctccccttcctcatgtgtgagccacaactgcatctatttcagactcaatactgtgctcaaaattcagttaattaagtgcgtttgcacaacgccaaagggctttctgcagttacacggagacacttgtagctcccccgacagttcagcctttgctgtatttctttgccttctgctggttgcagcttcctgatccctcctgttcccacccccacccgcacatgagccatgaagttcaactctttgtttagcttcattccatcctttcctttattcattcgtttgcttgttcattccttcaccagatcagcactgtgttcctgctgagcacagctctgcgtgcaggaaaacggtaatcaacgacgtggacacagtccatcctgggggcatggtctgcagggcgaggcggcggccgttaagaaagatgcaaagtgttgttaattacagtatcagcagttctcctttccatggtgcggtgcatttttgtctctgtttccatttctaggactctggttctgtgggaatctctctcaggtcgggaactatctgatttatgtctaattttttagtgcccagtggggcttcccaggtgatgctagtagtaaagaacttgcccaggagacttaagaaacacaggttcgatctctggatcaggaagatcgctggaggtgtgaccacatgctccagtattctttcccggagaacccccatggacagagaagactggcgggctagtccatggggttgcaaacagtcagacatgactcaggtgacagcacccacccgcagtatattcacagtggatatttagcgaaagacagagtgagtggagtagatgagagttggctttacgcacccagaatgatgaatacttctttatccagagagctgcctgccgtcccagccaccccaaggtacattgtgaagacatcagcacagtcgtgtgaaggaatagtcatgtccagcagacacagcctggg

SEQ ID NO: 25197 - DNA, 1881 bp, Bovine  19866881523173
  misc_feature (1)..(1): n is a, c, g, or t
ncgctgcgcctcggttccttcggtgcaaatgaatttctaagaatagagcttatctgctagggttgatgcaagattaaatgagtcaaagcaatgttcaatgctcagaatggtgcccagcacttaacgccagtcagcgttgccgtttagtctctatgtcctgtccaactctttgcaaccccatggactgtagcctgccaggctcctccatccttgggattctccaggcaagaatactggcctgggttgccatgccctcctccaggggcaatccagggattgaacctgtgtctcctgcattggcaggcaggttctttaccactgagccacttgggaagttactcttattaataaatggaaggttaacatcatatatatttggaacagtaatgctgcttatgatttgctgtggacatatctcagaattggaaaggaaagaaaggcatattcttcatccctccaaacaaaagagagattgggccaaaagagtctggcatgaaccagggtttctgacagcttcacgcggccaggtggcaaagccaggctgatttcccaaacacaatatgcctgaaattatgctactttacccacctatccaagaggcattgtttattttcctccctctgcaaaaaggagattctcattgtctggagaaaataataataataataaaaactcatgtgctaggcatattgacagaacattctttggaaaacaacacccccctccaacttcttatcaagggctcttcatcctgtttctaaacattcgaaagaaggccaggctgacatgttacacatgactgacccagagagctagctatgcttgcctctgggtgtgtttgcatgtgtatgagcgtgtgtgtgtgtgtgtgtgtttacctgatattgtaactcagcctcaagaaagattcaaactaatttatgtgtaaataatgagttggtggcacagaagcccacctcctgggctctgtttgcagacgctgatttgcatgtgtcaaaagaagatgggaagacaggaaggagaggacagtcaggtccagtgattggttctggggtagaaacatggtggccacaggacagtgcatcctccttcttggtcccctgattagttgcttctcaacctgcattattgcatttttagtctcccctactagcatacaggaccaccacccccccgcccccaacctgccaaggcagagacagtgtctgtcttggtggccgctgtgtccccaaggctgaaaattcttcctgccataaagcagtttctcatcagtatttgttgaatgagtgagaagggatgaatgaggtgtatgacattgaccccatctaagtgaacctcagttttcttatctctgcagtgggtagagctgtgatatgccactcagacagtggtcaaaattaattaaatgggatcctctatgaaacacacaagtgctcagagggtacatcagtgtccacttccttcctgtctgcccgccaacctgattctctgggacgacagccaggtgagcctttcgagtgtacatgctaaatcacttcagtcgtgtctgactctttgagagtctatggaatgtcgcctgtgaggctcctctgtccatgaaaatcctcaaggcaagaatactggagtgggttgccatgccctcctccaggggatcttccggacctagggatcaaacctgcatttcttacatctcctgcactggcaggtgggttctttaccactagcttcaacttaggaaggctcaggtgagccttacttggaaatgaattataaactcagagctatcctttagctctgaggctgatgggagcctgtcagccttaagctgccacacttccgaccacacgcactaaaaattaatgtcccggaaggcaggtctct

SEQ ID NO: 25198 - DNA, 1227 bp, Bovine  19866881968601
  misc_feature (1)..(1): n is a, c, g, or t
ntgaggcgtggttgacaggtaaaaaaattgtgcatatctgcaactcagtaattttgagaaaaagtatacacccgtgaaatcatcagcccctaaagtaccatattgcacacttaaaccttgctaagagagtagattttatgttaggtgttcttgctgctgctgctgctgctgctaagtcgcttcagtcgtgtccaactctgtgcgaccccaatagacggcagctcaccaggctcccccccgtccgtgggattctccaggcaagaacactggagtgggttgccatttccttctccaatgcatgaaagtgaaaagtgaaagtgaagtcactcagtcgtgtccgactcccagagaccccatggactgcagcccaccaggctcctccatccatgggattttccaggcaagagtacttggagtggggtgccattgccttctccattaggtgttcttaccacaaaataataacaataataataaagatgatgggagaaaatttggggaggcgatggaggtgtcatgctcttcttgttacaattatttctgctccctgttttttcaaacttctggtctactcctttctctcagtgcaaactaagggatttcccatgcttgaaacccctttaaccattattgaaagaaatttcaggaagaagaaggaaatgtttcttcaattcccccaaagagctgtggaataaaacagacagtgttcttgcatcatcataaactacttcaaaagtgagatggtgagaatattaacaaattcatcagtcttattctcttgttgagtgtggagaatagtgcgtaaataaataatcctgttctgtttcctgtgactataaagctgtaccagagaatagtcacacaaaggaatctattaagtcacctagtcatcagatagcactgccaggcctgtgaaatataacctataaccctcagatgtctccaactctaagcaaatgttcctgcttaataatttgttgccctagtagtaaaatttaaattgacacctttgtttactgaaaggtgcaaatcttgggaagtttccatgtgattctacagaaaggctttggaaatttcttcttcatgcagaggagcaaagaagaataataaatagtgaatactgctgatttcctaattcaacctaaagatttaagactctttttctcattaaagtaacagtacttatttgtcaagttaaggacgtttcttctcttctcactttccaga

SEQ ID NO: 25199 - DNA, 1568 bp, Bovine  19866880415063
  misc_feature (1)..(1): n is a, c, g, or t
ntggtgaattttgacttgagggagaataatgatgtcaattaacaaaggttattgtttatttcatttaaaaagcttaagctttattctatatgcaatagaaatccatacttcaacaaaccagttcacaatcatattttactttatatgactgactttaacaataatttaaaatatggattgagcatggggtaataatggcaaataagtgcataaccatgaaaaaaaaatactgtgtttgtctaaagatgaaataattagtcccttagtagaactgggatacaatactcataagaaggaattttgcttcataatttgatctaagagacaaaaggtaatttagacccagagtatgaaagattttcacatagtaactgatccaattcaagctaaatagaaaaaaattttttttcaatgatcgtccttgaatatctgtcatgtttccagaatgatcctggtgccattgcatgtggacataggtcattatgtgtgctactattcttctgagatactctcatttgagataatttacaagtccatcaatgcattgttgtgctctaaataaaatatattcttcaagcattaagtcatatcctatctttataaatgatgctacaagaaaaagctaactgcatgatgcatcttcacagtcttaagacaatttattatggtggatttgatttttaaatggaaccataaattacacaccgcactaaaaattataagatttagtgatgagctttactgtaactctcctctgagacaaatgttgccataaaaatctaaatcagcatttaatgaattgacagaagctagagaacctgagagcagtgctcgatgagaaagacttaaaaacgttgggtctttaagaagaagaaacttgggtcagaaaataaaattctgtaccttcgccattcaactgaactgagctctgagagactgtcaagttacatccccaagatacgtaaaagatctgcagctgaggggacagcctctatctgtgcaggaaccagcatctcatttgttaatgctccaaatgcaacaaagaattaagctgaagcatctattcctacacattcagaacaaagaacaaatcctgtatttagtgtagtcacacacaaaggagtgatctggaaatgtaaatcaccaaaaggatttttccctggggcgttaataacaggtcagtaattactctgaaaagcaagagacagatagaactctctggaagatccaacccaccctgctagacaccctcagtgctttctttggagcaagtagtttaaattcagttggaaaatatattttttgtctgcaatatctattaaatgtttaattaaaggaaagactccttttcaaaaaacaattcaatgctagaacactaggatttttttttaaccctctttcagctgttactcttaaaaacaacagatcattattgtcctcagtgttaggcaaattccaagtgaaattatattaagtgggtgttgttttccaaagcagagttatatgcaagacgggaaatgaccaaagagccatgatcctttataacaacatattatgaggacataaag

SEQ ID NO: 25200 - DNA, 1756 bp, Bovine  19866880461393
  misc_feature (1)..(1): n is a, c, g, or t
naattttcctcctgctttaccaagtcagtctttttgttgttgttgataatccccagcatttgtacaatacttcctgaggaagatctctgataccaatgcgtaacaggcttcttaaaataattctgatggacacatttagtgctattttttccccccacaaactcagttcttgtcttaaccatgaaattgctttgctatgcattttattaggcttgaagtcttaatactctttttccggctatgaactgaagaggatataggtccccggataaacttatctgctgggaaaggaacatagtaatgtaatctcctaactggcctcatatcttttggctgtgctctgcacaaatgcatctgaagacatttatctgactcaaaagctgagatcttcatgaaagcaggttagctctcctagattcaaataactgggtttatatcctgtgacctaagggtgacttgtgagtattaagccaacctgtgggtgaaaagagaagtggccttaaaatagtttagatttactgtgaaaggcaaagaggtgagcagtgcagaggaagagaaatggctgtacaacacttcctgctgtaaaagaggctaccttgaacttgctgattgagaagaaataatgcagtgccttgcaaataaaccatgctgatggatgtcttctgctagaacggagctcactgtatttactctctttctgtttgatgtcagcatcttagcactcagcgtgaactctgctacagctaactgtcgaaataagttatttctagtcgataatgaatgcttccctaacatgttattattgaaaataacaggttccaaatgtgtgaccgtatggtatacaattcattttcttcctctgaaagaattggattttcttgtcattagaattgaattgtgtgtcgacacagtactaagtcagaacatcctgaatccagaccaaaggcaaaaagttacgatgaaagattataataacaattgcaattgaacagtggtttacaatctgcaaagagcttttgaaagtactgctttggaatgtttggtcactaaggaagatagcatatgtatttttattcccatttaagtaaaaggtggatttaagcataggggatttaagttacttatccaacatcatcacaaaactgataattgagagcggtgaggctcaaaccctgagtatctgcttccgaatctaatgttctgtctttccttcctctaaaagtaaatacaattacctgaatttgcttggctatttttaacaatagaaagagagaagcataaaggcccttgttgtgagagtgactgcaaacagctgagagaatgtcagctactacatgctggttgttgggtcacacagatagttagagtggcatgctgctgctgctgctgctaagtcacttcagtcgtgtccgactctgtgcgaccccatagacggcagccaccaggctcccctgtccctgggattctccaggcaagaacactggagtgggttgccatttccttctccagagtggcatagacagggtttaaacacatttctgacatgttcaaaatcacacttcaaggtatatacatttaagaatcaaattttgaagacatggttttcatcttttcttgttttctttgccctctaatatgttaaatgattactagaactaagtatgcttcgtagaacctagggcacactcagaaattttcttgttttaggaacttaggtccatgtaaagaaatgtatagttcttcccgctctccttct

SEQ ID NO: 25201 - DNA, 961 bp, Bovine  19866880495231
  misc_feature (1)..(1): n is a, c, g, or t
naaaatttatgttcctggagagggtctgggatggattacaggaagcaaaagagaggtaaaagatttgagcaaggaagatagtagcttgattaaacatctctggagaagataaaacaaatttttctctcctaaaaattagaatgagaacataaactgtaacaggtttttataggcaggttggtattagaaaaaagagacatttgaactcatttgaaaaatgaattggcttgttctgaaagataatcagtacttggctccttaccaaaatttctctgacatcaagcaaatgcacagttcatgtttatccagataaaagaagaatctgtatctataggtttaatattacctggcagtgaaggttctctcaaaatagatgcttattttagaaagcataaattcttattgggtcttctactctcctgtgtagccctaccacttagcacaatggtgcctggacctctgcatccatctccgttgtagaaatgcatgaagatgttgggccagagtctttgatgttttacatctgctcaaggtacttgctcttttaaaagaattctattatcaatgattttgcaaagaaaaatgaaactgttgggtcaggaactgtttatctaatttatctttcatgattatctggatattttaaaggaaagtgggcctgaaggaagaagtaatgagtattttgctctgagcacaaggcatatttcattcaaaatatacttggtttttagccaggctttccagacttacatttatctttacttaaattcaagtgtgtgactgaagctaaaggtcactttatttaccaaaaccaaaatgtcaacaaataagcattctctctcctgcttttctcaaatcagcatgcaggggacaggacacaatgctctaagaccttctccacagagatattaaagaaagaattaatccatacaaaatatgttaatttcggtctacttaccca

SEQ ID NO: 25202 - DNA, 2668 bp, Bovine  19866880507227
  misc_feature (1)..(1): n is a, c, g, or t
natgaagaacagcacaactaactccaaaattatcttgaaattggtcatgtggtgatctgatcagcatcatcttcattgttttaagtatagtcgatctttacttgctgggtcattttattcccatttcttgaggccagttcttggaattatgtaaaatggaatagcttatgttatggctatagtcttgtcataatgtagttaatttcttccaaaaggtgggggtttcagtatttgcaaaacagctcaaaggatatggctcagaaaactatgtatagcccttgaggaggaactaaaggtccatgaagttgcttaatggctaaatttattattttgtcttgcttgactgttttctttgcttccgcattttctcacttcctggattaaatctattctatggctaaagctttttttgtttgtttgtttgtttttcacaaagaagagtcaagtggagaatatgatgggtgcagggggaggctacctgtctcatgaaggcttcacagggctctgctcagttatgaaaatacaaagaaccataagggactaaggaaaacaatgctgctgatgaggccttgggaaagatttttcctgaacttcctttctaagttttccttgcaggtagactccctcagacacttgagtggggatttaaccagacagaacaatgtgaagaagtagtagctagggaatccatgctttggagtggcagcagtgtcagtgaggaagtgagtggtgtgactttcaatgtctgtgcccaacagatactatagtgggtcctccccggactgccccacagtgtaattagcttatccttaaagagtagcctccaagcctgactccacctcttctggatcttctgtgagcttcccaatacaatttattcaactgctcttctacttaaatgaagtagagaacatcctatttcctacagctggtatttaagtcacaagattaaagtggcagtatactctaataattagaagcatggactttggaatttcaacttgtgtttgaactctttcttttccattcctttagtatatatttatgggtaatatcttttacttctctaagacttagtcactaatttaatatttggaaaaatattaatagcaaatttatagcactgatatacatttaaatgagttgatgcacaaagggctcatgtgtatcccagtaactgctcaataaaaaattattgttattatatgagttataatcccagctaaattaatgtgttcctatctcccaaacacatactctttgactattatatactattcctcctgatatttcactttcctaatctgcccttaggcttcccaggtggcatagtggtaaagaacgtgcctgccaatgcaggagacacaggttcagtccctgggtggggaagatctgctggagtaggaaacagcaacccactcaagtattcttgcctggaaaattccaagaacagaggagcctggtgggctacagtccatggggtcataaagagtcggacatgactgagcaactaagcaacaacaacagcaacaatctgccctttggagtttggaatacattttcaagaagttctccttactgagaatagtaaggagaaatcatttatttcacactcatgcaactacagtttgttgccttcaaaaataaaagcatgtaatatatattgtcatatttcggactattttttcttcaatgctaggattatcatcagtataaagttccttactaataaaaaagtgtactaatttcaattaaactcaaattgaaaaaaaaggagaaaaacatacaactactatgcttaagattgccctttgctaactgaatgcaacaatatcctgcagaggaggtgagatgtacctggcctcaggcagaggctttgagatgagctccttgttagagttactgattatcactgaaaaatagtgtaacagagacattaaaagattcatggtgcttcaaagaaatgcttctcattttgacactcattaaggtttgattcctaaattttcaaagcaaaaccacagtagacactttgcagtgaacttttttaacatacaaaaaaaaaaaaaaaatcaccaagaatatctcattttgaattaaatgaattttatattatggtgtagaacatcttataaaaaataaaacatcaagtttactgagacatgtgcagcttccttgacattatctccattcatcttgaacattccttcttttaaagctatttaaaatatttctgatcaggacacaatttatttatgtcttagtactcctttctattgctttctgtctctccctgctctgatcccttccccatatttccatctcattagaactgcatttactcagccagagacagggcagaacaagtgaagaagagaacatatttaggtggagaagattgatttatctacacagtaaaaagctaagagtaaaggagatgggaaatctgaactgaggaagaggtgttaaaaagatttctgaattagttactgggaaaatttaaaagacttgataaagaaggtgccctggaacaattttatgccatgagaaaattaaggaggaagggaaaggggatttgaagggtgacactatgtacagctgacccttgaataatgggttttgaactacacatgtccacttatatgcagattttttcaatagtaaacat

SEQ ID NO: 25203 - DNA, 4873 bp, Bovine  19866880530244
  misc_feature (1)..(1): n is a, c, g, or t
nttatacctactttgagaacaattttctatttgtacatattcatgagaaaggaagtgaataacattagacaacaaatatgtatgtgcatatgaaagtatatatatgtatatgctcatgaatttttaatataatatcatgctatagaatttgttctgcaattttttaaacttatcaacatgacaaggaagtctctttgtatctatttgcatgaagttaccttatactttttaatttcaaaataaatatttttctcttatattcatatacagagagttgcggtattgttaccaggaagagttaattttgaatttctgctgttctgtgactttaaccctcatcctgccactttttgttgttgtaggcatacataatggcctgcctcaaggagataacctgagctacccacctgtgaaggactgtaaggaagtaaaactaatacattcccctgcctgaggcttgccattctaggggacatttgcaaggattgaatagtctttttacttcattcctcacctcccctccatctcttatccatgaaagaactgggcaaccaggcacctacaagtttgttattttgaggtgctagtctgccatcttcttggtcaggtagctcccaaacaaagtcccttcctagtcccaacacctcatctcattgtctcattgacttatcctgaggctagcagagccagcttggactcagtaacagtatgggaatacataattgttgattctagaagtagtatttttctattctaattcagactcagtcacttactattaatattaatgtaaacactttaaagctctttgtgactatacttccttatctgcaaaatggcaaaataataacatatcttaataacaaaataataatttattcaacttattcaacaaatattcactaagctccttctagatgccagagagatcaaggcacctttcattcttcactgaataaagctgacaaggattatttttttaatccctcatgaagcttaaattctagaaaaggactacaaaagtttacaaataataataaaataaatccatgaattacatagcattttataatgagctaaactgaactgaactgatgcataatagaaaaagtagaacaaggagggcagttggccagaacacagtgagtgaatgataaaactgaagattaggctgtagaattaaggagggcaaggaagaagggtaaagcaagtatttgctgaactttgagagaatttgggaaccactgtcgggggaggattcagactggaggtgtgaggtcctcagatttacaagattcctttgactgctttctgcataatagcatgtaggtgtggaacaagcatagaaacataaagccaattaggaagctactgcaataaaattgagattagaattgatggtgactcaagcaggatattgccagtggaagtagttgaaagtcactgaatttggacataacttaaaggtcaagaaaacaggatgtgctgatgaattgaatttgagatactggagaaagcaaacattcagtgatgacttcaattatttagcagttacctggaaggatgaaattatcatcaaatggaaatggggaaactccggaagaagtaagcttagcagagaaaaccaggagttaaatttaggtcacattacatttgcaatctcgtaatatccaaatggagatactgagaagtcagttgttaaataacataattcacatctagaaatagctctcagagatactctgatgtaagctaaatttgctggattataacaacaggttactaaagaagatgattatgatctttcattcatagtgaataccaggttggtggatgtaaaatttgataccagggttttagctttgttaggtagttagaataggaaataggagtccaaattagcagcagctaaaagacaaagaaagcaaaaagcctgtgaaaatggaacaaaggaaggtctgaggaccagagtgagaacctcaggtgaaaaaagagtcctcctggctagcccaatttacatacagcaggctgggaaaaggggggcagaaaaaaacgtataaaaggaggagccaaaattgatctctcttctttagggtcaaggcctcaggcctcaaggatatattttcctttgcttgccaaataaaactgagctgtaaccaagctgtaacactggtggcaaatttttgctgcagtgagacagaaccaaggaattacacattccccccaacagcttcaagctccatgtgcatgacttaaacactgataaacaggtgactgagtgttggcagttgtaatatgtatccacacaaatgccatatgctgctttattaaatgcagtcatatccgttagattcctaacatgtccaagtgctaggtctagctcaccagaaaaataaaacatagaaggaatcatgccctccactccctcagattctgatagaccttctatgttttgatggaatccacactgatcaagaaaaagaatcaggttgagccagtaatagcaaagacctctctctgagtttagtgaccttgatgggacaaaattataatcctgcagtgtctgtaaaaaggtattctagaaaagaaaagcaattcttatattgacccttccccttttgaagagactttcaatctcactactccttgtaaggtgaccagagattttgtgttgtttaataagatggtcataacttattttacacatttcttgacttgacagcattatttggcacagttgatttttttatgcttgaactatttttctcatttggcatctggaacctcattctctcttggttgctgttcctttgtaatatccagccatacctccatcacggccaaattgctctgtcctcaatttctcccaaagtgacggcaaccttcgaaaattctccacccaaagcgctcggcacttatttctcccttatatgatttaatcaattcataaacatatacttttatttaaatacattcagaatcagatccctttgcaatacttccactcaactagcagcttttgcttaggttttagaatttctaaagatttttattctagtgtctttactctgcttcctaacagttgatccttaacatagcaccagagttcattttccaaagatttctttcctttgctcaaaatctgtcagcagtttttcatttaattaatgaaaggtcctacataaactgacattatctcctattgctttaagacttgttattcagctttatccacactggtttattattatttctgaaataccctaaagcgtcatcacatcttaactgcctcagaacatttgaccctgctgttttctctaccaggaatgctcttcctgacagttctgtgactcactttcccttcctccaattatcttggttgtctagtctcttctcagtgattccttctttaagacccaacaaaagatggcaatccctattttcctcagtaccaattttctccatgagaaatatcatgtatgcaaaatcttgtagcttgtcatgttcctccaactagaatgtaacctctatggatgctataattttgttcccccaaaataattgttaagccaactagtaaattcttatatgaaatggtgcctgtgtttaattattgaacagggaattttctctcctaattttctctttagaaaaacattcctagggctatttttattagatcaactctccagatgccaggtaagctatcttacctgatttttttgtctcctctgcctacctgcattatactcaatgcagtgtcacatttgagacttcttggagactctatattttcttcttgattagtgaaaagttgaaaattatatatagtatgaaaaatgtctggtactgttttgaattattaaaacccagcagacacctgaacataaaggttatataaaatatctgtcatttcatcactctcatctctatcattatcgttttcatggttatagatatcatttactaagaatttactatataacagaaactattctcaatctctatgtatactgatttgcttaatcctctgaacaactgtatatcgtaggtatcacctattttatggattgtgttctgtattttacagatgacataactgagacaaagtaatttggctcatacttttgtaacatatatatccaacttgaaagtggctggtggttaaaagaaatacaaataatgagcaataacctactccacatctacagatattaaaagagaagaggtgggttctggaacaagatggtgaaacaagaagattctaaactcatctcctttaagaacacaccaaatctaaagctatttatgggacaatatcttctaaaaaaagacctaaaaactagtagaaccatttttgtacatcagacaaaggagaagtaggaaaggctgagatacaatctcaccataaactctacttcccaaccttctgccccacatggtgacccataattgtgaaggaattcaaaacttgtctcttctccctgtggagtgaagagttcatatcccacatggggcaccatagcttttaagacgtatacctgagagatgagtttcctcaattatcctaactttgaaaaccaactaggcttatgtctgtgagaccagtggggctatggtgaattgagaaacaactcttaaagggctcacaaacaaactcactcaccccagggcccagtgcagaaacagcctttaaaaggtgttccagcatcatatgaaaaagcttatttggtaattttaaaacagagttagatgtggggttatattgggatattctcaaccaacagagtctggtgggcaccatattttttactttaagtttttaaaattatttatttatttatttaactctagacacatttccctggcaagc

SEQ ID NO: 25204 - DNA, 1764 bp, Bovine  19866880533437
  misc_feature (1)..(1): n is a, c, g, or t
natggattttatacagttttgtgatacgggaccatgtgtgtgtttatatgtttaaacaatactatattgactcttttagttcattttctttttttctaaaatcatgatagcagaagaaatggaggataaattcatatatatgtataatatatatatgtataatataggcagaaatggaggataaattcatatatatatatatgtataatatatatatatgtatgtataatataggcagaaacagtccactgatataactggagggaaagaatggcatagttgttatagacagtcactgttctttgattttagcattttcacttaagtatagcgtatgtggaagagcagaaacagagaagataaaacaagataaagcaaaatgagtgaatatggggctgtttggcttaccatcttttctcccacttaaactacccctctgaattgactgggccacatcacaaaatcaggaggtgaactgacttttcttttaaaacttgcaaactctcattttctctagaatagagataattaggtggactttcttgtgctgcttctcttagattggactaaacttaaaacctattatgttagcagagtatttaattgaaagaagtattttccaatctagtaataatgaggaaacaagatctaaaggacaaaaggaaagttttgtggcaggtgtgacaggtggaagaagagtagatagaaatgagataatgaagagaatggtctataaagtctgatgtgcagccagactagaagttcaaataagaatatggagaagttgagaaatgggagaagagagaggaaaagtaaacaataatggaaatagaagtgtaaatatacacctaattttcaaataggcaaaatgcttttgcttatatatttttaaaagacaaattgcaaaaggaaacattatgacaatacaggtaaaacagtgtatgtcatttttttctcatgaccaatagttctgtgaggccagagcatgtcatattttggaattatttttttttaagttgtctatgacttagtgacctagaattgacatctctttctttaaaatcatcaggtttcataaacacagagatttttgacaagctttcgctcttagaggggcaaatggaaagccctactttaattttaatcttatgaaggattactgaaagaagacataaagacagtcatagagtattctcttctcttcattcatcacatatcattcaccatgcaattcctattgacatgcctccaaacatgtcctgatttcactcattttttctgtgtctcattaccatcctagagcattcctgtatcatccccttcatgaagagttatagctttctaactagacctcttagattccctctaaattctgtgcaagctaatcttcacatggccaccactagatccttaagattgtacaatagattgaatcatttctttatttaaaacagttcaatgattttcaatctcactaaaaagaaagtcaaaactcttaaacctaactcacaaaactttatgatttggaacatggtttacagtcatctgctttcttccctgtaaaaacatgatacccctatccttctcatgtgtcctcatggaggggagaaaatacttactcataccctcaccataaaaatccagattccattgggcaagggaagtcatagactctacacaggcatctaagtacaagagccatgcaagaacaaagcatttcatctatccctatcttttcatctggtctagcccctatgcatttca

SEQ ID NO: 25205 - DNA, 1844 bp, Bovine  19866880568445
  misc_feature (1)..(1): n is a, c, g, or t
nacattaaaatttgggaggtctaccctgtagagttggagaaggtgatggcacccaactccagtactcttgcctggaatatactatggatggaggagcctggtaggctgcagtccatggggtcacaaagagttggacactactgagcgacttcactttcacttttcactttcatgcattggagaaggaaatggcaacccactccagtgttcttgcctggagaatcccagggacaggagagcctggtgggctgccatctatggggtcacacagagtcggacacgactgaagcgacttagcagcagcagcaccctgtagagtgcaccacaggatagtagtttactatgtttaatttaatagcaaaagttaggggctttgacctacagaggtcttcagtacattgctggtcacagtgaaaacataggtgatattggtgaagtgtatgtgcatgtgctcactcgctcagtcatgtctgattcttggcaacctcatgcattgtagcccaccaagctctgcggtccatggaatttccccggcaagaatactggagcggtgggcttccctaatagctcagttggtaaagaatcaacctgcaatgcaggagaccctggtttgattgctgggtagggaagatctgttggagaagggatagattacccactccagtatacttgggcttcccttgtggctcagctagtaaagaatctgccagaatgccggagacctgggttggatccctgggttgggaacatcccctggagaagagaaaggctacccattccagtattctggcctagagaattccatggactgaatagtccatagggttgcaaagagtcggacacgactgagagactttcactttcaccgtttcctgctccaggggatcttcctgacccaaggatcgattctacatcacctgcactggcaggagtgttctttaccactgcaccacctgggaaaccccaggtgaagggtcaggcttcgtttcaggggatagaggaaaggagcacgtttagagatgaaacagggcatatctgtgagctttagctgtctaggcttctcactcatttagggttgctgaaagaggaaaggaagaaaaggtcaaaaagagcatggcatctgacatcagagtttgagacagaaaacccccacatgaacacaaagaaatgtatgagcattaattaattattaataattattgaaaagactaaatcacagaagaattcatttttatttaatgtaagatttgggagtaaattatctgcccatgtgatgaataatactatagttagacctgctttactacttactgtgattcttactaaaaccaacttaacctaaaccaagtaggaacaggtgtttactaaacttcagcagcaaactaattttattttgcatttgtgcagttggtaatggtgatactagagtttactttactcgccacttaaagtgaatgggcttctgtgattatccaacacaatagtctggagtttcagggactcttaagtaaatctgaataagaattttcataagtgcttgtgaattgaagctgcaaatggtttaatctaaatcacagcatgagtaattacgtaaatccttctcacataaccaacaattcactagaggccagatctgtgacaatcttattctctagcctggaattgtgaatggaacttctaaaagagacactttgctttcataagctcatagcggctttcaatttctggttaggttatctccaaattaaaaatattgattcacataaaatagaagtaattttattttataataaagataataataatagattaatagtaaacatttaaaatgctttaagcatagt

SEQ ID NO: 25206 - DNA, 711 bp, Bovine  19866880605843
  misc_feature (1)..(1): n is a, c, g, or t
naaaagaattgaatcctcttggttttatttctcgtagagaactggagcagaaacaaagcaaaacactttatctccccccaggatctagttataccttttactaagacaaacacatcacattcaattctcctctctcactgctgacgagggagaagaaatacattcagagaaccaaccagaacagccagattattctcacccaaaaataaaccgtggctttgtttacagatccctttcctgtctttacccactgtcctgtgctcacagaagcaagcaagttaatatctagcaagaaaagaaggtctctttttttgtggctgagatttaaaatatcaaacgggctgaaatgtctgaatgcttggcctctagcaattagtgtcttggtggctaatatcctcctagctctattagttccagatcttttgcattatatccttggattttgcttttatgctaggcaataatgcagtgaaattgctattataaaggttaaggggaaaaatccttgcacctctagttgactctgtattgatctagtacaaaatccaaccattcctgagacagatgggggagctctgagactctcaatcccaaaattgcatctgctggttgctgttgctgctgcacatgttgacaatagctatagtctgaaaagcagggtttacatgcctgaaataaattgttttgattagaacctttaggagagaaagt

SEQ ID NO: 25207 - DNA, 1711 bp, Bovine  19866880625437
  misc_feature (1)..(1): n is a, c, g, or t
nctatttacataatgaagaggactagcatattgtttctatctataatctgacaccaatatttgctctgatctctgtgttgaatagaacaactcttcctagccatacttaaaataccatcttaagtatcattgtctcaaacaacttttttttacctctttatacatttttactatctggaatttttgttttgatttttggtatcaacttctcctgttagactttgaactccatggtgctatgtattatcttaactttgctcaccaacacagccccggtgccaagccttgagagaggagagtacagggacacactagcttacactccctggcttgactgctgcctaggcgccttagccgcccacatttttctaaggtggaggtctgtgtcccaagtacatattctctgctccttcctgtggcgcatttaggtagtatctgttttgttttgcatggtggcctattgttttgatgtaggtaaatttgattaacaaaggatagaattttaaagtgctacaatgagcacacacacagaagtctgtcctccaatcttgctctttcaataaacctgccatcttaatattcatccgtaaatgtatgtgtctactttttcaaatttgtgtggagcataggatgaaggaaagacctatttgttatatattaggacccttacatatcaatatattggcacactggccaggaatcttgaaagagccagcaatgggttggtgttatgtaaaacacagtaccacatgggtaaatccacgtgggccggggtccttgaccttccaggactgcagctcttgtgcagcttgtggcagcacatgtcgatggcatttagcagctgttttataagtaacctgaaaatgaaagggtcagtcgctcagttgtgtccaactctttgcaaccccacgcactgtagcccaccaggcttctctgtctctgagattctctaggcaagaatactggggtgggtttccattcccttctccaggggatcttcctgacccagggatcaaacctgggtctcccacattgcaggcagattctttactgtctgagccacagggaagccatcataagtaacctagggcttagtaaatatatcttacactgacttttgtatctgaccttgactgatgtaggtgtagctttgacccaagcaggcatgaatgagatagggattagattattgagggtgaaggagtctcttagttccagtaagggtcacttgatacaggctcaccaggcattgaggggtgaaatgacttgttgcttgaagtgtttctcattgtcagctggctgagccatcgatctgcaaaaatagttaatatccatgtgggctatgactgggtgaggtttttgtctttgtacaataggcgtgtgacattaatagagactattaatttaactatttcaaactcttttctcttccctcacttgaaagggcatccaattccaaaaagaggcaagatgagacatgccaagtaactagtctcttagactctgaaacacagtcacagtctgtgagtcacagtctctaagagtcacctccttccgtgtagttccagactgacctgatttggtcactggatagcctgtgagcagggcataagagctccaaggtcgagacggcattgacctacaaaggggtggtggtttttattgaacatcaaataatgaagaacaagggagagagacatgttatgttgca

SEQ ID NO: 25208 - DNA, 1133 bp, Bovine  19866880708650
  misc_feature (1)..(1): n is a, c, g, or t
nctgtgcctgaatataatttgggaataattgaaaaaggcaaggaaatcctccctgattaaatttgtaaatggttgtctggagaaccattataatttacaaggatttgttgctcagagagtaaataataccagtgacagcatttcctcagagaacagaagatcaaatctgttgcaaggtaagtgccaatatttcctctcaaaaacacagtggaagagacagaggtaataaatgatgttgcatttatctcaatgcttatgaccctcctggctgcttaagagcaaagggacagcatttaactcttcccagagtggtagaactacttacttctgttgcctacagcagcctcaaattctcagagcataactgaatgaggtaagagtctacctaagtgaaccccatacaatcacatctggcatttttggcatatagagaaatgtttaccactttcatgtaataagctttttatctgccttgtagtaataatgatgataacaatgttcatggtataagttatagcaatactgtgtttatgtcatttagaataatgagaggtacttttcaattagcatttgcgagcgtctgctaatgcagcttgcttgttgaaaattataatttgcggtcctttattgcagagttaaacaccccccctcatacaaggtgcagattctagctgatttaattccacctttagctctcctacagcatataaattgaaagctatgcagcttgtcattcaaatgagttattaaaaattgagaccctcgatctcaccactttaaaatctggtagtgtcagcacatattaagaataatttatgaaataagaacagccattggtcaaatgttagtctcatatactggtgctgccattttaattaatccatgtccttttttaaatgggcatttgttatatccagtaaattattcttctattcatttagcaatatctggcccttcttggtatcttattacatagccttaataatcacttgacatttagcatttcctagctaacaatgaaatgcaatgattcatatctctcaaatggattataaactcctagagggaagtcattatgttctacattcattttattagttgattaattaatctgatgcaaagttaggatgtag

SEQ ID NO: 25209 - DNA, 1388 bp, Bovine  19866880758554
  misc_feature (1)..(1): n is a, c, g, or t
nctaaaactggaaaataggagtatattctgtgacatactcagtaactgttgtttcacagcaagtttattcattttctgcattgcagagttgcagcatgtgaattagggcaattaagaaaggtggtgacaagagtcagagcaagtaaactccatactgaaagcaatcagctggagggagacaagaatgtgaggagggaggtaaccagatgcagacatctggataatgttgattggcagtttaatggctcttgccttccccaaattaggcatccagtggctgtttctattctttcttaagtatgggtatacacagtgtggcaattctgaggaggaaaaatctagtgaaaagactgtggaggacactaaatactgggatttagaaataattggaagaatttagcttggaagctgttccaatcaatgtcccagcaaggaacaaaaggcctactcaaatgagataatcagaggagagttttacaaaggaactttgggaaaaggtatggacataatagcagaaaactataggcattatgcagatgactgctcttagcattagaactgttacttactacccctacacccaaaaggactcagcttagaagaagtacatgtcagaatttggaaagagagaatcatgcagaacagaattggtagtaggcttgccagagaaaatatatatatttgggacagtttatgttaaacaatttattcatcacttttctgaaattcaaaattaattgatacactgtatttttagttgctaaatctggcaaccttatctgtgggggaagaaccaaatttttgtgtttgtttgtttggtttactttctaatcctttgccaaatgatatttttgtaaaacacagtaaaaataaattactagaaaagtgaagaaaaaagacaaaatggaagctccaccttttgaaattaataaccagtatatataaagtgtccttataatacaagttttcaggtgtgatacatgtttcagatcattatcactattattattattattttaatatcttggggaattctaagggttggaataaattaataaatttattataaattaactatagaaaattttatagttttaaaatatccaaacttggaatcactcttatatactaaataatgctacagtctttagattcctggctaaattgaggtcatagaaagagtagaaggacacattattgaaaagtatctgagcaatcaatgacctacagcaactgagcattttatatgtttctatcaattcactgattatgattatataaaaaatgctgttgaaaattaagttaaaacgtcatgttgagtcttatttatttcacagaaaataaggagaagaactgactaagagtttcaaaataggactagaagttta

SEQ ID NO: 25210 - DNA, 2723 bp, Bovine  19866880768530
  misc_feature (1)..(1): n is a, c, g, or t
nctagagaaagcccatgccccacaacaaagacccagtgcagccaaccccccccccaaagcaaaaacaaacaaacaaaaaacagattaaaaaactgttttggggggcttcagagggaaattagagaaatttgtgatgaggtacacacaagaaacataggaggtactcaaatctttgctgagttttgaaaacattctcgaaccaaactggccaaatggattctgtacggtgctgaaagcctttccctcaagagtgaaaactttttcttattcaaactttttgtcagtgactggcatagcactgtatccaactaaagttagtgattctcaaagcgcggtctggggacctgggggacaggaggcctggaaggttaaaactcttttcaaaataatactaagatgacatttccccttttcagtattatcctgccacaaaatataagttcattgatttcagattccacattgaaagtaaatcttaaaaataatcactgttgagttttgatataaaatcaaagtagagtctacacagttatctgaaaaggctataaaatataaaaagtattcctcccttttccaaatacttatctgtgtgaggccaggttttcttcatatgcttaaaccaaaacagtatattgcaacagactggatgcagaaatagacaggagaatcctactactttctattaagagatttgcaaacttgtcaaccaatgccattcttctcaccaaatttttttttgtttgttttggaaaagaaagggtctttttaaaataaaaatatgttttcataggttaacattggtaatgtgcttactattgccattttaatataaactgtttttaaagtatctcagtttttcgttcctaatgtggtagatatagacagatataacccacataaaccaacactctagggtcttcagtggtctttacaagtgtaaatttgaggaccactgaacaaaaatcttattattttttatgataaggagatgaaaaatatattttatcttagtgtaagtaagactttctttgaaccatatcctaatactaatcatttcatccagagcccaggaactgatgtcacttgacacccaactgaatgctgtttctgtattttagggtacaacatctgatagacagctcaagtccacatgggccatttaatattacaaggtcatggggccaaccctgatccaaccagtgaatgcatgttgatgtgggttacttggatgaatacaacatggatgaacagaaatatgttttcattttaattggggctataaagaaatctgaaagttgtaagcatactttattcctgatccccaaagatctggattttctgggaactgctgtctggaagatcttggcagtacatgtgtttcaaaaatctagtgtggccgaatcataactaaactgaggattccatccttcttgccaaaatacactttgaaggctgcaaagatttgactgaaagtcctgatttcccagccctgaggtgaaagcagaagaaatgtatcgagtctttgagttgtcagcttgaagtgggaaagtagaaaagggtcaatgtgctcagaggcacagtaaaaatgtgatttgagatatactcctctgggctctggtcccaaacctgataacaaatgaaagtgagcacagttcttaccttctggtgaaacaggagctcggttaggaaggaactgtctcatgagcatttgggatatagcagttgtgcataaaagttagaacctctatctttcaggctattgtgacaatacagagcaacagaaaaacattttcatgagccttgaagtaacaggatccataattttatggactggagtatcttggagaccaggaattctgttagcctcaaggataatttgctgaaataatgcacagatgggaaaaaatgaggctgaactatatgcattcctttttgccattaaataggcaatgaaataaaagaccacatggagaaaaggggaaatcccacctcaatacattattccctatttgtattttagaggaggaagagaagtgacagaggacggtcatcactgggagtttaactggctggcagcagcctcatatacctgttcatggtatcagaaccccacattcggcacatctcatttaatgttaacatattttaaaatgccagggagcttaagagtagcagcaagtgacgcactgtaataaagaagcacaggggttaaattaaaagtggaggaagtaacctggccaaagaaactggaagcagagttcgtttgtaggttttatttagacctctgatttttctagaggaattaggattctttgttgcagttcttacttagcttgactgatagattttacttaaaatagaccctagtattctattcctgctatgaaccatagtagattattctgttataattatatttcattaataaaaatgataaaaatgtgcaatatccaattaagagatgagcctatataacctggaaaggattactttcttttcatcatcttataaaattacaaagccagtctgtttctttggacaattaatcaacaacatcctacctctcctgttggttaaaaatagctaaaactttctgttacatctgggagtacttcccaaaatatataacagcaagtcatgtctcataactcctttcaaagaggcaatggctctgcaatgtataattgtcttcatgctcatcaagccatagatttttaaataca

SEQ ID NO: 25211 - DNA, 1959 bp, Bovine  19866880780384
  misc_feature (1)..(1): n is a, c, g, or t
nctaaagacaaaagaagttgagagtaatggtttgggacttcaaaggggaggaaggcaattcaaatgaagatggaaaagcaaatgtttcatagataaatgttttctgggccaagcactgacaataggacccagagtggaacctgattgataatgagttttttccaccacacctcaccaatattctttgcagacatctctggtgacagctcgattctaatgacaaggcctctgtctactaaatttgtataggcagttacagggaaggtcaatgtttcttcctgacgttttggtccttgacttttcagttccaaatgtctgcattccaaagagacatttcaggtggcaaattttactctcctacagtccccaataactagtgtgcattaaaatttttatacctggatcacatatagcccatttgaatattcattattgagtatgtaaaatttggactgggaaacagcaaaaactggggatcactggaactgagttatatttatggaagctgcctgaagaggtcaacaggcatcttcaaaattgttcagttctttcttcacttcttggagttactccatctccttctatggattaaatctgttagtggaccttaacaaatataggaataccaaatagtcataaagtaagatttggtatagtgcggaaaatgatataaatataagcctttctttttctcattagtagtagatcaagtaaggttctcaacatattcagcaaagtattagctgatttaatttccttgtaatatttttgagatatctcttctttcagtgtagttgaatatgcactagggattctaaataaacagagcttctaaagaaaatgtatttaattaccagtgtgtacagagccatagcagttccatggacataataaatttggtaaccatgagagaaaatcagcattaatgaagagtaatattgaaaatcttatcagctggagcatttaaaacaaaactattaagaggctttcatttcattaggcaaccacaattgctcttaatatcattttagagctttaaagaaaggagttttctctttaacctcaatttaaatgaaaagctataaatgatctgacagtgttaatagttttaaactataatttcactcaggggagtctatgctaagaaattgaactcaactggggaaaaaagatttatccttaataatattaatcacagcatgatttattgactgaaaaaaggggtaaatctctaatgttaaaggtagaatgatgtaataatgcaataggtaaattatgataaccacaatctgccatgaaatgacctgccatgaaagctttaaaattatagtgtcatgatatggagaaacactagtgaaaaaaatattgaacaaaaaaagcttttataaatgtttataaatagttctacaagtttctagcagtttaaaatttaattagcatagaaaaattaagagatttcctaccaaattcaggaccttgtttgatcaacgaattactgctattgatactgacagaactgcctaaagtttcagttcttttgttccatcctgtgagttaactagtctccttcaaaaaactgttgaaaatcttaaatttaaaagatcaaattgcaggaaaaaaaaaaaaaacaaaacaaggcttaatccaatgagtaaaaattctaaatctatgtatataaagtataggcaagataacaaatatagtaagaaatggaaaaattcacagcaagccacatcctactaatttggagaaggagaatacagaaaggagctgggattttccaagttttactttatacacatttttacaacttgagtattttgtaatacaactaaagaaaatacaaataacaacaaaaaataaaataggaaatcatagcaaaatttatgtctattttcaaaagcatataactattttttttccaactacaattttattttatttttaaactttacaaaa

SEQ ID NO: 25212 - DNA, 3330 bp, Bovine  19866880788443
  misc_feature (1)..(1): n is a, c, g, or t
ngaataagtacataaaaatatattgcatttggatttcccccaactctctttttcccgtggatttgagctcattatattcagctagatctattgattctatttctacagattctaagtgatttctttcagtttatccattgttccccttttaataaacagtggctagtaatatgacagtcggcagtatttattccatactattaattctatacctgcacaaggacatagttttatgctaaacaaacatacaagctaagctgcatcccctacaaggttaagttctgtggggtgcactgtggggtgattaccccaggggaaaatgcccctgtgggttctgcttatctctgaactaagggagactacatggacctcaaaccctgcatctgtaaaataaaaatctctagggtccctttcagcacctatgcatcagatttctgtggatactttctaacaatcagcaatcttctgttgtgttctccagtgcactctagaaagagccagctctgcgttctttgagatacgtaggaaaatccactttccatatggaaggtgccctgaaatgttgtcctcagttttcccaatgcctcttgggagtagaggagtgataagtttgctcacaaacccagtcctgtccctaatcttcctttttttttttttttgctttttggatagcaagtgtctcaggccaccaggtggcagaatggctttgggtaatccccaaagggatgtgcacacatcaattctcattttcttggttccattttagagctttgagttctagaatcattcctctgtgttttcacaaagtcgttggcactacaacttctagtcctcctcctatttatgtgtctccagactcacatatcccattgcagagctttctttatgcgaagggagacaaacatgtgggggcattctacaggtagttttagtcctggatggaaataaaaagagtcagtaaaagagtgacttatattgacttgaggagcaaaggaaaaatggttcttgattccatgtagttaagaatgcaaactttaatgtgaaagatgttaaacagtctcacactgtctgaatgttggttttcatttagagctgtaaccaagagagaataagtaaataataatagcaataatggcaataatcatttcaaatccctttcagatttctcaggcttaatgcctagtacttctgtctttcaaactgtagcaatgagtgctccatcagacctaattaggttctgttgacagtggctaagatcaagaaaccttctgtcttacagctgcttcttgaaaaacaggaagcattctctctccttgtcccaacacacattaccttttctgatgtgagaaccataaaagagtatttccacttataagtattcatgaaaaaatgcagataattatacttttcttccagtattgttatgggtaaaaaaaaaaaaaaaaaaggagaaacataaatgcttagcctggcatgtggcaagcactcacagaatggcagctgttatttttttttttgtaaaaagaactaaaatgattattacagttgcttccaagcaaagatttgtatgacttttgagattttttttctaagctagctcctctagcctaaaagagaaaagtggaaagaatggcagattgatccctttccagttggagagcaatactatgatgtaagggatcatactgctggattttcagaaaatagttacaagacaaaagacagaattaacacagaaatcattaagggtagacacgctaaaggcaaggtttttcttttaaaggtagaacataaagatactttccttattgtcctttgggttagaagtgagatgcattctctttctgtcaagcatgaaggatttatttaaattctaaaataaaaataccatgtcctatactttactttggtcttccctggtgggtcagcagtaaagactcctcttgcaaagcaggagacctccttcaatgcaggagatgcgggtttgatccctgggtcaggaagatctcttggagaaggaaatggcaacccactccacgattcttgccagaaaaatcctatggacagaggagcatggtgagctaaagtccatgtggttgcaagattcaggcatgactcagtgattaaattattaccataatttcctatgtgtagcctatcatatatactataactgattagagttgcgtgttttttttgcatttttatttatttatttatttattttaatttatatattttaattggaggctaattactttacaatattgtattgattttgccaaaaattccataacctgaatctggtaagtgaaaaataatcaagtaataaaatattaataaagatcaatttactagaagacatttacccttacataggcaaacatttcaatgacttattaatactagaatctgatatgcatttaataatatcaattttgtaaaagaaaaataattttatttgtcaatatcattagtgaactacagtaacatattttataagggagtatattttccatctaagcatcatatctgcagtgatgtttttcaattcttagaagcagattaataatgaagctaaaagaatttagctttagggttgtcatttcctgtaccctgaaaatactggaagttgttggtagttgtagggaactggagatgagaaaaattcaggtttaattagaagtatttctatggaaacatcatttataaattgctgaaaacaaaaaaatcagagaaaaaggatttggatatcaaaataggttctgatatgatttttttctcattctaaatactcattttatactgttataggcagaatagtatctttcaaaagagacccacactctaatacctggactctgtgaatatgttgcaagggaagaggtacttcaggttgcaaatggaatttacattgctaatcaaatgaccttaaaatagattatctgtgtgggtccagtgtaatcccaaagtccttagtgaaaatggaagtcagaagagttggtgtcagactggtgagatgttagaaggattcaaccagccattgttggctttgagaatgggaaaacaggcttcaaagccaaggaatgtgccaaccatctagaagctggagaaggcaagaaaatggagtctcctcaaagtctccagaaaggataacagctttgctcacatcttaattttatccctgtgagacacatttaggactctgaccttcagaatgaaaataataaacatgttgttttaagccattaagttggtggtaatgtgttacagtagccacaggacactgataaaaatacctacttttgaatttgcagtttcgttactttg

SEQ ID NO: 25213 - DNA, 1210 bp, Bovine  19866880893211
  misc_feature (1)..(1): n is a, c, g, or t
ntccttgtagataataatccatcagagctcagatttgttgctttatgaaggatgggctcatctgatctttgtcttttgttggtgcctcatttctaaaaagactgcatcagtttcttatcacacatagagaagtgcaaatttaactctttccccacataccctcacacttctgaaaataatgagctttgttgtcatgccaataatccctgtacaaatataaagaagtatagaaaccaaggtgctgccacactgttgggcaaagaatgttctgtctcagaagtacctactgatgaaatcagatacatttgttaagtggcacgaatgagcagatgtaggtctgaggccactcaagatgtagaacttgaatttttatgctccaaatgggactctttcagatgcaaaagcccagtgacaaagtctctgagtctccactttgcttagtttcaagggctgctatgaaatatcatatgataattagttccagaacagtaataagcttttatttttaaatggcctacatgtttaatttactcgataaactgaaatatatctgatcttttaccagcctgtgccacaataacagctgttttttaaagtctcaactgggacagtagttaaaagtccttgcaaagtaaatggtgcacattcaattaagcaaaaaaaaaagctaaaacaggtattatttagtgggtttttaattagatgacttctattaaattggtgctctaaaagggatttcacaacctcccaagattatgctagttagaaatgaaaccatataaatcccatttaactctgtcttgtgagagttctcttacgggtaaggtatttctctgtcatcagcatccatatgcccagagttgcacccttcactccctaaatgatactcaagaggtaaaacaaggtagctgaatctcagctggtaaatcaaagagacagactttctggtcatgaggcaccacaaatatctaaccttgcatgcctgcaattttccaacatcagagacacagtgacgtgagtccatgagtaagacttttcttgttggaaaatgttatgaagcagagagaaagaaaatttagtcctttctccactgggaatattcataccctcagtggatcttaacttgtatttcagtaaatggcctttcaagttctatcccctgctagtcttgcaaggttttagtcctttttaccattgctgccaaatttta

SEQ ID NO: 25214 - DNA, 1684 bp, Bovine  19866880911265
  misc_feature (1)..(1): n is a, c, g, or t
ngagttataaagaagtctaacgctgacttgaatattttaaaacaaagagtaggagtttaaaaaagcagcagaaatttcaacagatgactttaacatgggagaaagtaaataataaagaaaaatacagcaagctacacaggacttagatcatttaaatgctgaaagataaaagctagttcaaaatagctctaactcagaacagtgacacatctctgcaaaaaggaatatcaaacaattgcatatcattaagtctaaggtatcaaaatgtaaaagagtaaaggtaattttgtgtacattattaaatgtgagtgattgataataataaataataagccttttaaaaagccgaacattaaaagaaagagcaactgtaattaagaaaggcatacagagtctaaagagtcatttaacattgataatctcaattataggaaaaaatatgaagaaactgggagaaaagaatgtcagaagtgctactactaataaaatcataaatggtttccattaggtatactttattttaaaaagtaagataaaatgtctattttccaaaatttggggacctttctagaaattatgatctaagttctttagcctcagaccaattgagaagatgaatatagcaggaaagccctggctctcctatattttgaaactagattcatatatttgttcatctttcactagtgtgggctgtcaaaaagtaggtgctggcagttaataaattggaggctgttccacagtcttgtacctcagatcctccctaggataatcccctaagtgacgtcaagagagtgcggggaacagaccctaccagaactgataggcacttgctcaagctgcccaacagtctattttcttattcatgttgcttttgatagtaatttaatcttatttcatttataaatgagcaggcatgttttactgtatacatgaatgtatgtttgggggaactgaaataaaaattgaaaataggtgcattttccttgagaactttcacatctacttattatgtgcaggttggaggttaatcatttatcccattcttaaatcagagataactgatttaaactccagagctttgaacgaattgacaaattagtcattaagagcagatagatagaggtcagtgtatggatttcattaagaataaaactaattaaagactgtggcttggaccagtggtcaaatgtgcttctgaatcaccactctccctagccttcaccctcactatctttggcagaactgcttactgcaaagtcattggaaaactcagagaccgagcaacgtgagttctttcctttgcccaaccagacaaatgaagacaagttgtgggttataaatggatagaagtgttctcctgggtaatgaaatagaagttccttctcatctatgagataagttcctccccttgcttccccaaatttaggactagcccatctcaggacctcaagacagcacagaaatggccttgtcatttgagtggatctgattctacttctttgacattcttccttcctttttgacattttagtcattttactttaacttttctgtgattcttataaagaacatttctttttaatcatgcctgacagatttttcacttaattataatagtccatttgatttctgtgtaatcactgaaacactgggttttgatctaccatctttcttttcattt

SEQ ID NO: 25215 - DNA, 1721 bp, Bovine  19866880969126
  misc_feature (1)..(1): n is a, c, g, or t
ncaagccaagaagagggtcttcataagaaaataaacctgctaattcctccatcttgtgcttccagcctccagaattgtgagaaaatacatttctgcggtttaaaccagtcaactagtattttgttatggcatcactagaaaacaaatacaaatatgcatctattagaatggttaacatttttggcaaaataacaaagccaagttttcctgaggatgtagggtaactgggattcacgcacactgctggtgggaaagaaaatggtacaactaacttggaaaccagtttgtcagtttcttataacattaggtgtatattttttgattcagaaatcccatttctaggcattttttcagtggaaattaaaagatatggctatacacaggcctatacctgaatctttgttgcagctttatttgtcagtggtccaaaatcatacataattttgatgtctgttgactggtgaacagaaaaatggtggtgcatctacataatggagtatggttgagcaataaaaatgtgtgaactgttgatacatgcagaaggacgaatcttaaaagtattatttcaatgaagagaagcctgacaagatagactgaatactgcataattctgcttgtatgacattcttgcagtgcaacactagaaggtagaaatagatgttttcagttgcttgagttggattgagaacatggattacaaaggggtacaagggatatcttgcctgtgtggtggtgattaagactgtacatactctctaacactcctaaaactttacatctaataaagagcaacttttgctatatttaagttatacttgaataaacctggtatttaaaaagaaagaaagtctagagaataaaatgagctaaaggccaaccatgaacactgacacactgaagaaaacaatagcttaacaagaactaatgtaatgataacattaaagaaaggttttatacttaataaaattcaagtagtatgcattacataaataatttgacctgagatttccattaataacctcagactatagaggaatgtaaattaattagagcccttggcttgtaaccatctattgagggaagcattcatcatacaaatagtttcaccaacagatgccatgtttgaattgttctctaagtgctataaatcactaacaatagaatagttagttctgatcgaaggtactggggagggcttcagtgaggaggtgacatttaaattaagttctgcagttttctgttgtttaccaatgtcttgagagctgtaaatatatatttgcatgatgcaaaatcccaaaataccaccatctgattttatgcatatgtgaggtgtttggagatgttaagtacatttgcaatttgcagtgtatttgtgggtaccattaaaccctttcttttccaaaggtcatattgtttctatagtaacaaatgcatttcaaaatgaacatcaacactgagatcactgaactactgctgtaaagactctgagttgaccccttagcagcaatagattctgctaagaaagatataatctgaatttcttttcaaagtcttatctgtctattcttttgtgtaagaacatattcaagagaagttgcctcacttacattgctatatagattaatgagcaataaaacatgcttgtttcttcatgtattatgcaggcgcaatggttgttcatctatgtcatctgcactccattatttcatttatcaattaat

SEQ ID NO: 25216 - DNA, 1514 bp, Bovine  19866880971703
  misc_feature (1)..(1): n is a, c, g, or t
naatactgaagtgggctgccattttcttccccaggggctcttcctgacccaaggatggaacccacgactcctgcattggcaggtggattctttactactgagccaccagggaggccccagtatgtggagtctagaaatactgagtttatttgtgaggaaaattttgaaagcctcagaacgtctgataagctggtggacttccatgaagaaagttatctgtaaaaacaacaaaaaagaaataaacacattgttatttaaccactgttttttttttttttttttttaagcaaagaactgcttcaaattcaagatggaattattcccattgtttagattctgtggtgtgataaaacaagctgtcgactattttggccccagagtagtcccaagttatttgtaacaaaagtaactgaaagagagatgagcgctcagctttggacagctaaagacttaaagcaaatgcctgtttggctctaagaaagagcagacacgagctcggatacgttttaagtgaggctgccattctgcctggtgacagtagatggcggtggtgtgccaggagagagcctggcgggttgtaactaaggcttgcaggaggtagtttatgcaggtgcaggctaaaaaagacactattttgtctgaggaactgtaaattgtattcatgattcacatatcattattaattcattttgtattcattatcatacagcaggcttcatttggcatttaggcagatgtcagagtgtaggcacttccgggagctatctgtgcaggttcagaccgggctggctgtgcacaggttttcatggatgcataaatggagggaagaaatgcttaaaaaaaaacaacaaaaaaaccgcacaatttggctgtagactggaccatggatttcccagctaatgactttgagcctctaattctgtgactactgtgtgtcattacttccctctgcatattttttggcagattaagtctggcagatgagaatctcccaggttggagagctctgaatgagataaaaatttaataatcttattgctgacccagccaccaagggcagaacagataatcctttaataatgcacttcagaagcctggtttgcgtagccagagactagagacagcctggcagagtggaaagagagcctttgagacaaaaaaaaaagatgggctctggtgttgacttgccactaactagctctgggactttgggaaaatcaattaaccttcccaggtctcaggctcataatctataaaattaagggattgcatgagatcatcccaaaactcccctcacattgctaaaaatagcaaaattttctgataaaaaaaaaagcacgtactagatagagttttgaaactcttaacatttctttgtgacctacttcaaatccgatgagttgtaaaactcaccatgaattgtaaaatgtatatcatctgtgagtaaatgcacttcaagctgttacaagtggatttattgccaggggccagtgcagtatcgcatagaaggacag

SEQ ID NO: 25217 - DNA, 1705 bp, Bovine  19866881183930
  misc_feature (1)..(1): n is a, c, g, or t
ncagactgggacattctggttgcaaccttggctctgaaatctacatgcaaaactatacccactttgtagcacttaatgctctagttagtggccaggtgagtatgatcattcaagtagattttagagccacagtgacaaagaagcctctgctgcctcaaagccccatcctcttcatttacatcataaagtcaatttctaggctccaggagtcagccatcttctcagcttacaaaggagagaaactataacccttctcaatgatgttagtcatcactgagcaatacaatttgccttgatgaagagagaataagttggtttaatttgcaaagtttactcaagtagtcctatttctgtacatcatctggttccttccatactatattgaagacggtttgtcatcacaactttatttagtatgaaatgaaattaatcctagttagttttaaccaaaagtaatttttttttttttatttttttttaggtggctcacagagtctcaagatggcatataaacaactctgaggctaagttgtcagaaatgcccaagcaatgcaattgccagatttagcaaaaaaaaatacaggacatcagataaaactgcatttcaaataagcaatagacctatctcccttaaagaatctggtggattttacaatctatttgttaaaagatttattcgctcatacttgttgctcacttaaatttggtttgttaatttatctgatagtaaaacctaagtcacatgtgttaatccaagtttgataggagccaaggccgtgtgagcttcctattttctgtcttatgctctgtgctcagtcatgtctgactctttgcaaccaaggctcctctgtccatggaattttccagcaagaatactggagtgggttgccatttcctcctgcaggggatcttccctacccaggcattgagacaagtcttttacatctcctgcactggtggccggattctttaccaactacaccacctgggaagccccattttctgtctcgggaagacacaactcacaaactaggcaattaatgaaaatagggaggatattcaaaggtaatgggtagctaaacaaatgaacgtccatgaaactctgcagctgggtcttcgaaatgtgagtgtacctccactagtccattagatgttattagatttaatcacagtgaaatactttaactcaaatattttaaagtgaaacaataagtaatttatattcaagtaataattaaaatatctcttcgttaattctcccacattggaaaattattcagcattgtggacagccagttctctccattttagaatactcaatgaaaaaatattagctccctgaaaataatgtcctaataaagaaccaattaagtccttaaatgtgttatttcttccaaatgttcaaactctttttctaaccatttttatttttagataaagagaataaattatataattataggaaactcttgggcttttctacattttatctttctacagtatgtgaatgatagtatatatggagcttttcaaagcaagcctagagggctttggcattcagagatttgagtcatgagctatcagctcactgcagcattccactggaatgttatacattattcagacaattcatttttatggtattttgtactcagaatgcttcagaaagaaactaaaatgccatccaattattcccaaatcaaat

SEQ ID NO: 25218 - DNA, 2481 bp, Bovine  19866881189174
  misc_feature (1)..(1): n is a, c, g, or t
ntcctctgctccctccttctcttcctgccttcatctttcccgcatcagggtcttttctaatgagttggctcttcacatcaagtggctaaagtattggagcttcagcttcagtaccagtacttgcaatgaatattcctttagtattgagtggtttgatctccttgcagtcaaagggactctcaagagttttctccagaaccacatttcaaaagcatcaatactttgatgctcagctttctttatggtccaactctcacattcatacataactatggaaagaccatagtttgactatactgacctttgttggcaaagtgatgtctctgctttttaatacactgtcttctcctgcagcacacccatccttaaaaggaaagtaatactgtgctcagctccacagggagagacttgatgtttcatagctggaattttcctggactatgcttgtatgcagtttcttcccttggtgaatataaatttgtgtctgttaggagtaataaactataaccatgggtataacagctttcagtgagttctatgaatcattctagcagattaatgagtctcagggtggtcgtggaaaccccctaacttgcagttgatatcagataaaaatccttacatttcttaatccactttctaagcttcctcaaacatgtatcctctattttgaccaaagcctccaaaatgatcctgacattttctctgctgtggtgtattactgccataatgtcccatgttgttcatacttctttttgtccacatcttggtagtcccttcctatggtgactcagggtgcaccatattatttgatttggctaatgggcaagagacaatatgatacagagacttagaaagtatttgcatttcaggatttgccctgtgcttccatgtaaacaagccttgactaacctgctggataacaagaggctgtggtgacccaattgttcctgtgacctcaagtgacagtctgccagcatacctgtaaatgtgtcacactagattgtacaataatcagctaaacacagatacataagcaagcccagctgacatcattacttgaatttcaagaaggcaatggaatgaatgggtactgatacatgaacaagtgacttataatggaaaataagtgtaatggagatggtccacatctgggtcatgttaatgccaaggaggttatgcaagaaataggaaaggaataggctgacatcattcccattgaatgaacaggaattctgttgactggaagacatatggctccttgaataaaaggagtactgaataaatgagttacttatacattacagtgccccatacattgtaattagatttgtaatttgtagagtccaccatagtgcaacattatcttaagcagacatatataaaagtaggttatttaaagaggttcagtcattttccaattatattcaccatctaatctatagacttttatcatggctcctctaaatagggatcatggttgcaaccctttaaaggacaatagaagagcaatggtttcttgttaatagattattgcatcagtgaatacattataaatagtaaggtaggtatattaacagcacattaatgtgtagacgagttgtgtctagtgcaatctgtaatgtgtttttaagtttgtgctttaaattataatgcaaatgtttctaaaactttaatattcaagattacctcatgagatccaagcttcactgttatggaacaaactatgcctgtctccaatatttgtaagttgaacctataaccccaatatgatctttgatgatagtgcctttagataggtaactaagggtaaataaagtcataaggatggaaccctaattgaattgaactagactgagtgacttcactttcacttttcactttcatgcattggagaaggcaatggcaacccactccagtgttcttgcctggagaatcccagggaaggggagcctagtgggcttctgtctatggggtcgcacagagtcagacacgactgaagtgacttagcagcagcagtatccttaaaaggaggaagagacaccagacatctctttctctccacacaagcacagaggaaggccatatgaaatcacagcaagaaggcagtcatctacaatccaaggacaggggtctcactggacaccaattctgcaaggaccatgattttggatttccagcctccagaaaaaaatagtttctcttgccgaagccactaagtcttttgtactttgttacagcagcctgagtatagtaatatcctccttcttagttaaaatgaatcgttatagcttccttaacatgcactccggctttttacccattccactctactttgttgttgctaagaacagcatgatggttgtcttcctggaacctaattagagtctgtagatcatttaaattagacatgttaatgaaatattgagtaatggaaaattcattatggctaaacaccataaaaagacaattaggagttta

SEQ ID NO: 25219 - DNA, 1977 bp, Bovine  19866881329482
  misc_feature (1)..(1): n is a, c, g, or t
ngagtgttaattgtcctagcaaaatttattgagactttctgttctcttgtataatgctacttcttttttattttattttagtttttaactttacaatattgtattggttttgccatatatcaacatgaatccgccacaggtatacacatgttcccctctctatgtaagctttgggcttttgtggcctctccattatgttctacttatcctttattttcttgccactgtgccaatacccacccaacccatcaccaccctattgttcttgcctattttgagccatttaaatttatataaaagtagagaattaatttactaagttcttcaaacagtcctgatgtcattttgactgaatatgaaatacattgaatatgaaaatattgatagttccaattgcttattagcttctacaaacatatgtttgttatttgtttcctgattaatatttaaaaatttttgtatgtgtatgtctgtatttcatgtgtgctttgttttgtttttaggtagctaagttgtatctcactctttgccaccccatggactgcaatacaccaggcttctctgcccttcactatctcccagagtttgttaaaactcatgtccattgagttggtgaggctatctaactatctcatgctctgttatcccctttcttatcctgcccttcagtctttcccagcttaaaggtcttttccaatgagctgtcttgtcacatcaggtggccaaagtattggagcttcagcttcatcatcattccttgcaatgaatattcaggattgatttcctttaggatagactgatttgatctccttgcagtctcagggactctcaagagtcttctccagcatgacaatttgaaagcatcaattcttcagtgctcagcctttatggtttaactctcacatccatacacgactactggaaaaaccataggtttgactatatggacctttgtcagcaaagtgatgtctctgctttttaatacattatctaggtttgccctaccttttctttcaaggagcaagcatctttttggagtcaaagaaaaaaatctgtttctacttttctcatatctatttgccatgaatgatgggaccagatgccattatcttagttttttgaatgttgagtttcaagccaggttattcactatcctttttcacccttatcaagaggttctttaattcctctttgctttctgccatgagagtggtatcatctgcatatctgaggttgttgatacttctcccagcaatcttgattccagcttatgattcttccaacctggcatgtgtgcttaaaataaattacatacaaaatactttatttattattcatttcactaattccaacttttttttaaaaattacaattcatcgcttattccaagaagtgtttttggtcatcaattttattattttcatatcctttacttaatgttcctgacagaagaaatttacctgtgtgctttcatattcactctttatttctccatacttctcacctgtattttagagaacaacatttcaaaggataaatttacagttgacttccaagaagttccagccaatgagaagagagagaagcagtatacatttgaatctcttcttctgtctcagctggtatttctgatgtaggctctttcttacttctgttatctttctccacaatttcaaatcacatcaaatcactctttctctctcctcacatgtggtctaggtcttccttgttggacctggtttatctcccttgattatccttccagccctcttatgattgtggccttgtgatgtttttaatagcaaggctatctcactaaaactcttggcttatcagtggagtggccaactgactgtagtaaaatctctctttttgaaagacaagatttctgtctttcaaacacaaggtatacccaaagtgatctcttaatgcactttgggtttacctctcacatcttttactctaataaatggctca

SEQ ID NO: 25220 - DNA, 2023 bp, Bovine  19866881403508
  misc_feature (1)..(1): n is a, c, g, or t
nctccagtttcatccacctcattagaactgattccaaatgtattctttttaatggctgagtaatactccattgtgtatatgtaccatcgctttcttatccattcatctgctgatggatatctaggttgcttccatgtcctggctattataaacagtgctgcgatgaacattggggcacatgtatctctttcccttctggtttcctcagtgtgtatgcccagcagtgggattgctggatcatatataattttccttttatttctgtatatggctgtgtgtgtgtttaaagatacaacatattttgtttcctataggaactgtcaacttttatgttatttttactctcaaaaggccaaaggatgcttgaaaatgcatttgaattgctgcaaagtgctgagtattatagttgaattttaggtttaatttatgtcttaataacactcaccagagttatctgttgagcatcaaaatatcactgaaaaactcttcaataaactactgcagcatgtagctttctagccttttgactggcctgcaattctcagcaacttcatctgtgtttttcgtaagatatatgcacaagctgagatttgaagtattctactttgtttattcaggccctgggaagtaatcccaactggaattttatcaaagatatctgcatggcaataatgataatccttcagaatctagattagttcactattttattccactaatgaatactctggagaaatatgtgtaattttacagaacaaattaaccctagagcagaactacttacaatgttcattttactggacacctacaaagcagaataaatttaaatacagtttaatcgatccttccaggcctggttgagatcaaatagctaggacataaatataaaggaaattaacataaattgatgctaagatttttttttttttacataagtacttcaaatgtcacaattggtattctaatttcaagccaatagagacactacaagactgagacaatagcattatactatgtatcacttgagtcacagtggttcagaggtggcttttgctggcaaggaaatctgatttttaattactgtgttgtttccagcatataatggccatgacttgtttaacacgaataccgctgtatgagctgcagtttgtttcccatctgccttcatttcattgcacaattgaaaaaatgtaactatctatcctactaatagggcagcatgaaaactaattggtattctccgttttcaaatatttgtatcctcaagcctctcagcctaaaaaagcctgacagagtctcttcattatctcattatgctataattattgcgtactcaattgccagggcctgagagtaattcgtttatgctctgcatcaatataaacttgtgcctctagaactagatttaaccaacttaaaaaaattataatttagattcacaaaattatgtctcctggtgattcaagacatgaatcatcttatcttcccattaaaagaagaaaagtctaaatcaatatgctaactattctagctttcaaagccttgttgataatggcccttttcttataccatactcaaaaaggacaagaagcacgttttgatgattttatgcattcctgatcaccactggctggcattatgttctcattgacaaactcttctgaaatttacacatctttcctcctgtttgtggtataatgatgatcatattatagtggtatagtgatgatcatgattaggtatttcttattctccaattgtactcaaattcaatgcactcaattaaaaaaataataatcttctatttcataatcccaagcagaatgatttgtaaaaggtacatattaaatatatatttacagaattggttttttcaatgagtaaagaatctgttccccttttcatctatgagtagctttatattcctttcattttcaattccatcacttatttttccagtacacataggtaatcaatgggaacagttttatcatctttcaaatagataaaactattttaaaaa

SEQ ID NO: 25221 - DNA, 1591 bp, Bovine  19866881649038
  misc_feature (1)..(1): n is a, c, g, or t
ncagcaaaaaagtttgaagagacaaagcaaacatcaaaagcatacctaaatatggcaaaaaatgttagaattatcagaatcagacatctaccaacccttccagatgattctgatgcacacttaagtttgacaaccactggtctacaggactgatttggatactaaatttcctatatgtgatttctctattttttttttttttttttggtcaattcactcacaattcttctcaatataagcttcaagtaatttccatttgctctgttcctgttatccttatctatacaaagatgccataaatcccttgagtgatatatcatgtatgtcttttatatccttcatgacctaatagggtgctgctaaagaaatattcactaagtgtttagtgaaagaaaagttaatgacttgacatatgtactatctaaggctggttttgcagacaacttttctgcagtctgacctggatagagctctgctctctggatgatgctgaatgtcaatgtgaagacctctaagttccatgaaccagagaagactcccatttatccagagacatcatgtcccatttaagattatctaagccaggaacccctattctctctcttgttattatacggcaagtatacaaaagagaggagacaaaataaatttgatgtattggaatgtagcagtttagtataagctctgataaaaggtttgatggaggatgagctgtaagtgtttgataaaaactaaaggtcctgactaagcaattggtcagagttaatcattaatcagattttctctttcattaattagagttattcctcttgcccactggagttgactgaatgtaattaccctaggaaaaataacaatatttcaggtccatccttttcttattctgaagcacccaaaatgaacaggtgcttggattttacccagaacttgttcatttctctaattcagttttgcccatttgaaatcctgaatcttgtaagaaccaaagaatgtaggtttccagtagacagtccatctataattatacacactttgcaaataaaaattaaaacctgtgttcagattatgctttcttcttgcttatcaaaaatgaaaacagactcaatttgaatatccagattcatcagatgcaaattgcaacttgttaagacattgctatgttcacttgtcttagcaatctccatgtagttaatttgtatgatgaactagtgagagatattttgttactgattaatggaaaacaggccaagagaggttaattaaatttaacaggttacatacacagctaggtacagaacattttaaaaagttaaatgtatatatattgtgacagagagcttgatttcttagcgatatcttggaccaatgtgagcatttatttcttcaaaaattttagaggatatagcttcaggtgccttcaagaaatttttcaacttaaagattattttttggtggaaaccttgggtttttggcttcccagtagcaattttatttagtgttcctttattgatcaagtctcctgtgacttttctatttacttctctgatggagggagagagggatgtttgctagcctggttgtacactccatg

SEQ ID NO: 25222 - DNA, 821 bp, Bovine  19866881651501
  misc_feature (1)..(1): n is a, c, g, or t
nggttgacagtcaggcttaaccctggctggggatattgtttattctctaacttttctatttccagattccatgtgatcttagtttctgactttggtcccctcttgatttgattattgaggtctgagaatctgtttttaaagtaacttaagaggctgaaagactttcagtctcaattgcatctatctgaggcacgcagacatgtcctagcagctttatcctcaggcccttatttcttcccacgagcaagcactactcaaaagtatgagagcagcttgcattagctctaacatgcaagccctttcattgccttggagacactcgggcaatttatgatcatttgttgcaaagaggttctgccattactctcagccagaaggaaaatagcattgcctctacaattgcgtctcaaggactcagctaatgcagccctggtgctcttctctggatagaaatatctacaaaagcgttgagagctcagatcaagtgttttcactgtcagccaccaaaggcgttctgccccctgcctaccacaattacaggactttctagccagcagaaataggcaatacaaaatttcttctaatgctcctgtcaatattgaaccatggattgcctgaaaaagagtcattcttttccctcagtggctcgagtacactgtgaaaggtctttaacagtctgtgccagtctcggggtgaggccgaaaggctctgcatactttatcactaacactccaaagaactattgatgcactactggatacattaagggggtacttctccccatatgtggacctcttccaaatgatgagaagacaccagaa

SEQ ID NO: 25223 - DNA, 1133 bp, Bovine  19866881898771
  misc_feature (1)..(1): n is a, c, g, or t
nctaaacagtttgtaaacatcatttacacttgagcctacgagttactattatttccactttaccagttaaggaaactgagggccacaagagtttgagactatcacaagctggttccactaggatatttgccctatttcacactatgctgccggtttggtaatatctttcagtgcagggctgaaaatgaaagcacaaatttagtgcctgtggaagaaaacattctctcttctgctcttgaaaatatgcaatgtctattctaacttagatatgaaggggaaacggagtagcaaacaggatttataaaccactggtataaatttaatttttttgtctttgaatatttgcattgaaatctgaataataaaaaaactcataattgtgttctatattcattttatacttctatagggtaattgcttctttataataaaatatgaaagggttgtttcagaaattctgatcactattctttttccaactagtcatgcccaacagatgtttttaaaatgataaaactggtttaatcaacctcattaacattaatatttgagaaattacttgcctttaatgcatctaagactagagcacagctaattgtattatgcaaaattgtgaggcactactaaaatcttaccagctttagaataagtgagcagtacacccagaacactgtcccagcatttttaaggcaaaatttgctcgtttctttttgtaatatttaatatgaagcacataaattttcccctcaaataatgaaataacttctttctcaagttcttgctttctctttctctctcacatactcatacacattttaatctagaagttgctccattgtttcagagtaaatgcatgcaatgatttatgttttatctatctctacacctaaattctaagagttacaaaataccacttagcaaacttagtgtgtctggttgaaattagagccctgcaatctgtcttaatgaatgataatattaattctgataagagcagagtctcttattaagcatagacatgttaaaagttttatttctcttttaatcaagacaactgtataggcaaggtactgctatctgccaagcaaagtactgtctctcatggacagggtgcgaattaacaatatcatatg

SEQ ID NO: 25224 - DNA, 1597 bp, Bovine  19866880406506
  misc_feature (1)..(1): n is a, c, g, or t
ntttcaaaaataactaattttactggtagaattaaatgattgtaagagaatttcttctcattgtcagaatggaagttcactgtatgtctcaaatatttatttttataaacattatggcctgggcacattaaggccattttcttgtacataaaaagccactttacctcagctttgccttgttcctgtaaaaacagaagattgttttatggtctgtctaactgtatctttgcctgacaaatagacatcaaataaagaaccaattgttgtaccttactcagagacttttgctagatctccttacctgaacagacctcagtagtaacaaagaggacccagctgataaatgactggttttgttttcatgaaagttaggagaagtatcacctgccaggagggtttatcttggactctgggggcaaaaacctttactggctccagaatgatgacagtcactaatgtttaagtgatattctaacctttccaaaatcatttatatgatcccattttatccttacagtgtttttagaaaataaaagcacataatatacgtagcatatactgtttcagtttggtttttgctcacatgaatttaaagacacacacaatatccagtaatatttactatcaattttttgagtgagtgagtgagtgaaagttgctcagtcatgtctgactctttgcaacccccatggactatacagtccatcgattttttactactttgatatactcttatttttttcattttatatttctctcttttttgttattctccggacattttttcttcccaccctttgcagaacattctgattatttgtttagaccctccattaaggaaatatccattttggctatttaagtgacatatatggatgcaaaaacatccggcacagtgtctgacaagtaacagatgctcagtgttgactttttgttcctctgcctcctctccctctttttgtttttggtttggtcttcaggttggtagtgtggcatcagcccacacttgatagttgaatacatagacatatagatagataatctctatccatccatttttccatttatgtatctttggtccttggttccctctctatataggtttctttcctttaatccttgatattcagtttctctaattttcttatgcatgtggttgttcagtcactaagttgtgtctgactctgcagtcccagggactccagcatgccaggcttccctatctttcagcctctcccagagtttgctcatattcatgtccattgagtcagtgatgctatgtaactgtattttgtacttattgaatacacatgtacagaaagcaagtgttctagtgatcatgtttaatcgtgggagatacaaaccagagtaagataaaatcatgagtctggcgtaggagatacacaaataaatatgtcaaaccatgtgtgatatgctctcatagagaatatagaggggacctgtaatagggttgagagctagagcctgactctgggattttggggatcagaagtgaatgataaatattattactctctgttgagatttcttttgatagtatgttttgaggaattaacataattaattctttgcattc

SEQ ID NO: 25225 - DNA, 1034 bp, Bovine  19866880482739
  misc_feature (1)..(1): n is a, c, g, or t
naaaatcagtagttcaaatatgaccgtctatcctggaacttagcttgagtgttttatttgcacatgactgagtgactgcacacctgcttttccatgacagtatgagcttattcctattgtcctggtgcaattattaatattgcccctctttcctctccaaaatgtctagtttggattttaactattcaccttaagctcaagtcatacagtgcagttgttttcataaaacctttaatcaaggattgaggggatgacctgatattgaagtcataaatgcatatctgcattcagatcactgctctgctaattacatgacctaggatattttcctctctggttcttcattccttaaaataaaatatgataataatagtaactatttcagggtcattctgagaattaagtaagaaaatatcctatactatatgctattatatagtataatatactattagcatagtagctagagtttaagaaggtttctataaatgctagctatgaatattacaacaaccacctcagagccctaagttttttcttgaatataataatagcaaaattcttagtaacatggactattgcattaaaaataaacacatggaaagtgcctagcagagtgccaagtatacaatacctagtcaataaatgtgtatttcttagatctaaaagattttttcaaatctaaaagctgcattactagtgatccaccaccactttgtattttattttataaatagagattctacacctggaaaaataaagcacaaaaaagaacagtagcaaaatatactttatgtctagaaaatacaacctaaaatgaaaacaataggaactgagattgtctcagaggagcaaaattgcaaggagattcaatattccagaatgtttggaaggtccttgcactttggagacatatgttgctgaatctttccttttttttccattctttatagctttcccccagcattccatcccatcccaccctagtgtactcagccagaagtagactcatttgcctccaaggacatatgtca

SEQ ID NO: 25226 - DNA, 2025 bp, Bovine  19866880530316
  misc_feature (1)..(1): n is a, c, g, or t
ngcagcctagaagagtcataccacaaaaatacctaccagagagaaacagtttcatacccacctctgcctaaactatttaaagctcaacttggttgtaaactgtacttactggttatctgaataacatggtgctcacttcttatttttattagagcttcccggtggggtgccactagtgggttaccagtatgctgaaatgctgcgtccccctaatttgcatccagctatgagcagcttcctctgttttcccgagcatgctatagagaaatcattctctctctgtgtgttccatacaggaaaaaaacaagcaaacaaaaaaaacactgatcattatttctcaaagccgggaccacctacatcataatattctgaagggattattgtgtatgaagattttctgtcccacgtgtacaggatcctcaaagatcatattctctggagggtagatggattggatagtggcttaggtatctacattttgacaagctccaaagttgaatggtggcacactaaagtttaacaattattactgttgaccttacgtggaagtttagtgagagcagttttgagcatgttctgtttgaaatagaagcgtctggttggcagaactgaagtagagatttgggagtgagcagaatgtatgtatttgaagtgaatgagcagaatgattgtatttgaagccctgggaagggtaaaaatgcagagataagatggaacaagagggacggaaccttaggaccatgacttggagaaaatgaacaatcagggaggagctttgggaaaggtagtcaataatagattctgcctgggcagtcagagaggcaggagagccagctgggctggcacctggaaggcgagatttagtgacataaagactgatacgtttccccattgttttgcagctagtggttcattagtgtccttggtaagggtggatgaatgggcatcaagttcagtcaagttcagtcgctcagtcgtgtccgactcttcgcgaccccatgaatcacagcacgccaagcctccctgtccatcaccaactcccagagttcactcagactcagcgtccattgagtcagtgatgccatccagccatctcatcctctgtcgtccccttctcctcctgcccccaatccctcccagcatcagagtcttttctaatgagtcaactcttcgcatgaggtagccaaagtactggagtttccgtatataggaagcctaaataacctgaggagctagatagagcaaattttaaaatttccagaggaaagggagttttagaataaagtgatgacagtgttgaaaactgatatgtattactcagataatgttctaagtgcttttacatgtattaattcatcctcacaaccaacctttggaagtgggtaatgtcattatccccagtttgtagatgaaaaaattgatcatgattccctcatctgcccagtttttttatgactggttagtggtagaaccacagtttgaacccaggcagtgaggcccatagtttatatatggtgttattctttactgcctttcagtatttaaactcaaatagtggtaaagagttgtcagttgatttgccagccgtagccatatgctggtttctgcccaacagtcttctaggacaggtttgccgtcttctgtttcaccatcgtctcttttataagatgcctatacttagaggagagtagaccctcatcattagatagtttttctcttctttccatactttcatggtttttgttttaatttaaagggctgtgttcaaaaacaaaaataaaactttaatacttttagttcagggcccagggagagccttcccaaagtgctgcctttggttaattctttgtttccacttggggcttccctggaaaagctagttttaaactatcttgactgctgtggcttagcctaaattactgtagcaatctaatacttagagtcacatttggggggtcggtatataaatactgctttctgtttgaccaaaatagatatacattttgctcagtggcaactattatt

SEQ ID NO: 25227 - DNA, 1811 bp, Bovine  19866880576808
  misc_feature (1)..(1): n is a, c, g, or t
nagtttgagcaagttcttggagatggtaaagggcagggaagcctggtgtgctgcagtccatagggtcagaaagagttggacatgactgagtgactgaacagcaaacagcaacaatctaaaatattataatttcatcataagcaaataaaaattattaatgatatttaatattttttcacagtaagtctttaaaacatggttattttacccttgcagcacatttcaagtgctgaatatccacatgtggctaatgactaccttagtgaaaattgcagttctagctacagataattgtcaactcagttttatattgtttcttataatgtctcttttcttgatttttttcttcctttagtccctctaaattcttgttcttgataagactattgttgaccattgattttcactcacacgatgtgaatattaggtagtgggaaacactaagactaccaggaactgccaggacactttgtttacataaaccatgacttcaggtattgtttttaaaaaaaaaagtgtcaaattttgtgtcagtagatttgggtcccagttccagctctctctgactctttgactttgggtgtgtcacaacctctctaagccttcgcttcttcactttcatctttggacttccttaggacctttttgagcagcatccagcatggggcttatcttctagtaaaattctcaataaatatttattgtgccgtataatgattaggacaagggacttcgaatctttacgtttctatcagtacagactttcagaagcaaacgggacctttttgggtcatctagtgccaacccttagactgggatgtggttgttagccagtcgtttggtggatgctaatgctagtgatttaagctgcagggctttgtgagactgaattagttttcaaaaaaatacgtaagtgcaaagtattattataaattagagctacgcttccctggatttaggtatataatgctaattgacattaatggggattgtacataaaccaaggggagaacagacctattagcgtataaaaaacattctgcttctagtatcagtctggtatgctttacttccctggggcatatgcattttttaaaaataaattgaatgcatacttctttatcttcatgttattcaatcagtattggagttttctgcctgctagtgttggtttaaacatctccctagattataaattcagtattagggttttattttggcaaacttaccagattcagaaatgtgatattcatctgcatttcaaactaaaagttatcaggggtactctctcgtgctgaaatttcattctatttgtggtttgatcttttgaaaaaaaaattagtcctttgacatacacttagaaacaagatgtttctaatattacaataaaacaattaatggctccattataaggaaatgaaaatcttatctttttgtgtcagtgatgagagaaaaatatataagtgccctccaattatctgtaattgtatgaggttttctttcatttatgttctctctcttcctgtttaatcccatttagcacaattattccttttgtattagttttctctaaatggagttctgaatggtttgaattgtgaattgacaatgatcacaatctttacaacccctcctcctctccaccttcttctcttccttgcctttctctttaaataaaggaaaacaaatacagtttcctggagagattattttatgcacttagcaaaaggaagatcatgtatggcctttgtaagaatgtctatgaacaactgaataattaaatcattctgaataattaaatcatttttaat

SEQ ID NO: 25228 - DNA, 919 bp, Bovine  19866880674225
  misc_feature (1)..(1): n is a, c, g, or t
nttttttttttaaatgtaatgattctataaaatgtgagtcctgttaggtacatccagggaatttaaaagattgaagatagatctctgaatttgcttagaagaggtaagaacagatctgtctctcaggggggtacaaaataaacatttaaaaatattacctctaacatccataataactatgtatagtcatttattaatatgtgaacatggtgatccatggtgtgtatgtttgtaaactatatccctcccttttattagttaaagaatatgctcatttatccataaaaatgtgtaaatcttcctgagaacattttaaccagatgtggcaaagactgaagcattctttattgatcactttgtgcagaacatcagagaatgttccagcagagtgcagcaaaagccagttgttgcaaaatatactcttgtctttccttagtcagtctggaatgtggagacatagaggaatttaaaattcaaaaaatgatgaaaagaaattgtagagatcctagaatagtgttcctgtcccccatcctttggagtaggcctcaagcaagtaaaattttctttaatttactcagcagtgctgatctttcttgaggaagggacatggtgatagcccaggataacacaaaagttagtgtggtctattttttactttcttgtcttttaaatataacttttaaaaaagccacaagtactacatacgagagttctttgtcagaaaatatagataactaaaaagaaggaaataaaaataaaaattaccctaatcccattgcccagaaagaaaaaaatattttaaatttaatttagtacatatccttccagatttgtgaatgctttctattgtgaataaacataaagaaaaagatagaaatattttaagatgggatcataaggtacatactgtttggaaagt

SEQ ID NO: 25229 - DNA, 1471 bp, Bovine  19866880678329
  misc_feature (1)..(1): n is a, c, g, or t
natttgattatctgaataaaaaaacttttctttattctagatgaaatactcacaaaggaagagggacaactttagtgtatttttaagtcttattttgagtttgtacttggttttgggtcaggggtatttgagggcagtgagaacagagaattaaaattgtgaatgaaaggtaagttaggctttattttttaaactattttaaatatgtaagtagtttagatgcttggaaaattggaattagtgtgtccttcaaaataaacaggaataaacttttttgaattaaaattatttgcctttaggattttgacttgtaatttaaacataaaaagattattttctccacatcagagtttcttacccttggcactgttgacattttggtctggataatccttcattgtagaaactgcttgtgctattgtaggatgtttagcaataatccccttaggtgccagtagcacaatccccttccccagtgtgacaggcagttgcaagacaaaataacccctgctgctctcattatagtattaatattaacaaagattaaggactgtattttaggtataacttatccaactctttttttttctcctattataactattaggtctgaatcagaatttaatatgttcctttaatatatgttccataaattcataaattagcctacgttatttttggagggaattaccaatgacaagctttctgatttatacttcatactcaaatattttaattattgctttaaaattactcctgttttaaattataaaggccatatataattccacaaaacttggaaaaatacagaaaattattatgaagaaaatttaaattacctttaatcttaaaatttatatataagcagaaatacatgagcttctaaatcaagtattgatgaaaatgtagcatgattttggtgaacatttggagacactagattaaaatagaatcctctctttttgggttaaaaatgtcaaacaatgactgtaagcaattcttggtttttttaaagaaataagggtgcgagagctcaccaatatgttcacttggcttaattttgactgttgtacaaataactgtggtagcatgtatgatgctgtctgtgagattacagaaggtttatttatgaacaaattatccatttgagagattaacagtaattttctcatatgtgtgtaaagtaccttcttatagaacactataaacctttcaactgttcggatataatatattgcctaggtgtatatgtttataaatgtgtgtatatatctctatatatttgtatctgtttctaatttcataaacaataaaatttaggtttgaacagaagccatagtcttcgctatataattgaaaaaacgtgtgtttccatataggcacacctacagaaaatagtaactctcaaacaattcatctgtttagaaaatgctttcagaactttacatgttaaattcataattctattaca

SEQ ID NO: 25230 - DNA, 861 bp, Bovine  19866880760517
  misc_feature (1)..(1): n is a, c, g, or t
ncagcgttacaaattaatttatttactgggcttttttgtgtttactgtatctggtctacaactgatcattggtgttttcctttgctcccaagctctagactctatcccatgtggtaacttgacttttgtctgagtccttctacctgagcccctatgttgggagcctgcttgaaaggcccctccttaatggactgggctgccttgctcctgccaaatccctcccaaggaacgaaacctatggctgtagccctgctgcttgactgcagtgccaagttgcctgctgcacgcatcccccagactgagaggctgctcactcagccttctgcttttgtgttccacctgcctgtgtggaggctcccgtatgccatgctggcccgacatgcctctcggtaccagtgggatgtctcatgtctatggtctctgctatcctcttcctgactgaagacaactgagctctgatttttatgatccagagaccagacagccatggctgagtttctgacgtctctgcactacctgtcctgctagtctccactggtcatggtgcctaaataccagtgtaagcaagtggcttttcagaaagaataagaagcagaaagtttgaccaagtttgtaaagtgtatttcccagggtatcaacagaagtaagcaaaaaagagaaaaacctaaaagattttctcatgccacctacaaattaaaacaattaagttgaagataactgctcctcagcttctgggttttgacttaactcattcacctcaactgcctcttcactttgataaatcacttaatctctgtaggctgtgtgtgtgtgtgtgtgtgtgtgtatacgcatgcgcatgtgctcaatcactccatcggg

SEQ ID NO: 25231 - DNA, 1139 bp, Bovine  19866880806926
  misc_feature (1)..(1): n is a, c, g, or t
ntatttatttaataactataaaatgtatttttttcaattttcagatttcagttttgctttgttttgtattcatgtttggaaatccaatgtatttatcttcttactattcttcatctctgataataacattggtgagtgtttgttaagctcataaagattttttttttaccttcaaatagcaattttaaccatttaatgtaggtgagaaagaataaatgggtttctcaagtggcactagtgatgaagaatctgcctgccgatgcaggagatgcaaaagatgtggggtcaatccctgggtcaggaagatcccctggagtaggaaatggcaacctactccagtattcttgcctgaaaaattccatggacagaggaagcctaatgggttatagtccatgaagtcaccaagagtcggacaagactgagcacaacaacagttaacaagaacaaatagggccctttctggattattactcacatgagaagtttttccaagatagtgcttttctctatctcatcctttaaaaataatataaggaaggtttacctttttaagccgataacccagtaactattttttaaataataaagtaatgacttactttttaaaatatgccatattttatgataaaaattatttatttccttctaagtcacttcagtaggctaaatacttattgcagtgacactgccattgcccaaagcatttttggaattcctctgaattgccttcacagactgtggcacattcttttgaatatcttcaatggtggcaaatctgcgtctttcaagggtggatttgatttttggaaacgaccaaagtcttgtgactaaggtgggtgactggactgggtaatacagatcttgatcaaaatatggtgtgacaataaagtaataagaccgattttcttgcacccacaaggaaataaactctgaattataaagtttataaagaggagttccaaactgttttgagcaatggcaacctaattagaataagtgtatagtctcctcatgtaacttactttcatggaataactctcatttgaagttgtatttggaatggtggttcagtaaatcagttttattaccttatagtcacacttttgatgttcatatgccagtaccggaatgttctcctt

SEQ ID NO: 25232 - DNA, 1405 bp, Bovine  19866880836117
  misc_feature (1)..(1): n is a, c, g, or t
nctatatttaaaaattttaattaagcttcaggagtagaattgaaatattcagcttcacctagtatgcaaaaaaataatatgttgccacttagatcttacttatacacaaagcttcacatttcaaagactgttccattttattgacctgatctgttcagactgtattgcagataagcagtcctgcttttacatgtggaaaaagagaagcaaatgaggttttatgttgtcccataagagttagtctccattatttctgcattagagttacatgacatgggcagtgtaaaacatgactgcagatggagcacagtacgtagccagacataacaggaagggatcaaggaagttctggctaccagactttgctactgcttcgggccccttgttttcaatacgaaatgactctagcaggcccctggaaagagttctaaaggcattatatagatgtgtaatatatagttattctactctggtatataagttctttttcctttttttttaaagcacattttggcttccctcttgacagtgatactggtctcttgggtgtgccaggggtaattagaattctctttctggaaaaactgttctgtcaggagtgattttgatgtgaattttgtctgtaagtgttaaataattttgtgattaatcgcaccatagtaattgtgactgtccatttcctctagtaagctagcaggggaagtgtttgaaggagaggtgattatatttgttaaaaaactgtagaacaaagtcagtctgatgactgagtaggccaatatttgcgtattacaaatgaccaaattttcttctctctcagcattatactcagagagttgaataagccaaatagcctattttgccaacaaaatattgctgatggtagacaattagggcaagttaggctctttcagtactttggccacctcatgcgaagagttgactcattggaaaagactctgatgctgggagggattgggggcaggaggagaaggggacgacagagaatgagatggctggatggcatcactgacttgatggacgtgagtctgagtgaactccgggagttggtgatggacagggaagcctggcgtgctgcgattcatggggtcgcaaagagtcagacacgactgagcgactgaactgaactgaggctctttcaactaagctgaaagctaccctactagcaactttggaaagtcttcaaatacatataatttttttctttccttattatagatacacatatgcataccctcacacatacctctacacatctctggcttcaggtttaggtacaattatagcctgaagattaattggtaggctattttacatttcaagtttcttaagaaaatgtaaacctcagtagaaatgtgcctctgataaacccaatgtttaaatgcta

SEQ ID NO: 25233 - DNA, 1967 bp, Bovine  19866880869784
  misc_feature (1)..(1): n is a, c, g, or t
ncatgctgcttagcagacatgctgggaacttttttctccgcctctaattttggttcccctctttcctgagtcatatatcttcttatttcttaattttctccattttttttttttttttactggacagcatcatagagtacattcctaagaatgggtgcattgtatttttttattttgagtttgtacaggcatactttttagttggaaaaagtctttattctacttcacaattgttttctactttggttttgtatgcaaacctaagatgaaagttattttccttccaaattttgatggcattgctgtccagaactgtgaagggtcaagttttacactccttgcaaggtagcagctggctgtcagtttcaccaggacagcacattactcacagcagtgggagaagccagaatatcagctggttttgcacctactctcctaaccccagttctcatagcgggcacaaagaggaccgaaagacccctgctcacacaggcaacggttgtgctacaagagaggaaccctgagcttagggaagccaaatcttttataatgggtgtcctgccttttgctctggacagaaacactatatctcccaaagctcttcactcttcagatatgcttggaaaggtagtgcatccaaaacagagggcagctggggcctctctcatcagacactcggaaaggcgagagacacgtggcaaagtgtctccttgcctccagctccccacactgctcctgagcatccactgacatccatgcagccattgtctgtagtttatttcacccttggaagcccttggatcatcttctaaaatttcaaacatcagcttggagactgttatatcctatgtttctagagatttctctatactatccctttgattattagatggtctccttctcttttgtaccctcgcatggaattatctatttttctttggatttatttgccttgtcattcaggttgcaggattttcatcaagtttccagtggtctatagatgtaacagtatatttaagaatgagagactaaaacagctggtaattctgtatctgtggccagggcatgccacctgctgggctgaaccacagggtaatcaagggtgatttggccttttcattggggggcggggctcccagttgtcaaaatcagtaggtgtttgctcttgactcttaatattttctctagaaaatagtctattggtttcctacctgggagatttatgccaggcttggctttctggaagtaaggcaaggtaatagagctgccacatttcagagagcatgtttacgaagaagaaataaataggtttggttacctgttacaccttcaccctgttgtcctcccgggggtcctgccctcatccccagtctctgaggggccaggccttagcttagagcctgagcctcctcttctcacaaggaggaaattataatgcttggaaatggatccaaccaacaggatatacgcttcagtacttcctgattcatactgtgctctcatacaaacactgtcattctttatgggtctgtttgaagggggatgtctgatgtactgtcctgtagagagaacctgggatcccagtggtggtatttcttcatagagctttcttcaggaaatgactgttttcctttttctctttatgtaattttaccctggtttcttggaacccttcttttttaaaaattttcttcactaagtatttgtgggctcgtcatgctcactttctgagcatctggtccacatgcccttgaagtcctcctgcctcttggtaaaccttcatcaagcgtttgagtttcaaggtcattgctgtgaggagggcttatttagtcatcactgggtaagctcacgcactcacagagcaggagggcccatcgtctcttctgacagtgtgtctgatttactccatcagaatctccccagctctggagcctgaaaatttgtattttgagaaaacctccaaagtg

SEQ ID NO: 25234 - DNA, 1005 bp, Bovine  19866880972278
  misc_feature (1)..(1): n is a, c, g, or t
ntgtatataatagaatatacaaaggtcaatagttacaattagtcatcaaatttaataataacccactgtataattgtattttcttcatttaattttttaatgtataaacaattaaatagcagtagagtaatatagaaaaatattcctttaagctgtttcattactcacaaaaaagagctatatacccaaagttcaagaataaataattgttcatacagtttctagtcacacaaagtacagcgaaaagtaaaagaaactgtttatataaaatgagaaaatagccaagtatttccaataaagttggttaggaatctgaattacccaggtaaccacctccacttttctatttcacttcctgtatatacacacacagtctgagttactttgtatatatatgccaacgcacaaatatttccatcttcagttatgtgtataactttaaaagtccaatcaattgtgtaaaggacaaaaaagttgccagtgaaaccaagaacttgatttaatatcattccaacagaagcggctgcattttaatgcacctttataaaatccataaaataagcattataatgaaagaatgccacaaaattaactgttaaaatgatgacttttaacctttttaatggcacagtggcaatcaacagcttttttaaatcctcaggcccaaatgcactccaaggtttataagagaaaactccacttccaagttcaaaatactcattgcttaaaagtaataataaatcctctagtgaaacactgggttctggctttaattagaagtaaatgtgctaagattgccacctcctgctgaataaaaagtcaagtccttcatgaccaacctcaagtggattttcaaaagacctcaaatctgaatccttcttaaagaaagaagaaaggagaataggaaaaaatatatattctcacgcagaagagtttaagtggggccacttgaactatccactgctgccaaatgcaaaactctctttcccaaaaaagtcaaacata

SEQ ID NO: 25235 - DNA, 2802 bp, Bovine  19866880999486
  misc_feature (1)..(1): n is a, c, g, or t
natttgctggcatattgagtgcagcactttcatagcatcatcttttacgatttgaaatagctcactggaattccattacctccactagcttcgttcttagtgatgcttcctaaggcccacttgactttgcattccaggatgtctggctctaggtgactgatcacaccatcgtgattatctgggtcatgaagatctttttttgtatacttcttttgtgtattcttgccacctcttcttagtatcttctgcttctgttaggtccataccatttctgtcctttattgagcccatctttgcatgaaaagttcccttggtatctctaattatcttgaagagagctctagtctttcccattctatggctttcctctatttctttgcaatgatcactgaggaaggctttcttatctctccttgctattctttggaactgtgcaatcatatgggggtatatctttccttttctcctttaccttttgcttctcttcttttcacagctgtttgtaaggcctcctcagacaacgattttgccatatttgtctgtacatatatcttaaataaaattaatgataataaccattagcagctttctatatgcatgtaaacatcctaataaattatttgtgtgtattatctcatttacccattaaaacattggaaacaggtactatctatcactatatcccattttacataagagaaagatgtggcttagagaagctagataatttgaccacgggcaactctgattataagtggaagaacaccatttaacttctgtctgtcagagtccagagcccatgctcttaattagctgtggttaagaatcaaaataactgcaaatgaaaaagttccccattttacattttaaaaatagaggttcagagaaactcaaaaacacgtctaagaccatcgagccagtatatacaagtgagcagaaaagaatgaccaagaatgaccaagaaggtctcacgagagcttagttttaaaaatgaaaatgaaaaatccttaaagtagtaataagccacttttaaagcagcagacattctgactctgctaggcataacaatgcatacttagacaacaatcatacaatttacattgttacaagtgtttgcatttagtttagatggaagatggatggtgataactcttatacacagatttattgaatcccaacaatggactaggcactttcaaatatgaatcaagatgatgtgtgacaaaaataaccacagtaacaaagaagagttgtgtttgagccaaaataaaaaaagttaaagacttggctagatcataaacctcacattttaagagaaaaataattatagaatattaaggggaaaatatgaaacatgaatatgaacgttttccatgctattttccatgtctaacaaaataaaatatgatccttaggaaatataataccaaatttttatcctagatatataaacatgactccaaaggccaggtattaacaaccactctgccttggttgcctggaacagatggtcacgcatcatgcacacatactcaaggtagccacatcttcattcacttggaacggatggaaaaattttctcaattaacaggatttattatgacggaaacttgtatggttatatattttggctgctgttgtaatttaaggctataaggagagatttataacagaaatttgtataggaactgtcaggcagaaacaggaagtcacggtgtccagccgtgaaagtcaagctgattttgtgtaactctagagtatcgcattctttcttattcttttatcatggcagtaaggaagagagtgtaacttagtcattctcaaatgcagttaaattcccataatgaaggagaaatttccagtagtgtcacaccatcatttgaaggtagctgttatacaggaaagcctaagaactgcatgggagggaaagatgtatttatttatagcaattatagtaggtggggggaaaattaccatgagcaatgttatctggtttaggtacaagatttctttttgaaatttacaacatgctcctgaattattatatgtatgtgtcagaataatatcagtagatagatataaaagggatttccctacacaaaagtctacagatcattcctggaacactgcgggattgttgttttttatcttaaatgtttgatttcttgccaccaaagcttttccagactcagaagtattaatgagatagagcctttgattggatagggggaagggagactgggaaaagaccacccttgtttccagtggcaagaatccaaaaaaattagcttaggaaacagttataagattgggctcccttcagcttctaccaaagatccccacacttgggccacccgctgggtccagtgtaagcgaacacaattggtaaagcctggtgccctgtcaagctcctccaaggacagcaacccataatctaagaaaatataaagtcccgtccaagttttgacttagcgagtcgccaagatccacaactttccctggctccaacgtctgggcagtgataaatattttcagcttaataatgtgctgactgattaccacactgtaatctaaatgccttaagagggttctacatttgagtcctagttctaaaattctacaatggcaggactaaaaatcttaaccaaaaccacatcgttcacattgtattttgggggcactatcaatttgtcactactctgtggcttcttcgtttagtattttcctactataaatacatccatttaaagctaatattaggcagagagaggactgggaattctttgcaaacacacacataga

SEQ ID NO: 25236 - DNA, 2114 bp, Bovine  19866881050270
  misc_feature (1)..(1): n is a, c, g, or t
nctcagtcagtacaagggaaaaattggctcatggtttttctatatgtgaaatgtcaaaaaattgcaaaggatgtattatttattatttatagcattctattttttaggagatgcagcagaagattaaatagttttcattgtgaagtgtgtcagtgggcaacttctagcctttgggccagaatcaaccattcggttaatgtaattcagcctgtggggaccaataaaaggtgtcctcggctctgtgtaagcctaaagatggaaaaccacagctcttccgatcatctttaacagcttcattgaagaaaggttagacaagaagtgtattacttctttaaagagtgtttctgacttatgtgttttttttgtttttttttttttgatattcgattcccatggacatttttcccatgaagtgcgtgtgtccattagctcatctctgtttttctttccttttttgtgagtcatgtcccatttgtagtgtcctatctgcctttctttaactcactttctttctctcttgtttccttgttcatcagccttaatcagtcttccccttcctctgtgccccccagttcttccattcacatttgaatctctccctttatttcctgtgatattttaaaactgaagcattgtttgatttgtaaaggttactttaaatatacgtgaatgcaatgatttctctttcatgtttctcctccattgttttccttttatttatggctgccgctgttgctctatgccatgaggaagtgactaccaatgtaaattcaaaagactccctatctgtgtttggggaatttaaggtgacttttgttgctacaattacatattatactgggagtttttatgttcagaagtaaatttgtaagatattttcctagaaattgttatcagtatcttaagcctattaacaaaataacttgaccaaataattttatttttttatttagatcactttaatacagaactctataagcaatacgttatataaatattttaaaactatctaatttattactatttgcattttactagctgcaaaaaggaaagaagttactaattaaacttcaaaacattaaagcatagttagcttacaatacttgttagtttcaggtatatagcatagtgatttgggagttttgcggattaattccattttaggttcttacaagatattgggtatatattcccctgtgctataaatccttgttgcttatctattttatgtttaatagtttatatctgttaattccatattcctcatttgttccccttcccctttggtaaccataagtttgtcttctatgcctgtgagtatgtttctgctttatatatagatacatttgtattatttttttagattccacatgtaaatgatattagtatttgtcttcctctgacgtatttcactgagcattatattctaagatgtccatccttaattaaccttttaaacattatcaaatttaaaatataagttctaaaatgataaaaataatttaattattgacttaaaagtatcttttattaaagaatttcctgaatttaagttatgtgtgtgtgtgtgtgtgtgtgtatatctatctatctatcttttacccctgattttagcctcatgatttaaaacacacataaaatgtttctgctcgcagaaaaataatggagccacaaattgtgttttcttttagagtggcttttagaaaatcaagacccaaataattcttaactattcccattattttgataccagtacttcagtcattaataacaattgtccattatgtatttcttatgtgtgtgtgtgtgtgtgtgtataatctaggaatagctaaaaaagctggaagaaggaagatgataataggtttcttagcccaatgctttcattattacccaatatatgaggataagtactaataaattgggcttcccagatggtgctagtggtaaagaacccactgccaatgcaggagacgtaagagacacaggttcgttcgatccctgggttgggaaaatcccctggaggaggtcatggcaacgtactgcggtattcttgcctggtgaatcatatggacagaggagactggcgggctgcagtccataggactgcaaag

SEQ ID NO: 25237 - DNA, 4435 bp, Bovine  19866881050917
  misc_feature (1)..(1): n is a, c, g, or t
nctatacccaggtgtggctaatctcataatagttaatgaatgaatctcataaggatttccagagttacagcaagtttggaccctgctccttcattaagtaatgggactgtaaaaatgtcttcttttataaaaggaagcagtcaaatcatttgtaatgtgataaggagattgaagtaagtctggttatcttgttactaccaagaataatcccacatgatacctagaccagtttggagaacagccagttgttctacatttcagggtcaggaaagagatataacctatacagaaattcatccagtgccaagagcctaccatatgcaaactctatgctaacaaataggggtaccaagggcacaatacacatcctctacactcaaggagcccacagcagggttgcattgctatgctatgctatgctaagtcacttcagtcgtgtccaactctgtgcgaccccatagacagcagcccaccaggctcccccgtccctgcgattctccaggcaagagcactggagtgggttgccatttccttctccaatgcatgaaagtgaaaagtgaaagtgaagccgctcagttgtgtccaacacttagcgaccccatggactgcagcctaacaggctcctccgttcatgggattttccaagcaagagtactggagtggggtgccattgccttctccgtggttgcattagggtataccaatctctataatacaatgcaatcccatatagggtgcaatggtcaaacggggatagaactatgactcagggagagagggtattcggagtgggggaaaggcaggaatggtctcagacaatatccgaaccgtaaaagttcacatgagtcagccagctggaatatacaagatgggaatcctaggcagaggacttgtgtgcctgaggacaagggaaaaatatgcttccttctaggagtctgtggatagctcagaatggtagctgcctaattggcaagtacaagcaaaagggctggagacacagaagccagatcacagtgggactcaggagtcatggcagataaccggcagtttactgtgaaggcaatcaggacttcaactcaggagggacatcatcacatcatatgcatctgcatgggttgaacaagatatgtaaattcaactagcagcatattgggctgagatttttcaggacctagataacggttggtcaggtgagcattcaactgccaggctggttaatcgcctatgtccaagacacagtattatttttattgggtaagctgccatctaaagtatcagtcaggcaagcctgctggttcatccttcctctatgcccaacagctaaatgatgatgtcgtaacactatgggcaattcttggcatttacttcttaaaaaaaaaaaacaaaaactaaaaacgcatagttggctaactccattcttaaagagcagcttatatcacttgtactctcctgacaccagaaattcaaaaagaaaatgtcaagagttacggagttctattttatcatcatcaaatatcctgcggctttagagcaattatcactgcgctttacccatcagctacgcaatgtttattcctggttttctacggacacaaacatgtttaggaaatcaactacaaagataagtgtggccattggggacaattctcgtgctaacgatcattttcaccaaaagcagggagcagggttatgaatcatctgtgaccacttatgcttaagctgaatacattaaaatttaatggtttcgacacaagaagccagtcataagtctgcacatcaaggcactaatgtgtcgggcctaattgtacttagatgaagtgagtcaggaatgcatggcagccaaccatattttgctgtaaaatgaaaattatgaatctctaatcacaagtgaggattccttttataattcattattcatgggtttaattcactttaaattattcattttctcaaatgttattgctatggccttttaaacttttctactcctccactttcaagtgataaatgcctgagaactgagtggtctcaggcctttgaatataataaagtactgcttcaacatgctgctggctgtgctcaaaaccactccagaccgtgaatgcacattgactattcaagtttaggactgccacctttcatctggtctaagagataacaggttcataaaaaatgtcctatttcaagatttgtcatttctagtaaaccctaagctttgaaacaaggcctcctctatgatctggcccctactcagtttaccaaccccgtccactgtcatcctccccagtcaccttggccttctttcctacttgctttgcatttcctattccctctctctgggacatcgactgcttctcccactctcactcccaagcccaccaaaggcatcttcatacagatggctccttcccatctcactgcagataacctctctttaggaagggctccccaaatccctcctccccctgctggttactctttaccacactacttgccttcatattattcgttatagcttgtaattatctttttatgtgtttgtgtattgccttccttccccactgggatggatggtttattagggcagagccttcatctattttgctcacctctgtacacctagacttctgtatgataataagcacataataagtactcaataatggtttatataataaacacaattttaattccaagagatgatgattaaagtatattttaacctgaaaccacctcttcaattaaagaggtacaatttatccccaattctcttcatatccttctatgagctgaccatgaggcatcaaaggctctgcccaagcaatcagcagagtcacaggaagtagaacttgggacagtttctggtgaagcattgtatcacagacacacagagaaggatactgagatcctaacagttagaggtcaagaaaaagaaactgaggttcagagaggttgagagaaaaaccatctgtctgtatttcagcatcctgtattccgtggagaattccaagcatccgagtcaataggaagatcttcaaaaagaaaaaagcctggaagcaacttggagcactatcaacttggatcaactccttagaaatgctacaaaaccatgtgtagcttagtttcagactgaaaccttctcatggatagagaaagaagacagacactctttgcccaggatcacccctcatcagctgtcatggtccaccataacaccgctttccttgttaagagtctcctctggaaaaaataacaaccattaaccagatcattttatgcacaggagttaaatacaaaaggaaaggaactaaataggtcaggttaatcaacagtaagtctgtgagttactgaaatatattttcacaataaaaatcaaagtctgactggcacctttgtgcattttatgctttctcaaattaagtgatgtttctggctagcacacaatgtgttactacaataaggaaaccttagattcagacattaaatatgaattcatgatgatggccttttaagtaattcaaaaacctattcaaatggaaactgagtgtataattattaatactagacattcttggcaaagacaagtagaaaaagtaaaagatcttcagataagcagtccacttaagaatcttgggattattgagagatgactttacaagcattgaagacaaggttatcaaggtttttccttagtaataataagttttttcatgacacttttttgaaatatttttactggcatttgtaggagacctgaagccaggaagaagaaaggtaaccggtcttgttatgaaatccatgcctaaaatgataaaggctcagaaaaggggattaagtaaatatttgctaaataactgatgagccaaataaatagagaaatattaaagattaactttcaactcccagtcgcacatataaccctttagattaggctgattttctttcagacagtcttgtacttctcatggcttgcccttctcattacttattaaaacaagattttgaaatgtctactgaagtcattcaaaaattgctcttttggaccttaggtggctaatgtagcaatataatttacagaggatacattatgctggaccttacactgattctgggatgttcccagatgcccaccaagaactccagcaaactgacacctctaaagtcactttcctggcatcctgagacaagcttagtgccaggtcttccaatatgagtagctcatatgtcatcccattatgccacctagccccagacagcacacctttaaaatagatttatttaggctataaacttaccggacagtgcctctgtcttcaaatatattacactgaaacagctgggaaaataaaatcccaactttccaatgctgaaatcactgaggccaatttgaagtatgaaggggctatcaaattctataacagatgcaaatttagat

SEQ ID NO: 25238 - DNA, 2656 bp, Bovine  19866881085665
  misc_feature (1)..(1): n is a, c, g, or t
nctttagtgtgggcttccctggtggctcaaatggtaaagaatttgcctgcaattcaggggaccctggtttcatccctgggttgggaagatcccctggagaagggaacgactatccactccagtattcttgcctgggcttccccggtggctcagatggtaaagaatctacctgcagtgtgggagacttgggtttgatccttgggttgggaaggttccctggagaagggaaccttctggagaaggttcccggttcctgcctggagaattccatggacagaggagcctggcaggctacagtccatggggtcacaaagagttggacatgactgactgactgactaagactttcactgctttttttcacaaccctttagtgagtctttactaagaactccagtcttcatttattaagcccatcaacatcattcctaggaaacactttgaagtttaccactgaattcagtactgtgtgatttatttcctttaatttaatagatgctaatttgatctcagcgtaagctttttgctgagtgtcaccttcagattttctaagagaagaaccttctttttgcggcaaagtgtcagacacatagtaaatgatcaatattactggcattaatattaagatggaggaaaaaactctgaaataagacttgttggactgagacttaaatatttgctaagggttgatttaactgaattgagactatttttattgcctggcacaaatcacttaaatttagtgagaagttattgttaatcagttgaatcagcccagttagtactcagaaaaatatatagaggagtaagttacatcaaattagatttctcagcaagtctcaaagagtttgcattgagatatataaaaaatattctttcattgctatacatggatcacagagttgatttatttctaaataatagaaagttgggatcacaaccatttaaaagattcttaatgtcttaaagaaacataggacacctttttcttgtttgttgattgcttatttagttttgttactggttgatttttcaatagcagtttgactttcctaatactgagatctgagaggaatttttctccttagtctttataaagtggatatgatgcaatataggggagagcaaccttgatacgagggggaagatttagtcaaagtagttgaatacattcctatccaaaattaaatagttgatcaggtctgaaccttaagaaggccattgactcattttacccaaactgttgagttttgccagttctttgctgcagtggagatagccattggaaaaaagatggattcattcattgactgaatccagtgcctgatgactcatgtaattcttatgaccacacaacggtgggttgaagcctggtttcctaactttagaaattaatcttttttatgctcttttggggaggggtatgggtatggcaggggaacaaccaaagtgatctctgtcttttccaagatttagggacataatttaaccttgcagttcaagactctctgccaaagttgagtctgggacagaatatttttttctctcagtctaaatcatctaggctaaatcattttttagcttacaatcaggagcaaccttaaaggtactgtcacagctcctcaaattcataatgttcaagtgggctataaatgatctcctcttggatagatgtgtcggggcagcctcagagagggcccctgggaaaggaagtgctgaattgagagagccgccatcagaaaatctcccagtcagctgcgtcatgaggtgctcctgagaaaaacctgtgaagaaatgaaacttgtttaagtcagattctgtttttagtgcacttagagagttgctgaacataaaaagggattctgttaagaatcatttctttaaagtgaataaactcctccaatgttgcgtgatttcatgtttttatatatttaaggatccttgcctaacttttgaatgagtagattttaaggcataggtttgttccagaattatgaagtttgtgaaacaaagattccattcttccctcacccaatttagaaaccaatttcttcttattgttattgttgtttggatagatactgaaaaatattctagttttttccccccagtaatttccctcattgtacagcaagctcattgcctcttcagaggtagctgtggtagccatttatgcaaaaaggaattctcaggaaaagccttttttttctctctacttttctccagcttcttgaggttggggctgatactcacagggactctcaccaaccaaggaaacatgattcattatcttagccagtaatgtcttttttgaatacaaattgagtttgtgatttgttgggtagtttcttagcctgtgtttccatcatttgaatgtcccaaatgaatgactatattttattttagatattaaaatttaataccagtgttatagaaagaaaatataccttttatacaattttttggtattgaaaatcctttgatcctcaccttgtgactactgaatgtcttctctactcctgtataatctggcaaatctttactcttaaataatattctttaaggccagatgccaaggattcactgtaattcattggtatctgcatttcttaaacagtaatctgttccagatgctattttttccgcagataagcta

SEQ ID NO: 25239 - DNA, 2140 bp, Bovine  19866881107437
  misc_feature (1)..(1): n is a, c, g, or t
nagaatgtgatacataagatttgtagattatgtatatttaaaaatttaattatattgagatcatgtgcttttaaaataatttacacattttaactataaagtcacttacagttattccatatcttttaaacagataccaagtacttgcttttgcaacggatgcagataaaagacaagagactgaacaacaaaaacatgggtctggaaaaagactagttgtaaggccttttaaaatatataaaaattttagaaatgttatatctgatcacagatgtttgttcagaataataattcctgggaagaaaaattaaaaaaatatatttcagccattttctgtgttaaggttatgtcagtgatcagagaatttagttggctgttattgagcaatggagacacatgcctagtcatggtcacaatgtaccagattatagaattgtgccactaggattataaatgtccagatggggtcactttgaactgaactgattaaaaactaacaaaataaaaattaaaaaattcctttaatagacaaaaaagttgctactcgtatagatgcatgatgaaatatgagtaaaagatgaaaatttttcacagcctgcaaagattaagtttgtgcacaagtaaaatttggtaactttgaaaagtagtttgaagaaaaaatgtttgagttttatggtttttggacttatatttagatatttaatccattctgagtttatttttgtgtaaggtgtgatgaaatgttgtaatctcattctttcacatatagctgcccagtattcccagaactgcttattgaagagactgatgtgctgctgcctgtgcatatgcaccaataatgactgtcccctccctgcttagacgttgctttgggtcttagctgcctttgtgtctcatggctgggttctttccttggtcatgttggctctcactccagtgtggagctgcagtatgacgtaagtggggctggaacattcagtttgttcatgggcagttgagaaaagccagtcagctactcacaaagttctgatctgcactttctgccctgtttcaggagtgaacaagcatgtgcacactccttcgggaacagaaggctttccccagccttcctgttagtcctaccagccctccaaccagccaagaggctcgtcttctttgtggaggaccccaggactggggtgcctaatatgtagctccaactgctcactccccagggaggatctgtgcctgtgaaatctctcttctcctctgagtcctctcccttgggtacaggtgatggtttctcttcccttgctgcctcattacatgtggatctctctctcagccttgcttgtacaggagtctctctgccagtgtccagttattttttgctgagaattgttccacatatggaagtatgtctgttgtgtttgatgcagcaagtgggttctacatcttccaactctgccatcttgacttcctcctctaggagcagagatctcctccatcttctagcttgcattgttcccataagaaatctttcatcttatcttggttccttggtacacaatatctttttcctccatgtgtttttcagattttttttcgtatcacttcttttgagcagttagattataatgtgttttgtatagttttctttcattcctttttttgatgcttatagatttgtgaacttagtgtacttgtaaatttatagttttcatgaaatttagaaaaattgttagctattcttcaaagatatttttctgttctccatcttttctcctcctcactcagttacacatacatttaggctacttgaagttaccctacaggtcacagatttgctctttgtgttaaaaaattctcttttctatttcattttggataacctctactactgtgttttcaaggtcactaatattttttctgtaatgtctaatctggtattaattcctgtctagtatagtttctatctctacaagttcaatttaggtgttttaaaaaatatcttccttgtatacttttaaaattaaatagatacaatttatttaacataagtattataaactgtatattattataaactgtatgtaatacagtttatttatctctacattatggatcacattttcctgtttctttacatgcttgataatta

SEQ ID NO: 25240 - DNA, 1690 bp, Bovine  19866881124084
  misc_feature (1)..(1): n is a, c, g, or t
nattacagggggattctttaccaattgagccatcagggaagttccaatccacatttaaatagggataaatagcatgcttttatccaaaggaaatgaataaatgccatttccattccagaacaatctagaaacgaaatggtaaagtgtgtatggcccaaacaacaagagggtcttaacctctgaaagccacagaagcactaatgctttaaatcccaacatttctgccaaagtctatagaatctggaaagatacaggtttaataccatgtaatttcaactgaactggaaatagtgtggtttctagcatagtttcagtagacaaatttaagactgactaagtcttaaattgaaagaaacattttctaaaattagtaattagaggagggaaaagaccagtataattagaagctctaaaacttacaggctaaacataatattatttccaggatatccctttttgtctcaattatacaattatatttgctattttgagtcatccttcatggcatctcatctatgttatcagttacactttaaaaataggccaccatggctttgggaaacagagcccctttttatctggatttttaaaaaaaagaagaaagctacaacccaaagaccagtcataatggggtacataagcatcactaatagactttttctaccatccaaggcaacacggaagtcaacagacaggaagaagaacccccatccccaccccaccggccactcagtaagtattggaagtttctctgtttccctaactcttaatttttcaggacaaatgatacatgttcattctctacaagaaaatatgagaattgagaagacatttgttttttcaagaatgctgaattctgtgatagaaaaatcacagcctactgccagcctctgcttactccaaccttttcacctgatccaattcactattagctactactccagatgctgcttcacatatttacataataattcaaggtattgatattaataagtcaaaattccaatgaacagtgtcccaacctgcagggtacatatccctcccaactttgctattaacaatgccaacaggctcaaaacctcaacatcatatttaactcacatctcctccttgatctactttattaagacccccaagtactttaaattttcccttcaaaacatctccccatatttattttctccttctattccaatcatcaatatcctcctcaaatcacctctagattactgaaacagacctccactagattgaaaagggggggtggttcactcagattatgctaccttgagagagccattactaatattttgagaaatatctttttagacaattctttctgagactagctacacatgtatagatatgtacacaagtttacaagaatgggttaatattttagatgtttgcttaattaaatcaacattatataacaaatatcatactatataatttaatttttaaatatcaatttctgtacttgtatttgctaactgatctattcctacctcattttatagaaaaagtaatacatgttgaaattataagtcttgccctggctatggagtaatttaatattaacaatattcaaattcttcccaatcttgccagtgtttatcttacttaaccccagctttgttactctcctatattagcctctccatcacaaataatttggcccatttatcat

SEQ ID NO: 25241 - DNA, 844 bp, Bovine  19866881139985
  misc_feature (1)..(1): n is a, c, g, or t
nttatgtaaacacttccctgtggatttgggattttcggaaataaaagggaaaatattagctaaccttgtataagagagaatgatgatattgggcacgtggtataaactctccccagatttcccaaactgtgatccaaagaatattcctttgggagatattaataggtgttttgtgaaaaatgggttttaaaacactgcattctgtatcctcctgttgggagttcactaagccacactgggttattaaaggctctgagaagttctgctctaaagaaactttaaaaaaaaagtgttgaatattttcctaatttaggtaagcacagaacagtgtgtgtgggagaagggggacgcattccacgagggcctgcttggtgtcggagacagttctgtatgctgcattgtacttgtgcacgtcttatggtgcactggggcattggctgtctttgctctgcactgcctttttaagaatatatttttacatctttacagggaatagtcttggaagatagagataatatctccatctagagtgaagcacaggtgtgtgtgcttgtgtgtgttttgtctagtgtagtaaagatcgtcatctcttccaggcaaaattgctgcccattataaaatatttggtttccctaagcgcttggttctttttctgtaacccaacccacaacttatgtagatgttgccttcgttctttttgcatgatgggaattagggctccgggaactaggacaaatgctgaattctggctcttgtgattgctataagtaataaaattctttgctttttgaatcttctgcaagcatccataaaactatgactgattaacttgttagctgcaagt

SEQ ID NO: 25242 - DNA, 915 bp, Bovine  19866881168987
  misc_feature (1)..(1): n is a, c, g, or t
ntgttgctgttttttggtctctgtatgatttcgccgcaggatgatagtgagaggatatcttctggggacagactttataatgcagagacctagatcctatttgataccgcaggtttttccacagaattcttgtatagtaaatgtatcgagtttaataaacatctcattgtcagacaatatcttggattttatttataatcagagggttacatagttgatatctttatttaacgggaagaagttgaatggacctaaaaatgttgctgggcttcccaggtggctcagtggtaaagaatccacctgccaatgcaggagacacaggacatgtgggttcaatccctgggtggggaagatcctctggaggaggaaatggcaacccactctagtattcttgcctggaaaatcccatggacagaggagactggtgggctacagtcagtggggtcacaaagagtcagacacaactgagtgactgaccatgcacgcaaaaaaaagttactactccacagtaagacttgaatatggttgttttataaatgaaaggaactacaactaggctaaaagtaggaagagatgtgttttatagtattgtatgaaaatgtttaaaatattttcaaggaaaagtgttagtcactcagttgtgtccaactcttcgcaaccccatgggctgtagcccacaaggctcctcaaggaagctagtacattaacatcgtcttttcattacccaaatgggtaataccttttaaaaaatccaggttataaaaggattcacactctattataattaaaatgtaaggttttcatatgcaagaaataaaagagtttgtcaatctcaagttaaaattacagttgcaagactaatttatttaaacaaataaatgtctgtgccagttttggaatacctcagtcagtaca

SEQ ID NO: 25243 - DNA, 1195 bp, Bovine  19866881178780
  misc_feature (1)..(1): n is a, c, g, or t
ntttgccatgtccaaaggaggctataagaatatgtacacacaaaaaatttaactccaatttctagtaactcctacaatctagtttaccatacacctatctcagaaacatttttcagttctttaaattcctctctcaaaccctcctcatcccccaaaccgaagttatgtatctctaataaaacaggaccctatcttcatgactaatataatggctcttagttttcaatatctaacatcacctttatagaaatccttgatgtggcaatgatctgtaatgtagtgttcttaatagaagtttttaaaagcaataatatcatggctttacttacgagaggttttggaagcaagaagcgtaacttgggaccctcctaagaagcgaaaacccattacattcacctgatcatcttctgactgcttggcaaagcctacaaagaaaagaaaaaacatcaccttacagagacacaaggcaaacacttaatatttaaaataggaagcttagtttatgatgagtactttttacggcactagtggagtctgaagtccgtgtgtggactatattaacttccacagttgcttccaattgttaaaatttctgcctcataagaacatgctaaaatcatttcatttcctttcttctactagttcattctaggtctgaggcaggaaatgcacaagatgaacctagaatatctgtcacaccagaaaaaagctatcagggactagagagctatatgaaaaggacgtaagagccatcttaaagagactaccactggccagagatgaaaatatttgagtatcaaaaaagataataattgcaatggagtaaaacacatcaaatatatttaaaagcatgtgttgatatttacactaaaaacaaaagagaaaagccaaatgctcactactgaagaattctagagaatcaactgagcattttaaaaatcactaacaaaggcaaggaatcaagtacttaccctaatgaccctactgaactgtaccacataagcaatggtaaataaggcaaacattctttgtacgtaaatacaccagctaaaaaattgaagaaagcctgaaagccatcatttttcaacttccaatgaatgaatggatctgagtattgactatcagtagctattacaatcacacaaaaaagagacaaacatattatttacccactgcgaaagtatataccaccatt

SEQ ID NO: 25244 - DNA, 2239 bp, Bovine  19866881241182
  misc_feature (1)..(1): n is a, c, g, or t
nctcagtttagcacacaaagcactttctgctccacctcctgctccatcttattctctccttgtccacctgcacccacactctcaccttggcctctccaaaagcttgatcctcctgttgcaatgcctaatcaccattctttcttgccaactcctacttacaactcagctcaggcactgccatctaaacatcacatgtgtgggccctctctgggactctgagaccagactcacccagttcatcaccctgggagcactcctcaccctatgccgtggccactgtcagcattctggtttctccagtgcctggagatgtccgcacccctagcactatgcttggtcaagaaatgtgtctgctggacagagacagagagagatagtgagagatggtgaactaggatcgcagatttgggaggactctggagatctttagtccagtctcatgggatgcttcctgctgaataaaacagaaaccatgtgcctaggtatggctgtccccaagatacaaaattatcactttttgagacagtttactcctttaagggacacgtgaaaccagcagaaagttattgctaaagctgagctaaaatctgccccattggcccttattctaccctccagagccatgcaggataaatctaacctctcttctacatgacaaccctttatatctaagaagacagcaattcagtaccctctcttccagaacaaacatccccagttcctccagctcttccttatataaacatggtttcaagttttctctccatcctgaccacttgtctttgaatgagctccaattttaaacacttaaacatttatacagctaactagggaaccccaaactgaccctaagacagcaggcaggggatggggattcagggttggtagagtcacgccccaccccactgtttactgggaattctccctgccaaccaggcctccggttgcctctgctttcttggcagccacaccacactcttgattcacacaaacaaacacaattaagccccaggcctttctcacactcaccacatatcttccttttaggcttaagcagttcgttctttagaccaaagtgcagaatctctatatatccactaaagaacttcccactgattgccaacataaggatttttcactctattgatccattatagatgccaccaggcaaataaggaaacacattaattatttttaaatgagatgtcaaaggctataacaaaaacttcctactccaaaccactaaagaataataaaacaccagttgctacaaagaaatctctatacaactatcaaaatctaaatcagatcaatatttaaaattgaatttgtatttcaataataatggggatgaaaattaagacaaaatagtaacccaaatgtcattgtagaggacacatttccaagttgtttttgataccatcaatgatgacctctggagtataagaaggaaagatcctttgtatataatttggcatttatgtactctgtggtcatttcagcattaaaacagttcctactattttatagactattcatctaagctaactattattttcataagtaggttatagtagcatattagataatttaagtagatatggcatttagttaatacagaagtactacagaatttccttttctactgccaacttgcagatcaagtcaaaaaccatgtcatggttaggtatttggcatggatatttctttaatataatgaggcatgatgccaaaacttcaaaaagattgctactgaaatacagggttattatttggagagctcaaattgctacataaactcaaatataataaaaaaaagaaatgtttatgagacaaaagaagagctttaaaaatgcaatgtgataatatactgatcaaacacatagcctacttacctgataaaacgtgaaacaaaaccatgtggaaatctagaatctcaaggacaaaaagtttaaaggtaagctgttctaaccacctttttggtgtttgagtccatcacctttatttagatcctttaaattgataagtccaatattcagttttaatgtctaaacacacacacaaacatacacacacacaacccatatgcacacacctgatctttatcctctaacgttgagcatcagttgcactaataactgaacaccaattgatgttcaccaattgctctctcctaattgtgagagtgaaggaaaatcttaattttagtgcttaaaatagcactaaaaatgtctggaag

SEQ ID NO: 25245 - DNA, 812 bp, Bovine  19866881254588
  misc_feature (1)..(1): n is a, c, g, or t
natgcagctgacccttttagctgctggatacccgagctttaagtggcaactttaatgtgataccttagagttatgtccttactaaataaatcacatttagaagcttttatgttatcttagtcatgcttgtattttaagaagtctgaacatgataaacattaaaaatgaatttatattcatgaagcaaaatgtgattttcgaggtaattaccaattcatctagaagttcaaatggttgcttttagtgttcatccatgtaaatgacacaataaaaaaggaaagctattctgtgataccctgtgattcatttaaaatgatttttctgatgatacatttatttcatctaagactttttcaaatagatgctcctttcctaagtagagcttggtggagttagaaataatttaatatgtctattgttagaatgaggccaatataaccttttacttagtcttttatttagtagattaaaaaatttttataacctcctgagtgagcatattgaatttttgaaatatgattgtagattaaaggatatatagagatgttatataatctatttttaaagcaagtagtgttgggatttgtacttaggtgatgttggatataaaatgaaatcaaagaggcagaaattcagagaggtttttccctaattaataaaactagagaaagagagagagaggtgaattgccattgatttttaacagttgttattcatacgaactttttgttaattttaggtttgaaaggaaaatgatcaaaaagcatttctatagtagtaacttaaagattacaggctatatagttaaattt

SEQ ID NO: 25246 - DNA, 879 bp, Bovine  19866881285581
  misc_feature (1)..(1): n is a, c, g, or t
ngcttccctactaaatagcttaggtcagtgttcaacgtacttccctttctggggctctagtttcatcacttttaaaatggaggggtgggaaatatgatctctcacacccatcatagctgtgtaagatgcaaaaacttttaaattacttttggataatttattttgaactatccatgcttctgccccatttatcgattcacttctgcccctctatttgtacacattctgagcttctcattgaatagttattgatttgcagcttttatctataaaattgagtaggaaatggcaacccactccaggattcttgactggaaaactatatggacagaggagcctggccatgggattgcaaaagttggacatgactgagcaaagtacacacacatctataaaatatcagcaagaatatttttcttcgactaattcataggattatgagaattaaatgacagaagtaaaaagatgagcaatactgagcattggcaaggatgtggagaaacaggaaccctcatatcttactagtggcaatatgatacagtcaccttggaaagcaatcggcagttcctcaaaaattaaacactgagttactctatgacctagcaatgccacttctaggtttatgcccaagagagctgaaaatatatgtccactaaaaaaacttgttcacaaatatttgtagaagcattatttataagagcccaaagaaagaaacaaaccaaatgtccatcaaatggataagtaaataaattaaatgtggcataccagtataatggactattattcaggcataaaaagaaaaggagtatgtacacatgctactatatggataggaaatggcaacccactccagtactcttgcctggaaaatcccatgga

SEQ ID NO: 25247 - DNA, 1117 bp, Bovine  19866881299332
  misc_feature (1)..(1): n is a, c, g, or t
nattaaggtgctgtttttttccattatgatttttgtcatgtttccatgaatattaaatttataatggaagaatgttttctaaaaaatttctctttaagttaaaagctaccaaacaggaaaggttactttggtcttaagtcctctaagtctcactcccagagaaacatgctgacactgtggccggggtgctggaggagggactctgcaccaggcggggcgggactggacggattcacatgtccttagactccactgttctctgaactgatgacattcaagaaagcagcaatggagcgtcagagaaggaacatggggcagcagagctttgagaagatgcagtcgcaagggagacagacagaaggggagcgagcgctgaggacacccagggggcctgcagtggtgtcttagggacatgttcttaatgtctctaagaacagacataaaaaatctgttttaggcagattaaacttctgcaaagcacggactatgacaaagcccaaagtgcacgaactgactgccatctgcagagaagagacaggactaccataaaggagcttcaaaccttaagcagctgtttttcataacaagtgactgagtctgagttctggtcaaatctgtctcagagaaaaacccaaaatacaaactttacactgaccttgataaacccaggaggaggtttttcataactagaaggaaaaaaaacaaaaaacaaaaaactggtcatcaaccattgttcataggaacataacacatttcaatcaccaaaaagcaactacaggccaaaataaaaaaggttatttttagtaaaaactaaaactacagtataacttttaaaaacagttaataaaataggcccagcagtcagagatgttatgttaatatgaataaactgatgctgtatcacatcctgctgggatgcagcacttaaattgaccaaataataactaacttggtgtctaaggacaatgattttatatttagaggaagggaaatcaagagactgcaaggaaaatgtgagggaagaagagacttgagctaattatggttccaatctgtcattgcacttgtgggtatttacctaccataacttccaacttctgtaacactgtgaggctca

SEQ ID NO: 25248 - DNA, 1037 bp, Bovine  19866881427081
  misc_feature (1)..(1): n is a, c, g, or t
naattctgtttatggcatttggcacttaattaaaataaaatgccttattaactcaaaaggaatgcttgaaacaatgtcatgtgcctagttttagatacagatcacatgggagctactttacattgcaaaaaaaaaaaaattagtataaaagctagaaaatactgatttatgatctccctaaaatgggcaaactagctgtgattgttctgcttctgagctaagacgtgaaattgtaaagaaggcaaggtggtgttgaggtttgtagtgacaaacactttacagttgttgcaccacagtagctgcaaggagtcagcctcttctgacatcagcagcctcctcttcctaatggctgcagtcttctttaaggatttttaaggagactacaactttgaggagggaaggaacagcaaacaagtacaagtatttgagaataaatgttcaacgtgttctttttccagttaagataaaacaccaaaaagattggtttggaaactctagaaacttcaatccagcctgccatcccacagtcttttaaatgttataaagtaatgctgtaagtattaactaagtagcagattgctacttgtctgacccaaataggcttttgctagaccttggaaaatctaagtcttcacagctatagttggctgaattacagttctagaaagtgagatgtatgtgaaagtctgctgagttggggtatggagtattatcctgggaaagcttttactttcttgggaaaaaaagaaaaagatggctgaagccattcctttccctatattcgtgcctctgacaactaactatgtaaaggctaaaactgttgcagccatcttgcaattgtgagagaaatgttaaaagaatcatagacatttggctctacttttctagagctgttgaatcaaggataaccaactaccttcaggtttatgtgactaaacagacccttctttaagccactgcagaatttttttattcgcagccatatgcattcctaactgtacagctattaaaatcataccttttagaactctcttacc

SEQ ID NO: 25249 - DNA, 1206 bp, Bovine  19866881552300
  misc_feature (1)..(1): n is a, c, g, or t
ncaaagtactggaggttcagctttagcatcattccttccaaagaaatcccagggctgatctcagctcactaaattaagatttttagttaccttaatgggccttgtcctctttcacatagttttttctgcctcaaacacttctcatttgactggttagatttaaggtgattatacatcctagtttatgcttgttttcactttgaaaattgtccctgtttggatagtaaatgatatggtaaccgtggttgaattcaatttaccattcaggtaacttcctccaagggactttttttttttccttcagccgtgccatgggacatgtggaatcttagttcttggaccagggataaaacccatgccccttgcattgcgtagtcttaacccctggagctccagggacatgtcccctccaagcagctttaaaaaaaattataacatggttccctttgtataaatcttaaattttactctctattgcctaacacttattaaactatcttactgtcttcaccacagttgagagggtaagggctgtctaccctatttatttctgtatcctcagtgcataataatgcctggtacatagtaggcacacagtaaaatctatataaaggcatgcgtaggtcacacggggagtctgtgggagtagataattcagaccaccatttcagaattgtagtaattagtaatggactatctctgacactatggaaaaaggatttgtcaataaattaacatcaaatgaaccaacattaaaaacacaaactttgcaaaaacaacaaaccacaaactttccaacaattttgatttgaccaagtgggatttatcttaagaatgaatggttggttaaacatctgaaaatcatacatgtgaacaggataaaggagaaaaatcatataatcatttcaatagaaaagttattcgagaaaatctaaggaccatttgtgataaattttttaaaaagctactagaacaatttagcaagtttacaggatacaggaacaatatatataattcagctttgttttagtgtattatcaaccatcaaaattcaaagtaagacatggcaaaatatgaaaaaggtttataagtgctagtatctctaatatctttaaagagtttttaaaaataaaaagaccaagtaccctgtaagaaattgagctttgagatgaacaataaacttaatatatgctgattttattcata

SEQ ID NO: 25250 - DNA, 596 bp, Bovine  19866881714577
  misc_feature (1)..(1): n is a, c, g, or t
ntaataagggccaaaatgctgaaaccagactacaattaactttcatacttgtacccacaggaccatgtcagggaatgaaacctgcgaggtctggttaaatgaagacaaccaaaaaccaagaaattggaactataaagaaaaaatacttgaggttcaccaaagaaacgcactttaagccaccatgactcagcatttaatgaattctgttgttgctattgaacatttcttaagactcaagtgccctaagtacccagaatgggcctctcttaatcataggcaatcctggacacaattcctcagatagaggagatttcaaggaaccctctacagtgatagaaatttaagtatgcatggaaatattagaccaagaaaacgtaatagtctttgcaacggaaagagtaagtgaacaataggaaaacgctaaccaagataagaaaacttttaaccaagtcaatataactattcttacataatattaagaagtccatattttagtaaaaagtctacatttaaaaaaaaaatgtttcttacctgagacagagtagacacacagttttctcgaatgcaacacagccaaatgaagcatctcagtacct

SEQ ID NO: 25251 - DNA, 914 bp, Bovine  19866881749990
  misc_feature (1)..(1): n is a, c, g, or t
ngaagagtccatatatatatgtgtgtgtgtgtgtcgtgtgtgtatgaaacatgaaatttgcagagttcattaaatttaatgtaacttttcactccaagttttatgtcttgagattgtggcatttctataaacaatgtgctaatgacattttgattaacacttgattatgtaaaacatttctgagaaaagtcccttctagcttagttactttttggtggccaaaatgatgcccttgagtactccagtcttttcacccagggataggctattttacttgtcattaccctcattcttctttgtatattgaaataactgctaattaagctagggatgaacccacagacttgagtgcaaagtttgttatttacataacctcaaagttaatatttgaagttctctgccccttctttgccaccatcatttgattttattcataaaaatgaaatagagactctttaaaaaaaaaaaaaaggagagacttttaacatagtttatttctagaatatggaaagaatttactgttttttgcacttataaaattgtggtatatttgttcattaaaatacctataattatataaaagcaccaaatcatttcactatagcagattatgagaagttaaaactctgaactttttgatgacctcattatagtagagtgactttaacttgcaaaaaaaatgttcttttcagtcttgtgggttatgttcagcacttaaagttgtttttttttttcttcaaagcaagaattgcagcaaaatataaagccaatttaaagaataccttttgttgtacacatggtgtatattatctaccataataaaagtgtttttgaagctgattttatgtgtgtaagttatatgaggagtgtatgttataagcatgaaataatatcaatagtaataatttctgtat

SEQ ID NO: 25252 - DNA, 718 bp, Bovine  19866881862043
  misc_feature (1)..(1): n is a, c, g, or t
naaaagatactcccagggtggaaggaacacagcatcactgagcccagacttgataaaggtaatgtctctatgaaagttaggaaaggctccctttctctagggatatttattccaggccagcgcacatggccagatgagcaggatcaggtctgcattccagtctccactagccccttatgccctggtttaaaaacaatttacacaacctgcacagtggccctgggggtgggtgaggtggggacaggggtctacagcttcatcctgcctctaccaaatagagcagggacatccatcaatgaagaaatcaaccccttcttccactgagagaggcaggcacacagttcaccacagaaaagctcaacttcagtcaactcatgtataaaagacaaaatttaaagaaaaggcagtttcagaaatatttctgtagaccacataaaagtgcaggccatatgaaaatcatatatatccaacgcttagagttttctttttttattactttgcccaagtattttaatacaaaggtttcaataaaatatgtttaactctgagattcaaaccacataatcctccatttttatatggccaaatattctggtccttacaacagcacgctcatgattaaatacaaattacctttcacaccaccaaatgatccataagtcatattgcaggctgttctctgaagattatgttcatacatcaatttgatctgatactg

SEQ ID NO: 25253 - DNA, 1405 bp, Bovine  19866880350976
  misc_feature (1)..(1): n is a, c, g, or t
nacttgccaagccacagtcattcaaggaagttgcctgctatcaactaaaaagcagctttaacaataaaaagcccctcagcgaagatcagtgctcactagcgtcgtgtgagcgccccgctgccaggacgggacgcttgctggtacagtggaggggacatgagtttcacagactggaaagtatttgcgagttggaaaaagagtcctgcaaagcaagctggccagctagacaccaaatgtgctttgcagttgcccctggagtttggtttttttccgtaaaggctgttttgaactccagattctttggatgaaaagggagatctctttcctgcagatttatgagaaggtggatactgaaaatatactccagtgctaagaaatggaatttcttttgttacttctagcggctgggatcaccagctcacagattcagaccatctgaaaacacagatgcccatcattttgcctttttttttttttttaaagccagttcagaagaacatacaggaagcttgaaaatggacagaatcaccatgtcctggaatggaacaactccacattgcagatttatcaaactctttccaaattaccttatagattgaattaaactttaaaatcagagttctgaaagaattttgttggtgagaggaatttagcaaaatgattctaggtttatcttagagaaaaaaaaaaaaacaagtattaagagctaaaacattttggaaaaagaataatgaatacttatatctccaaatattaaaatgtactgtgaggcaaattaataaaacacaggatggctttttaaaaaatggttcttgaacaaatggttggtccataggaaaagaagaagtttagatttactctttaccccccccaccaccaccaagataaattccaagagaattaaagattttaatgttaaacatttaattgaaaaatgaagtattgaaagaattagaagaaaacttaatgagtattactgtaatcttaactttggagctttaaaaacagtagcaacaataaagaaaactgcaaaaagatttaaatatattaaaatctgacatgtctataagcgaaaaaaatgccacaaataaaagataacaagttacaaaaacttttgcaacataaattcgcctctatagagtaaccttaaaatgtaataagcagtttttaaaagatcatctcagtagaaaacaggcttactatatgaataaatcacaaaaaattatgaaaggtaataaacaaaaaagttcaagtttcctagcaaagaaatgggaaaatcaaacaagatgtaatatttattacgttggcaaagatttttaaagaattgtaatattcagcattggctaacttgtgggaatgaggggccgttgtcatatcttataaggaaaatatacatttgggtttg

SEQ ID NO: 25254 - DNA, 2180 bp, Bovine  19866880430138
  misc_feature (1)..(1): n is a, c, g, or t
ncaggtgtcagactgtcgcagcgacccgcagtgccattgctggactccagagacccatccccacaggccaaagggtttcccaggctcacggcctagaggcgttgagcccctggccactgttttgactgctggcggtacaaaaccagtccacccccacaccactgccgccgggctcactgcgggccatcaaaaagttcaagccaaaatgttaacattgtgcatcaagacggcaggcataaggtgagaatgcaacatttacaatctcaaccatacatcaatcagaagcccctgtgcagtttccaagatgttgttttgataaactctttgatgaaatggggaactgcaaatacatgatggctttgaagaggattagcagggtttgtccttaaaacggattcttcatgtaaaccctagtcctttagaatgacagtggagaaggagaaacttctatactgtatgaataaggtaatatttgaatagtaggctatcacaggcaggaaaattctttaactggtttataagtctgtccgtacttgggtcattccttgtaaaaggtcgcagacatatgattgtgatcaggaaactgcacaaaattatttttttcaaccctcatattattgtcctcccaaagtttttttttttaataaaaaccaactttttgttgtatatattcatattccatgtgttagatggaagcatttcctatccagtgtgaataaaaggaacagttgtagtaaattattataaggccaatgaaatttcatggcaggttattctaccaagctgtgcttgttggtttttcccatgactgtattgcttttataaatgtacaaatagttactgaaatgacgagacccttatttgcacagcattaagaagaaccttgagtggttacctctgttaacgaccaattcacaaacagtgtctggcctgtagcttggcacatactccagtgagacacaaggtctcttttaccagagtcaagaacagagctggtggacatattaattaatagtcttggatatctggctgtgggtaactttactgtaaatatatctagaatgggcagagactatgtggaagtctcatacacactaaagttcaaacaccaggtcagaagagggaaattcatccaagaactagaaaaaaaaaaaaacatgaaatattgcaccacagttttcagcccagcgccaactcaaaaagaaattaatgctgtgtaaaagtgggttgaattaatttgcaaactataataaagatatatgcagtaaaaagcctgttaatgcacatcagatgggaatgggatgttctagtcgtgttttctagttatctgaactctactatattattgtacttggataaccaatttaaaagaattagaatatgatgttttaaatacacttaacattaaactcttcttctaattctttcttctatctgtgataattcagaagacattatggatcttcagtgcctctgagtcattgttataaagatcagttattgctgtacctgctatagaagactgggctaactgtgtacaatgacaaaccttggaagttgctttttttaaaaaaaaataataaattccgaaaatcaactcttttactggttgtctctttgctatgaaaatgaagtacagattgctcaagtgcttaacactgtgatcataaaaatggctatcattctgcagattatatttcccaaattattttgtgccttctactatcttgattactctttcttctttagctgtccaacattcaacttatattttttgtaggtaaaacagtgtttcttactagttcctgaatctgtttctttataagtcctcattaagccttagttcatcttaattagaataaaaccatctgaaaacaaaatcattccacaatttcttcccaaggcttcattagtattcaactttaatagcattttgggcacatggactttttcaaattacattcatcattaaatcattttgagataattgactagcaatttggaaggaaaaagaagttggagccctacctcactccttataccaaaataaattctagctgtatttaagtgtaacagatgaaaccaggaaagtccaaaagtaggaaaaatgtttactgtacggaatgaagaatttttaaatctcatatattgcttgcattgccaaccaactttcttatata

SEQ ID NO: 25255 - DNA, 1535 bp, Bovine  19866880435848
  misc_feature (1)..(1): n is a, c, g, or t
ntggttgcagcatcccagttcactctgtaagggatttcaacgattagttgcaccaataaatgttctggctttttaaaaaaaaagaagaagggtaatgagaaaacagcaaactaacaggcaggaactggccatagcgtatctggagggccaaagtgattttccttccttatcatttctacaggagaaggcaaggaagggataggagatcagggctagagggccccttgtttgcagattttttaaaaaattattttcttataactctgtaatgaaaatgtgtattatggtatagaggttacagaaccgcatctgctactgggtcacggctacaggtctatgagctgatccaccagcagtaaagacctggctaggttgggaagactggactcggagctcctactgctgtttctagagtgcccaccttgcggggctttggttatccatgcaggaatagggtcaaactcatcttctgccaccttgtccaagccctcagggacatcaaaagctgagatgagattactatcttctgcagctttatgggccggagcatatgcttgagaaatgtgtgcctataacctttgtgtgcctataacctaagaagtttgtgacttctctaggcctcagattcctcatttgtagaatgatgataacaacaatgtatttgtcttgttgtctgatgttgtgataatcaagtcataggtggttgattgagagatggttgagagatggctatgggccaaactcttctagaaggtctgtagaggggttagaaagcagagagtgatcaatcagggaatcttccccagcgagagaatctgtgcggttcaaggtcacagattttgtctaagaagggaggcactgaggcaccaggggctccaggcccagtatcagactctcaagagcaatgtcagctttttcaattacagcatcaaaagtgctcccaaagggatcttctttatccacatcttctttatccatatccatctctctgttgacagatatttatgttgcttccttaagaagcatttttaaaccacctatgtcttgattctcacatcagacaacaagacaaatatattgttgtcattatcattctacaaatgaggaatctgaggcctagagaagtcacatacctcttagattataggcacacaaaagcaaactcaggtctgcagccctgatgcccagtcctttctttcttttatacattttctcaagcacatgagttctatgctaggacaagcagatattccagaacagcagttccatcatgactggcaaggccagtttgacatggaaagagattaggaaaaagcatcttaatgagcctcgccagctgttgcttcaggtgtaaagaatagttgaatggacaagagcctaaaacagaaaaatgaccgctgtagcacagaaattgttcaagtggttgtcataactgcattgtcacactaactctcccacagctctatttgatgaacaaagaaactaaagctcataggaaggaatcagtggtgctctgtcaccagtaagtgacagag

SEQ ID NO: 25256 - DNA, 3238 bp, Bovine  19866880531031
  misc_feature (1)..(1): n is a, c, g, or t
ncagggagaacatctcccacccagggcaaaactttcagaaagttctagaaagagtcctggttccccagtgaaggtggtcagaatcacacacctttgaactgattgcatttgactcagtttctcaagcattccaggaaatagatttgaggaccagagaagcaggggagcacattgcctcagcacaccccaagggagctcactaggagaaggagtccacaacgggctgctccctgccatcgcctaggctaatttaaggcactgaccacgctgaccacactttaccctttcctcattccaggctcatgatcaggaaattttccgatatttggcctgaatttttctttgcttggttttcaccccctggatttacagcaatcccgtgcttctcattaaattgggactgaccgcttcaggcgagttaagtaatgcccagatgtatggccaccagaaagatgaaaaccaggtctgttttcaagtttgctggaaggcttgcagacttcagagaaatgattttcctccttttccagtagctcctccctttgactggcaatgacagaaatgacagccgaaggacaaaagccagaccctggctggccctgcagaccgctgtgttctgcagaagagcctgaccagcctgtgctgctcacagcaccgggaagccggtggtcttctgttcattttctttcaggcaaacctgtcatccctgcttaagcaccttgaccttgtaatcaagcagcattcagtgctgaaactgcactgaacgaagctgtatgccatccagtaagacacactgaagccttaaatgttgtcagatgtgctgttgatgttgaacagacatttttttgtcccttcctggctacaattcagaatggttccaaacatgttttaaacaaagaccaaaagaagagagaaaaaaaattaccgtgtatgagtgtgtctatgtgtgggtatatgagggggaagtttctaacttatgcattcatttgtttcatttaaggagaagcatgagtcacaatatttattatatattttaaggtataaaaaattagtattagtctctcacacccctctaagttgaactaccctcaaaattcccagcttctgactaacttccaattagctgaggcagacaaaccaggagagaagatacagctgcttgcctgcccacccctcctcccacccccaaaaaaggaaagaaaggcagccacaaagcccatgcactgaaatgctttgagcgatggacctcacaaacctcctggcgtggtcttcttgtttaggaagaaacaagcgagcattgatgtaaaattcccggtttgccagcctttgtggattggaagatattgattatcaggctagggtagagttggggaacctggaattggtacacttctcatgggatagtcaaagtgtgtccatttcatatgaaagaaagatatataaatgtcaggtaatacactgtggtggagggttcccagagtggcggagaatctttaagcttcgcagaagcattcctcctgggaagtgagaacctgtgtcttgaaacgcaccttgtagagagggccatgcaggcaggactctcagatctgagagaaatagtggtgtcaactcagaggctccccccaggctgtgaggaaaacccaccaaccacttggaagaatctcctgaggctcttctggccccaaagggatgttattaataagcccagtagcaactgtcttgaaatgacaaaacttctgcctcctctcagaaaatcaagcaaaggaacccttgttatgtactttgacttttaagagttatttttcatcctcttgattctaaacacacttattctatagcttacttcagctcttgcataaaatgctacctgatgtattgaaagaagtacaacaaggtataggatgtatagattaccccagctgttttctatgccacacagaatggggactttggattcatctgtggaactttgagaattcagaacactgagggctacaatcagaactagctggtcttacctcggccagaacagctgttgatagcagctcagctggatgaagggcatacctgggtgacacatgtaccacaagtcaggcatagtcccgagggtcttgcttgcactcacttcttcatttctcaccaacgccctcaaaattagaaactgctactactccttctgttttacaaatgggaaaatcaaggcacagaggggtaacttgcctaaattcacactgctaatacgtttcttgatttattttattactgacaaagcatccattccagctagccatgatatctgttattaatcaagtagtagaaaggactgggagcctggaggtaaaagaccaatcaggaaactattcacaggataagtgacaggtgatccaggccaaggcagtagccaaggagacaatggggcagggctggacaggaagaggcaagagggaagatgggacagaacatccaccggacacggtcgaagttggatgtgaaggggtggcagagagagaggaggtgagaatggcctgtctggtcattgcctgtctccatgtcagtggtgctccatggcatactcaaggcagggtgccaaagcgggagcaggttggaggaaaattattcaatatgtgatgtttgggggctttttatacctgtgatatgtttactttacaactaagatttggtaattggattggaagtttatatgagccatgggcagacaggtggaaatttgacccatgagactaggtgagagtatgcggggtgagcattctgcctgggggtgagtctggtagaggggggacaccgaggggaccccctttgcatcaagtgtaggcagaggggaggggaagaagaagctgaaaaggatatgagagagttaagaaggagcaggcagagccaaggtttagccaagccttagcgaagcagctgtggtggagtgttgggggtccccagacaccgtcatagaagccagggggaaaggcggaaatgtggttgcaggacagagtggaaggcgggcgctccatgcttgtaaagtacaaattgttggattcttactcgtcatcttacattcatttccatctttctacagggcattccaaattattattttaatgactacctaaggattaatacattgataacattgaatgaatgctttctgtgagacaagtatcttacttcaagggcttcccaggggctctaaggtaaagaacctgcctgccaatgcaggagacataagagg

SEQ ID NO: 25257 - DNA, 3234 bp, Bovine  19866880570058
  misc_feature (1)..(1): n is a, c, g, or t
nacaaatcagcacaatcctccaaaacatatttgaaaagattcttatgtatacaagggttatcaaaatagagatgccgccaaactatttttatttcagttcataaacaacatctgacatctgagtttggcattctgatattcctgtggtctttcagcctttctaatgacagtacaagaaaccatagctcatcttgttaaaataatagtaataaatactaggatattgtaaaaaaaaaaaaaaaaaaaaaccttgaattatatatgtctctcctaaggccagctaataaatagatgagactgatttgtgactaatgtattaattgtttgtaaatgagatggtgtgtttgaagttatttgaaaacaaatttttcttgggaggagctttaagctcactttagtctgaaatatagtctcacttgtatcaggcgaaggttggctagtttgaaccacactaagagaaacttatctccagtgtcaccaacaaaaggctttcctttattttcaaaatataaaagccaagctcatttgttacaccatttaggactgataatatttgccttactctttcactagatcacttttagttctagaatttcactttcaacattggaagaagtctgaaagtttttctagtccagttgcctatctgatgcatgaatggcctttacataattctgccaatttatcaagttgcctggacttgaatataaccacaacagggagttgactcccaccggtacggagcacccaatcagaaagaccttttacaaaactgagccacaaactatccatcagcctattctactccactctttgtaaactcatggactgtagcctgccaggctcctctgtccatggcattttccaggcaagaatactggagtgggttgccataccctcctctaggggatcctctcaactcaagaattgaacctgggtctcccacaatgtaggcagattctttatcatctgaaccaccagggaagccccattctactccttagatatacacaataaaagcagttgtacctcaggagagcccagcccttgaaatattgaaaatgtctatcaaatctttatatcttcggtctcaattctatagattattctaaatgatttatcatacttggtaatcttttttcacatgttcagtttttttgaggttctccttgtagtgtccttactatttaatatgatacttgaaagatgttccttcagcaagttgaaaggttctatcaacttccttaggctcagataccattctcctgttaattcaatcagaagtcagagactgtcactgcactgattcttagagaacctataacatcagcctaaggaaactaacattgggtatctattctgtactaggaccactgccagctgtttaaggcctgggattttagccacactgatctgatcccaaagtccatgatggttcctacttttcttcctcaactaagtctttccttcgtactttgctaagccacatctttcacaggacatatcacctataattacagcaataagaaagtaacagccatcctttttcaggggctgattatgagacactaatgaatcacttgtagccctagggttgtggattggtcattcttggaacaaagtttctttcacctaaataatggaacactaaactggagcctgttcctttccaaatgaccaaattataaatcagggacatccagacaaataatattttgctaaaagacttggaataaacaaatgctgaattaatcttccaaaaatattgccttgttctttctttgaatggtttcccatcacccagactccatcttttgtcattcaaacactctgcaatgtcagtctcctatttcccctccaaccctgacaccccttattcttccaggataggaattcttcaccctctgtgaagacatgggggctaaatggataaggagaaagatgggagaaaggtgcacacgggagtgagctgtacaggcagtggaatgatgtcagggtgaagaatctataagcaaaactggagtgtggggcttggtcctgcccttctccactggttgtttggaagggacttgtcttctccatgagttttttcctgtaattgagaaatacaattggggagaaataaaaactggggagggtcttgttgggaaaaagatactctgagctcagtacatcgtgagccgtctacatgttattcttgaatttctagaatttgtccagctcccttttgcaggaagtcatgaatgccttcttaagtaattgagaattagggttacagttagaacctggtaacccgctaggaccattaaatggactctccccaaagtgtgcagtgcttgtgtcaacttacttatccacaggcctgggtggaggctcacaagtctttagaatagacaaagaatttctggatatcctgtggtatttgtcttttgcacccccaaatataatatttaccttttataccaccaaatacagcatctacctcttggagtatgtattctgccttgataactagtttgtatgttctggagggcaaagacaggctacgcgcttctctgagaccctaacacttggaccatagtactatttcatacatgccagtcccagtctttggctctgttcaccatcagcaactgcttctctaaactactttacttaatgaagaggcccacatgcttatagctgctggtatgaattagctacttcaaagatagctacctattttgattaatggactgttttgtttaccttggaaaagaaatagaagaaaaatgacttctctgatttctactttttctgaagagtgagcattagttttttattaagttggaaggcgagattgccactcagcacaaggttctggattcattccctaccaggctggtgaaattcaagaaattttggcaagggcagtcacgccaactgtctgtttacctagatagttatacaactacaaagctgggctggatttttattttcctaagttatttcaaagcaattagtaacagaattgaactcacttacaaaatgaacccaggaagttgctaagaatagaactctgcagacaaggttggaagatgccccctgacctccatctgaagcctcgctttgctgcagccactggagcattcttctatggctccagcacactgtcttctgagctagccctaaccaaggctgcctgtgcaaccccagccttcactggcagcatccaggttatttaagttaccatcg

SEQ ID NO: 25258 - DNA, 1519 bp, Bovine  19866880628210
  misc_feature (1)..(1): n is a, c, g, or t
ntttctactgcagaacagttttaaaaggctaacaggatcatttctatattcattctgaaaactagtatagtaagaaaggtaatttaagatttcttaaaaagttctcattagccattatttatcatatattccataacattgatatcaagttattagagactcacaagttaatatggcataacttgacagttttgctagttaactatgatttttattttaactgcagatactatcagttcaaagctagtactatccatcctattggttatcatcacggatctaaagatagttaaattcgtcaagctagagaaacactgtcatattaacactctttaaatactccaggaaaaaatgatttaattgttacaatttttaactttaggctctaacacaagaaaccaaactaatctgaaatacattttcacaggtaaaacactacctggtattccgatataaaaaatctattaaatatgtggatataacacttttttaatctacctttaccattcccttcaatttctttggccttcataaattcaatgtgagctgtgatttctttttaaataaacactttcaatgacattgttctctttagaaaaatcacttaagctgtagcatataataattaacctcagtctttcccttttactgctgtagtatatagcctaattagaaagagagagagagagacaaaggaaactgaacccaaaggacttcttaaaatatgtttgctgaagtcaacatttcacatagttttccctctttcaagagttactagaaatatgtcaaaggaatataaccaaggagctaaaggggttcctttcctctcatcctcataattaactcaggtcaagagatctgtattcaaaaggttaagacagtatcatctcagaaacatctttctaagaaccttaaagaaaatctttattagctctctaatcaacagtctcacctacgtgtcacctgtgtcagttcccttttagttgtgttgcttgttttcaccttgtatctaacaactgctgttccttacagtactacagacacatggatttatagcctgtggtaacagttaactctgcaaaatgcacttcacctcttaggaacatgatatacaccaaaacctgaaccatcatttcaatgaacaaattcactcccaacatttaaaagctcaactccatttttccactctctcaccctgtaccttccaatgatcctagtctccaggagcggtaagtactcaaggagacaagtggactttaaacaggatgtatttttcagtttctggcacagtgactttcacataatacactgttgacagagttataacaagccaaagacagttaacattaactttccttcaactatttattcctatggcataggtgatttaaacagacagaagagctgactgatgtcaaagtaacaatcatttactgtgccacgtgtcagatgctaacatgatccttggcctaaaaaggattcatggcctgggtaaagagtactaagttatacaaaagtg

SEQ ID NO: 25259 - DNA, 1259 bp, Bovine  19866880670207
  misc_feature (1)..(1): n is a, c, g, or t
naaataccactttggtattcttgcctggaaaatcccatggacagaggagcctggtgggtgacagtccattgggtcacaagagttggacacaacttagcaactaaaccaccttaagagtctctagctctcccttaagcaagtcccattagctttcaaagtcagacattctgggaggtcatcttcctggtgcaggacccctgggggctagaacccaaagtgggacttggaacccttgttcctctggggagaacctttgcaattataattatcctcctgtttatggatcacctacccatgggtgtgggtcttgactatactgcatctttgctcccaccaccaatgttactatggggacttccctgtagtccagtggttaagcatccacctcacaatgcagggcacgtgggtttgatccctggtcagagaattaaggtcccacaggctgcagccaactaagccagggcgccacaactactgagcccatgtgctgcaaaaaagaccaatgtcactatggttccttctttacatctttggttgtggaaaatcttttctgctagtattcaggtcattctcattgatagttgctctgtaaatagttgtaattttggtgtgcccaatgggagaaggtgagctcaaggttttcctaaccttggcaacatctccaaaatgctggtattttaaaataatgtgaatataggaggttgtaaatcttccatgactaatcttgggggtacaaatttttgttgtcaatgatgagtggttgacatgtctcttatgacttctccttcagaagaaaatgaagcgttttctgcactcttagcaccaatgtttcttgtacttttaaaatgctttgcaagaatgcaagccacttcactaaaaagaagtatgtcttttatgaattgcatccattttaatgtttacaaggatctctcaactaaagatgctggctaaaaagtactgaatgtgcacaactaattgaacatcttttaacagagctttgctctgcactctccagtgactcaggcattatgttaactggctgctgttgctttataaggacattgtgaaatgacatttgaaactaaacagaggaaatgttgcacagttttaactccaaactttaaaactgtcccaagtagagaaggaagggtttatataactaaatgaccattttaacatttagcaaaaaggaaggaaccaaagcttatgcccagaggaattaaaaggcttctaatctgtttaggtatgataactttagg

SEQ ID NO: 25260 - DNA, 1342 bp, Bovine  19866880691033
  misc_feature (1)..(1): n is a, c, g, or t
ntgtgtgagatgctgtgaatctaaaggacacatacccatttagggtgccagccactcattagcaagagtatagtagtcacaaaagcaaaatgttctttaaattttaattaatatcctctccacttgggaaaagtactttgatatctacaggcattggaaaagaactcgccctaaagatggaattcctcacattgtgcaaaagaagaaaacagaccttcatccaggatcttgtatgtgtggagcaggatgggactggagctatgcaccagatgaataagtaatttcgtaatttgacatttcacatccaagctaaataatgcttttggcaaggcaatctcagtttatcttctggcccctattttttaaggcaaatatctcaacataaataaaataataaatagactatattaatgatagttctaagtagtcagagtcatttaactgggattatggacaaggacaggaaaaatatcctcaagattgttaactggaagagacagaaagggagagaaggaagtctctgaataaaattagttcatcttgggtcagactttcactcactcagcatgaccatgccacagtgttttcttaaattttagaaaagtgcatgaaagcaacattattactgagacccatccaaaatgtcaattaaaaccaggctttttggaaaaataattgctgcactgcttagcaggacccaacattgaacttgataccaccaatgaagagaaaatggtcaataccaagggctggtttttagaaaagcgaagcttagaaacaatatttagggcatgcttagaaacaatatttagggcatgctacctcaggtctgaccgctcagcaccattcatttcctcttcaatcagcaaatgttttcaattaattccacttctaagtgcgtgacccttggaatctctgcatacatctttgtcttgctaccctgaatgctctgaatttttagagtccctttggccactgatcacgtttcctggatctcctttctctggtcctattccttcttttgttgttgtttttaagatgtgtccaaactagacaggtgcagacataatacgtcaaggttttatataatgatgagacataaataggggatttaagcatcaaatgggaaactcatttgtaaagcagttccttatgtcactgtgtatgtttttgtctttgttgaccgcaatggcatattgatcttcctcagaagccataaaagtgagtccttctctacatggactcactaatacattcatttgcatgacaagtaattcattgcaactttaggcatagtttagacatgggcacttagcagactttcatgaaccttaggacagaa

SEQ ID NO: 25261 - DNA, 2475 bp, Bovine  19866880711869
  misc_feature (1)..(1): n is a, c, g, or t
nttcattattgtttaaaaggaaatgccatgtttgcaaagaacagaaattgcatgttgactacctacacttccgtaatcccagagggagttccaggagtcccatccattgttattgtcaacattggccacgccatgttcattgttgacactcactgactgctgcccacttccaccactgttgttgttatcattaacactgatatcctgaaatttacaagaaattgataatgatttaataccatttttttttttttttgcaaatgcattttggtaacacactttaaaaaatgaaacttacatagtcagcaagagtaggagtcaggaagatgccaagaagtccagcaaagacaatctgaaatcacaaataacattggtctactgttaaatggcaaaacaatgtcctcatcgtctttttctagctaaacttataaaagtgcttactaaatttattactgttgagtgatctgtcttttcttcttctttgatcttcaatttttttaaactgtagaaaatttaatgataatgttgaattgtaggttaattataaataattatgttgttttagaatttttaatgtaggtcttacgaaaaactgatgaagtgtaagtatattgaaaaatagcattgacaccgaatagcatacttggcatgaaaattgttttaatttctgagaagcagacctgagaatgaattaagataactttcctaatgtggtctagaaaccaaataggactaatttccagatcaaattattgacctgaatgctttcttctcttcctagaccccctaatctcaaaagcagtctttattaaaaacattttttattgtggtaaaattcacacaatataaaacatattcttttaaccctatttaactatatggttcagtgacactaagtacattcatattgttgttcctatttccccttcccatcctacccccagcccctggcatctatcaatgtactttttgactatgaatttaactattccagatatctcgtgtaagtggaatcaaatagtatttgtctgcatctactgtgtgtgtatatatatatatatatatatatatatatattcaaagcaatggattagtaaccaggttggatatgaatgatgagaagccaaagatggagtatctggctatcgagtatgcttagtagaagggaagtcaatgtcccaggatacctgggtaatcatagttgtcattgagtacatgatactggttctcagaacacggagctttatgcaggatgcacaattttgggtccctatcttcattttctttgcctggaacaaaacgggttgagacctgcactagtgattcaagataattaaaaaaaaaaaaaaagtttgatgtatcccctgatagtttaaaaaggaggatgaaaaaaatcagaggtgaaagaaattttaaagatctattagtacaacataattcttcacagatgagaaaatggagcttcagaagttgagtgacttggccaagggtctaccttttgttcataccacaactggaagagaaatcagatctaacctgtctgaagctcttttttttcccttaaccttcctatcattagcacttatttccagaaaattatttcacacttgccactccattatgaagcagaatctactgtcatatattttaatgtttagtatgtcaaaatacgaatgtttattcaccctactctagcccttttgcatcctgttatgagacacacagcatcaccggttgctttggcagaattttgctgtccatttgctactctctcagccttttacatgaaacaagtgagatgatgaactagcttcatgcttctagtgttttcatgaatataagactatagacagggttcaaggcaaaactttgttacttagagatccatttcacaggagggaatgtgacagtaagtctctcactaatttattttgataataagctttttatcttgcctgaacctgttcagtagtatttttttgtcaaaaaaggaattcaagaatgtaatgaaaaatcagacatttcatatagttagcagctgtttgctctgtgcctagatctgaatcaacagatgcagaaagcaatttttttaaaagatagcatagtataagatgctcaggcagctgactaatcccagtataattatccttttctatggagatgtgtataaatgccataattccataaaaagggattattcttatttttacaaatttttccatgacagtgatattataataagaagcatacccccacttagctgagtatattagcagtttccaattataaggtaataaattcaaaaggaacaatctactcactgtgaacttcatcttgacttcaccaaagcaatgaagctgagatgacaggtatgcattcagataaaaagtgttctcatatttgtacttggccagctttactcaagctaggtgtgaacaggtggggcctaagacttatcttttctccattttccat

SEQ ID NO: 25262 - DNA, 847 bp, Bovine  19866880721579
  misc_feature (1)..(1): n is a, c, g, or t
naactatattgtctcctatcttaattcttttttaacctggttgagtttattctcatatttcccagacttctaattgtttctattccaagttggcatagtggacacttttatcaaggtaattatggactcgacaaaatgaaggttagcaaatctctatttaaggaactgtagttaaggaattctactaagagtgaactttgaaattgggttaaaagcaatgacaaaactagggaagatttcgattttgcctaaaatttaataacaaatcatctagatatgatcaaactctgggctgggaacagaatgttaacatacatagcatgagttcccatggacatgacagatactgttgagagaaagactgctcagtaccctggaggagttaagggtatccttacagcacagttctttcattaagaaactagagggaacctgaaccagtgaaaaaattcttaagactgaaaccaaagaaagctcaggaatcactctatagagaacacggcctcaaaaagtgctccactctttaccaaggaaacacatccctcaacatctagaagctggagctataatgatgcagagcatcattgtgggaggagctaaccaggctgagaaataaataagcccaggaccactggctgcaggcggaacgtctgactcagcgctgctggcactgaccagtccctgcagctgtagagactcctgactgacctgtgcggttcgaggtcacagattccgtctgagatggaaggcgctgaggcaccgggggctccagtcctggtatcagactctcaacagcaacatcagctttttcttttggacagagcattaagagaggagaggaaagggt

SEQ ID NO: 25263 - DNA, 764 bp, Bovine  19866880781000
  misc_feature (1)..(1): n is a, c, g, or t
ntatgaagtactatagcagagatctgctcaaagagatgctaatgagatgcttgtgggatgagaaaggactgaagcgaccacagagatttagacaaagcattgaaacacaaggatatttggagaactcccatgcagaaaggacttattggtcttattatatgtagctttaggagaccaccaccgagcggttggggaggaattcaaggaggcagattttggcttaacacatgcaacttttacaatgaaagctttccaacagtggagtagatggtttgaactttccacccctagaattatgtgagcaacagctgaatgaccatctgtaaacatatgctgtccagagaactcctcctttgggtttcctttataacttgaagtttctaaagacttaattcaacgtccgctaagatattaatggctgattattgtttaattgcgaaagagaccagtacacttggaactattttgcattttaacaaaaagtcttaatgggaagaagatgtaaggatctgccctgatcaaaaagaatttcattcaatgaaatgagtgaaactatttggagagagagacgtcccccaaagcctccagttccagaggttataaactggcagccaacaagccctctctggtctgcacatatgttctttttgattcacaccgcaattaaaaaaaaacaaaacaaatttattactaacacttaaaagtctgatttcacctaaaaattcagattttcatctcatattgaaaaatcagatctagcaaca

SEQ ID NO: 25264 - DNA, 1067 bp, Bovine  19866880786824
  misc_feature (1)..(1): n is a, c, g, or t
nattcaactaaatgtaagtctcttggctaagaccagggactctgttttaaaaattgtttctcagatgattctaaggcacaaattagtttaagaaccattgacacatagcatgtctttgctggagaaagcctcattttattgttgagctgtagaaacaatgccaggatcaaggataggccttgacagtctagtgggggacatgaaggatgttgttggctccacatcaacaaggaccagaggtaaactccccaaaactggggtggggggcaaggaagcacctgacctaactcctggttcattttgatcaagaaaaacagctgggagtcagagaatgagcctcaagaggaacatgaatatgtttgctggattcagcagaaaaaccaccgtcccagtcaaggggaatgtgattctctcagtgtcctaaccaagcccaaggagagacagggaaaagaagtggcttatgagccaaattaggctcagagatatgtattatttgtatttcccagaatgtagacattttctgaaatcagttggaaaaaaaatttttaattacaatttcaaatttctagtttatcttaaaattggaaaatctgaccctcacaggccttaaactacttcagcaacaatcgtctgcttcctcacagctgctgctgcccatacttggagcctgagtcttccagtgatccgcagtctccaggccgcctcacttgtttatgtcacttacctggcctctggggttgccatcccagttctagatagctcaaagagaatggtgggatcctttggtggtctgataagaaggcagggagaagggctgtaccagaatatcagacagccatacaggctcaaacatggcagttggtctaatttgcccggacacaagggttagagacaaatagtttgatctttctaccactgattataagttactgtgctagtaatagcactagtaatagaactacagggctcaaattagctgtaggtagttgatgaactccatcttttttgtgagtattagagctcagaataacaagtattctctgctcagtgtcttttgacatcacttg

SEQ ID NO: 25265 - DNA, 1390 bp, Bovine  19866880790315
  misc_feature (1)..(1): n is a, c, g, or t
nattttgtggccgacccaagactgattaactgcatctcctccacaatttcaatttcctgtagcttcacctaaagggcaggttactgtgcctagcttacaaagtaattcccaaagtctaacctaaattcatctataatggctgctgctgctgctaagtcacttcagtcgtgtccgactctgtgtgactccagagacggcagcccaccaggctcccatgtccctgggattctccaggcaagaacactggagtggcttgccatttccttctccaatgcatgaaagtgaaaagtgaaagtgaagtcgctcaggttgtctacttgaaagttacacagtcgtgtccgactcctagtgaccgcatggactgcagtctaccaggcttctccatccatgggattttccagcaagagtactggagtggggtgtcattgccttctccgctataatggctcaggaaacaaattctccaaccgcaatgcccggttctatgaaccaaaagaacaaaaataaaaacttctctttccaccactcacaaatgcttggagttctttttgtttccatccctatgttaatctccacacttttggggaagaaagttccaaagatccaacgtacttatgtttcctttcctgatactgtctatgaactgctgtctctgaattcctatagaaaaataagaaggtgaaagtgaaagtcactcagtcctgtctgcctctgtgaccccatggactatagcctgccaggctcctctgtccatggaattctccaggcaagaatactggagtgggtagctgttcccttctccagggcatcttcccaactgaggaataaacccaggtctccctcattgcaggcagattctttaccatcagagccaccagggaaaccccatcaaaaacaagagagacgtgtaatttgctatttgggtcatctgagaaaagttacccctatggggtagaaagttgttcttgttcagttgctaagttgtgtctgactcatcgcaaccccatggactgcagcaagccaggcttccctgtccttcactatctcctggagtttgctcaaattcatgtccattgagttggtgatgctgtctaaccatctcatcctctgctgcccccttctccttttgccttcaatctttcccagcatcagggtcttttccaatgagttggctctttgcattatgttaatagaaagataactgtcgaattttctggcatggcacactaaggcagtttttctcaattcagcctgctgtcttgtaatcaatagaaattttgtccacattctaggacttagttctttatcagttttcagcattgtgatccttttttttttttttttggtctttcagtgggaagttacatgatactacattgggagctactag

SEQ ID NO: 25266 - DNA, 806 bp, Bovine  19866880815137
  misc_feature (1)..(1): n is a, c, g, or t
nccagagcccgtcgttccctggagccagtacgatgggttcctgctctgtgggcagctcatgaattcagatgaggcaaaggtttgtatgtcattagagtgagttgtcctactttagaagaaggtaatggttactgtacactagtctgttaggcaggcaacagtgggtcaagggtggaccttttggtgagatactttgttaaactagaactttctcaacagcaaaaagttcagtgaagccaatcatggtaacagtctttatgggatgtcgcatgccaacaaagaactggactatcatcaaataccctcaagtcactttaaagctagtaagagaaggaggatgcttctgagaaggtttcaagcaatatggccttgctgaaacctgctggaacagaaagacagactgaccaacctggagggcagatgcagggtcctagtgttctagctttgtgataccatgcatggcaggtgtgggtatatgaggaacatatgccagggagaggaaggacaggaactttccttggctcatttcagccacagctgcctgcagggcctacagttcctgtctgcaacatcacaaagctcttcaccagcaggagttttgatcctcaggtaaattgtttccttaaagggcttagaatcaacagttaaccacattagaatcatgttaaagaaactaaccaaccagcaaaagaaaccagtaaaaccctactgacaacgataaaaccttcatggtttttaatcaagatttgcaaaactaaatggtccatgaatgtgtttgtattacacagctattaaaggggtctact

SEQ ID NO: 25267 - DNA, 785 bp, Bovine  19866880838513
  misc_feature (1)..(1): n is a, c, g, or t
nttcttttctgggtttgttcccctataattattagcaatccaaattccataattctcacttgggaagaggcaagtccggtatccaatgacattaaacaaactgacaatctctttcagaggtattataaaacccgtatttttcaattttctaagccatactaaagacaggcaaaatcacacaagttcctttattcagaatattaaagaaattaagactgattgttgtcacagtccattataaggtcttctctgggaattttcagtggattattcttctgactatcttccattgtaaccactcttcagtgtaggggagtggttttgcttttttggaaacatcaaatgttacttagaaccaagactggtgaaaaaagggtaagagcataggttcagatgctgaaagagacactaattagataataatacaactgattttcttatacttttaacataaatggtggcagcatcattaaaataagtattattttcccaagtaaaactagatgcctttgaagggaacactcaattagatgtcacaattttgatatgtctgctaaagaaatcactaactataatcatattcacaagtgtccatttaaaccttatctcctctgaggcctgtgttttcactgggacttgaatttggtgatctagttatctgaatgctgtaaaggggaaaagaaaaatccaatttgtgatattttctggtttagttactattttgcacagttggaatatatgcttacagtacttgcccattttaaaatagcagatccttcattaca

SEQ ID NO: 25268 - DNA, 1742 bp, Bovine  19866880851806
  misc_feature (1)..(1): n is a, c, g, or t
ngagcgtgattgacagtgcccacaggaccacattgggcctcactgagaagacagcatttaagctcaagacccaaaatgtcgactgacaagaaggaaaacctttcccaggcagagtaccagaaagtgcaaaggccctggggtgggaatcaggtcagcttactgaaggaagaaatgaggggatgaatgctctgagctcagggcagaggggcagccaagggccagaatcatcagggccttgtgggtgtggtaagaagcctggattttttgctcagtgatttgagaattcaaaggagtaacatgtatgatttatgctttcatcatctggcttgtgccaagaggccacccttccagcttctgcagttcatgggctatctgggtaagaacaaggcatgaacctgaaggggcatctgcttgaaactggcctgtctaggccctgccaggcatacctgaaagatgcaacagagaaaaggacctccatttgacacctttcttttcatttctttaactaccctccctgagtcattccttaattattttaagtatttttgacctacctccaggtccagccaatacacaatactacctgattaaggcaaatttctgcttcttcttagaagggtcaacaaactatctaaagaaataaaaactgtcttggtacccctagctgtgggtctgttttgtaagtagaggatttccacatcacaatcccttccaattatgaagcaatcaatcaaataaatccctctgacattttgagagagaagaaaaaaccaagcagattcttttagttcaagaaatcgacaggagtaagaatgaggaaaaagaaaaactatcaacagcaaaatgacctccagttatttctaaggggctggatctatttgctttttgaaaggaactgatcaagaaggaaagggcaacttctgtccctcacatcatgcgcctcttcccctaagagaatgaggaggggagcaaagggaaatctttggcatcatgaaccccaactggaaagcatccaagcattgttttgaaagctgtttcaatcagaccacgctaaccgtttcttacttttgcagactgcttacttaaaaatcagtacacggcagattgtatgggagatgagaactacttatcttgatgatgaaaagtcaagctcagacagtggaaagtagtggaacctaggtctcctgactcattccctatcaaattttattatgtatttttatcttataaaaatcaaagcacattagaacaaaacaggaacaggaagtcactcataatccaatcagtatactatactattaggattttattccttccatcatgtgcttgtaggttcccctgcacatacactgttaacatcacactggactaaaagttgtttgcaatacacaggccctttacatcaccattaacacagtcgaggacatgaaacttaacattggtatgatgtggaatacaatttggtataatttgagctgaatttactgtctttgctaaggataagtgccttccaagtgaattttggcccttttattgagacacagtaaaaatatacaacagtacctattattaggtcttggactgcaggttgttctcacagtgtttaaaacagaactctcaagaggccctgtgatgtaacttaacttcagttttatttacctacctggtgcatcaggtacttgaagaggaagaaaggatcagatacacttagaagaggaaggctagaatccatagtctgccca

SEQ ID NO: 25269 - DNA, 1612 bp, Bovine  19866880910517
  misc_feature (1)..(1): n is a, c, g, or t
ntttaaattgaagcatagttgatttacaatgttatgttaatttctactatagagcaatgtggctcagttacacacggtatctacattcttgtggctcagctggtaaagaatccacctgcaacgcaggagacctgggttcaatccctgggttgtgaagatccccggagaagggaaaggctacgcactccattgttctgacctggagaattccatggaccattccatgtggtcacaaagagtcggacacgactgagcaactttcactttcacttcaccttctttttaaatattcttttccattatggtctatcacaggattttgaatatagtttcctgtgcaaagctcatatcctttctatgataccaactgcagcttcttccttgtgcagatcttctggtcggagcactttcacttagatcctctagaacagggtttctaaactgggggttgcaactcttcaacccctcatgaaataattttgtgtattaggatctgaattaataggaaagaaaatatttgagttaatggcacatggtgaggataagtatgatttgtgaaaaatgtgtatcagttaaacatgcatgggtgtgagtattagtgtatgaagtgaatgcacacataaggatttactgggccaacatgtattcctgttggggttttgcgagcatgtttgaaaacactgatctgtaagtggtctttgaaggataatgctaaaggctagaagagtctagaaacttcaagttccttgccacaaagcgttcatagtagcagcatcaatttaagaatgccacttgaagagttggtgttctgaagttattttctggtgggttttattcagatacgaaaaatgtgctctgcaacctttatcaatggtcgcttgagttcttgtgggttcaactctgtcttgctaagcataatgtttctcatctctcttggccaagtatttacaaaaacctctaaaaatattctggactgacttcagaatgctgggaaggactgctgctgtgttcagcatggttttctgcattaaaccgtttcaatcattggttaaatgttttcctttaaagttctttgggataagtatttatgtgtcaggatataaccaggtggacttcctggacgaacgcctcttttcttttccattttttaggggggactcctggtaactgacttggtaaatcatccccctctcagtattctgtgccctgatcactcaactccttgacaaatgaggtgcaatgagatggggctaaaagaaaaagtggctgttgaggaagtgttataattaactcagcagaaatacaaagttccaggcagggaaaaggggcaaaaaccacctagatgtgcaacaccaggagaatgggtggcaacagatcatagagcaatatttaagcacaaaatgactggctttagactgtattttggggctgcccctcaccagctctgctgtggccttgaacaaactgtttcatgtccttaagtcttacctttctcatctttagaaaaaagagagataataatattgtctgctctatggatttcttaaaaggcttacaattagatattgaagtaagatgcgtgcatggtaaagtcgcttcagtcatgtctgga

SEQ ID NO: 25270 - DNA, 2430 bp, Bovine  19866880913673
  misc_feature (1)..(1): n is a, c, g, or t
ncaggttcagcgtaaaaacaaataactgctagtatcttgttaaaaccatgctctcaaagtttaaaaatgattatttccccaaatgaactagtcactttgtaaggcattcaagatgctgccttaaatttgtttgtttttaaatttgcagtataatttacactgaataagaatacaagttaccaattttaagagtacaatttgatgaattttgacaaatgtacacacaagcaccactgaaataatgaagcagaaggtttccatcaccccaaaaaggacctgtgtgcccctctctggtcaatgccttcctctgagccccaggccctggcaacaactgatctgcattccgtccttgtagctttgcttcttttctgatgtccttcatttagcatgatgcaattgagattcctccatgttgtggtacatatcagctgtttgttttactgctgagtgtcactgtatgaatgcacttcattttgttgattcattcatcagctgatggactttcggttatttccagcttttagttattaaaaataaagctgccatagggatccctatagctcaaacagtaaagaatctgccttcagtgcaggagactcggatttgatccctgggtcaggaagatcccctggagaagggaatggcaatccactccagtattcttgcctggagaatcccatggacagaggagcctggcgggctacagtctgtggggtcataaagagtcagacacgactgagcgactaacaactattactactaaagctgccataaacatacacatatgagtttttgtgtgtttgtatctctttctgagcttagttttgaatctctcccctttttttgaacttgcacttagaaatggtttatagctcaccaagagaagcaatgaaaccacacctaggtttaacttcaacaatcatttactgtccgccaacttacagcttgtgacactcccagtactcattattaaactgtcaaatcttataaaattcacttaagcctgcaggtggattacttctgatgtcttttggctaaagaacaaaaggacattagaagccaccagatttgtcacacctgataacttaatgtgtgataacatgcacactgtttccttccaagacaagtctttatagacaactctttcaacaactctctaccttttaaaagtagagcattaacttgacacaaaataatgaatcacagactcttagagaaagaaaggaattaagagctcatacttcctttaacttacagagactgagtgagaccacacaaattctattacttgcctaagtaaaggcctgtcaacaatgtcttttctacctcagaaataaagtgccattaaaataaaactaagacatctaagaaaaagcagtgacaactgtgtgtatataatatcttaatctgtattcttctaggctattaggaatagagataagcaaagatgaaacagatattcactgagggacagaagccagattttaggtgacctgtaattgagatgatctgtaactgcacaggtgaaacaaaataatggattttagtgtctaggcaagataacttgctttggtacaattaacactgcagaaaaagccatttttataggtgaaaccaatttaccatttttggaaagtataatatgcggatatattggaattaaataccagtaagcgacatttctcattgatacctaatttatattgaaggaaggaaggaaagaagaaagcagcctctgagcagcagagaacgaaactcagggttctaaccaagtacacgaacataataacatcagcattactcgaactgcagatgacatggtgagaaaagatgtttaaagtttcttgggcaattttctgcatactggcaaaagtaagatggttttccccccaaatctaatttttcattattctgagcactggctttggttttattcccccctaacaaggacctttcacgttaaaaaaaaaaaaaagtgatgatctgcttttttcacttctagcactcagacatttgcaatcttatgaagtcctggacaaaagggaaagagcccacatgtcttgcttgtctttcaccggaggcctgtttgtcttggcctgtccagtgagtgggcgtgactctggggctgttcctgaaacggatctccttacctgtaaaatgcagacagctaccccccaaccttttcgtattagtcactcagacatcatctctaagcctttccccacactctctgtcacagtagcaactttctggaacactctgctttcacttctcttacagcccttgaaggcagggaaggtagattcttaatttctgatccccagttcccggttccctctcgtcctctgtcacatctctgccttttggcttcattggagaggtggggagaacagaggatcgaggcagaaaggcaggtccttcaacaagaat

SEQ ID NO: 25271 - DNA, 780 bp, Bovine  19866880926343
  misc_feature (1)..(1): n is a, c, g, or t
ncagtggagtcatagatgatattcgacctcatctgcagcaaagcctcttccccaggtccgttggaataaccgtccaaatccagggttgtccatctctgggaattgctcgtgggcgatcatttcatccagttcctctttccgctccttctcactgctttggtcatcagaaaacacgacaagcaaaggatcgtgcttattccgggcactagtgtctatttccagctgtcccctgccaagtgtgtcctccgtttcgtgtttgctctcaatgtggacctccagctggtgggtggatgagcctgacttttgccaatgcctgatggcatcagtgacatcaaacgtctcccactcactgttggttccgtagatctcccctgacaccaagaccagcatgtttctttccccttcatggtcctctttgctctcaagtacttcaaaaatggtgatttttcggtccactccttcatatataagggcggtctctttgcaccagggtgtacaacctgagctcagccatgatgatgtcttcatggtgagggatggatacgttgaagaggagagggtattttcggagtccattaaaactggctggttgggaaaacagatctggaaaaaacaaaaaagaaatcagatttgcagcatgtagcagaggaaaacagatgcttatttatgcaataagagtgcctgtccattctctccacacagaaagaatgaaggaaaatcagtgaaaacaaacacagtgttggcattctctaagaggaagtaccgaaggtcaagcattga

SEQ ID NO: 25272 - DNA, 1466 bp, Bovine  19866881093501
  misc_feature (1)..(1): n is a, c, g, or t
ngaagaaaagaggaggggggacaaaaaaacaaaactaagtacattactgtgaacttctttcatccagtgccttaacttttcctttcttcttaatgagctggattttgcaggcattggcttcccaatctttatcattgcctccgtcaattcccacacctgaatcatccagaggtagaaaagcaagatttagaaattggctactacttagaaactatgactgaaaggcagaacttgtaagtgaaaaataaatttttttcatctaattaattcatttacttatcaattcaaaatttactgaaaacatactatatgtcaagaaccatgatagccactagagataaaaatgaagaaaattcaattcctgttctcaaatttctcaacagtctattgagaagacagacaaggaaaaaataattaccatacagtgtggttttaatataataaaagtcatgtgactagaataaaagtgctacaggttgcgactgcagcacaatggagatacagagaagactggcaccacctcagaagcagggtaaggaagggatgccaggacacacagctctcaagattctactaaagttcctacagaatttgaaaaagttactctagaggtactggaaaaccactgagttgtttcaagcagagaaatgacacggcaaagaagtttagaaaactctttgaaaacagtgcaaaagctggaggagagaaacagggaagaagaaacctgctgtcagaagttacagttacagcaaagcaaaaatgaggaaggcctgagctacacaatggtcatgaagtgatgggtgtactgaaaagcagaactgactgaaggtaacgagagaaagcaactcccaggctcaaaggacttgctgaatgacctggctgttggcaaaaggaagagagaaaggatagagtgagacacggatgagaactggaatgtattcagttcaattctgagcatgcaaggtttacaatatcgtggtttgtccagggaaaaatttctaagaagtagccggaaaaacaggtgtgcaacatgggaaatacatatggattgtaagtcaccaacatacaggaggctgatgaagtcagagctcacgcacaaagatacaaaataaggaaagaggactcaggaaaacactgagtaagtcaaaaagttcattcgggtttttccacaggatgttatggaaaaattcaaatgaactttttggccaacccaatatcttgaggaacattaaaataagtaataggtgaaagaaaagcagcctccaaagcagacaaaaaagaaataatcagcaagttaggaagagaatgagaagatatgttgtcagaggtgaaggagagagagaatttgaagaacaaagagttgaggaattgactttccattagctgaggaagagtcaaggaagataaacgcccattacatagggcaatgttgagtgtaaagagttaatatggtaggcccaagaccg

SEQ ID NO: 25273 - DNA, 1547 bp, Bovine  19866881103170
  misc_feature (1)..(1): n is a, c, g, or t
naatgatgacaaaaaccattaaagactccaccatgcttcctaggaaggcctggggcctcacgaggggcctctaccaggttggcttaatatagaaggaaaagtcaactctcagctgggaaagccctagcttttctctagtgcctcgggatcatttaaagaaaaaatcatatgcattttcatgaaacaggaaaaatattattatatgactgttactatctaaactcacagttcacttcagttcagtcgctcagtcgtgtctgactctttgcgaccccatgaatcacagcacgccaggcctccctgtccatcaccaactcccggagttcacttgatggacatgactctaaacacacaaacagcgtctaaaaaaagttgtatcatcgtgggcctgacctatgcaatcgcggcccctgaaatgcaagtggaattagaacacagcccatgtcctgctcaccgtgtgcctcgagagggatgtctctgcccccaggaaggggagtcatttactctcataaaggtgttgcatggattaccaacagccctgctgctgctttttttttctttatttgaatataattttctaacgagttttgctttcataaatacagtttattgcttggtttgtctttgcctaacactaattttgagtttccagccctggaagagtgtgcctcatggtgggggtggcagaatggggtcccggcttcagcaggtgccgctcttcaaaacacagttcccctcccccaaggcagagaactcaaaagctgaatattatttttggcccctgtgtctcagagacatcccagtcagacatctgaccaagcaagttgttccacaacagaaacacagctaacacttcagtccagcctatgtcgggggcagcctgttgcctgtggcctgcatcagtctccactggacacagccatccagttatggaaggtgccgtttcactccgctgaaaccaccgtggaataatgcaatcctttcaaatacagccccatgggctcagagctgtccacacaagtccccgctcactcttctcctcttgcaaactccaccgatctatttattgggaaatgtgatgtttttccctccaaatgtcgtctccctcttagggagtgatgttgcttcctggctatttgttagcagcaagaaaggcagcagtgctgggtctctgcaggcggtctctgtggttcctgggatcctcaagcgtcggtcttgggttcctttatcgatttgacaaactccttgacctcctcttccaagaccctgttcctcttctccacatcctcccggcagcgttccacgttgcggaggctgatttccaaggctgctgacttcttcttctcattctccagttcttcattgagccttaccaccttagcccacacgtcataattttccttctcgaggctatgaagaagggaagaaaagaatgggatgacaaggcatgacctctagactctccctccggccttgcccactgccaccctgtccgtttcaccttccatatcacaagacccatctccagcctgtgcctcctagtgtgt

SEQ ID NO: 25274 - DNA, 1700 bp, Bovine  19866881146859
  misc_feature (1)..(1): n is a, c, g, or t
nctcagaagggaacttgaaaagtatctgagggctactcaggcagccaccagaacaccttttcatcttttctgcaaatattagtgatgagaaaggaacacacttccctttaaggagcacctaatgcgtttttagaggacctgccttgattatactcatttcatcaagtaggttaggtccttatgcatacaggtcacttcaggagagacaaaggtaagcagaaagctgttaggattcttccttatatgaaatttaattctctttcagtgaccctcacagctttccagttcccagcgcttggggctggacatgtacatctgatccaccttcctgacagcctctctggcttgcagaccactctcctgtccttctggatccactgttttccttgttctgcaataggaaaggaaaatgttaggtgctcagtcgtgtccgactctttgtgaccccatggactgtagcctgccaggttcctctgtccatcgaattttccaaccgagaatactggagtgggttgccctttccttctccaggggatattcttaagccagtgatcaaaccagggtcccctgcatcgcaggcggattctttactatctgagccaccagggaacaatagtctatgttgaaacacatgctcagaaacagctccttcagccagaggcaaacagaaggaaggcctgtacctggtctagaccatggccctgatggggtaataggtctggtggacagacagatggtgctgcttgtcctgggaggaagtttactcttatggcagaacatgggatctgaaggacatagaaacagtcccaggtgggttaaaattccttttatcaatcatcctgcacctcttttggaggtcatatctggcaagtgcatcagcagggagcaccaccctagttcctcagcatcagaagtgatgaaggcaggatgagagttccagacacagagaaaagagaaccagcaatgcgcatagaccaggactggactgacaaaacctgaaaagccattcttatacttaattttgaattttttagcaacatattcattcctttctgtaaataagtccattactgagtgtttctcccagtgtggagcctgggttcattctccaccttggtctgacctgagcatggcagcccaggactagctatcatggctctagaagtttctcatctacagtagagcctggtagtacattgggcagacagggctgtaagtgatttggggaggggggtagtttgtctacaaagtaagagaaaaaatgattttcaaagctcagattatacattaatactatttataggttgtattactgctcttaaggtgaatgggtctttgtggtgttgagggaaaatagtgccatgagaggggctccatgtgactctagtcacgtggtcaagagcccgcttttgtgcagaagtgactatttgtaaataaggggcctgcttggagagggtgagagcttgttaacttgggtggttataaatggattatgtgattatcttcaactcactcccccaaactgtcagtttacaagaaccagctcctgccttctcttaacgttcatcagacagttcagacagatccacaggagctcagctcatcccaaggagaaagtcagaaactacacagacacccagtccattttcactcttacgtgagattctagactctgtaaagctttaggactctcagttcaa

SEQ ID NO: 25275 - DNA, 2766 bp, Bovine  19866881163262
  misc_feature (1)..(1): n is a, c, g, or t
nttagcaatttctactcctttttcccccctccccttttgtgccccaactcccttctttgctactgatgaagtaaccgtgacctgaattcgatatctcatcattcatgtgacagcaattaacacttagtttcaatttacctcctgcacatatggtggatggttcagctgctagaatttcgatgcaggatttcttcaatatctaggaggagaggaaatcaaaaagtcaaagtcaaagtatagctattttgttagaaaagtgggtttgattttagctaccaggatcagaaggctcaaggatactatgctgtagtgggtggataagtagagtgttacattttcactgatattattaatgtcaagcatttaatgagcagtactgtgctagatgttctgggtgtcacaaaagctatgtgcctgtgtgctaagtcgcttcagtcccgtccgactctgcgaccctatggactgcagcctgccaggctcctctgtccatgggattctccaggcaagaatactggattgggctgccttgccccactccaggggatcttcctgacccagggattgaagctgcatcccttaggtctcctgcattgcaggtgggttctttaccactagcaacaccctggaagccccacaaaagccataagaattatttattcatttgttctggcagatatgcattgaatctatgaaaggccagtcctagttatagagacgtttacatccagtagatgaaatgggagctacacttgaaaagataaataaccatggaccattctatgtgatagatgccagggtaaaagggcagacagtacaagctagagttcatgggggagatcactgagggctgtaattgagaagggcttcctggaagaagtggctgctgagggtgggatgtagtcaagtgggcaggaataagttaggggaaggttaaggtcccagcagggagtggcatttgcaaaggtgagaaactagaaatgcatagacctctttagctggaacaaaagaagcttaaaaagtagaaaaacaagtgattaatagataagaccagagagataggatggaaatggccaactctctagaagagatgcacgctcagattactcagtcgccttctagttaaagaagtggaaacatgttgcaggcaaaggatgtctttgaagcctgcttattgtgcctcacactttaagaggaccttacgtaaatggaaataaaatagtttttcccccaagtgagtctttcagggttcagtggagagtctggagaactccaagactgcacagggaattaaaggcttctggcgaaatcggggtatctgacttttaagcttttctctagcatttatgaatcccactgcttactgcataaggattctaaaattttggccaagcattttaaacaatgtataggacactgagtgatataccgcaggatctttatttgggtgggccttacttaatttggaaattgaaatgggtcagagggctgaagaagatcattttgctctatttatgaagggggcatttgttaaaagaattaatagtgaaataaaatgtaaagtctgtaaaagaaaaaaaggatttttagcattgggaaacacacattaacttgcatggatgtttttagcaaatatgcttctttgttccagcttaagtgatacatatgccacaaggatacagtaaaacaaaatatataataaattacaaaaggggaggaaatggattaaagggaaaatcaggggaagatgaagtaaggagtgagaatagcatagacaaaatacattgggaagagcttatttccttgttaggagtggctcctgaatttaattctaagctttctagtagcaaatgaggacagacaatatttatgagattctcagtctgaagaatgaaaacaaaccagtttctcagaagagataatatttacccattccagagagaaatctgggcatcctcatagagaagcattgtgaaaggaaatgaacaacatgcttcagaaaattgttctctgatatacagacgacaaaacattcagacgtattcactgaaagaggctccctcgcaaccaggtatttgaggtaattctctatacctgagagtcataagcagcagcatggtcctccctcagtacctgcaggaggactggtccaggatctccatggacaccgaaatcagaggatgcacaagtcccttatataaaatggtggagtatctgtacacattcttccatatactttaagtcaggggtccccaacctccagactatggaaatggtacacatccatggcctgttaggaattgggccgcacagcaagaggtgagtggcaggcaagccagtgaagcttcatctgccactcccccacactcgcattaccactgaaccattcccccgcccccacccctggtccatggaaaaattttctcccacaacatcagtccctggtgccaaaaaggttggggactgctgctttaaatcatctctagattgcttataattcataatacaatggaaatgctatgtaaatagtccccagcatgctgcaaactcaagttttactttttggaactttctggattttttttttttacaaatatttttgatccccagctggttgaatctgcaaatgtgaaacccaggttatagagggctgactgtatttctttttcttgacaattctaagatttagacttccagctatttttcctgaacattctttctgcctctttcacaatttaaaggcattttagtatctgttttcagcttcta

SEQ ID NO: 25276 - DNA, 2045 bp, Bovine  19866881168167
  misc_feature (1)..(1): n is a, c, g, or t
ngcattgggggctggaggagaaggggacgacagaggatgaaatggctggatggcatcactgactcgatggacgtgagtctgagtgaactctgggaattggtgatggacagggaggcctggcatgctgggattcatggggtcgcaaagagtcggacatgactgagcgactgaactgaactgaatcatcctctttagccccccagcctctcaagttctctttgttttcctgctggaagttctcgttatgaagaagccttgttcactgggttagtttatactcagatgtagttgacagacaacagtgtaatgggaagtggttattgactctttctggagcaccagggagattctattcttatctggtaacttcccaagctggtagacactgatcccactgtatccccatcagggatgccagccactaagacatttctttcccaaagtgtagtctgtaactgtcagagtcttgctttacagcatctgggccgcctgataaagaggaggactgagattctccagagccatgggcctccatgggggattccaggcactgtgctgttggggtggggggaagggaggggaggctgaaactttgggtcagctgagagtatccaccagctgtcagttttcagtggcaaaatgactgtcctcaaccatttggtaaagctaacttcactctgcttcctgttctcagtaatcggaagtcatctctaccaccagagggaaatacatctcaggccccattatttttatacccaattgcaaagaaatggaatagacctgaaaagtgtcattagaatttgtcaaggacctaaaaaccattccacacctcttgcctcacctgtggtcttgagtttctaggtaagtgattcatgtaccttctttttgctgttgggcaaaataagtggggaccgctcggcacatgtccttgatgggtgctccgaactgggctaaattcttgacccggctgggtaaaacagtgtaggtcaggccgtgagtagatggataatgctttggagcctggaagatgtgacatttcaaaagggtgagacagcaagtagaggtggcccagcaaggaggaagcgtgagaaacctattccagtgcatgggggcactggatgtccaaaaatagccttgaacctgcactagcccttgagttccctctctaatagcaatattctatctgaccacaaggtggcaaaattattccagaaaagtctgtgtgcctctgtgactcaatctgtactcctttcgcccttgaattctcagcgcttccagactcctgtgctattctctttctaataatgatatacaatacattttaagttatggtcttcatttatattatgctttttacttgttataaatcagatgaggggaatacttattacctctctttttaaaaagtgacaaattattttatttttatgtgatccaaaggcattttcttccccaggaatcagcagccctgctgccatggacatcagggacacagcccaaatgtgctgggttggttatttaagcaaaatgatgccagatttcaatgacttcccaagggcttcctgctgatttttaatttatctgacaacccttggcatttaagagacaggaagagagtttcaggagtcctaaactcattttcaactaaagatattatgtgtgtatgagcttaaagggtctgcaggggaggagaggaggtatgagaatgaaaatactctagtatttcactttaataattcatattcaccaacgtgtagttcacacccttttggaatacatcaaaattatgtcattgcatggaatgcaaaggttcattttcattaatgtgctgtgacttaaataggccacggattggacttggagtcctttgcacgatgatggaattccatgggcgttaagatcaagtatgaaatgaattccccagcatgtacagcatcatcttaggaggtcagaacgtagagttcaaaaacaccaaactaggaggggactccaatgagctgatctcacttacctggtggtccagggcccttaacaatgtcatccaa

SEQ ID NO: 25277 - DNA, 1209 bp, Bovine  19866881240062
  misc_feature (1)..(1): n is a, c, g, or t
ngtggccctggcgtcctgcttgtcccactggccgtgtggccaaggagcagcagccctctctccggaagctgcctgagcatccttgctttattcactcactgtacatggaaacccagcagctcaagtcctaggaagctaatctaacctgtttcggtcaaaatccttttcagaaaagcaagtcgaaactcaaggtcttgtagaacccaaaatttgaaaactagtatctgatttgtcacaacatgaaatgatagctggattcattatctggagttattccagctcaacagtcagaggcagagagagaaaaagaaaaagaacgcgtgtatgcgacactgttaatgaatcctaccgtgtctcctggctgtggacgcatcacggacacacgatcgtagcctttccttagtaggacccacaaggcatcaagttttccctgaaataaaacaaatgcaccaagattacatctgaaaccagactgagggcccgcactgacatgaactttccatgcttcttcagtcatatgaaccacacttcaccagcaatgcagttgtcacaggatgtgactctctagttcaaaatgtggatttcagcaatagaggagaagagacgcatcccagagaaccctgatgctcacgcaggagacacctgcaactgtagcacagcctcaggtgtgcagacacacaggagtcatccagcctgttgccctcattgcatttctgggcatcttctcacactgcaggcttttcaacttgcactcaagttttttcttcccacttagtgtcccgagtttacaaatgaaacaatgaggacaaattcaggaaaatgactgaacagaagcgtggatggggctagaccaatgaaagggtcctggggcacagatccacggatgtccccacaagaggctccagaatcctggacttgagggacaaatgaccaaggatcatggatcaccacaaatcacagccccctttggagttgtaggtgattggctgaatctgagaagactgaatctgtgagggctaaagttttcatagtgtgtgacaaagggagtctaatgttctagttccttagacatgctgagtggagctggcttctgccactgcaaacactaaaaacacaggaaaaaaaggaccctggctggtgacgccaccaacaggcagaagtcacctttactttgtctgatttcccttcaccaccaggaaatccgctcgc

SEQ ID NO: 25278 - DNA, 944 bp, Bovine  19866881387331
  misc_feature (1)..(1): n is a, c, g, or t
ncctatgtgataatactattaggtcccttttcacagatgatgaaacctatttcacaaagagaataagtaactcattcaagggcacactatgtgagtggtagggttgggataaggaccctatagtccatgctcttattccaaacacctacctctcctccagtctttccagtgtttaagcctgtactcctaacacctgtgcaacactgcctccccatggagggaggaagcatacgattacaattcgtagtgttaggctgctaagttagcagagaagtactgcagaagttccacacatttttatgagaatttgggaatagggatgccagggcaaggttaaaattggtgtacttgagtggaatcagaagtgccaaactgattgcccattttaatggaataaggtgtatcagaggattcacctgttcggccttcaatcctcttgtgttcctttgatagtgtcttttatgacagtcaataatcaggatgaccatataatttaaaatccaaactgaaacactttcaagagtaaactaggaagccactaataattatactgggacaagcacaggcgaggaatgaactagaatgtaccatccatttacttatggttagattatggctgtccaatggcattttgtacttcctttgaccttatattgcttattattgtgactggagtgtagttgagttaggatatttcttttttttaaattttctatatagtttccataaacttgatatttgcattatcttttatggtggctcagatggtaaagaatctgcctgcaatgtgtgagacccaggttcaaatccctgggccgggaagatcccctggagaagggcatggcaacccactccagtattcttgcctggagaatttcatagacagaggagtctggtgggctacagtcccaggagtcgcaaagaataggacaaaactagtttcc

SEQ ID NO: 25279 - DNA, 869 bp, Bovine  19866881583767
  misc_feature (1)..(1): n is a, c, g, or t
nttctggaagtactttagccgttatctaattcactgcccatcccgccctgcattttattggaattctgttgccctggcatctgtggtggctctcttcagcttcctacctctcatctcagattactccttgcccacctcctcatgggcttttccttgtatgcagtcccttaaatatcagcaggcggcatggatctttttttttttaaagcaaggtatatactttttaaaaattaatttttattggagtatagttgctttacaattttgtgttagtttctgctgtagagcaaagtgaatccgcgatacacatacatatatcccctctttttttgaatttccttcccatttagatcaccacagagcagtgagtagagtcccctaagctatacctgaagtgcctacttttttctcattttaaaaagcatggtaaaatacatatacacacagcatatgccacttaaaccatttgtaagtgtccaattcggtggcattcagtttgcttaccatgttgtacaacccatggatgcattcttggtcccttgctgtttttctttctgtaaaactggccacgggctgtctcccttcctttcacagtttaaactcttatctagatactgatgacttaactctttatctctagcctagatctctcctcatgcttcagggtcatggtcagggtcattccactgtctgctaggttctactggcactgcactgcaaactcaacaattcaaactgagctcactgtttcctttttcaaaccagctcattctcttctcattcaatgataagtactaagtacttcccaggtggtgtagcgatatagaacccgcctggcaatgcaggagacagagagacctgggtttgat

SEQ ID NO: 25280 - DNA, 1886 bp, Bovine  19866881752957
  misc_feature (1)..(1): n is a, c, g, or t
ntacatagtcacaaaaatactataacattaagtttgatgggagaactagtatccagttcttcaaaacaagaccagacctatttgatctctgagcataaatctgctctataggattggaaaagtacatttaaaggattctcctgaaaaggcccaatctgttaacctttccattctttttagaggaggtgcagtatgaccaaggctcagagcaactgccctttgcaactctccaagcccggcattctggagaccagagacaagcggtgggtatagggtgcgcagacatccacatccccgcagggaattttggtagtggcagcccaagaaacaaagcagtcaagagaaggaggaattctaaataactgtaaacagaagacagacattaaatcttgttggcggttagagggtttccatttttttttccccttaatatgaatgtattactgtaggaagggaaaacatatgttttcagggtgaatagtccttatatgtgaagatagccttgtactgttggaaaaacatgttggaagccgtctgcctgtgagcgatgaaagatttacactaacttaacctcagtgtcttggcccatttccttttcgaaccaatggctatgcatagcagacatcctgtgatcataaaactcagaaagctagccagttgttcttggggtgtggggtgatggggcggggtggctggcgctaaaccccaggacctgacctcacagagtcagggtctcccttatcaagcataaggatcttccttatcatgaagtttaaggtgaggaaattttgttctaattctctcaaattaagtcatgtctctctctctcttttttggtttagcacattaaattaagcaagaagtcaaaacacacttctttttcttgctttgatgtagggactatgtgagaggtaaggtcaagcacactgttccaacgcttccactagggataactccattttagtctattttgaggctccaaactacatcaatttcagtaaagagcttatatgctttgaaggaaagacatactcacaagtatctgatgattttgcaaagactctcaccaatccccccttaatttcccaagcaactcaaagtgctgaatgacttagaataggttacccctggaaattttatctgatggacacagtgaaggccaatgttcccttaaaaaagaaaaatcgaaatctgaagactgaaatttcaggctggatcttcctgagtgccatatatcataggtgaccagaatttcactttctcccatactataaagtgaaataacaattagaagaagcatcagagacatacttcttgccccaaactggaaattaagacttgggagtattggaaaaccttctcagttaattagcaaatagaaagcaaaatacatcccttcccaagaacttcagaaatgcagcaccaaatgaaatccacactctttcagagttgaatcagggaatcaggagatgtgcttcaaatgcataatttccatgaccttttgcttagacaataagatcaagcatttggttctaccatatgctgtgtcgttgcactaaaacccatgcctgggagctaacactggctagcgatgctgtgtctctcaagccaatggggcaattaaatgagagagatttctccttgggcataaaactgctgttgccaagacaaaatgtttaattaaattggcctgggtacatcaatgattaaattcaaggagggcagctgcaaatgtgtgctccctttaacaactccacgtctgggtcgtatcaaatgcaggctcacagggggttttcatctccatgaccacaggtgaagccagggtaggcaggactcattaaaacgtcctcggcacgtctctcaaatgtgtttgcacagcactcgtg

SEQ ID NO: 25281 - DNA, 944 bp, Bovine  19866882028837
  misc_feature (1)..(1): n is a, c, g, or t
ntgagaattggccctaaggagatagttaaaaggaggaaaaaccaatgttcatccaatccaaatgttaattaagcaattaattagaaattatacattgaactagatacattcctggacctctgctaggctagtgaccatggtcactgtggcagtgttagcaacagtagaacatagtaaacaacataaattatttaaaatgctgcgatggtttaatacagtatgagacatccatatgatagactattatgctttaatgctaaatgacacaagcagaattcaaaagcttctcttgcatttactgcctgggtgtgaattctgacttgtactgtgtcctggcacctgacattggcaagttcattagcgcctctaaggctccgtatctttaatagtaacacaggtataacaatactatctcatggagttggctgtcaaggttaagtgaggaaacgtgttcaaatttagcacaattcctagcacaaaacaagcagtcattgaaagtgagttgttcttttgaatactataaatgtagatggacagacttaccgacagcctcaaatggacagcccctactttagagccccaggaaatatgacgtgtggtttgtcttgtatattttgttcagtatcattgcagaaaatcctatcactttgactgctcagttctgccaagggaaattggagtgactggcaggctctgctttctctcttcccagccgtgtttggccagcgcttggatgagaccgtggcttatgagcagaagtttggcccccacctggtgcccatcctggtggagaagtgtgccgagttcatcctggagcatggtctgaacgaagagggcatcttccgactgcctgggcaggacaacctggtgaagcagctgagagatgcttttgacgcgggggagcggccctcctttgacaggtatgctgtgctcacctcgtcgcc

SEQ ID NO: 25282 - DNA, 720 bp, Bovine  19866880373672
  misc_feature (1)..(1): n is a, c, g, or t
nccccctaccccgaagcggctctcccaccacccctggcggcggcggtggcccacttgccccactaccccttgcccatggtgccgcctccgcggccggcgtcgacgaggactcagccccggagccccctctactgcccagaggccgccgccgcccgcccagcactcagcccgcctgcccagccagcaccaggctcccgggaacgtcagcacgccgccgtctccggacctgctccctgcctaccccattggtcggaaggagaaggctggcccttcccattggaccggccctcatattgaactgaccaatgggaactgaggtttcaggtcgccatagagaccgatgctgttaagcgctagagggcctggaaaaggtggggagtgaggatgaaggtgtctctggctttgggtgcgggagggggtagaggaaagagctaccgagggattcgtgagtgctgattgaaattgggacagctttcgctttgtctccctgtcaaacccagttgtgcatgaaagggttagtccgtcgcgtcaaaggcagggacagctgagcccctaaaggaatccttgagaacctgggagtgggcatttcactttttctgcgattagggagtccctcggcctctgccctttggcctttgacacgtgtgcaccttctgcttctccaggtgagtttgcaccccatcccttaaatcattgcttcttcctgacgtcactgatcca

SEQ ID NO: 25283 - DNA, 1934 bp, Bovine  19866880409946
  misc_feature (1)..(1): n is a, c, g, or t
ntgagtttgagtaactccgggagctggtgatgggcagggaggtctggtgtgctacagtccatggggtcacaaagagtcggacacaactgagcaattgaactgaactgaactgagacagttaagataccttgatgttaattacctctagttattaatcactgttttcccttaattcaaatacctaattcaaatggctaaatgcattagggcatgtactttattatattatattaaatattcctatcagtaaaatattttttattgtatggcatgaagaaaatttttttttcctcctactcttctaagttctctgttggggctctgtaacaaaagacagattaacaagagaaaagcattcaaatttattcagtataagttttatgtgacacaagagtcttcacaaggaaatgaagacccccaggaaacagttaaacctgagtgtttttatactagctttgatgaagaatgcaaagtcacagagaaacgtgatgggacaaaagggtgagagcggagagtgcgaaatcgagggcaacctagcaaggaggcctgtttgttcagattcctttcagtgtccccccttttctctggagagagggagaccacttctcagaggatggtcttttgaccttcttccagggagaagggaagatcagagagtccttcccacacctgccatttctcaaattccttcagcttaaaatattcagtgtgctaaggcgccatatttggggggtagcatgttcttaactgtcaaaaattaaatgtactaactctttgtgaaatactgctgctaagaatttttatgtagaatcagacgattctgtaattttattttactctttttacatacagtttctattaccttctcttaataatcatcaaagggaacagccctagattaatactttaaaagttaatgaattatccagacatattcttttgagatatttatatatatcctctcacataatttcctttttctaatcaggatagaagtattaatatccaatctgtgtatcttggcttgaatttctttaaattatctttgtataagcaatgctcttaaaataaacatgtagttctatagaaaacactctagaggaatatttagcgaaaaactaacattgcatagctgggaagtggaattggggaggattttctaaaatgttttacagccttttgtattatttttataatcagaatatatttgtgcatgtgtatgtgtgtatgcgtatatgtaagataatatgagaggttttacctagcagttttggcctctattgcaattctttattgttttcaccttcatcataaagggattttactggcacaaacctaaaggatattctgttgaacttcacatgacattctaggatttggtttagctgctttgagcaaatgactgtaaactgaggtgaggcgaacaaagacaaatgccctgctttaaactgttagatccaaactggattcaacatgttagtggtacagccaggaatgcctaagctaggctaatgggcagtcacttgtcagtccacaatcagtcaacagaaaatacatgtgcatgggaaatgaactttatagatttaaaaaaccaatatgaataaattataatgattatatattaattaatagaatacatttccattttcccctcctttccttgttaggccattttatgttgaccaaaaaatacaagtaacagaatttcaactttctgctgttgtccttctacagtgggaagcattttctttcaaattagcccttcctgcttgagaagaccttgactggatcgattctttcttttttaatttctaggataaacaacaaaaggattcttggtctcccgttctccagtttctatattattattccagtccttagcatgcacttagagactctgcaggtaatttatggtagaattaggaatagaacta

SEQ ID NO: 25284 - DNA, 1313 bp, Bovine  19866880466344
  misc_feature (1)..(1): n is a, c, g, or t
ncctcttaatgaaagtgaaagaggagagtgaaaaagttggcgtaaagctcaacattcagaaaacgaagatcatggcatccggtcctatcacttcatggcaaatagatggggaaataatggaaacagtgacagactttattttttgggctgcaaaatcactgcagatggtgaccgcagccatgaaattaaaagacgcctgctcctttgaagaaaagctatgatcaacctagacagcatattaaaaagcagagatattactttgccaacaaaggtccatctagtcaaacctatggttttcccagcagtcatttatggatgtgagagttggaccataaagaagaccgagtgccaaaaaattgatgcttttgaactgtggtgttgaagaagactcttgagagtcccttgaactgcaaggagatcaaaccagtcaatcctaaaggaaatcagtcctgaatattcattggaaggactgatgctgaagctgaagctccaaaacttgggccacctgatgcaaagaactgattcatttgaaaagaccttgatgctgggaaagattgaaggcaggaggagaaggggacgacagaggatgagatgattggatggcatcaccgactagatagaacttgagtttgagcaagctccaggagttggtgaaggacagggaggcctggcttgctgcagtccatggtgtcgcagagtcagacatgactgagcgactgaactgactgaataatcataaggttccttcatttcccctaacacaacaacaaaaagcaaaacaatttttggttcagggttttagtgatataccagacacttccaattagatgaagcttgtcttcagcaattggccttcttaatcttccttccttcttccttctctcccttatcctgcagaaaatctgcgccctcctgctgccctctgtgcaattagtgagagacaaatatatgtaccatgaaagacactaaaaatatctttattttcttttaatattttgcctaccgtgacctacttttggttcagtgtcaaaagcaaaggggtgaggtgtgccctaaataaacatgtcagtgaattcggtcccaccatattgactgcatgacttttgtactgtaaattaaagtggttttctacagattgcaagagttaaaaagatgttctatgtcagtacattgatgtttaagttctgaaattccatttgcttcatcaaaaatctatttctttgaaagccatttcccactgataatcctggaattaaggagatctagttagtgcctgagtcacatgaagaatcacttccaacccacccacatag

SEQ ID NO: 25285 - DNA, 1192 bp, Bovine  19866880531927
  misc_feature (1)..(1): n is a, c, g, or t
nggccatctggtgggacttcctccagatgaccacaagagggcacatgattgccagctcataaggccctctgcacagccaacagccaattcctggggctttgctatagaaaggacagtttctgtttgtttgtttgttttccctcagaaacaggaggaaagcagttgaaattcccaggatgcagctaaggcattttctacggcattcatctgtgaaatgttggctgcgagaagcagacattctggcgggcaaaggaaagaccgcattctctgtttctctcgcgtagtcccagcccagggagaagaaaagggctgcagaaagttggacagatgatttttgttgttcctgagattactagtagaatatgctggtgggctacatgtgtctagcaggcttcatggtataatataaataaagtgtggaattaggtctatatgggattcatttccctttcccaagcttcctgtcaagagggctgctggcaaccctggagaaactccaacagtaacctgatgcgaggtcgagaggtgttaggattgtcccttggattggggccctcgggccctgatttcagatgaaggggtgatgagacactattctggaggggaacatggagatagtgatgggatgggaaagttaagtggggtgagtaagcatgagtgtaggtcaaaagtcagaagtggccttttagaggtcaaaattagattgcttaacttctaaagtagcagacaaaaattcaactataagtgaaaatgaaggaagaaaaaaaaggaattagaaacaaaaaaaacctgtactatcaatgagaactctcagctcagatgttgaactaagtcctcataagacagtctggaaatgttgcccagctccagcacctaccaactctgtgaccttgggctgggtacacagtttctctgaaactctttcctcatctctaatatggggaaaactatcatggctaccagctggctatgaagagtaaatagcataaggtgcgtgagagtgctctcctacgtggctctttgtagacagtgaatattctagttctctcctctcttctccctctttagcaagtctagcttattaacacttactcattcaagaatatttcctgagtacctgtatcagttaggttgctttcaattgcaagtgacagaaaacctcacctaaatggcagtaaacaataaggaaaag

SEQ ID NO: 25286 - DNA, 1274 bp, Bovine  19866880589395
  misc_feature (1)..(1): n is a, c, g, or t
ntggaatttctccctgtcccctggccgcttctctgtgacacattctggaaactaagccgttttctgtttcatattctctaggactggcttgcaggcattcatacattcactgtctgggaagaaggctaggtttaccttcaatcaaccttggcgttctcaattttagctctgtttatggctgggtcagacttccctggtggctcacatggtaaagcgtctgtctacaatgagggagacccgggttcgatccctgggttgggaaaatcccctggaaaaggaaacggcaatatactccaagactattgcctggaaaatcccatagacagaggaccctggtaggctacagtccatggggtcacaaagagttggacacgactgagagacttcactttctgtctttagtttagattttgtgcacttaatactatattttccagaagacacacacatttccatacttaacatctccaaacagctttttgaagaaaggacaagaaaaaaattacaaagcttctagcattttatcacagatggagcatgcagtgaactagactgaatttcctattcactgttctgcatctcccaatcatacactctagattcagtgagaccagggactcttttcatctaaatcaccacggtattctcagcaccaataaaatgcctgaaacatagtaggtgctcaatagagtttgttgagtgaaagaaggaaacaatgagatgaagactgaggggaagaacgacaatgtatcttcacttttatcaaagaaatatttatgtgccaagcagtgttaagcttcagaatcatcaagatgctgaaggagctcacattctaacaggagagaaaggaataaaaatagtgtgataaatgcaacagaaaagataataaaatatgccacaacaggagggacatccaggaacatgagagtttctacaaagacaaagagacataaaacatcacaatgtgctgtgttcagagaatgccaacagattaaaattagggtggagaggaggagaagaaaaggagagagaaaactctggatatgaaaagatgaaggaactgttgttgttgtttttagctgctcagttatgtctgagtctctgcgaccccatgaactgtagtctgccaggctcctctgtccatggaattttacaggcaagaacactggagtgggttgccattcccttctccaggagacctcccggacctacagatcaaacacgagtctcttgcatatcctgcacggcagggggatgttttactactagcgcca

SEQ ID NO: 25287 - DNA, 1027 bp, Bovine  19866880643982
  misc_feature (1)..(1): n is a, c, g, or t
naccaagcattctggctgacacgaactttgcagaaactggcatccctagggaaggtcccttgtgaggtctttaagtagcttagatgagtaaaacattcagactaccactataatgaacagctctcagtggctcataaattctttcattcccagcaatcaagaagcagctgttaaaatcctggaatcttcctagtagcagatcttaaatacctccaagttggccagggaaggttcccaactgctttcttctctcctcccccagcctctccccaggagtgccaagctggcaagaataagggaagggaaaaaagacccaggaaaggaaaaaagagagtgagtgagtagcggctctggcgaaagcagagaggcagactcccttcatttccactacagagaaataccaactccgcaccaactaaccaggtgtctcctttcttctcccattcccaccccctccaaacacattaacttctacagtctgatggcctggcatttggagttaatgacctcagcagtcctaagcccattcctcaaagattctaaaccaagctcttcctttccttgccagagttcgaggcccatccccagggaagattcagcttcctttttccttgtatctcgcccagacggcgatgctcctggggtcaagttcaagatgaaggtaccctcctaacctccaggagccgactccactgcagggaacagagctacctagacgagtcccatccttcgaggaacggggatctggggctgtcagaagtgggccggagggggctgggaggggaagaccgtcgccgagcccgttgtcctctgaaaccctggccgcggcgccgggattctacctgaccaccgccgcatttcctcccggagccttacacaataagtaaactaagttttgaaaacgccggttcagagccgtttctgtctgcaaacacggcgcataatgccttggggcttccttccttgccagccgttccggaaagctgccgcgccaaagccgggagcccctcacacccccaaagcagcg

SEQ ID NO: 25288 - DNA, 4784 bp, Bovine  19866880651803
  misc_feature (1)..(1): n is a, c, g, or t
ngcaagttatgtaatgacaagacacagaagagcaccccctgtatgaacaacaacaaatggatatgaacttcacatttctagaaatagaaataatgcaatcattgtaacagtgccttcatgaaaagtcactactgtcctataatgctttaattgtttcattaaacactaggaaaagtgataatctgcatgggtgatcttaccgtgtatataaaattcccaagaaacaaatagtctgtagtgtaaccactttgcaagaccatatctgaaaagtgaaaaagtcattttttaatctttgtagagtctgaaacatagatttttaaaatttatttttactaaaggtacccatactggacaccaacaatatttatcaatgaatggtcacatttctcaagtgttctgtcagtgacaacaatgcttactttgcctaccacaattgtgatattttttcattttcttacttcctccaaagatagatttgctgctgctgctgctcctaagttgtgtcagtcgtgtccgactctgcgagaccccatagatggcagcccaccaggctctgccgtccctgggattctccaggcaagaacactggagtgggttgccatttccttctccaatgcatgaaagtgaaaagtgaaagtgaagtcgctcagtcgtgtccgaccctcagcgaccccatggactgcagcctaccaggctcctccgtccatgggcttttccaggcaagagtactggagtggggtgccattgccttctccgacctcttcagttatgctatttcaaaaacataattttttttataattatagaaatgatatactctcataaccattcaggcagagttgaaaataacagtaatcccctccacaaacccacaatgatactactcctcaaaagtaagtactgttaaattactgttaaatatttgaaagaaatcctgatttgcacacatacacacagacagacatacacatcctcatatatacctaaacatatacatatacacaaaattttattatatttttccaaaactatgattgtttatttttgtgtcatttgcatttttctacttaacaatgcttatgaatgcatttatgtgtcagtacatgtaaatctgcttctaatggctgtatagcattctgctatttgagtatgccatgtttactcaaactttttccaaaattccaaaagtagtgtatgcctactaaaaataatccaaattatactgaagtgtaaaaaatgaaagattctttcctttctatacttcccctgtcccattctccaagagctaactattagtaacaacttgctgggaacctttatgaatttttaaaagttagatttactggagcataattcacatacagtaaaattcaccttttgtagcatacaaatgcatatggttgtggaactatcactgtagttgagatatggcatattttcattcctactcacacacacaaaaaacccctcatgcccctctataatgaccttctcaacacccaccatggcaaccattgacctattttctgttcctatggttttgctttttccagagggtcatataaatagaatagacagtgtgcagtcttttgaatgtggcttcattcatttagcataatgcatctgcaattcatccatattgatgtattatcaagtccttattttgtcaagtacatggaaatgtttttgtttccaaaagtgagattatgctatacctggaatttagctatcttttttgcttgtttacttattataaacctacttctgtatcatttattacatctagatctaattctttcttctgaatcgctgcccagtattccttacggagtgtatttaactgcttttcgtgtattagacattcaggtcatgtccagactttcacaattttggcaaataacaaagtatgaaccaataaaacacatacttgttcaaaatttcatgtgcatatgtacagtatttctataagatagatttttagaagtgaaattgttaagagtcaggtatatgaagcattttaataaatactaccaaacttctctataaaaactataaaacttgtatatatttaaattccattcaccctgtttgagaatgtctttttcttcataaacttaccaataacagatatcaatatttctaatttttgttgatcttataaacaaaatgttggtatcttattgtatatctctcatctctaatgacattgattactaaaaatatatatttataagctatttgatttttttcttctctgaaatgctagtttacagcttctggtcattttcctgttaggttgtcatttaaaaatgcagttgaaagaattctttaaatactaggtagactagaaatgttttctttcaagtctttatgtgtttatggggtctataggaacctgtatgttttattatcaattctgtaatatcttcctttatgatgtttataaatcatatcatacacagggaaacctttatactctaggattttaaagctattctcaacttcagaggttaactaatcctttgctgatagacaacacagttgcttccagtttttcctgttagaagcaatgttgccctgaacactcttgtacaccttctgccttttaagagtcttgtacattttcccctcttatgtgagtattttcacaagatttttttttgtaagataaatccctagaagctggatcaaaggataaagtgaaatgaagtcgctcagtcatgtccgactctttgcgaccccgtggactgtagcctgccaggctcgtctgtccatgggattctccaggcaagaatactggagtgggttgccagttccttcttcaggggatcttcccaacccagggatcgaacccgggtctcctgcattgcaggcagatgttttatcctctgagctaccataggcctatttcaaattttgtttatctgtgctcctggagttcatattcattaccctattttgagacttcattctatcagggattccctctcctgcacaaacatttagcctctcccatccatgggctctttctgttcggcccagaagcatgctctagactcacatcttttaagaaacaaagcaaaataaaatagcttccattgagtctgcattgctttctagtcgctactagttttttcttttctttctggacaacttgtcaaaaggagtccactcttcctcattgcccattactgctatcctctgccgtgggttttctatccctgtactccatggatggagaagatccccaggaacctccagagggtttacccagtttcacctgcagctcttacccgctccctatttcctgacaccagctctttcctgttctccccttcctggccagactctcttctccatcttctttgggttccttcttccagtgctcactcccttaacgtttttgactttgatctaatgctcttctctccacacacatccaccctgctgactgtacgtactctcgtgaacttcatgccaacaacacctatagtaggctaaataatggcctccaaatatatccaggttctaaattttagaacctgtgactgctaccttctttggcaaaagggatcttatgatgcaaagattatcgtgggtcatctgtgtgggcccaatgtaaccacaagtgtccttataaaaggaagcatggggacagagaagaaagcaatgtgatcacagaaacaagatgctacactggtggctttgaagatgaaggaagggccaccagccaagaaatgtcagtggcccctgcaggtaaaggcaaggaaaagattctcccctagagcctccaggagggacctccctgctgacatcttggctttagctcagttagactgatattagacctctaactgctaaaactagaagagactatatttttattaagtcactgctgctgctgctgctaagtcgcttcagtcgtgtctgactctgtgtgaccccacagatggcagcccaccaggctcccctgtccctgggattctccaggcaagaacactggagtgggttgccatttccttctccaatgcaggaaagtgaaaagtgaaagtgaagttgctcagttgtgtccgactcttagcgaccccatggactgcagcccaccaggctccccaagttttgtgataatacaatgctcaaatctatatgtctactatcagaactctcctctgaccaccagtcatagcaatccgcctcctatcttcaatttagcatgacccaaacagaattcatcactacctccctccaccttctgtgtttccctgattcatttaatggaaccaccattccttgaatcacacagatcagaacccatgggtctttctggcctcctcccacccacaaccaataaccataagaccctgcataatttgctgtccaaatctttttcaagtacgcctcctcttctctatccctatatctctctgcctgtggattgatccccttcctccaaaacccaccctccacaccaaagccaagaggaagatgaaccttctacaaggcgaacatgccagagctccttcttttaacaatcgcccagagtcaagtctcggctccttgacagacgatataagaatctcccaatttccagccacattttctgttattccctgccttgaactctagtgacactgagctgtttgccatttccccacctgtactaggtactcatgtgtcttcatggtcacaatccagcagcttggtctttctgcgaaggctgcctgttagctaactataatagctgtggccggagggtcaggcttctaattaacagcatctagggg

SEQ ID NO: 25289 - DNA, 3157 bp, Bovine  19866880689070
  misc_feature (1)..(1): n is a, c, g, or t
naaatggtggcgatggtagaactgctgtatatttactaaaaataattgcactgtacacttataatggatgtatctttacggagtatcaattagatactaataaagctgttattacaaataaaaactttaaaaaatagcatgagcacattgtcttaaaactctcatttatgaacacttagtaaatttgcagacaatttttaacatgattgaaaatcttccaaatgcatttcagtggatttagacccaatatgttaaacattaaattaaaaaaaaaaaaaacaactttgctaggaaaactgattgatatcagcaaagtcagaaaattactagactagaaaaatactaagctacaacctttgtataattaatggatgaactgaaatttgagtatcataattgagtacatgaaactgattttgcacttcttccatatctctttgtgccatctaatttaagtacaatagtccttatatctaagtatggaaataaactgaccttagactttgaaccctctatgatcaggtattaagccaagattttcaaggtaatacagcattttctatcacataactctcactaaaatttagtacaattatcagcactatatacatttaaattttttttgtatttatggattctctgtatttatgttttacaatttatgtaatgttactacaacattatacttaaagaattcataacagtagtttttaagtatgtgctaaaaaatgcttattaatagaggtatgtgtcagagaatgtttagaaaccttagtttcctgttttggtttgttttggtttggttttttagttttcctttcctgtctaccccacgtagtagaaataagttgttggaagatgacagtcaaatctaaattttcgatgttttgtcttgaagatcacttggatcatttgtctgcaattaatcacatttaagtctataacgtcatcagagatgttgatcattattgtgatccaaatcaagagaggttagtgaagtcttgagtgatattaggactagtattattcttctgacacatgcaaatggtgtgaaagtgaaacatagaaagaaagtaaaggaaattgctttacagaatttgaaatatgaaaaacaattccaccctcgcagaattaatacatttttatgatcaatagaaaatctgatttcaagtatcccaggctttcaatgatctactgtttgaccttggaaatgtcaaatatttttctactgcctctgcctcacaactagaaaatgaggtttaatatacttttgcattctcacaaatgttaattattaactttcaaaattaaaaaaagtaaaatatgtaaacttctgaacttttagtactgaatgtgctactgtactctactagttgaccttaaatacaaggttctttgacactttgagggtttactctcagaaaaggcctcttcctttttactttttaatcaatttttctttttgcatccttcctgttattttttaatattaggtaaaaatatcaatttaaaatgtttatagggaaagaatattaggggaaatttttgcatttatatgaagaattttctttcttgcatttataaattatctgtgctactctcctgcaatattatttgactattgagaaataactttagggacttttgcatttaatctacaatatgtatatgctgtaattattttttatattcttgaaattgagtaaaaacctcttgaccaccatttctgtgttttgaaagttgacggattgtgtttgatacagttggtggaagggtgctgagctcaaagtcaggagatctggttgggggtctagctttcatatgctccctgcttctttacgtcttggataaagcatttaatctccctggctctgtgtttaccgatctgtaaaatctatcagtcagactaaaatcttttccaggcttatgttaattcatgtataaaaagacatactgcatgatctcattctaaattgtggccttgttttctttgaaagaaatttaccaaaaatttttctcactttgctgtagcccttaaatttatttccacaaccctgtttgttttcatttttccataaactgttttaaatagactcctttcttttcccctattcgagatccatctcttcccttggctcccacttctatcttgccttcctttctttccctctaggaccttactcttatcttatcaagggagcagctgtttactaaaaaagacaaaacaaaataaaacatgacaaaggtcccctgctctgtactgaggagttctattccctgagggggaatagaattgagcagttaggtccatgggctctagagccagactgcctgggggtgcatctagtctctgccatgcagcagctatatgatctttgaccttaggtgcctactctgcaacataggaacaaccgtgttaccaaacattattgtgatgactggatatccctggtggttcagacagtaaagaatatgcctgcaatgtgggagaccaggttcgatccctgggtcgggaagatcccttggagaaggaaatgactacccactccagtattcttgctttgagaattccatggacagaggagcctggagggctactccacggggttgcaaacagtcggacacaactgagtgactaacacacacattgtgaggattaaatgaatcaaaatagatgaagcacctaggatagagcctggttaggagaaattgctccttaaatgttgccaattattgcacccaaccctcataaagcgataatcacttcagcacagggtggaagagggatgggtaatactgaggcagggtgagtagaatggtgtgtcctaatagttcttttacaactctttgttccctacttccatccttccaggatgtaaatgttaggcaaaagcgtgatgaagaggaagactgccatgatttgtgggtgacgtacctttcatttaattagcaggaatggctacctgtggcaacattttcttcaagtaaattatctgtttgaaatgtgatttttttgttttctgccataattcagaactggcatgccataattattatactctaagacatcaaagaaaaaagcccaggaattgtcctttgggcaggcctatttatataatactgtatttgagaaaaagcactggaaaaaaaaaaaaaa

SEQ ID NO: 25290 - DNA, 981 bp, Bovine  19866880702276
  misc_feature (1)..(1): n is a, c, g, or t
ntctcccgtgttagtttaacttcctgcaaactgatttcctcttctgtctttgacccttttaggcttatgtataaaaaccacctggggacttaacaggccccggtttggttgaattaaagcctaatgttctatgagagcacaagggattgggcactggtggaaaggaacaggtggagagcttggatcttccctctctggctgtaggtttgtaacgaccagtccacactgaagaggtgatttcctactcatggaaaccttcctccctagaggttccagcttctagactcagtctccccaagatgcctacacattatctgacttggtgcccaggcaaaccagcttctgcacagaagacagaaatgcagtttctctcgccctcctcaggtgtggggttggcagtgttatcagtaatctcttttgtctgtcaccaagctgaggagcacttttttttaaaatttttattttattttttaactttacaatattgtattggttttgccatatgtcgaaatgtacgaggagcacttttaaaaaaggatacaggcctggcagaggctgactggaaaaggtagctatcgaagtattttacaaaggatccacagttcttttttttttttaagtatgctatttatatcaattctctggaatatggaaattatttttattgtacttaaccatatgttcatatagattggctgaggcactcaggcctatttttagccaggttgatgttctttctactgtctttctctttttttccttgagaatgatctcacgagctcaactgctttgttcttgcctttctccaaataaccaaatttatttgttggtatcattctttggctcttctaagccaaggttgtttcagtcatctttgctgcagaggacaatggcaggtatacccttcacaaagcatcaaaagctgacacaaggctcagtggctttctggtgggcagcccagccaaaaaagagtcagaattt

SEQ ID NO: 25291 - DNA, 2957 bp, Bovine  19866880710328
  misc_feature (1)..(1): n is a, c, g, or t
nttgctattgggatccctgcaaaatgaaacaagatactgatcctggatcccacctccagagattctggtttaattggctggcagcgtggcttgagccctgtagatgttaatgctcccagctgattctaatgtcagtgaggctggtggaccactcacgtaattagtgagaagtaagagggttcacttcagagtagcattttgatttattaggaaagaataagaatctccaggataaggaccatgaggcaggctcaaaggtgagcagtgagatggcatggctgtgctgggcctgggccagtcacataggatgcttttaaatgatagaagtgaagtgagcttaaagcaatctaattttaaagaatgtggtggtggcgaggggaactgagaaactgcaagaattgggggcatctacatggacagaaattccgtagttttggatacttcagtgcagtcaagaataggcagggaggctggtcccacgttaaaggcaaagggctcgggcagcctaaggggttgttcagtgcagcaactcagctgaaggcctgcaagtccagggaggacagcgtatggatttttcaccagccggagcggttgcagcgttgcaaagcgcgcggcggagctgcacgtggagacgccaactcggcagggctgcagggacaccttttttgaattctggtcccaccgctgaagatccccacttctgtttgggtgagttattttatttctctggcttcactctcttcacttgtgaaaagaggataataatacctgtttgacaggtttctatgtattaaagacaataattgtgaaagcagctaacaggttttttaaatgttttatgttggtgagtgtttaaagtaggaaaaggagatacgatagttgttagaggcagtctggacccatgtctttctgcctcatttccctctctcacctgatattctctccattcttatttaactttctaaattctaaagtatgatggctagagctgacgacctgtttttcttagtaggagattaaaaccatggagttggaggacctaaaaagtgtaaaacttaaaaagcagaattaacaaactcaaaactttattttctgtgcaaaaaagtatcaatgttatgaagcatcagagtgaagcaatgattgctgaaatttaaactctgagagaaagcaatttggtaaagtgtgtgggactttcagttatatttcatgaaatctgagatgcctttggttgtaggatacatcatgttatgtattatgaaggaaaagtgttccttattaaactgtgacaaaatgctttctttgctcatataattttttttcttttttgaaagagccccttaaggttaaacatgtattgttaccatgtgttactcttaggcttgtctaaggagaacagtggaaaagtttgttaacatgttttgcaaatcttgttcatgttcacctaactcttctgaatcacattttagtcactgatgtgtgttttttcccaaacatctatgtcctctgggctttcaagtgaactgatgatatggtctctcataacatcccatatcttcttctaagtcactgccatctctttgcaagctttcttgcctagcatgtgataggtaatctttctgtgtgtatctcagtaactaaacataactcagctttatctacctatagatatcttccttaagtcctataatgctctgcttctcaaactttcatattcatacaagtcacctgggaatcttgtcaaaagccagtgtgaagtaggtctgagataggcctgaggttctgcagttttctcgtggtcccagttgaggccaacacaattggtaccagttgatttgagaagtgaagctataaagcagttgtttcaatgggttgcttctttgcaagaaaatgaggaagtgtgattgttcctccagtaaatacttgtttcgttaatgtcaaatgcatgccctgctgctctgttttcatggccttctgtgtatacaacaatttctcatttcaacaccaaatgatagtctaatctccttgaaattatttaaacagcagtgaaactcaacatgtgtagtgtggtgtagtgccagcaatgcacataattccttggcatgatggtggagtgaagagtgaggaccaagttagtgtgtggacaggcagcgctggacaccaaagaggactgtaagctgtactctgacgtcaaaggtgcaaaaatgtgctgcttcagctcacggaaatatagagaatctgttgtaaatctctgtgctattttaacctctactcttcgcagttattttcacttaagaaaatgctgaagtcagccttaagaagtatgagagataacagtaataaccctagtgcattttctcagcatctttgttttttaacctttccagttccagttcagtcgctcagtcatgtccaactctttgcaagcccatgaatcgcagcacgccagggcctccccgtccatcaccaactccagttcaaccaaactcatgtgcatcaagtaggtgatgccatccagccatctcatcctctgtcatccccttctcctcctgcccctattccttctcagcatcagggtcttttccaatgagtcaactcttcacatgaagtggccaaagtattggagtttcagctttagcatcagtccttccaatgaacacccagaactgatcaccttcagaatggactggttggatctccttgcagtccaagggactctcaagagtcttctccaacaccacagttcaaaagcatcagttctttggcgctcagccttcttcacagtccaactctcactttaggtttcccctaagtgaatggtacacaaggatgaaagttgttgagtgtgtgagcattggtgatttgtgtgttttattttagtatttatgtattatttggctgcatgaggtctgagttatggcatgtgggatcttcaatatttgttgcagtcatgtgagatc

SEQ ID NO: 25292 - DNA, 1056 bp, Bovine  19866880734364
  misc_feature (1)..(1): n is a, c, g, or t
ntagacttgcaaatgacaagaagggtaaactgggagattaactggggtacctgaattttattggtctggttattctcttgctatacttacctttggaaacagaaatcttgtccagttgtaggtatttgcttatatttggcttcataaatcatacaacagtacatgtgcaaagtcattcaatgataatttccacaaattagtcttaagtcaaaagtgagtaaaatagtttcaaaacacaaacttttttctattgaaatttataggaatagtcccaggattcaaaaaggctgaatgtgtactaattttctttacattagttcactgcttctcaggtctcattgcctgagaaccttgagactacagtgttttattatacaaatctctttggacatacattatattttgtgtttttttaaataaaaattttaatacagaaaaatatacacatatatctaaaagtctgtcattattcaacttcagcaattatcaacttactagtcaaatttttttcatctatacccttatctagtctctcatgcctatgcaaatacccatatatcatatcatttcatctatattttagtatttatctctaaaattaaaaagaataaatcatttataaagcctttataaaagcataaccatactatgatcatacctaaaaacttgaacagtgtttccataatagcatctacttactaatcaatattgaaatatatctgttttttttttatatattaggtgtattcaaatcagaaactaaaatggctgtttgtttcctctttgatgttaagattactcactgttttcagctactgtcagcctgatccatccattactataacatttcctatcagctcagatcaatttcagtagcaaatgattatcatgaatgagaacccattatttcgttactcattgcaatagggtatattctaatgctatcatttcttttttatttatttggttccatttaaaaatgttatttgggtaatttaaataggtattgcttgagcatctatcatggtgctagcactctgctagatagtataagga

SEQ ID NO: 25293 - DNA, 784 bp, Bovine  19866880748677
  misc_feature (1)..(1): n is a, c, g, or t
ncattaacttatatgtctattacagcatctaaggcttttttgaaaataagtaaaattaataaacttaataacctttttggttctttttaatgtatatgtcatacagtgtatgatatatatgttgttttatatgtagttttcatataaattattccacataaagtagcatgctgctgatgctgctaagttgcttcagtcgtgtccgacactgtgcgacccatggactgcagcctgccaggctcctccatccatgggattttccaggcaagagtgctggagtgggttgccatccaccttgtccgataaagcagcatgtgccctcatataagtactatgaaggtcacagttagctgtgctattatatttgtcttattcaaggagaatcatatgtcttttaataatttgccttaagttctaagaaatacaaatttgtcccagattggcatagggggttaaatactctctaaaaattaatttagaacagtcactttaaatattgtttgaggttttaatatacttttatataattaaatgtgaaaattaaatgtttatgttcaaaacagatccacagttaaagtttacaacaaaggaagtaaatgttccattttttttccttctttttctctagctcaactgagaagtcatttccttggagatcaacaggtatgagttttttaatcatataaaaaaatctttcttacgttttgcccaagcaaagtgtgctctctaaatttactgtctcttgatgagatcagtcaagccaaaactttaatagtgacaatat

SEQ ID NO: 25294 - DNA, 685 bp, Bovine  19866880760137
  misc_feature (1)..(1): n is a, c, g, or t
natcattttctgactaaaatttttccgcaggaatatagtcttctgtcttcagagcatggggagatttgtcgtggcagatgttcattttaagaaaacccaattcacactcagcagtacgaaaccttcactgaaaaacatcagggagagatgattcttgcataaatggatcgtttgcaggaatcttaaacgaactaaagttctctgggcaaagacgcgatttacaaaaactcaactgtcatcttgcctggaacatagtcattccataaacagggctgtttatgacattttatgccaggtctgtctctctctctcacacacacagggatgtgtggcttaacaggcctaggggtttcaacgacgactgtcgccccgacacgcttctgtccttagaagggtgacaggtcggagcacacacaggcagttccctgcttctggacactgaccttctcttacctcatacactgatgacccaggccgccctgccaggcccgagctgagcacaggagccagctgcagccacagaagcacttcctgccggctgagacggccccaaagggacggaggggggccagggggctcagcttggcttctgtgcttgtgcttaccggtgcactttatttcctaacatactgggttttcccatctctcagaaaaatggatggaaaatgaactgcggtaagcagca

SEQ ID NO: 25295 - DNA, 1247 bp, Bovine  19866880780836
  misc_feature (1)..(1): n is a, c, g, or t
ntgtctaaatgtttaatggctttaacaggaatcatatctgcctaagtagaaaatagggcatgatgtaattatctctgggcttcattagaggagtcactccttacctagagaatttgctttaaaaaccagctacttagtaaagattgatttgactacctagtgagttgttcctaaagccctgttatctttcagtgaattcaaagctcttctagcttttacagttaatctagttcctctcagtcttcaagattttctgtgcctttgaaaagaccacctgaagggaaagagattactgatacaattacaatagaaacaggttaaaacaagacatcagaagcccaaaataagacagcgatcactgggggttaaaagtagatgatgtcctcttaggctcttcatcctctttctaattctccatgccctcaccctacccccaggagccaaccagaatgctagaggcctaaatcttgttgacaaagaattagtaccgaaaatttaaaaaaaaaaaaaaaaactgtcctaatatttatctgggaagctatatttagcgtcccaaaatcaggtgacatgcagagaaactggatcactcatacatcactggtggaaacataaaatgatacagccactctgggaaacgttccctcgtgttcccgtggttaagaattggcttgccgatgcaggggatacgggtctgatccctggttgaggaagatcccacatgccacagagtaattaagaccatgcaccacaattactgcagctagtgaactccaggcctgtgctccgcaacaagagaagcctccagaatgagaagcctgtgcgccgcaatgaagagagcccctctcactacaacgagagaaagcctgcatgcagcaacaaagacccagggcagccaaaaacaaagaaacaaatacgtacatacataaaaaaatttttaattaaaaaaataaaaactaagtatgtaactgccacatgacccagaaattgcactcctggatatttatcccagagaaatgaagacttgcatttcacatgaaaacctatacacaaatgttcatagaagttttatttgcaataacaaagcgtagaaacaacccagacatcctgcagagatagatcatcaaactggtctctccatgccctggaatactaacacagcagttaaatggaataaactattgcacacaacttggatgagtctccaggggattatgctgaagaaaaaaaagctattctaaaaggttaca

SEQ ID NO: 25296 - DNA, 2095 bp, Bovine  19866880788332
  misc_feature (1)..(1): n is a, c, g, or t
nataacttctactaacccacccacacatacacaaaataggccaagagcagagttccttcaagaaattacactggaagctcgtccctcgttgaaactctgctacaaaataacttggcctgagaaaagaagtcagacacagaagagtacctgctatgtggtgcattttactatgtacaaacaaagtcaaaactaatatatggggcagtaaggcagggtagtgattatccttaggggcagccagtttgactagtgctacaggtctgtctgtaaatattcaccaacctatatgttgataatatgtgcacttttctgcatgtatactctactttgaagaaaaaatttttaaatattaataaatattattataattaaaattataataacttggcctgcaaagcttgtagttcatggtcacacagagcagggttttgtgggtttttttaatcttccagaagtagccaagcagcatgaaagcttaaagaccaagtagaaaaccatctatacagatcatttagcgtctttagtgggaaagttgctgtttctatatgaggtttcttttcatcttcacagtgccactgcaaatgttgccaaaatacagacgatggatgccctgaatgacacgctggagaaggtgagccatgggtgaggcagatcacatgatactcctagccagttttcacctagctgatcatgctacatgggtgaatgagctgatgactggaatttttttccatctcagaggtttgatgtccctgtgaaagaatctgctttcagttcaaggaacacagagccgttttgatgggaagagctgatgctcccgaattcctagcatctatttaagaaatcatttcaaaaataagataggaaattaatcagaaatcatgatgccaaattggcagaactttacgttgccatccatttatttcctggagaccttggcatgttgctcaaataaggcaaactgtgtgctaggaattcagccctttttgaccttcctccccaccactgctttcccatatggaaatgtttgatctgaggccaggatgggtggagggttgcccaatttaagactggaggaaggctgggcactggctggctttatctaatagagtctatttataaaggtggtcgaccattactatttttatttctgtgtcttgaattctttcttagtagctcaggaaactcagaaagttcttcctgaatagacagtggtttaattttgggttcaatagtttgtttttaaatgttgtaagtgatccgagtgaggatctttattctactcctagggagggggcagatacactgaattcaggcattgaagaaccaccacttctgttaccccaacatatattgaaggtacaggactgggtgtcctttgtagaaggaagacttgctgttattgccaacatcaggggtctgaaatattaatagattagaatggaaattgtgcagctaaacttctgggacctctctttggtactggcttctcctcttactgtctttaaagccttgagcaagttattgatcttgcacctctgatttgccatttgtaagatgaggataaggaagaaatggttgttgtgtggaatcaatgagattcacacacaggaatctcttagaacagtgcctgacacatggaaacctgtctgcactctctgctctgattagtagcatccattttatgacagtgcaatggaaagttatgtctgaagcccctgaggcaggcagtagtaccagatgagatcttgacaatagaccatagctacagagccttctcacatggtggggtgtggttctcccatcaggtagatcagcgggcaggtcataaatgactgtttgccttcctgactttagaagaagggaaggggtggatggtgatctgcctcttgcattctctggctcctgctgtccaaacacctcatcctcaggggcaaaagatatccacagtaagtggaactgagtggaatagatacattcctctaaaatatgttaacccaaaataaagtgtttaaaaagagtggtcagtaaaggtcaattatgctgtactttaggtatgatgctggagtcttcactgttttttaatagacacatg

SEQ ID NO: 25297 - DNA, 1444 bp, Bovine  19866880845013
  misc_feature (1)..(1): n is a, c, g, or t
ncaatatggaaaatttttgctctgctgttttcagttaaaccagtatttgttgcacacacaaaataaaattcatttttacatgcttgaactcacagtcacagaaatttagaaaatatttgtctaaaatactgagttcagcttttcatatcctttgtagtttttttttttttttttacagacaatcttgaactacacttttatgttgaacctgttttgaaaatttggaaaatctctcagttaaatttagtattcttcaaaagaaaacaaatatattttcagaggtattgaaaagtccttaaactattggtaaaattttggcaggtgttgaaatttaagttatatgtatataaggctatttcaagtattacatgtggtgagatatgaagttattgaaagtcattgagtcaactctaaaaatagtaaaattctttttcaattgtttttcttttaaacctaggaaatgcttatagctgagcaaaaagtgttttctggaggctatagaattacttggagaatgcagtattaaaaactttaaaatgctttttgggaaggaacatttaccttgtccccactaggccaccagtgcaaaggaacactgagtttctcttgaccttgagtcaggcccatgggagcaaaaatcaatattaaaccgtaaggtggagagggccagatgaggacatctattttttctttccctgctcttatgttagaaccttgatctaaaacaagcaaatgaggtgttatctttattttgaagctctctagagataggtctgcagcctgttgcctcacgtctaagtgacctttgctatcagaaatctatcatgtcactatcattaatgtttcttaatttaagaataattactgaactcttaatatttaagagtattggtatcaaacctggacctaatagtttagagagattataagagcagaattccgtagtggctcagatgataaagagtctgcccacaacagaggaggcccaggttcaatccctgggtcgggaagatccccgggagaaggaaatggtaacccactccagtgttcttgcctggaaaattccatggacagaggagcctagtgggctacagtccatgggatcacaggagtcgggagatcacaagagactgagtgactacactttcactttttctttcaagaccaggataggaaattaatatcttttctgtacagcagaactgacaatgaataggaaaagaggcccattttataatagaaacaggaactttaaatatcaacctaagaggaaatgtacaggttttatattgaagaaaatactaaagctttgttgggggacttaaaagaagatctgaataaatggcaagaaatactgtattccctaatgggtagatttcttactattactgatattgctactactgctattatttggctgcactgcatggcatgtgggatctta

SEQ ID NO: 25298 - DNA, 3762 bp, Bovine  19866880900800
  misc_feature (1)..(1): n is a, c, g, or t
ntatttttaatatttgaaaatgatataaaccatttggagtcatgattggtagttaagttgaatttggactaaaacactaagttttagtagtagtattctgtatacagcattcttggtgacatgtaaattagctctcaactgattcccaaactgcttttatcaatgacagcactcctggaacaagccttccaaggtcctctaaggacagtatttaatttggatacttaaggtatggttggctatggcttttattatagtcattactttagagctatacattgtatatatgaatagctaaagttgtattcagacttgtaaatataactatttcaagtaatctggaagtcatgtatttgcatgtgctttttaagcttcacccatgctgtttattgcactgagcgatatatagggcatgttaacagtatccaagtaacggcactttatctcatttatatgaacacctctgaggtgctacaagtccaaactgatgtattattcatttgtaaagataaggtacaggaatgatccttgagttaaaggtatttttatatgaaaatgatatgctattggaggatgttaaaatgctagttttcagagaggtgggagtgctttgttttatatgttgggatgtgaaattattttctagaattggagagaaggaagttctatatttacagaatgttttaaaaatgaagagttgtaatgaagtcctgtaagcaccattgtggtcttgtacgaacaggaatcttctggcgtcattcttcagcattggttcctgtgtgcagtgtactctgtatagtttcattgtgtttttttaagaggctcttcatgaggttctgctatacctactatggcttatttattgttttctttaatgttgtggaagtcttactcttgcattatgtagttttgtttctgcacaactactgtacttgtccgtctggaataaagacaatagtttgttttgcattaaatgaaacagtggctcagtagagaagatcttgatgtcagctatctgtctcactttaatcctgggtgatcgtgtccctaaaaaaaggcgaatagcctgattttcagtaatactacaaatgcatgtttacttttatttcattttagaacaaggataatggcatctagaaatcccaatatttcaaggtcaaaattagtctttttgcctgaaatgagcatgcatgaggagccttctaaacatctgttccagaaatcctggcgtctgtttttattggcaacacggtatcttcagtttttagctctcactttggcgatacactgaacaccgtgctaatgtgaaattttgttcttcacatgtgtactgatctctgagttaaacgtgtttatacccacatatttcagtttcaaagtcttatgaatgagtgtgaacattaaactgttgtgttaaaatatcctgacttggaatcttaagcctaaacaacttcaggttattgtatggttactgctattattagcaaggcttaagggaaagtattttcagtccttatttaaagtcatatatttaaactcaaggtcaaaaaacaaaactgggtaggaggggaaactctagtagcagataaatgcttattggatgacttttcctgtgatgctgccagtatgactattagaatttactgtgatggattctgagtaaatgtatttggtccagtagttccaggaagtgctgtctccttgggaagctgttggtgggagctgaggcccaaggagcgagtcctgcagggacaatggcccctagtgcggtgtggagggccaggcggtatcctttcctatggatggttttagatttgattttttgtttgcctgtgctttgtggggaggagtagttagctttggtttgtttgtagagaaaaacagaacacttcactttggtaaactggcatcttagttttcagtcacttaactagaaactatcctagtgaaatgtaggaaaagaaaatcaccttctttaaaacatttaaaaaataacatcttttattgtgttttctgtcagtgacttcaataatttttagtaatttttatgtgaaaaccagctagcccttttgaaaaataagtattattttatcaaaacacaagatatctggtccaatggtgagagcactaccgattttaacaagtcttttgatggaatatatccttatattgctttttatttgtgttttcaaatttcagaacaattacagtgagggtttgggggtaagtacagagtcctggtccctccgtgcccttagagtttatttagttttagcaagctttgcactaatggcttccattctggtgaacaacttgcgagagggagggagaggcagtgtaacctccacttacgggacctgaagtcttctgagcaaatgttggtcagggtgcttgtattagctatcagcctactgtgtacaaatgtatagtcaccttagcttaaactatgatgtgagaactttaagaactctatattctaaaaggaggctagtttgccactttatatgtttcagcaaagtcaacttaatgcatctgtgataatttatgctatctaacttgtacctaggtttggacaatggggaaaaaaatcattactaccttgcaaacttagaagctaaaaaactgctagtaaatatatcaaagtgactttctcaatgtattcgtaaacaaatctataattattttgctaaaaaactctttagaaggattccagagagttatcaaatgaaatgttattaactaggattatgttctagtctagattattctgatctttggttataatggaatatgatctataaccagaataaacttgagcattgcaatttgaagtcaaagtaaaactttctctataggttaagattttattcactattatatgaaaaggtaggtaactaagtttacaaagtttacctttaaatcactcaagtgagatcacagaaaatataaacaacacaatatagagttttatttttgatgtgtctcacttagccatcgatcgatggccattttcagagtcctatttggtgtaagtatcactgaagaaagaacaagatttgtcatgggactggtacgtttctttttgctgatccaattttccattgcttccttttcatatgagtagccatctaaaaaaaagaaaaaagccacatacacaaattatttgcaatgtaggaaaagggaagttaggatcactaaaatggttataaaaattccactgccaaggcctttactatgatttaagtggtattcttgtcttgcaccattgctcccaaaatatttctgcaatgacatcctaaattctaccatgtaagatacactgattgcacaaattaccttgaccagtgtcccaaaaaaactggaaaaggggccttctgttaaaaattcagatgtagcaccaaggaagaaaggaaatgaatcaggtaggagagaggcgagtggtggtaaagctgcaaggtccagctgtgccgccagatctgtgcatcagttactgtggctacagacgggagcaaagagttccagggaagactcggcctaactttccaacatacggaaaagtcagggaaacaagatgccaagaggttatagagcgcaccctaccctactatggacttgatagaaaaggcatttacactgccaaaagaaaaaaaagatccactggctaaggattttaataccatgttcttacaaacttatttgtacctgtaaaggttgggagggtttgcctcactatttttatacttgtagctctttcaaacagaa

SEQ ID NO: 25299 - DNA, 1927 bp, Bovine  19866880912811
  misc_feature (1)..(1): n is a, c, g, or t
nttttgagaaacatgtctttaaaaatctgagtctcctaagctagtatttcatgttgctaaaaaattactacatataagtttgtttaaagaagttttcattttgataatacttggcagaagagaaattttacttttggaagaaaatatgaagaagttacctgcttctggctacaagatccattttcctatattgtgaagagatttgtttcattcaacttggaataccatccccttcataaaaccttcccaggccatgatagtcagaaggtacctttaattccacacctcactttgtactatcaataaaaatcacagtgtaaaacgttgaactctacaaatctcccatggcacctaaaaatgtcccttagatgtaacagacacctagtaagtctccttaaatgaaagaatagcggggttgttatggaggggaaatgaaaatcaattgcaattctctcccacaacagatttgggctaataatgtaagaattcttctgttaccaagtactaatttccaagtttatggacaaagttatttgacttacacacgatgaacagcacattcccatggcaggatctgctgtgttatcaggctttcagaagtaccagctgcaggtaggttttattttgggattttaaatacacacacagaagggataagtacaacaacagagaagccaaaacctgaaatcaatacattctgcctcaaaccaggaaaggctcagatagggaaataaccaagtccagctgctgctgctgctgctgctaagtcgcttcagtcgtgtccgactgtgcgaccccatagacagcagcccaccaggctctgccatccccgggattctccaggcaagaacactggagtgggttgccatttccttctccaatgcatgacagtgaaaagtgaaagtgaagtcactcagtcatgtccaactcttcgtgatcccatggactgcagcctaccaggcccctccatccatgggattttccaggcaagagtactgaagtgggttgctattgccttctctgaaccaagtgcagagtttctggcaattatcattatgcctcccaggtcaatggttctcatacaggatggagcaccagccttgcagaaagcccctgctcatctagaagcttcacccaggtgctccccaaccaggcacctgcctcccaacctaacagcatgctacctaactagagaacaaaataactgtgacattattaccatcaccaccaccatccagatggccatagatatttattagagaaagaaaaggcatttcacaagctcacttaaaaaatctatttcaaaagcttcctcttagaagccttcctgctcttattttaattgcttgtccacctgcctcctccactaggctgtgggcctctgaatggtcagaccctgccaagcttcaccagcacagttttctcatttcaatatcaatggatatatcagagaggaacacaatctgaatccatctctaattctcaaagggaaaaactgtacctcaaaacacattgccagcctatttaagtaaatgtaacctccttgtttaaaatgcaagaccctgagcatcagaggaacttgtcctgactctcctaagacaaggttacaacccgattttccaattacagaataagcactgggctaggtgtttcattctgcacacattcctgagtctccactctgtgccaatcaaagaggggcacaaagtataatatgttggaggaggaagacaacatcatcaacaaacatgggcaggaagccacaagtccaggcctcccttttctctgtaaagtgaaactgaagtctgagaggagcagagatggttcagagtagcccctgtagagaagaggaaggcaagcacaagattaaaagggcagctcaacagttctgattgcccaaccaagagcaagacacaatgaaagtgtg

SEQ ID NO: 25300 - DNA, 3113 bp, Bovine  19866880922531
  misc_feature (1)..(1): n is a, c, g, or t
ncaaagctcacttttggtctcagctacatggtttccatagccctggagacaacttgggggttgttgaatcacaggactcccttggagacttctttccattgcaccctactgtcggtccctgcctgagttccgagggctgctgtaggaaagtgccacgaacttggtggcttaaacaacagagattaatcagctcacaattcttgtggtcagaagtccaacgtcaagctgtcagtaggactaggctctgtctccctgatgataagagggagtgactggctccaggtcgctctcctggctgctggtggcctaggacgctcttggcttgtcggtgaccttcttttccctgtgtctttacattcggttccatctgtgtgtctctctctgcgtccaaatttctccttttaataaggaggttgctcagtggtaaagaatctgcctgccaatgcaggagacccaaaagacgtgggtttgatctctgcattggaaaagatccctgcagaagttaatgggagcccactccagtattcctgtctggaaaattccatggactgaggagcctggtgggccacagtccatggggtcacaaagagttggacatgactgagcacacacacacattggataacagcccaccctaatgacctcatgttaacttgatttttggtagagaccctgttttcaaagaagaccatattcacaggtactttgggctggactgtctacatattttggtggggacataattcaacctattacagccccagcctttatacctctacactctgcttttagtgcaggacaagaagagcccatcaagaaactgacctgaggctcaggtctctggatgaccctcaccaagtccaaccaggatgctcaccatgccaagcaccctggggtatgccttcttttgtcttaatgcacagacctgtttccctttcagcctcccaaaaggggctgcctttttctaacttgtacaagttgctctacaagctagctgaagtaccatgaagtcaacttgttatttattcacagacatttgctatactgaacatagattttttccccgcaattctgttctgtgcttatatccatgcatacactacattatctcttttatttatttatgtttttaaaaaggacttaatctttcttttagcagaaacagcatcaccgtcatagtttattttctgtaaaatttcaaggttcagaggaaggatgcaaagcaagtttatgctatgtctcagatgaattaggatccagataagtgacttagccaggcttcctgccttccctttcttactggtttcacaagcgcctcagaggctcagcatatgaaaatctagaaggaacaatgattgccctattttctcacagcatccaactgtgaggcgaagattgagacctggacttgcttattatttgagaaatttcaaacataattcaccagtagtttgtaattaagacagaaaattccatctacccgcaatagggcacgtcctttcccaagagcatgactgagtgctgaacacatttgaatcaccttaaaatctcgtcattgtccattaaattcatgggacaacagtagcccaggctcagctctctaattctagagtttggcaagcagggacagtattttggttgctcactggggatgggaacgccagctttggggagaccagcataaacagcttctgcctctgcatttaatgctgactctgtgctctgtcttcccatagattcatctgcctggacatctttgccaaaccattaggataaatctgaatgggactggagagtgtttcgtatccatgacctctccagagagctcaaaggcacaggactcagagataaccacctgctgatttagcaaggccagtagctaacgcataaatcccagcttgtgcattgtcctgaggagctggacagagtctaaaaaaattgctcaaggtgagccataaaaaagccaaggtgtatcagagtctactgtggggatagatttagtgatagataaattttttgtcagtatgtactgtttttcaaaataaagtcagaatatacccctctaatatttctaggttaaacagaagatttttgtattacctgtttcttctttatctatagtgatggcttagagcctgtttcgtgtttattaacttacatgttcttacaaatattgggatagaataatcccatgtgttaaaatcagagacccaagagctccaaggcagatgagagtccacaagagcaaagtaaacttgaatactcaagaagtgtatgcaaatgacccaaagcaggggtgacccggggctccactgtgtgactgtcttgcctcctaaagtaggggcgtggaaagccctctcagggtagtgctggccttgcactgtcgtcagccgctgctcaagggtccagtggtggcttccaccgtcacacctcttctgccctgtgatttcggatcttacccaggtacctagcttcaagcatggttctccagccttcctggcaatgttggatgagccactcccaatcctaatcaattcattttctgcctaaaccaggcagttagtttctgcactcacagttaagagccctaactgattcgggcactccggtggagaagccagaacttgacccaggcagttggaccccagaacccatacccttaagctccacaggcaccacttctactgaagatagtcactgtgctgggctccagactgtgtgtgcccatatggattattgcccaaaataggacatttttgagaatgaaaagggctaatatttatactcatgccaggactgtcctcagcaaatgaaatggtcatatgccctactaatgaattatgctttttccttatgctatagaagtgaatccatcttctggaaattatacgcatggtgtaaggcccagagctgggcttccctggtgggctcagtggtaaagaatccacctgccaatgcaggagatgcaggtgcaatccctgggtcaggaagatcccctgggaaaggaaatggcagcccactccactattcttgcctggaaaatcccatgaacagaggagcctgggggctacagtccatggggtctcaaagagtcagacaggacttagcaactg

SEQ ID NO: 25301 - DNA, 1358 bp, Bovine  19866880958480
  misc_feature (1)..(1): n is a, c, g, or t
nggaggcaggtgaggatgtctacctaccttctagcaaagtaggatgagaagcacatagacatggcccatgctcagaatattttctagggaagatattttgccatcagtcttcttctgaaagcatcaatgcgtgcaaaaccaccagtggcgggtctgggggctgctgctctcttgtggatccagtgaataagtgaccattcttaattgtaagacacttcagtacaagcaagatgattccttaatgagaaaaagaagatgtgaagtgttttccttcagtgcaaaaatgtcccacaggatacccaagggtagatatgttgttatgaaacgtttggctccagctggataaaaaagctggacctttgtgaagctgggcttctcagcatcctgagcttcttgatgagcagggctcactgagcttaaaattttcctgacagctgatcaccataaaaggaattataaatttcatgggctgggcactcttattcaaacacatttagagatgcagatatttttggaaatcatcagaaatcaaaacatgccataaaacatctatttactgaagagctatacattaaggataatagatgggtgtgtcacaagcgactgaactgagatcataaaacagcaaacgcaacttttgcattagtctcaaaggcctaagcaggtcattgagacccaccatctcaatggggaaactgcacaacccctgtaccacgctgggctcccagcgatctccggggttgacagcactgatcatcacagtggccagtctgcaggccaccatccagggacctggagttggctgccctccagttctcagcacctctaagagctgactttagtgctggccgcgtctaattattgacctttgttcttccagaaaggacttcctagagacactgacagtctgatcctctctttcttctcctctctccctcctcctctcacctgtcccttcagtcggcagcacctcgtcctcaccagcactgttaggagtcagagaccctcgctctgaatacgataggacccagccacctatgcagtattacagtagccaaggggatgccacacacagaggcctgtaccctggtaagatgccagtcgggtgtgtgatagagtatctcgaaaagccgcgtgtccccaggcgcttgaacggcagcctgggaggtaacctctgcctgccttgagatggtcccccagcagcaaaccatgctccactgtctccatctccttcctgcttcgggggctgttgcctttcccacttgttttaagtaaaacaagcagaggcagtggtctgctgaccgcaaataaaaagagcactgtatccgagtgagaacgcatttcccgctcccgtgcag

SEQ ID NO: 25302 - DNA, 3395 bp, Bovine  19866880965822
  misc_feature (1)..(1): n is a, c, g, or t
nttgtgattgcatgctgctaaagctgaaactccagtactttggcccctcatgcgaagagctgactcattggaaaagactctgatgctgggagggattgagggcaggaggagaaggggacgacagaggatgagatggctggatggcattgctgactcgatggacgtgagtctgagtgaactccgggagttggtgatggacagggaggcctggcgtgctgcgattcatggggtcgcaaagagtcggacacgactgagcgactgaactgaactgaactgaactaaaaaaataaataatacctgtttctccttcattaaactcatgttttagaaaaaaaaataggcataataagagagagaacatgatttagttatttgtcgataacttgctgtaaggaggaaggaagaaaagcaaggtcatgaatgagctatttgaatctcattgaaagagatactgataaacttccgtagagctctcttcatcatagagttgttaggatagggatttattcacaagccactaggaagaggcttttaagtaaatgagactatcattctttccatagttagttagctagtgttagttgctcagtcgtctctctttgcgaccccatggactgcagcctgctaggcttctctgtccatggcatttttcaggcaaggatactgggagtggttgccatttccctctctaggggatcttcctgacccagggattgaacctgggtctgctgcagattctttaccgactgagctaccagggaagcccatcgttctttccatagaaatatctaatattttaggcattcttaaaaagtgttttataatcattaattatggaaatcatatcattcattgactttttctacagcgttgaagaaaatatttattttttaaaataaggaacataagatttaaagaaaataaaaagttgctcgtgatgtcaacaaattaaaataggtttaattttttctattccttcccatatttgagtccatgtttcatttcaccttaatttttgaacaaggtttgaatcctagagtaatatttttttccccctctgtggatatccaattgctctagcactattttttgcaaacattatctccccgctactgagttgctttcgcacctttgtcaaaaaatcagttgagcatatttgtgtgactctaattctggggtcttttctgttccactgatctttgtgtctgtccttccaccaacaacagcacagtcttgattatggtagctatacaataaatcttggaattgggtagactaatcccttctacccttcactaattagttctgggagaattattgtagctattttaatttctttgcctgtcaatataaattttaaacagcattgtctacatctaccaagaaaatctttgataagtaattttgctgggcataggattctgagttgtcagttcttttctttcatcattaaaaattattattccacctctgtctgaagtccatggtttctggtgagaaatccagtgccatttgaatgcatttgttcttagtgatttcaagagttgttttcctttgtctttagttttcagaaacttgactgtcatgtggtatggatttcttttggttgatctcgtttgggtagcttagctacttgaatacagatttccatcctttgtcagagttgggacgttttcagtcattatttcttttagtactttttcagcaatgcccttccccccctccccctttctgttactctaagaacataaatattagatctttcattataatcccactggtctttgagactattactttttttcagtctgttttaaacctacttttcaaattgggtaattactattgttctgtcttctaggtcactaactctttccccctctgcccactccattctgctgttaagtagtatccactgagctttgtatttctataattgcctttttcagttgtacagcttgcatttaatttttctatacatcttctatttctttgctaagacttcttattattttgctttagaatttctgttttttgtttgtgccaagcatctttgtacttgcctttgaaacatcactgctgaagtagacactgtcagaaaactcttcatctctggtgtcctgatactgacatctaccgacagatttctttctttcagtgagagattttcaaatgatgactagacatttttgtattatttgatgagacttggggtatgttttaaacttctatttgagctggctttctcggatatcactccagcaggggaagcagggaactccctctaactgctggaactccaggttttccacttggcctccactaatacccgaggagagggggtcaccatcgtcactactgctgggcagggtggatgttccagcttcctatgtggtctctactgacatggtcagggtgactttaacaatgaacaatggtgaaatttcccacatttcactagacctctcctgactccaccccggaagaaaaggggaccttgttacagaccagcagggatgaaatttctgtttggttttctctgacactaccctggcagaagtgtgtgggttcttcattatagtctggcaatgggggaagtctgggttcccctcttggcctttattgccaaggctggggatgggggtcacagttttttcgtatggtatctggttggagtagagccattattgtctaacgtttttctgtcttgctaatctgcccctttcctggttctttggctagagagagcttttgttgggctttttttttttttggtctgcagccaatagtgctggcttctttagctccaagtcctgaatagataagtcaaaggaaaacccagggaagtgacttctgtgtggttcttgagtcccaaagttcttagacagtctgccttcttttctttcaggatcttcttatgctttttctgtagagggtatctagtgtttttagttgtatttagtaggaggaattgggggaaagatgtctactctgtcttttaagtgtacattgtccctgggtgagatttaaagtttattgcagtccagttccttctttgaaatctcacaggaagaagaaataagttatatgatgcaaattaaaaaaaaaaaaacacaacaccttaaaaacacttagctttactgtttctaagtaacatggtctcatgacttcctcccaacccccaactattagttatttgtcctttttaattccttcaaacccagtctgaagtggagaagctttggttttgtatcagtttaactgcctccacagaatctgttatgctgatctttcagaaactggttatgtttgtaaccaggaaggatgtcaatactagagactacaccataggttagttctctctttacttttttatattttcaaagtcgtaaaag

SEQ ID NO: 25303 - DNA, 694 bp, Bovine  19866880981229
  misc_feature (1)..(1): n is a, c, g, or t
ncttcccgtttgacagggtaatatcaagtctcttccaccctctaggtgctatcattgcaaagggcgagctttatttcttgttcacagggccactgtaatcacagcagctgataaaccatcaccacagatgaaaaaggaactcctctaaggagtctatggcatgggctgatgataagtcttgagtatgaaaggagaagcgatcctgaagacatgtcaggaagtccattttttcccaaaaagtgttaacaggcactcaatcaatcagtgccagctgaatgaagcctggtattataaatctaaagaaattaaattttttaaattgcactgcatctggcctcaaagcgaaaaaggtcagacaacttcaaagatgccctgtgaaaggcagctattcattacaccaagatttcttgcttatggcgctgacagacggatctttcacttaaagcttcagaatataagatgtcaaaatccctcctccgcttctgtcagagcttgctatgatgctctgaacaaggttataacctccccaggacttaatttcattaggttagggattctcaatacccgtgtagtttgcttttttttttttttcagactcccccaggtgattctgatgtacagccagcaacacgcatttaggactaattatatttcaggccctgctctaagcactttatatatatagtcatttaat

SEQ ID NO: 25304 - DNA, 1287 bp, Bovine  19866880983758
  misc_feature (1)..(1): n is a, c, g, or t
nagtccccatgaagacatgccactccacttgaatagctccaccccaaaggcccccagtgtcctaaaaaagcccaccctaatgccccatgccttagagtcccgaaagaaaagcccctcccagtcccctcacgactatctcaaacttttaccaccattctccttgaccccactctagctttcctcccacttcacccagaaacccgaagccagcagactaactgcactaacactccaaattcctgccccggttctccatccaccgatgtatgcacacgcacttccccggcctttccccttcactcctatttccactggcctctcctacacacgcactcctgcactccacctacctcacacttacccactttgttcccctctacagcacactgttgaccttccacaggtcagctcctgtcccctacactcaaccccacttcaactggctactcccttgacctgtgtgcatgctcagtcgctaagttacatctgactgttttcaaccccatggactgtagcctgccaggttcctctgtccttgggatttcccaagcaagagtactggattgggttgccatttccttcttcaggggatctttccaacccagggaacccgctgtctcctgtactggcaggtgggctctttaccactagccaccaggaaagccctgactattccacacacacacgcctcaccaaacttcactttgccatttcttctttgtctctccctaacacagaggctacacggtccactgcaaaccctaagtgcctggcacacaggggttgcagtaactgctgaagaaaccaaaggatataggcaacaaatcctgcttttgctcttaagtgttttattgaatgttttattagaaacatcaccaattaagatctgtcaacagtcacttacatatgatgccatatattttctttctctctaaactgagaagcgccccctccccccgcctgcccagaacaaatattcctttgatgaaagaaagaccagaaacaaaacactacttccttctcaaccaaaacagaaaacccaaaatagcaagacagtttattaaaagtatccagttgacgctggcttaggtaggagtaagtgcagttgtccaagcttaagaagagaaagggaagtttattctcgaaagtttattctcgaccgctatttgggggaggcgatgagactcaagtactaaacacgagagttgcctgaaataataagcctcggctctattacagcgcaagggaggaaaaggaagcaggaactccagtggaaatttccttcgt

SEQ ID NO: 25305 - DNA, 1387 bp, Bovine  19866880984302
  misc_feature (1)..(1): n is a, c, g, or t
ngactatacagtccaaggagttctccaagccagaatactggagtgggtagcctttcccttctccaggggatctttcccaacccagggatcgaacccaggtctcccacactgcaggcagattctttaccagctgagccacaggggaagccctaataacattattagaattacaaaattatgtcgtatatatttttaataaaattacaaaaattactataagagatggagaaattatcttttagaaaactcaagacacctcttagttagtaatattttcagtggaacagttccaaccattactccctgtgcctttcagtctcttcactgatctattgtcaaggaaccccagttattagtggtgtggccttgggcaggcaacaattactctgtgatgcagaacctttttctgcattaagttcattcactacagcacctactctgtgccagacactgttctgggctgggggatacatttgtgaacaaaagacaagattgtgttctcaaggagcttattaggtaatacttagatggcccctggcccagaagataacagtacatcatgttagccatcattagctctcaaaattaagtgtcaccttagtaatcattatcttagtcctattttcacattaaaataaaatcctatttgctttattttacctatgcccaaatgcttcttagcaagagaaaaagggcagaaagggggacagttaaatgattcatcagaatctggcaccaccgagcatataaactctacatttcctgggaaagaactgttgtaaagtgctacagataccaccagctactggggatacaacagactgctgccaggaacaagattctgcaaacaacttttgatagatagcatcccactgcgatttggctcctcccaggactttgcaatgatgctgatgaaggtctatttacacctggaggttacagctgacgtgctgctgcacctctgacaagctgcaaattttaactacagagaaatttaatccctaatgatgccagctttcaagctgcccttacaaagcctgccatgagaacatctctttatttgttcagaattattacataatcacaggccatgctcaccacagtcaccatacacagaaagcagcctgtctttcagcacagaatcgaaaaccaccggcaggagaataaaagaattctgctcaatccaaagtaaatacgtgaagtaaaatgataacaggaactctccggagagcagttcccttataaacagcttagatcacttcacaaacacctcgctaaatccaaatatctgaagtaggcccccatctccatctggtgtcacaaatgtcatcggccaccactgaaggcaggatacgccttagagggtttagggtacaacctcaaaaga

SEQ ID NO: 25306 - DNA, 789 bp, Bovine  19866880988468
  misc_feature (1)..(1): n is a, c, g, or t
ntccaatttcaggtattaacagactagtgatttgttaacaagatggctactggttgcctgtcattttcttccctactacttatcatgaaatgtccagggggaattcacatgaggtaatgtagtgcttggatataatttataagaacccagattcttcctctcaaaattcaggtgcatgttaaaagatattactctccaattctttaaccaagtgctttgacatgatgtttgggtttgtactatgtcagcatgttaataaaatttattttcattattctacttcttataataaacacataaagctgttttaattggtgagatcaacatggtgaagttttggaagtttaatgccatgtcgaagtatatactgtcacagcataaacatggcttgtattcaaaaaagtttttctgtcttcatatcagtggcctggaagaagtttctcagtcccgacagacacatatttaaaagtagaaccgccagcttctcttagggggagggcattttcttcttaagtagagatgatgatgataatagtaatattagcctttactatgagaatttactaagtgtaagggagtgtaaaaactttacataggttaatttaatgtttcaacaactattactatcttcattctacaaatgagaaactgaggcagagagaggttaacaatcttgccaagatgacacagtaagtagtggagccatgatgagaatccagccatctccccctcgcactgaaggagtctctgtatcccaacgaaacattcattatgagacacatccaccat

SEQ ID NO: 25307 - DNA, 1214 bp, Bovine  19866881016569
  misc_feature (1)..(1): n is a, c, g, or t
nctcctctggttattataccacaactcacccctggactgattagtggcctgtgacttcaggttcccagtgtgtgccgtcagccgggatccactgaggctttccccccaacccctgagggtcagctgtcccttcctctgaatctttcagatgtatacaggtcatagggggacatcaggagctggcaggaaaagcatgggctttggagtcaggacataatttccataggcctcagtattctattctctaaaatgggctaataatagtgtcagcctcataggcttgcagtaaagactaactgagatgagaatgtcaataaaatgcttcgtattttgcctggcatatagatgatgttcaataaaattaatctacttgtcacttctggttacaattacataatatgtttgtcagcctgtctgcctcactagactgtgagctcctcagggtaacagtaatgtcttagctatgccatctctgtaactctcactctctgtggctccagactctagaacagtggtagtatataataggaacccagggtatttgttatctatttccataataatgctacatagtgaaccaaaattaaaacagtcattatttagctcatgattcagcagttagtctgtttaagccaggcttagccgtgtggttcttctgctttgggctgggctcagctgcaggtcatgtaagctttgatctgaggatgggggagggttggggagagtaggggagggtggtggccatgtccctcatcaagtagtagctgagtctgggcctctgcccatggcatctggcagggtcctcgagtgaaagactcttggggatctgactgaaaacttccattgtcacttccaccgcattctgttggccaaagcaagtcacaaggtcagctcaggttcaaaggatagcaaaatagattccattattccatcccttaatgagaagagtggcaaagtcacattttaaagggcatgggttcagagaagagtggagacttaccactgtttttgcaatttgccacacccagtttttcaaatgaatgaggttagttaggaagagaagaatgaaccaaaaaggcaataagaagaaaggtccagtttaagtcatgggcaaggacatttaaattctaggttgctcaatacaagcaagatgaaaattgacctctcaaaccattaagtagttgggcgctctctaaggtacagtaaagagaata

SEQ ID NO: 25308 - DNA, 4270 bp, Bovine  19866881025534
  misc_feature (1)..(1): n is a, c, g, or t
nctaaatattaaacagtaaaaaaaaaaaaaaaagactggggctactttgaatacattatttggaactaaaacacagattgatcaagtccccaggccctgtgcaatttcaattagctatctgccaggagccacagacagcataatatagctgtaccaaggaaatgctatctgcctctgtgaccaaaaatcactctagtatcgatatgtatgattcctcaaagctctcttgattctgctgatattatagccaaggttaatcacacttctctgaatgtcttcaactgcagaggctatagcacccatgcagcactgtacaagattccccaaaaccactgtgctgatggtgcctggcacagttaaccacaccaagatattcatgaacaaatgtcctagattggcagaaactactgaatccttgccagttcttgtggtaaactaagcatccaggttttccaattatacattttttttctttatggattaaggaagtatataacatgaggatcattatttcccaagaagaaatttgcagcatctttcattaccaaaaaataaaaatacccctgagatgatgtcagaaggataaacagaagtaaatactaataacactgtgggcttcccagttggctcaatgataaagaatttgcctaccagggcaggagccacaggagacataggtttgatccctgggttgggaagatcctctggaggaggaaatggcaacccactccagtattcttgcctgggaaatcccatggacagaagaacttggtgagctacagttcatggggttgcaaagacctggacatggctgagtcactgagcacacacaaataacattatggacgttgaaagattgacatatgagattatgatatgagattatgagatatgatatgaggtggtaaaagcatccttgcccctgcatttagtcccttaggccatgtgactaaacagtaagctttttgtgatcacctcttcctttgagatgatcctatatactgtcccatgcacctttagcatcaattccagcttgaccaggtaagtgatgggtcatcactggttctgactcctgcttatcttaacctgcaatcaccacacaagcaagttagaacagcatagcaggacccagacatcatctgtgccagagttattagtagtgcacaagagaatccagcctagttaaagaagggaagtattaattacagggctttagaaagttcacagtctttggaagggtctgagaagcaagctccagactaagcttccaggaacaacatccagaatcgtatatcacaaagctggtctggtaaaggacatgctgcttctggctgtcatcaccactgaccccagaacacactgtgtttgcttgggattgcaccagcaagatggatgtccattctatatctgtctcttcacttaactgtattactctttacctttcatttcagtaattggattattacatgcctcagaataatttcctttgtatttatccatcttaggagtttgctgagtttcttgaaaatacagattgagatcattcatcaaatttggtaagctcatatgtcacttcttcaatattgcctgtatctcattctctgtctcctatttctagggctttaactacatgtacattaaacctttttactatctttcatatttctcttatgctttcttctctattctgctttttattatttttatcttcatatatttcagtttgaagatctattgctctgtctccaggttcattaattctgtcttccaatatgtctagtctgctcttaaggctcattcaatgagttcttaacttaagatattatattttgcatttctaaaatgctcatttgattcatttttatatattttaattctatactgaagtattccatacttttatccattttcatcttttcttatattttctttaacacattaatcataattgttatagttcttaccttttaactacaatatctagatcatttctgagactgttttattcctttattatctgtccgtcactttttcctgtttctttgaatgtttggtaatttttattttgggctgaatgttgtgaaggatctgttgtagaggctctaagttatattatttttctctaaagagtgctgagtctttagtctgaaaggtagttaacttgtcacaaaaatctcctggattgtgttgatgctttatttttacctttttaagggtaagtttgtttcagttttgtccacaatccttaagtgtaattcatacccttaaggcatgacctttctggagtttcacctgaatgcctagagtgctcaccaagattttttcacatgagctcagctaggattccaatatctacacctccccaaaactgtgtgacctctgaaatctctgttctcagccttctaatagttgttctcttttggcctcttggcatctcattctctgcattcagagctcacaagttggcaaagaactcatgagattttttttgtaggcattttggaggcttttatctgccgttcctttatctctggtactctgtcccccaaatctcaggtgcctttgcaacccaaactccaatatctgctttcttcacctattgagattataatttactgcatagtttatttctctttcttccttgtattaaaacatgatgtcagaggaatttcattgcagtccagtggttaggactccacactttcactgccaagggcccaggttcaacccctggtgggggaaacaagatcctacaagccacaaggtacagccaaaaaaagaaaacaaaacaaaccgaaaaaccatgacgaaccccatgaagtcaggaagaaacctaaggtgaacacagggctcatctttaaagtttttcttattttagggatcttattcaggcactggctgtcccaatgcctataaacacttctaaaaataataccttgttcattttttattgttgtttatcatggtatctgttattcattatcaatggaattgaaattcaaaaactatattatagtaccatacaccatgcaatttgtaaaacctaagtctgttctctaacagcaaaggaggctaaaatctgtggagaagggagattatgggaggagctgatgccatgacaaatatggaaaaggtatttcagatatgatttattcaaaaaagtatcttctgtctcattattatctgatttcccttactactatagtttcttggttaagtcattcattagatagatagagatgggaggaagagcacacaaagaagatgaactaagtacctggtaacacggtctatgcctgaaatacacctcagttttatagactatcagattttctttgtaaaaccatatgtgacttcacagcatattcagtgttgacaattaagtcttgtatttcacttcttaatgaccttgaacatccacgtactcgtttctacagaagattccctcataaataaataaggtagaaagaaggtagttaaaacagtactatatcaagaggtatagtggtgctagtggtaaagaacctgcctgccagtgcaggagacataagagacgtgggttcagtccctgggttggaaagaccccctggaggagggcacgacaacccattccagtattcttgcctagagaatccagaggacagaggaccctggtggactacagttgatagggttgcaaagagtcagacatgtctgaagtaacttagcacacacacgttaagaagagaaaaatgcctaaggcttattatatacttcaacaagagtcactcagcaccaagcacattctgatcactgagaaatttgttgcgagggtggtgttagaggagtagaggagttataggaggtatatgctataccaagataaataagatggggctcctgcctgcagttgtacaggggacatagatttttccagtgtggcagaatcactggcaagttatgattatctaataaggggctagggataaccaagaatggactgaacctagccagtgacccaagaaagtcttcctgtagcagacatttgaagtaatcttgaagatgagtgagacttaaccagacaaaggaaggcgagagcagcgttcctgacaagccaacagtggtgggagcaaggacacaaggtcagggaacaaaatgctgtatcaactagagatggagaaaggactacaggggtttggcatgtttaaactgttaaatatgaggtggagtatcaagaaaggagactaggaagggagcccggggtccatgttactgaggacttaaaaagcca

SEQ ID NO: 25309 - DNA, 738 bp, Bovine  19866881046499
  misc_feature (1)..(1): n is a, c, g, or t
nctgagcgactgatctgatctgatctgatcacagcaaatatctttgtttcccctctcctcctcagtctttcccttcatgcatatttatatatggatagatgtgtattcttaataaaatctgaattgtattttgtgtaccgttgtatagctgacattttccacttactttccttctgcccatccgcagtaaccattccatttcaacctttaaaaacagtccttttctgggacttccctgccagtctagtggttaagaatctgccttccaacgcaggggaatgcaggttccatcccaggttggggaactaagatcccgcatgccccagggcagctaagccagcatgccacaaggaaagatcccacaggcctccgctgagacccagtgcagccaaataaataaattaattaaaaaactccctttctaacagggttaaatcaatcatgaagacagccatatggttacctactactttagtcattttggaatcatgatttctaaagtctgaaatgatatcctatttgtgaagctctataagcttctttgatcttgtagcctattttcggttgtggtacgttataactggctgggaattagattatttttatagtagtgtagacacttttgcagtaaacctttaggtggcagcatgtctcaccataaaccacattctgaatagaatttctcagatgcatgagacgtttgacacaggaggatttcagaatctgccgactcccccg

SEQ ID NO: 25310 - DNA, 1335 bp, Bovine  19866881189329
  misc_feature (1)..(1): n is a, c, g, or t
nggacaaggctaaaaaggctgaaagaagccttagactaagtcatgaaagctccagattaaaaaatattttttaaatggtctcattgagaaaattttcaaatgagagtcacacttgaatgaatgaatgctgtatcaaattatctggagacaaagaagagaagccattctaccagaacaaatgcagcctgctttgtctagaggacaaatcattcttgcagcccatttggaaatgtcacttttaagtcaatgagagttgtgttcaaataagagggggatgcaagaccctattatatccactaggacgtgatgttttgcctctgaatggtttctatagtgcatgaaaattcttttttttggggagggggaggcgtctctctttttaatgtcttaaactgttttcaggttttacaaagtgctttagtttttacattgaaagggcagacatgatcacactggaacaccagttgtctggctacagaagctctgactttgggggcaagtcttttgaacttttaacttggtgaaaacagattccttggctcgcgtggggaagctgtcttctggaagtgatccagcacttagaacagtccaagacagccattttctccatctttccgagatatcacaatttgaacagcgatggtgatcagtgaaacaggaagttcagagttgagactgagcaaaactgacagggaagccaattcactgccccacattgaccagatgggctggcatctccaggatttttagactaggcaatccagttttgcttttttggttcattttgacaaactaaaaatctttttaaaaaattatttatttatggctgtgccgggacttcgttgcaacgcaggctctagttgcacggatcgggggctgctctccagttgcgatgtgcggtcttctcgttgcagtggcttctcttgttgcagagcacgagcagggcacaggggcttcagtagttgtggctcctgggctccagagcacaaattcaacagttgtggcacacaggctttgttgctctgtggtgtgtgggatcttctcagatcagggatcatacccgtgtctccttcattggcaggcagattccttaccactgagccaccagggaagcctgacaaagtataaatcttcaaatactattggtaaactcctgaaatcaatttgttgttgttgccattattaacaattgttttttgactactaaaaggtctatatgctaagcaatagtccaacatcatccaattcttctggcagatatactaaaatgactgggtgatgttttacaccattttgaagtatgatttttgaaaaggcaagtttctccatggagat

SEQ ID NO: 25311 - DNA, 1282 bp, Bovine  19866881195857
  misc_feature (1)..(1): n is a, c, g, or t
ntacctgtttccttcttgcttccctttcctccctctcggctcttcttcgcacagcctttaaccttttcaacactcctttgcttctaaagagaagaggaggggaaggaagaggaattaaagattactaaactggaactgaacttgcatactgacacaaaaggcaacttgtcttcaaacaaacagatcacttaggataaaggtaaccttgagttttacattaattttctgtgaataaactaacatggggaactaaaagctaaagacagagtgttttataacacaatgaagtgatcagaaggtcactgtctttttataaaagtaggaaaaaaaaacacaatggtgcattctcagcattccacatctaattaaggttatgaggctaaatctggacacattactgtaagatgtctggcataggaatgtgggtctcccccggttcatgaaaagaaaacattaagacagaatcaaaaagataacagttaagaaggaagctacatggttaacggcatgttttacaggtgctactgattatacaaccataaggaaaacattttggaaggctaatcagaataaaacataactgaaaaacatttggaaaataaatacagtgggaacacttttcaaccctgatgtcaggggatctgatcaaatagcacacactgcaatgggtttttaccacatatagtcagggctttggaggtgggggtggtgaggtaaggagaacaggcctgtggctgaatcccttcaataatgagctgtattttttaagcagggttatattgagcacataaaaacaccacaatggtccaggcctaagatgaaacataaaaccacccctcaagcaagagacagacaaaaggaccattattttgtcagttaggcttctttagctctcttccctccactaactcagatgagatggccagacaaccccaaacagtaacaaatctgaatgggttgtgttaccatcacacctttgttaacacgctaaggagagacaggtagaagaaggcgagtagcttgctgctgaagagaaagcacagaggggacagacaactcttctgcagaaaaacttgcctcgtgagcaccaatgcttccaaaggcctcggtataatacccaacacaagcacacaccaccccagagttgattcaaggttttccactgagagggaggaagagtcccaaagtgcggccatgtacaacataagcgcacagggtgacctttcttatcattgggtctgggcctgtatttatctttccaagccttttgttttcttgatga

SEQ ID NO: 25312 - DNA, 1035 bp, Bovine  19866881196152
  misc_feature (1)..(1): n is a, c, g, or t
ntggggtcgcaaagagtcggacacaactgagcgactgaactgaatactaggtgcaacacaaggacacaggtagggagaagcctagctataatgcattcattttattaagcttttatatgtaaaaatttgcttcaggtttaatagatttctcaaaatcgtccctagactcttattttataatatatgcaattaagggtatggcaagccatatccaatctaaagctgtttaaacaaaaatttgtttttatcattagtttttcatatcaaatgctagtattaaagattaaagactaataaaaccactagcacagcacatatggggattcagaaatatggtaatttataagtgaataaccagaggcaataaaaacagtaaaattgtttaattaaggacttgggtatttaataacatttataagatctatttttaaaagaagtatacagtctactaacaaccagttatcttacacagtatttgtctttttagtttatgacagtgattttttttttttaacatggactctttaaatgacttctgagtgtcttgtgatttacaccaggctttctagctgataataacctacaagttctgtattagatatctcagaagtgttatatcagacttctttttaaattataaatttatttgtaatttgaaagattcaatttaaaattaaaaatttcaaaatatgctccatggactacttctagtacatcagaaacaatgtttccaacgttgcaaagtataaatgtgggaaatgcttcctcttgaagattcctaaaaacattgttatttaaagtgagacctgtgggccagctataccggcagccctttagagcttagaagaaacgcacaatttcaggcctcacgccagacctactgaatcatcttcatgtgaataacatcaccagtgttttgtacacatgttcaagattcagaagcagtggcatagagcatttaaagactgagaaatctcaaagtaaatgaacctgtttaatctcatctatttcagtatctcacacttatctgacccg

SEQ ID NO: 25313 - DNA, 2090 bp, Bovine  19866881259295
  misc_feature (1)..(1): n is a, c, g, or t
nattagggaatgacaagaccatttaggggcatgagaaaacttttgggggtaaagatatatgcattaccttaattgttgtgatggctttatagctacatacatatgtcaaaattcagcacattgtacaatttaagtgttattattgtttagttgctaagttatgtccaactctttgcaacctcatggactgtagcacaccaggctcctctatcctctactgtttcccagaatttgctcagattcatgtccactgaatcagtgaaaaagcaatatgggctagcaatttacttgtgttttcagaagtaaagaaatatataatttccccagtattttaaaggggtgaaacaatgtcttgctcagtcatgtctgactctttgcgacctcatgaactgtagcccaccagactcctctgtccttggaattttccaggcaagaatactggagtgtgtagccattcccttctccacgggtattcccaacccaaggactaaacctcggtcccctgtgtctcctccattgcaggcagattatttaccacctgacccaccagggaaacctcaataactagtactattaaaaaaatactttggtagcaaatgtttatctctgtcatcttgattaaatgctttctcagattttatggcagatataaactgacctagtatgtcttagtactagtgaggtaagcatttcacaaatgatattgatgtacaactaaatgttcatgataaatatagagtattcattttaagcactaatgtttttcattgcattgttgtgaaagtagcaaccatcaataatagggaaagacagccttttgtaattcactgcccgtgagcataccaggccattggaaacaacacgaacacaggaagcatatcttttcatccactgttttagcacctacgtctagtatggtgcctagcacataataggagtctaataaaaatgtgtcaagtaaatgaatgaattacgtatgagtttatttctgcccccagccacacattatatctctctctgcttatgaatgcaaacctaaaataacagctgttaacttaggacagtagcctttactttctgatctggggaaccatgatgcttttggagatgctgaggggttctgcaaacagtaatgactttctgccaaacctttacattgcctgagtgtatttgtcaggattcttagctacaatacaatctagcttcagtcaaataaagaatgattggttcaggaataccaacaaaggtggaacaaatgagtaaagagcaggactcagactgggcttcaaaaaagttcaacatctccatctctcagcaggttagcttcatgaatattcacagcagaccagtttcttttagtgggacacatggtttatgacagccgttaagctttgtatcttggaattttagtcactggataaagaccaactaaaagctttctttggctttaaagtttaaaatcttggaggaagaattttgtttataaaagaatttggctattgaaaaagatttgaacattttttgctctaagtaattatttagtgttcctatccccccttttcttaaacccctcactttagtctcatctgcttttcttcagcatcattcctctaattctgagcctgggtctccttgcccagtctttcccagtcttaactttcctccaggcatatttggcccttagatttcctgttccttgtgattgatatgccttttagtctttttatcttcttgtcttgagtgaagactccttatccaaggagtcccattccaaattctgtctgggaggaattgaggcatgtaatgtgtaagtttcaaaatgacataaaccatagctgtattaaatcttcctggtgcttttagaaggttttcattaaggacaaaaggcagttattttatatctactgtagtcccaagcagcgtgtaaatagggtagaagttcttaaaataacttaaaaaaaaataaagtgggacaccttaaatcatcagacaactagaattttcagcacttcactgaaagaagtgctaagaaatgaccttaattagtaaaaaggtaaatatatgtggaagcaagaaatgatcaatgcagc

SEQ ID NO: 25314 - DNA, 1083 bp, Bovine  19866881271798
  misc_feature (1)..(1): n is a, c, g, or t
naatgtagtatgctgtctgaattaatgaacaggtgaatgaaacccccattagattgagtatttctactgctaggtattttttaacttgtatatatgtttatgattataatataattgattaagatattgtctatttcagatacaaaatggaatctgaaataaaatccttattcagtgaagagaacattggaaatgaatgtctttctgaccttatgaattttggtaggttttgttttttctttggtcccacatttaaaggggagttttgttttaaagatgaaagtgggccacacatttcagtcttttaaatattaactgctgtttgtttttttctaaaggaatccaaaaaatctgcatcttaatgacctgttcttgaagaaacttaataatgtgttgctttgattttgtttcaccatagaacaggagttatcagaacaatggtgcacatatcttaaaaatgtaataaatcctattcagcaattgagagaagatctaaaatacagacagcatcacatttcacagtattcacactcacacagtgaatcaaactctatgaaagtattggaagaggtcagtatatctcctttacttttaatactgtaatatttggaagagtctgagataaacgtatatgttttatgtgcttaaatagaatgtatagcaaattctgtcccttaatctgtccaacatgctcatttctcacctagcaatgttacaataacctcataaccctgctttcctcctttctcctccttccagtgtattctgagatcctatcctagggacagggattaagtcatcctcctggtaaatcccctcagggctcctactggccagggttcctcctgtaataggggtggggcaagtgtgcagcctgagctcctgacctttagcgcaagatccttagcgtgagacctttaaagagagactgttagagtgagatccttagagaccgttagcatgtaaccattaaggggtgactgttagcgctgtggttacaagtcccacttcaccagcagtcagccatgaggtggtcctcacagcacgaagtgtggtgagaagggatcaccaccctctctgggg

SEQ ID NO: 25315 - DNA, 787 bp, Bovine  19866881304007
  misc_feature (1)..(1): n is a, c, g, or t
ncctactgtgagcaaagactgtccaggaaagagatgggagggatggtcaggagacctataaaggtggtctgtttaatacaatttctgccctcagaagaatacagagttacaaaccatattgtatatttttatttgtggtaattggcacataatgaatattcattcattggaaccagaaaatccaagaatttgtccccttatttttagttaatcaggctatagatatatattgtattatgccagttttatgtaaatttgttaacttaggcattattattattactaactattaggcaaaattgtttaatttttaccattgaattagctgtacctttggtttacatttgaaagtaatagaatatttttcctttattaacagttaaagtcaaccttgcctttgcatatttaaaatgataatttccttttcagttgaataactcagttcacaattcctgttcagagttaaattatgaatatatggaataatttttcccctgtacatgcaaactttatgatattaaatgtgaaatgagtgactgctgagttggtgagattaaatggatgacaggatcattcagcattaaattctttgtgccgcttgattgtttttctttgcagaatcacttcgggagagaaaattatttcagaaacagagttttttcctgcaggtataacccttgaagtcattccacagctaccgcagaacagtctgtcttcatggtttgtgttcttacctaaattgtaggttttgtcacttttgcagaaaggggtccattcggcattactg

SEQ ID NO: 25316 - DNA, 1283 bp, Bovine  19866881330849
  misc_feature (1)..(1): n is a, c, g, or t
nacgtattatttaatttttttaaaaaagtcttattgagcaaaatctgctttcatgttaccgttttattcttcacttttgagagacaatgatatttttagatgcaataaagttgaagtgaataaaattattttatatttatattattactcaattttccaggttcaaaagcaagaataatagaattggactacttctttgggatgggatgaggaaaaatttaattaatgattatgaggccttctgaaattttatttgtcacataaaacttttataatatcacctcaaaccaactaccagtagtcattaagaattataagactggaatagaagaatgatggttctttttctcaatttattactttttagacattagcaatgctcatagtttcttacattactggttatccatagtctcagttctaatgatatggttccctcaaagggttatatttatccacaggcggacttcaaggaagtaggaaaaacttgttattaacagttggtttgatatattaaatagacattataattcctctcatatcaaaatttggcaaccctgtccattgaaattttaatcctgtctttgcctataactgcacaggttttattattttaataacaaattctatctgtatcatccaggttaaaaaatagcatagaccaattgtcttggacacaaatctgtcaagctgatatgtttccattttcttcaatctgatttactcaagattaatttgatttcatatagtgaagaacaaaaacctctcataaatgactctcactccatcctgtaaaagcctgatttttcagttttctgaagtatcaaaaatgtagcctcatgcaccattatactgtatagcttctatgtgaagcaattatatcaagaaggcagttgtgggctaccgtgatactaacaataaagacttctgaactagaaatttattaccactagtcttgtactttccaaaaagacatttaaatgaacataacatatacgtcaatacacagactaagttattaattaagcaaaagcaaaaatctaagactagttttggggatgtccttgagaaattggacctatttttccccttgataaaatgtattccactgaagtcaagagaatttaaacttcattttattcctacagcaaacccagaataggttgagcaatcaccaaatgtgactcttagtctaagaacacaaagtaaatcttttcaacaatgtatttattttaggagaaagctatgaaatacatatgacaaaaaataaaaatctcagtttg

SEQ ID NO: 25317 - DNA, 1710 bp, Bovine  19866881359805
  misc_feature (1)..(1): n is a, c, g, or t
ntacatgacatgacaaatacctgtaattttaatcttcaatacacctcatttacaaagctctattttactgatttattttacagttgtagctatagatgagcactttcccctaagtttctaaaaagtagatagctgaacaggaatgagtttcttctgatgcatctgaatagaaagcttctcccccacaccacaccacttcaagcatgtatatgtaccagggtattggtaaattatgttgatgaccagaacagtgctgtgtcatacaagtgtgatgtgagccacatacataatttaaaatttttaactagtcataataaaacattttaaaagataaaatttattttaatattatatttttaactaaatttaacttagtgcaaaatagtatatttttaatatttaatcaataatttaaaattattaatgaggcatattacattctttttttacacaaaatcttttgatatctggtttacgcttcacaccacagcatacctgaattgggactggccacatttcaagtgctgaatagccacaggtggctagtagttactatcttggacaatatggcttaaatgttttactaaaacaattttttttaaaaattggcttcagttgaacctatttatttattcagtatgtttgtgaagctatttaaattctgtttggactgtatttcattagtaacatgacaagtttaattacttgttttagacttagatgagattgtggctttaatttcctaacatttggtgaattaatcatatagatgagacaaaattgtttgatgctccacttagctatgtcagatttgaagccaatatgtggcaaaaactatacagtgataacaagtaatttctactttattgtttgaaaaatatattacattttaaaatattgattcataattatcattcttttatgagatctgaaccttgagtgctatttaaaaacccacaatgattttaacaattttggccctctgggtgtacattgtgaagacccactagttttatattttttcaactaaaaattttcaatttaccctaactattaatgactttcaaaatagctagttagtagtatctgtccctgtttccactttttcctcttctatatgtcatgaagtgctgggaccagatgccatgatcttagttttttgaatgctgagttttaagccagatttttcactctcctctttcaccttcatcaagaggctctttagttcctctttgctttctgacattagggtggtatcatctgcatatctgaggttgttgagccaccagggaagcgctaaaaaaaaatttgaatgaacatattcttacacatgtgactatattttgatgaatacaagatagaagaaagagaaaggagcataacaaacaactgtaattcgcttacttggatgatgttacaagaagttcaaatgctggagccttaattgttgtttagtcaccgagtcatgtctgacttttttgtgacctcatggattattgcccaccagactcctctgttcataagattatccgagaataccggaatgggttgtcattttcttctccaggggatcttctgacccaggtattaaacctgcatctcctgcactggcaggtggattctttacccgtggagccacctggaaaaccagagctttaattagcaggggcatttttctcgagaatgtagtctcagatctttggaaagttt

SEQ ID NO: 25318 - DNA, 1128 bp, Bovine  19866881374322
  misc_feature (1)..(1): n is a, c, g, or t
nttcgccttcagtttctcatgcggaagggctatgtcatatccatccttggatccccagagcccaactgcagtctcctcacttttttcctcctaccctttaccaagctctaaacacctttgttcgtccctttccattgaccatggcaggtctgactgcatggaggtgtggacgagcggaggacatcctaccttccagtttccagcagagaggttctggagtgatccggcagagccttccaaggtggctgggttggaactttctgctaggagggtcagatacggttttaccactgatgggtgccacagcatctcaacgcctttgggggactttgacagtcctgggataggaccaactccatcccactgaaagacaaagaacatatactggtggaggcaaagcgaacacagtattcaacatttgaaaacattcctttctgctggactcagctagagctatgcagaaaagctgaatcatgagaaaaaattttttcttgccaaatatgtgatttcttactcccagagaaacaaaactttaagagtttcatgtcaaataaaatgctaacttgatcctcttgtggtgtcctctttttcttcttcttcttcttcccccagcagcttggctccgaatctttgctgggagactcttttccgagtaagtcatctaattcgttcagccccagcagccgggcctgaggcacctccagctccagccgatacgacaggttcctcagggtgcacacgcagttctccacggtctgaaacccaacacggcgcagggttaaaaccatcgtagcgtgttagtgcaaaatgcttctgtacccagcaccagtggcactaaataaatgtagaatatgaaagaactgtttttcactgatgggaacctacaaactgaaagttagaactctgattccagactcaagttggtgggaccccaagctcacagagtgtgcagagccacccaaagtagagctgaggatctgatttcacactgagtgaaatgtgtggggctctgggaggggagaatgcccaaggtttctgcttcagggctgctgcagtggcagagcccccatattaccagaaccccaccccttctcccagctgggaactctcatcatgacagcaggtgtg

SEQ ID NO: 25319 - DNA, 1187 bp, Bovine  19866881461161
  misc_feature (1)..(1): n is a, c, g, or t
naaaaaaaagaatactggaatgggttgccatttccttctctaggggatcttccccacccagggatcgaaccctgtttggctggcagattctaccattagccacctgggaagctgtaaagtgaagtctatggaaaataagtgctcaaaaatcactaaaataatttttcaaagacaaatttcattcttttatgggaagaaaggttatcaaatgcatcaataaaaatatttgctaatgggagatatgagatagacttctattaaaaaaccaaaaagaatcttaaaaaataatccatatatattcaccaccaaaagcaatgaatggagtttgtgaaactttttttgtacttttctattggattatctatttggacaaagattatcaagataaagctaaaggcaggctaactttggtataaaaatgaaatgtggagttatagatggtagcctttttaatgttttccaaagtaacaactaagcttccccagtggttcagtggtaaagaattcgcctgcaatataggagccgcaggagacgtgggctcgatccctgagttgggaagacaccctggaggagggcatggcaacccaatccagcattcttgcctggagaatcccatggacagaggtggtgggtggactacagtccatggggtcacaatgagtcagacatgactgaagtgacttaacatgcgcacacacaccaaagtaacaattgtaaactgaggaattgctgctcagtgtgttgaggacgtggtaatggaaaaagaggagctttctgacttgacaatttctattttattttagctacctaatagaatatttcttcacattatcactaaaagcatgagagaatttaaatatttatttgacatgtttgaattaaacataaaatgttaaaggctaaaactggatatttgatttttacatgaagtactaactcaaaatatttaagcttctcagggacatgttcatacatcatgaataactggctcgggaacattcagatatacactgactaaagcaaaatgctaatattcttatttggtggcacaaacacccatgcacagagtgacaaatgtggagttctaagctgatgcccagcatgctagaggtaattttgcttaatgttagcaaaatctcattctacgtggaaacttagtaccacccactgcctaagagcacatgtca

SEQ ID NO: 25320 - DNA, 1658 bp, Bovine  19866881668181
  misc_feature (1)..(1): n is a, c, g, or t
ntaaaccactactgatcattaaagctggtactactaaattctggaattgagaaatgtgaatagatttttcttgtctccataaatcttaagctacaaataaatgtataaatataatacacatacactgccaagtaaccatgctcaatttatattatgacttggtagtttcatattaggtagataatgtttatatacaaatcaaacttgggctgacatatagcattttgaaactggaaactcaattctgtaagttctctggtccaactcctttctatattgtcatctcagtgacctgtttacacactggctactcccattccaaagcaaagcctacttttgcaaaaaatatttcataagcaatccatccacacaccaacataaattgttacaggtataaatacagagctataaaacagttgttaatattccgtaccctataactatggctaaaaaatacttctataataggctaaaagctactggcagctgtttctaagacagaaatatcagaggttgttgctagttttatattggaactgatacaatctattagggaaatagttttttgaattgggaaaactcatatcctcctttcaaggtcaaggtccaagtcttaaagtatcttgtgttctcagcaacttagtactgttcccaaatagaaatgatgaaatatgtagtaaagcagctaaattagtactccccatccagagtatgcaccaggtaaattagtacataaaagcccttagtagtacagtctggctctacttcaaataaatttgatttattctaaaatgaaaaagaaatcaccaaactttcatgcactttacttcttgtttatcactaaatcataacaaatttcttgagctcagttcaggaaagacactgtaacaattcctcccaaggataaaacctcagaaacaaaaaagctgccaagactccctcttcctgtgagaaattatgacagaacagaaaaaagctgcacattatggatgttaaggaccaagccatgaaaaatcagcctagttaatcaaaagagaaccagatctagtagacgctgtgtttccaaggtcaggttgaccctggattgccccctggtccctcagggagcccgcacacatctttcggtagccttgctggctgcacaggtaggttactgggagaaaatattgaacattcatatatatgttcaaagtgatgggaaagaaatatcatatgaggaaagaaaaaactcatatactgcaaataacaccatcttctctatgcctaacagggagcttaggataaatttttgggtgtaatcacagtgacggtcctagcttcttaaacagctatgtctataatcttttcttcttaattctatttcttgttctaattttcatttcatacacacacacaatacacaatatgtaaatacaaagaaattatttttgtgtgtgtgagagggtttgatgttttaagaacatattataaagaggaagtacatacacctaaatcaatatgtaatttagatgtgttaaagcattaatattcaaactacattagggcaagcaatccattttggagtttatacataacgtggattctacttttagtacataattttcatactttatttgaatacagggcatttacttgaacattaatatcttacaagaaag

SEQ ID NO: 25321 - DNA, 1608 bp, Bovine  19866881673552
  misc_feature (1)..(1): n is a, c, g, or t
ntagatggatgcttactaggtattgaatttaaaatgctgatagaaataatttgatgcctatgtgatatcatttgcttttagaaaaccatccttccactcttttgtcatatacctgaaagcattaaaagcccaggactaagggtttgaagatttttgactcatcaaatttcaggaccccaggcccttatcagaggctgtttcactcagatctctactcttggtgaatgctggcctccattcactgttcctccactcctaagaatctatagctgcttccaggtaagtgctcccaagcaaaggcaggcttcactggtacagcctttcaaaattcatgttttgtccattaccttttcaaagtattgctcttcccctaccccatttagtgaatgcccctaaaatgcttaactccctgtttttcaaaaaaagaattgatttgagtagctttccaaattcctcaaaggaaatcctcatttgatccactaatttctttcaatttttgagaagtttttcttagctctttaagaagttattatcattatgttaaaaaaatttggctggttattaatatttttctagttgtttgatagtttagtctgacatacctaatccattatgtttattttcaaattttaatatttattattataaatttaatgtttttttaaaagtgagtccatttaaagaaaaatactaatatccacagattatctgcagatctggttatgaagggatactttagtgactgaagtttgcaaacactggtatagtggatgggaccagagccatgactcagattgtcatggtttatgtcttatctagattgcttatgagcctgttagccttgaacaagttgcttaatccctccaacatctgcttcttcatttataaattagagacaataaaagccctaactcgctatgttgtagtgagtattaaatgaggccacatgtgtaaatcacatggcgtaggccctggcatttaataacatttcgtaaatgttagctataatttccttatttgtcagggagaagaatggtaatgatatatttaggtcaatcattagtctccttgattatgacaactcattagcctaatttggaacatttcttggtagatacgaactcttaagtatcaagaagtttcatcattacctcagagagatgtagactgccttagagtagctccccagattctcaaaagaacttttgaatgaaataaacagtcaaccctgatgtgaatagttggttaggttgtgtactacccaactttcatctctaaaatggcaccatgccttgagccgtgttctgtattcactctgcacaactaacacgccgtagccctgggagtgtttttcaatagtgatgtgtattcttaacacatttgcaatactaactgtcacaccataatctgttttaattattccaatttttttaagagaatttcttgaattctagtttctgccctgttactatctgtgtgacttgaacaaatggcttactatccccaggcctcaatttctctgtatgtcaaaaacaagagttggactaaattgtcttcagttctaaaattctaatattcacatgcaaaatacaattctagtatctttgt

SEQ ID NO: 25322 - DNA, 686 bp, Bovine  19866881759578
  misc_feature (1)..(1): n is a, c, g, or t
ngtattctatttttaaggacactatttggagggggacaaggtggggccctggacagaggattctgaggaaggggaggagacatgcaccccttacatcctccctgtgcccacttcgctccctcccccagggcctagcagacgcccacccccattctgaggaccatcccagggagggggaggacatggctggccgctgggaggtaccgtttctcaggcttgtgagtggctccagcacgccccgcttgaaggcggccaccgggtcctgcacacaggacctgaggctcagcatgctctggagctggggctcccttatcagcaggtcccggtaggcggccagctggtgggagcggcagagcagggccgcgatgctgtgcacgaactcgggcaccaggcacgtgtaggtgttgtcggcctggcagtagtggtaggccacgacctgcggggaagcagagccgtcagcatcgcctgtcctctccacacggctccttccacgctctccaacaggatgcagtgctcccattctctaacaagacgcgttccttctattccccaggactgagtcaccatttagcttaatggactcagtcattcctccactttggaagaatgctaaaatttgctgaattctaggcagactttaagttgtagccacaagtctgtcatgactgcccctaagatcaccacaa

SEQ ID NO: 25323 - DNA, 929 bp, Bovine  19866882119051
  misc_feature (1)..(1): n is a, c, g, or t
ntcctcctgctttctaaaccttaaatttctcttttggccactctatctggaacgataaggagattctgggaaacacggttcacactgtacatatccccactaaaatacccaaaagggagaaatcatagtttgtacagtttaagaaaattattaaaattctaatattaaattaaattataatgttaatgactccctagtagactggttcttatatttacaagtacaaaaaagagaaagtcatggaaaagtaaatagttacaaaatatcactatattcagacttatttaaaactgaaaccactataaaattttgttcttaaaattcccatcatagataccgtttcagtttctcatagctacagtggaagaatgtccaggagaattggttgaacactgaatgctttcctgagtttgataaagtatcaggaacatacggctggaatccatggactacaaagtaatccatgccatttaaaaaggtgatttatcccagtaataatcccactaatagtttcacacttggtgcttattaatgctcattacagcctatctccctcggctccattcagctttaatttcagctgttttctagcacattaacaatatggcagcccaccaaagggagggacagtcgcagacttaatgttttgtacaaaatcatttggccacagaattggatggattggaaaacttaagagcaagattccatttctaccaagaagattccaaggagctgtgcatcttgaagtcctacatgcagccttgtcttcttgacagagtagctgcctcagagaaacattagcttgagagcttctgaagaagaggcctctttggttttgggagactgcggagtataggagagcacactcaattccagcctcggcattctctgtctgctctctcccaggcagaggtgaggctggaggcatg

SEQ ID NO: 25324 - DNA, 2667 bp, Bovine  19866880494272
  misc_feature (1)..(1): n is a, c, g, or t
nctaagggtttctcttctaatctttcacaaactgtcagatattcaagttggaagtgatttattagcacaacctcccactaatagcacaaatttactgtataatatctgacaaaaagagacttgatatttacctaagaaattccagtgattaatttccaacgtactcattgtatttacagacagtgaagccatttttttttaaaaccttggcttctttttcgaaatattcctttatacctcttaccataatccaaacctttaattctcaataagctctcattgcccctctatgcttcaatcaagctaacctattttatatataacagtctaactcctatctacagggagttccttcctttcttatgctctttgtcaaaatagtagtgtcatcttctttaaggccaacttgccaaaatatcaacttttccaggaagttttcagcaactttcagctcttctctcagtagctgcttaattttacattcttcaattaaattactctcttctaactaccaaatgcttttctggacattcttatgtctacaactggaatttccattccccaaggatagctagccatttcttctgtacctcctgcacgtcatttaagtgctctctttccataaaagcacgtggacggccctccttattctatgcatttattttttacttcttaaatgtatttctagatttaatgtggaaataaagcaatacttcctaaataactaccgtgaaagcttttccacttcacagtatatcagcagtcttaaggaaaatgtgccagtatgtacttactactaagcaaatcttgtagcaagctgatgtactcaattcagtaactgaaacaatctaaccctcagattctcagatttatagatttattagtaagatttatggagtatactgctgccagggactgtacaaagatttcacaacctgataatgctaaatgtgacaaaggtaaacaaggatataatagaatgaaggtggaaataagaagaggaatgagaaagaaaggaagtataagaatgtgaagtcagaaatagtaatgatgatactttatttcaggtgctttaaagatgctttattgatctatataaaacaaagatagaggattcaaatgcaattttatacctagggcttccacagataactgtataggttttagaggaaaggtgtttggtttcaaatcttagtttccagctctatcaataattactgagtcacatggagcacattatttaacttttaagtgctctatctcataagtttatgtaaatattaaataagttaatgatacagatgtttaaaacagaatacatacataataaatagttgacaagtgcttctgatggttactgtcaaatgttaacattatcacatgtattatcatgttttatattaatagcaataaatattttgttaacctcctttctgaacttagagtcacctcactgttacctcctacttttagaatcacgatcacacttcagagctgaaaacactatttatcatacatatttctaatattaacttctaccaacccaatttttggaaatttctgcatttccaaaatgtagaacaggaaaacctgttctactcaagacacttctgacaccctaattctctgcagacactgagtatcctgcaacttaactgaaatctgatactcagtgcagaactcagtgcaagactgcttcccatctcagatgctaagagcaaacactgggtcctcaggtacccagaaatcagtccaatatggacacatattgggggttcccacaactaactttcctcaggctcagtaattgctataatgactcaaagaacttagagtactagtttacttattattgctggtttattataaaatatataaatgaatagccaggtgaagaaacacattaggtgaggtccggaagggtcccaagcacgggagcttcatctgtccccatagttagggatgcaacctcctggcatatggatgcattcacaaacccagaagctctatgaactccactgttacaggttttcagagattccattacacaggcaaactgattaaatcattaactattcttgggttctagctcaattcccagcctctctccaatcccctatccctgctcccccacttccagaggtcaaaggtagagctgaaagttccaaccctctaatcaaaactgcagctcttttggcaatgagcccatctccaagagtcacctcattagcataaatacaggtacagttgaaaaggccttattttgaaaaacaaaagatgctcttctcattcttaccactcatgaaattcctagggttttcgaaactcagtaaccagagatgaagactaaacatattattttttattgtatcaccatatcacagctattttaatattttaaattcagaacattcaaaaccaaaatatctccttatcctgatccttccacttgccatatttatttcaggtgctcaggacaaattcttggccatcgcctccaagtaattttatacattttcctctccttcctctgccctccaatacagctctcaaaatccatacatgaacctcctaattatgtctttcttcactgtcacctctgctgcaatcctcctgggtttgtcttccttaaaacatcacttgttaagacacattcttggctttaca

SEQ ID NO: 25325 - DNA, 3338 bp, Bovine  19866880496671
  misc_feature (1)..(1): n is a, c, g, or t
nctgccttgtctatttgtctgtcttacctttagaatacatttctgagcccaggagacctcagccagaggctcagctgcttcagtgtgctgtccacaagcaaacacacagtgcgtccagctgcctgatgggggactctgctaattggaggtctgctctggtcccctgtcaccagttggcagacagaacagactgggccgaagctgatttccagagtcaggcattcatttatctcagtgataacagggtatgtgtagacagaagtagcaaagaaagcaaagggcagctgcagttgaggtggggacagtactaatgcccccaaatcaaagacatgctgcctgtagggccttggcagtttagttctctctccaaagtttaattagtcactaattataaactgctgtcttttattacggatgtatttggccagtgctgcatttttttttttttttttaagaaacatgttttcatctcaagcaagttgcaaatgcttaggtatcaatgttagaaactgcagtcaagtacaacctgtccccaaatctcagccccttgaaacacgatggctcattaataacttaaaaaggatgatgacactgatgctatttatagagtcttgccaggcaggtctgccagcattaaagaaattaacatggagaaattgtcaactggaaaacattagtgtttatcaacaaatcaatcaaacttcaacaactgtaaaccgtgcttttagctaagtgaaatgtattgacaatgacagccacttacccaccttgctgaggagccccaaatccccatgttggtccccaaccaggcagactctccctttgacattgtagtcatcacccactcctgccttttagggaagagtcagtctgcctctgttccacatttaagagcaagctggagagactgggctgtggtctcagttgtatattaattagctctgactgtcaatttgtaaagtctcaagcagactaaattcaataccaaggttagtggctccaggaaccaaattctaagtttatatgtacttcatgaaaggaagactctgatttaaggagtttttcttggttctctcatcttttaaaaagcagtgcttgactctcattgttgtatatttagagatggtgctattttcatttctgggctacatcggtgatgatgacatggcttcggaacctgaacaaagctggagagctctgataggctgctggtgatgtcatctctgtgcctccaatgcctgggaaaagcaccagggactgactgttttcctgacttttcttttctttcttccttcctttttttctttttctttttcccccaaatatgaaatctcactttcacactaagagtacgtttggagtttcatatcttagcaacgttatcactaaagtagccagtgaccgctttgcacagactgacactgcttggcttgacacacagtttcagttctcacagagaggattttgtgctgcatcacactgaatatcgctgctccgtaatttcttgtcattacagcaaaccctttcacgtgctccctttctgtaacccagatgatcaacacttgtcaagttcacctacctaatcaaaggagcctaacagttataggaggacttaaaaatcaaaaaagagaaaatatggccagggcacttagcttcagaattaatatcaccccagctcgtcccaaggatgtctcttatgtaatgcacagccttgccaacttccaccttttgttcttcttatgtgtatattcctaaaacaacaggatggttgaaatgatgttttcactgaagttggggtgggaagacttgggggaacctggaatgagataaaggagtcctctacatccctatttagagggaggggtttatttttgctcagtatgtaacaaatttcatattattttaaaacaaaacaccaatcctgcagttttacttctgacatcctacctaacaccctaagtcccaagttctcatctgttaagtgagacaaaaagacacacctgtctgaagagtcagcattcaacgcactgctgtgtctagagcccactgtgcacgacaggagcaaaactaaaatctgctcctgccaatcagattccaagctctgtgacacaagcaaataaagacaaccaggaaaaaagggaaagttgaaaattgctaagcagtctccacggctggccaaggaattaatccattctcagcactagagtcctttcccctccttgtagctccacaactggttttcactcaggagtaaaatctatagtgctcaaatttgaggggatgtggagggacattaaaatgaaacaaaaaacagaacatagtttcaaaattaaaaagtaaaattcagatgtgtctctacctgtcactaaagagtttggtgagtttgaagcaaaatcttccttaccagatttttatgcaggaaatttaacaggaggatcaaaaaaaaagaaaagaaaactagcagtcgtaaatggatattcacaaaatactgtactgaattttgtgaaaattacaaagtaaatattagtcatggacattggcatcaagacttagattctgattttgtaaaaaatgaatgagaataatagttcaaattgcaaatatgaattcaagatagcaaaagacgacctgtcaaaaggcagtatgtgattaaatatcaattgcactgtacatataattattttatggatattcaaaagaggaagattttacctctaaatgaaatgaccagggtagttttaagaaaaggatgtgagctagcctctgggccacagaagatggatttgcttcagataaatagctggggttgtgggggggtggggtggggaggtggtgttcaagacaggaagaaaggtaagagcgagaccagaaaaggtacagtttcaggaagtggtgggaaaacatgatttgtaaaaaggtgtggtgagaaataggattggaaaaccctgagggttccactcaggtcagctggcgctagaatgtagagcatttaacatagaagacagtcaggcatttgttcttaaactcagttttactgaggatgtgaaatgttctgtctggcagtgcacacactggtttggtgctttctgcccttcttgtacatcttggacactgtacacagttaccaaccccctttcagagaacaaggtctggcctagattccagtcaaaactcatccattaatcatatattaacactggctttgaatgtgtttgataattaaacattctactgtttaaaaaaatcggcataattttttcagaataaaaaatactgtccttgtacctttttatttcagcatcccatattattctgatacacaaaaaaatgtaatttaa

SEQ ID NO: 25326 - DNA, 1902 bp, Bovine  19866880517905
  misc_feature (1)..(1): n is a, c, g, or t
nagcaaatttcacttcacttcacttgaggatgtcagagtctagtactttcttggaggtcttcctagaaaaaatatgtcatatattttttaagagaatttcagaaatttgctggacaatgtagtcaacctttaagcagagtacttgcatttctttggaaggacagactttcccttatcatgtgtaaaaatccatttgttgggactgccttttgtatttcttgcctttgtcttccttcctctcccgggaagtctcatactgataatttatgcatctagggagtgaccttgtgatttcccttactctctttggaagtcaaacagccaatatgttgggccaaactggagagacaaagctgtttctagaaagctaaccaggttatgaactacctgattattaatatgagggtgaggcatgaacgcatgattgggggtaagtgtaaagttggccaggaagggatttggctgaacggaataaagggggaaaatcatacagtaacaggtgaggtagtgagtttaggaagtggggagaagagcatatgttaggatatggatgagtctgctgatcctgcggtaactctaaacagttattaagcatgaaatttagcaaatgcttcctgagctaaatcacaccatttaaaaggagataaattcatacacatatggacaccttatctttgacaaaggaggcaaaaatacacaatggagaaaagacaatcccttttataagtgggaaagaagtcatctgggaaaactgttgaaaaagtgagttctatgagggcaatggtggaaaattgaagttggctaagtcagtttaggctcagttataaggtttgaaatggcttaaaatctaaaaggcttatttattctgcagctaacaaggtgacaatttttggttgtgtatggaaatgttacaatcataactccatgtcaggaatatgaatacagctatcattcaacaaatatttgttgggtgtctactcatttgcaaggtactatcaattctgatgagaataaaaggaagtataccacttaatccctgatctaaagtttttctttttacattatggataaggaaatacatgccatatccagagaaagataaataattatgaattattttaaaatcagtagtactggatgtacttgtaacacatgtacacttgtatagtgacacttataacactcttttggtttccattgagcataatctggaatcttccatttgaaattgtttgttataagtttgtctcttcattttcagtttgtaatctgttagttggctctaaattgctgcttgtaaaagagaaattacatagcaaatgtgagtgctgcaaacccactaccatgagaggatttataaagaaaatcttgctaagtccccatctcttctcaactgtgaagtgcattagctgaatggatattctttgtttgtctcaatgattaattatgtcttgcactgtcctagaatttgatatttaattatcctaaaatgctttatgaatatagatcaggtgtcttcaggatcatgtgagtgtgccaggtatgtttgtcgagtgatcttttctctaatcaatgtaaattttgccagagacaggaagcaatagtgacttcttcgttgtctgattttgaactatagctacatctggagggaagggaacaccaccttagagcaccttttatctcaggccacaattggaatttggatgcttatttcagtctcagctattaattctggcttatttccttgtcaggcacacacacagtgtatgtatgtatgtgtgtgtgcacattgtgtgcacgtgcagatcattgacattatagacaacacaaaatgagtgtgttttgtttctgatttgtatttttcttatttattcttgggaggaggggatcacaaggaaatcg

SEQ ID NO: 25327 - DNA, 1610 bp, Bovine  19866880532387
  misc_feature (1)..(1): n is a, c, g, or t
naacagtgatgacactgactctcaatctctttaactttggattccaaacacagtgacaaatgctacccagctgtctgtcagaaataaatttctggattaaatcaacaggccttcaactcagttcagataaaattgtggccacgttggcagcataagagcatgactctgaggaactcacctgaaatgcattctcttcaggtattattatgcagtaatacctcagagaaccaagaaaatgtaagtgggtttgagttaatttgctggataagcaagtgaatatagcccctccctacttcaagcctgtattccacaccagggagcatgtgttgcttctctgtagaaatctactgtgttgaggacatgagcagaactttgactcaatcaaatatgcaaataatgattaagctataggtacctatgttgtgctgtgcttagtcactcagttgtgtctgactttttgtgatgctatggactgtagcctgcaaggctcctctttccacgggaattcttcaggtgagaatactagaatgcattgccatgccctcctcaagagaccttcccaatccatggatcaaatccaggtctcccaccttgcaggcaaattctttaccatctgagccagtgcctactggtgcataataagtacctcagtaacagatataaatacacgcaagacactattttctcctttgaccacttttgcatctacttgcaaagaggagttatgggtataaaacagagcaaactacagacaagtagtaggaagactcaaggaagtttaaaaagaggagacaaaacctagcaaagcaatttgagttatgcctcatagaggaaaaagtgagttttttctgtatctttgtcatctcttctctgcttctctgatgctaagaaactatttacttttgaacttcttgtgaaataagcaacaaatggtacccttaaaatttgagccacttttagttgggaattctgacttgcagatgaaagtgtattgtcatgaaaaccagctgttctaggtttaatcccatgcaagttttaatttactgactcatgtagaagcatctaaaagattcccttgggatgctgccatttttcaaacacattgtgttttgactcagtgagagcatatatttactaattcataaaatacacatttatgaagctatcttctatgagacaggccctatgctaggcatggaaatttaaagattaatgagacatcattccatttacagaactcataatctactggttgagggtggtggtgaaaggagacacagaaacagtaagatcctttgaggtaacaaaaaaagaaagaagcggcatggaagggaagcagtggtatgaattccctagagaaagtttctccaggatattttagggagttttttattgctaagaattaaggtgacacggtaggatagaatcatcattttacagtcaccctttgatcatgtctagaaataatgctttgtgcagggcatatggaaacattttctgttcaacaaagatacaaagatctctcccaggggacgagaaaagtcctgaatgcaaagttatgggctcctgggatctgtttccatctctgccattctctgtttctgtaactg

SEQ ID NO: 25328 - DNA, 1324 bp, Bovine  19866880537550
  misc_feature (1)..(1): n is a, c, g, or t
nttctacaattactttggcgatctcatttcaagcatgcaaatcatattattgaagagcccagcaaaagccatttgttccttggaaccacgagataagttctgtggggtgaatgaatgcagcttggagaaggccagccctcctgtctcataacctctactgcatggtggtaaaatttactcaccttaatatagacatcaaagaagaaatgaaacaaaatcattcccaaaatgaagtagttattttttttattccattcatgaaagatctactttgtaactcatttatttaattaaaaataacatcatttaaagaaaaaattagaaaaaggaaaaaagcacgtgttgttgctaaagttcatggagtcaaagccaagactgctagggagtgagagctcctttatgttccacaaaggtcctgaagctttttccattttctctaccttctggccaactcagctgagctgtaacatggtcagtcttttatacatatatctagaggcaacataaatgggataaagcaatcatagcatagtagcattaatatatgttaaaattcgtttaacaaataccatatgaaaggttagtgacttccctggtggctcagatgctaaaagcgtctgcctacaatgcaggagacctgggttcaatccttgggtcaggaagatcccctggagaaggaaatggcagcccactccggtactcttgcctggaaaatcccatggacggaggagcctggtaggctacagtccatggggttgcaaagagtcggacatgactgaacgacttcactactactactacactatatggaaagttggagctttcctggtagctcgggcgttaaagagtctgcctgcaatgcaggaggaccagggtgtgttccctgggtcaggaagatcccctggagaaggaaatggctacccactccaatattcttgcctggagaatcccatgggacagagaagcctagccggctatagttcatggggttgtaaagagtcagacacaactgagagactaagacacatacaactcacagccacatatatggacggttcagtggggaaagaggaaagataaaccaccagggtgactactctttactggctcacagttgtaaaatggggaggaagtgcccactacactggctgatccagtgatatgtgctatgcaaagtgatagtgctatgcaaagtgctatgcaaaggtaggaattgagttttaatggagagatacagtttcagtaagtgatgaagatcttgcatgaagtcgctcagtcgtgtctgactactttgtgaccccacggactgtagcctatcaggctc

SEQ ID NO: 25329 - DNA, 561 bp, Bovine  19866880566924
  misc_feature (1)..(1): n is a, c, g, or t
ncactgttactgttttaaattacaacaactcctatggctgttaggaatccttgatcgtcctgccacacttcagtaacagtattccatacacttccttcttaccagaaatctagcaatcttttatgtataggaagcattgccttacttttttttttttatcagaaccttcaaaactgcatttacgaaagcagcaatctgctatataaatttgaggtttagttctcctagcaacaaccacagaaaaaaattcataaaaaaagcagttgtgactatattgttagaaatattgaatccagctgaagttctttctcttgcctttcccaagcactggtataggatatggctatcgagtctgtcaactggaaaattcttcctaaagggcaaaatgcaacattatggatcacagtcaaccaaagggggaaaaaataaagtagaaaattgccctctgagctgataaaaacccatctgtctctcatgacaagtcagagccattcttcacaggctcccatcctgaagacatttagagggtcataatttccagttccttttccttttattctt

SEQ ID NO: 25330 - DNA, 1881 bp, Bovine  19866880628788
  misc_feature (1)..(1): n is a, c, g, or t
ngataattaaagcaatgatgaaatgtgttggttgattccaaatttcctcacaggagtgattaattgcattttggactttgagaaattccaaaggagattgcaatagaagagaatcttgatcttggcctatgtctggctttttttttttttttttttctcacttcttactgttattaaagttgtatctctggatacataaagacagaaatgtgcctagtgcttaagcagatttaaagaatgaccccccactgtgctactgcacattagtaggcattttacaatgtgccagagacatgcagtcaataatttaggagaaaattatcaatatgtagatatttcataagcccacagtcagagtaacttataaaactgatgtctttggagagatctcttttttttttctttttttcttctttttgatactgcaatagcatcatttaatttagcatggccaagatctcaatctggctcatagcccaccagctggttcatggagtaagtgttccaaaccaagggcattcagttaagggaaaaaacaaaatagaatccagaggaaaaggatgcacttttctatctacagatgtgtggtccttgtagctcctttagctcttttccctgaccagaagtaagtgttaggtcacatccccaaaataggcagacttcacatggataaacagctaggatccttctctgtatcattaaactcataactaatattgaccaactactctaaaatgctagacactgagtcaagactgctacaactatcactacaggtgaagatacttagagagtccaggagagtggactttgccaacacaggagctggagctcttcacccagcggagttctccaaagctgatgctctcaaaagcaaaagtgaagtgaagtgaagttgctcagtcatgtctgactctttgcaaccccgtggacagtagcctgcaccagactcctccatccatgggattcttttaggcaaaagtaatggagtgggttgccatttccttctctagggaatcttcccaacccagggatcaaaccccagtctcccacattgtagacagacactttaccatctgagccaccagggaagtaactgcctcactatttctgatcctgccaaaactataaattattcctcaggacactaaataccatgtaggtgaaatcctaacacattagcatttgagatgataataatggggaaattccatagcttctggcatcagaaatctggagctcaggtccaggcatacagacttactgtgatcttaaacagtttttttttttttttttttttaatcctttctaggccttattttcctcacacagttagggtgagaaagtgaaacagaatatgtaaaagtttgtcatatattctgatgagtcatgggaatatgagttgttgtctataaggaagaaagtgaagttagaaatagtaagtggctaggccagtcacatagctggataagttatgaaaggtttgaacagataattcaagtctcttcaaacacatttgtaaacttttctccaaaaggcatgtcaaaattaaattgaattaatgcctattagtcttaggaattttacaggtaatttgttagcactgttactggcacactgtggtaccttataaatactagatattatagttagtgtggcttcccagctgatttggtgataatgagttcacctgcccatgaagaagacacaggagattagggtttgatccctgggttgaaaagatctgctggaagaggaaatgtcaaccctactccagtattcttgcctgggaaattccatggacagaggagcctgtcacgctacagtccatgggggtcacaaagagtcagacatcacttagcaactagatacgcacgcaca

SEQ ID NO: 25331 - DNA, 718 bp, Bovine  19866880642538
  misc_feature (1)..(1): n is a, c, g, or t
ngcggctttattctctagggtccactctttgggaaacaaatattaatgttccactgttcccaggtcctttattgtgctataaaaaaatgttttcgattaacctgccaattgaatctggagagctggatagtttttaagactccctcgcttcttcctgaggcaccacaggaaagactggcagattaggattgtactggaaaaggaaagagaaagtctgaggtagaggtctggtcccttggaacagtgctgaattgagtttaccaaaagtaacattaatttccatgagctgaaggctaaaatgcatgaccttgagcaaatcatttaagtacaccaaggtctttgtgtccttatctctaaaatgatggtatgagatgtaacatttttttaaattttattttatttaactttacaatattgtattggttttgccgtatatcaaaatgaatctgccacaggtatacatgtgttccccatcctgaaccctcctccctcctccctccccataccatccctttgggtcttcccaatgcaccagccccaagcacccaggatcgtgcatcgaacctggactggcgactcgtttcatatatgatattatacatatttcaatgccattctcccaaatcatcccaccctctcccacacattttttaaggcttctttaagctctaaaagtccaatgtgtacacgagacacacgatacatttttccctccccc

SEQ ID NO: 25332 - DNA, 1931 bp, Bovine  19866880678138
  misc_feature (1)..(1): n is a, c, g, or t
natacctggcctcattgtccttcaccgtcattatcctttgctctcgtgggattttaattttatggtcgtgacttatttgccaggatctctgaaaagcctggagaaggcaatggcaccccactccagtactcttgcctggaaaatcccatggatggaggagcctggtaggctgtagtccatgaggtcgctaagagtcggacacgactgagcgacttcactttcacttttcactttcatgcatcggagaagaaaatggcaacccactccagtgttcttgcctggagaatcccagggacgggggagcctggtgggcttctgtctatggggttgcacagagtcggacatgactgaagcgacttagcagcagtagcagctgaaaagacagacttgcagagatgcttttctgatagactaacactgcaggaataagttgttggttggtttttgttttttaatcagaaggcctataagtctcagtttcttataaaatcaagataatgatacttgcttatgtggttgctgaggggatctcatgagattctactgtataatagatcaagacatagaattgtccccacatttagtagattctcaaagactttagattctttgcctctctcaggcctcactgcacttccacccataatattagccatggaaatctgcatacatgtgggaaattctttggaattaatggaaaatgttaatatttctcacatgtgactaatgatagctcttcaaccaaagctaaactctaaagtccttccggagctctgtccttcgtgtacattatgacagccgctcacatcagagcatctgtcaaaaattgcagtgggacacatttggcagctacttcctccctcattcatttaatgttatcagttaaggggcaaccataatcaaagaagcgatggtataaatgaagatactgagccaaatgaaatttaacttaaaaaaaaaaaagtaaaataaagtttagttccatcactgccccatgtctgtgagatgtgattcttgcattacaggatacactctgatttgtggttcagtgtatctatcctgggtccctgaaatgtggttttagtactagaagtacagagagcctttcattaccatgggatcaactgtaactaggtcacaaagcatggacctcaaggatagttttgcaaatacaaatgtgcaaatggatttctctgttcatggtgaattagatcagtcttgcttgtagtctgccattttgttgggaaaagactttccaaaacgtccatgttctctggtctctaaaacagctactcgtttgttttgtgagtgcgtctgctcttccataggatggagccaataagggcaatgacttaaaaagcattgccacctgaagtatctgggtacattaccaggctactgagagggagaagcagtcacattagattgatttcacatcagttgtattttgcaacatagacagtagcaacaaagtgagaagagggttgttgtgtttgaagcctcagagctgtctgggataccacctagcacaggcgcctgagctgtcaggaggaagcatggtgctatgcctacttttcctttggaggtcgtgttcttcacaccaacagcacctcttagctctaattcagacattaaaacagtactgactctgcccagcctaatcaaattgcagaaggaacatggcaccaagaagcctgggcatgaaggaagtaataaatatgtttcgaggtgacagtttcaaggaacctgagtctgcacgacagagttgaaggcagacatctccagacggcaaacgctgcctgggagaagtcttggaaacctgcactgtctgaaaggaaagaacagatcacaggccgggtctggatcagaggaaaagccccagagacgtgtgatgagatgcgccttggaaacgctgggagagaataagaaat

SEQ ID NO: 25333 - DNA, 1255 bp, Bovine  19866880741519
  misc_feature (1)..(1): n is a, c, g, or t
naaatgcaaactaatacagccactatggagaagagtgtggagattccttaaaaaactggaaatagaactgccttatggaattgctgggcatacatactgaggaaaccagaagggaaagagacacgtgtaccctgatgttcgttgtagcactgtttgtaatagccaggacatggaagcaacctagatatccatcagcagatgaatggataagaaagctgtggtacatatacacaatggattttctttattttgacagaaaatatttggcataaattaaccgatgtctaaatattataacatagtatgaaaattgtcacatctacacagaaggtgacaatttgctttcttgtgtaaggtagcgtggttaagatttggtggactgaagtgaaatttggatgtgtagcagcaggttacgcctgttcccccactcctagctctcagtgtagccatctgttttcatgcattgatattcttgagggcatgtgctttggggactgagaaggaagctggaatgagggcaccctgctgtctattgggatgctttagcaaaagatgcttcaaactagggcaccagctttgctacctcattcccttgtggttcagatggtaaacaatcagccttcagtgcaggagacccaggttcaatccctaggttaggaagatcctctagagaagggaatggcaacccactccagtattcttgcctggagaatcccatggacagaggagcctgaccggctacagtccatggggttgcgaagagttgcatgtgactgaatgactaacacttttgtgaggttagggtgagcaaactgggctgcggagagaaacagtctttccctgtttcaggggatgacatggtcatgttcaggaggacctggggataagtgaggcagtgtggcagggagtcagccgtctctgaagacatcatcagctgtggtggtggagaaacgctgttcccaatgtccaggtcagtgaaccccttcaaagagccgagagagaaagggcagtgtgcattcattcctgaacaaacatgagctgaggctcaccctggggcctctgagaagtaactgagatgattgtagaccttggggtgtgggccaggggaatgaagaatgcgaatatagttttcaggtatggctgcaggcccaaaaatttgtattattaatattaatatgacctcattttatccacagactgcagagactaagaaattcaggttacacatagtgtattattttcaaagcattttcct

SEQ ID NO: 25334 - DNA, 738 bp, Bovine  19866880766407
  misc_feature (1)..(1): n is a, c, g, or t
ngtaatatagaagatgaatgaaagtctatcattgcagtgccaggatgaagaagtgacagctcataatgaaaagaaaaaatagtttccattttgggcctctgtaagtaagaaagtgacagagtcctgggaactgtgaagcctgaaaaatggtccttttgacagacatgcctataagtgagagggccccggatataataccacctataatagagggaataatgattattttaggcattgcatgattttgaataaatccttgactactccccagaaaatggagttgaaaggaatctgggaagagtggtgggttaatttaagcaataaatgaccacactttttcagtcttttaagtcttagttggttaaatttatttctgtcagaaataaccaaaagccaatggtattaataaaaagaattttgcctcagtgatgagagggaaaaatgtcactctagaatcttccctcaggattttgtttccttgtgaccaaatcctttggaattaaattctagattggctatagtaattgagtgtttgtaaactaattgaaatctaaattcaggttgagtcagcaaagtaaaatactgattttttttaaattaataaaaatttcaagatgcctggaattacccaacaagctacttgcatttttcaatagctagtactccttagatgcggcctcatgtgttagcccatttgtagtgtttaaaatcacttcccctgtataatttcttcatcca

SEQ ID NO: 25335 - DNA, 975 bp, Bovine  19866880820785
  misc_feature (1)..(1): n is a, c, g, or t
ngaaatatgaaccagtaccagaaaacccaagggcaatcccccaagagtagtctcatgcttgaagcaaaatccagataaacttgccctgtggcaaagtggagagaaagcatgcaagattaggctggcaaagaggatgaagtcccatgagtactccattctcccatctctcctccccatcatggtctgctatttgtatgtaagcttcaatcagaatttagagtcatggaacattttttcctggctcagaaactgcagtaaagtatcttcagttcttttcagcctgggtctgatgctgaaaacatacctgttggaagttatgaacatatcacagatgctgagcaggtgagctttaaaaaaatggggttccatctgaataatctgccaggctataggcgacaaaaagctatttctgactccagcaggaatgagtgattactttgataacaaattaaaacaagcttggaaattggaaattaccagaattaagctatctccagtgaatgactgagctcccctcttcagtacattttcttctatattaaccataaacatgagctcttcattaacagaaattggttcattgctactggccacaaggggaatctattgggtgtgtggcactaacttccaacctgatcaagaagacaacttgttcttaatgtgagtgctttcttgggaacttaaaaattctttatatcccctttggcttcttgcatatgaagccaattgtaatgttcaaattttaaatgttcgaatattttctgtatatgagatgtttatggtaccaaataatttctagatgattactgtttttaataactatctaattaccatattaatcagaaatatccttttggcttgtagaaagtatcaagggacagaggtaagaaacaaagatattcccgttgcaaaccacttgcaagaaacttccaagcttcctgttcacaaagtatggaagtgttgctgaatggaagg

SEQ ID NO: 25336 - DNA, 753 bp, Bovine  19866880834254
  misc_feature (1)..(1): n is a, c, g, or t
nctgcattggaggcagacgcttttaccttttgaagcccccagggaagtccaaacaaggtcttaacttcacctaagtcttttcagattataaaagtatatatatgcatagttgtttcttaactaatctctgagggaatatgttttccttcgaaattcacattcttacatatgcatttgctaagtattgatcctagtaaatcacatgcacactcaagttttgatgatgaacatgtgtttctttgtccctcagcatttattataaggatgcattttgctaattgattttatgctaattttagtgctttcctagtaatcattatggattatagaaccaattttttacaaaatggaggtagacatgttaacagaagttcttcctgcattaaagaaatattcttaaaaacgactgaaaaattgccagatacaggtgctatgttgacatgccgaaaggcttattttattccatcatgccatttgctaggaagggttgagattaaacactgtaatgtttgttgcctagcaacacccacctactagtggtggaaattttccactgaaaaccacttttatttgggtcattgtctttgaaattgcatcatcagaggtctttttcccttcaaaatcatcttatagggctttctagtcttgtctgtgcaaaaagatggagaccacttagtttgggtcacttcatgctctaaaactatgcctttcaatggaaatactctcatattgcagcccatttctttctagttt

SEQ ID NO: 25337 - DNA, 956 bp, Bovine  19866880836532
  misc_feature (1)..(1): n is a, c, g, or t
ntgtttctaaaactatggagatagagggcatgcaggaatcatatgaaattttagcttcatactgcatagaggggctcaggggcacttcccccagggggccaaaagcagccttgcttgatctacttagccacgcttatacagcttgctaagatcaccatgaggattagaaccatgatgtgtaaccaggatttcctctggagaaaaatgacagctgcaacagagatggagggtgagaggagacaaggaatagaaggttatcagggatgtggcaggaattaaagaggaagagggaaggaagggagaggacatatttgtctcaaagacttcccttctcaagttagtcatctttgtctaactcttggaagtgccaagttttaaatcaaagtagaagagtaagatggagaaggcaatggcaccccactccagtactcctgcctggaaaatcccatggacggaggagcctggaaggctgcagtccatggggtcgctgagggtcagacacgactgagtgacttcactttcacttttcactttcatgcattggagaaggaaatggcaacccactctagtgttcttgtctggagaatcccagggacggggaagccttgtgggctgccgtctatggggtcacacagagttggacacgactgaagtgacttagcaaagcaaagaggagtaagatagttaaaggagataaagctaattgtccctaaaaccacaacttcaggacacgtgttctgaatatatacagaaacacaaacaatcccaaaccacagttccctcattgtcactgagtagcttccagggatgataatgaagaattgtctcctctttattgctttggctgatgcttgagtctgtggcgccaagaatctggatctcccagagccaggcagtagaaaaacaatacattagccttaaataatgggatctctgatgcccggattgccacagag

SEQ ID NO: 25338 - DNA, 1881 bp, Bovine  19866880849543
  misc_feature (1)..(1): n is a, c, g, or t
nttcaatattatcctcatagtaggtaaaacttatcctatgtgtaagaccagtctttttaatctgtttgtgaaatattctagaacaattttaacctctattgattcagggtaaggcactcttctgatctacccagaagctcagaagactgtgatagattttttttagctcttttttttcaatcccccaattcaaatcctgatctggtatatatgtgcctctgctccacatacccatcagcaaatcctataactcataaaaaattataattcaagactaacatttttcttcatgtatctattcctatccaatcctacattccttccttgtcatacatgcataatccatagcctatagctgagtctttcacttgattgactctatatactagtctagttagtttgtctatgttttattttctatcacaaccgtaagttctgcagtgaattaaaatagattgaggtcattatttctgtttatttccaacacaaattaaatataaaggagattcctaaatgagataatatatgaaaactgcctaggagtggctagcacatttacccctccctcctttttctttaaagagcactgtaagtggaaatgtaactttttgataggcaaatcctaatgtacatgtttagtacagttaagaactacatttgctttacaatcctatttataaacaggaaccaaacagatggctgagtgtctgggctcgagcatatctctctttccctgaaataagaggccctttcatttaagaagagaagctcctgggagtctagtttcatgagtaggctagtccaagtgtgcaaactcaagaagtttctggaatgtagactaagatcatcaactgtcctcatttaggccaccatcacctttgagatcaagggagcctgtataaatataatttactactgtaggtctgctcagaaggcacctggcaggacaacctaattaagtatttaccccagagaccaggctagttctttctggctcattatgctttctcaactaaaattaatttatgtaaataaatagaaatgtgtgtgtgtgtgtgtacacaagtttatataaatatttagaacctttatttggacagtgtttgacttaataactgaataaactatttgttttattgatgaatatcagtttatcttgaacatatgttcttgtctctataccagtttgctcatgactggtctgggacagaagaattgcaggagcctctagcaagtagaccttcaacatctgggttgactttactttcctcactttatggctttcctcacttatagacacaaatctaacactcagcagttctactgacacatgagcaggtaaaggagagaagagtgcatggttggagtcttatagtgcaaagactcagttttaaaatgggaatagattaaaaaaagataacttttttttaattaaattaaaattctttctagagtaagaactgtttgatgatacaaacaattatgtcaatattttaaatgatttaaagaaataatatatatacaatataatgggcttcccttgtagctcagctggtaaagaatccacctgcaatgcaggagacactggtttgattcctgagtagggaaaatccccttgagaagggataggctactcactccagtattcttgggcttccctggtggttcagatggtaaagaatccatccgaaatgctggagatgtgggtttgatctctgggttgggaagaaagaagccctagaggaggccatggcaacccactccaagtatttctgcatggagaatccccatagaccaaagagcctggcgggttacagtccatggggtcgcaaagagtcggacacaactaagcacagcacaacacacaatgtaatatctttt

SEQ ID NO: 25339 - DNA, 1230 bp, Bovine  19866880903769
  misc_feature (1)..(1): n is a, c, g, or t
ntcctctgctgcgccgtttttctttttcctttcatctttcccagtatcagggtctttccgaacaagtcagctcttcgcatcaggtggccaaagtattggaacttcagcttcagaatcaatcctgccaatgaatgtcttaggcacttgaaaattcttaagttctttgaaattttattacagaaagttatgtttaattggagttttatgttaaatatattatatttttaataataggaaagcgatgtatagtatgcagaatactgtcagttgtgaagaaatattgcttaaacataccatgaacatccccatccaacttaaagacgttgggtacctcagtacttaatgccctcccttcccttttacttcccccacctctttttttttcccattatatctttcttatatgtcattgtggtcattaatgagaaattcatgttagcagtgtatataataaaaaaaaatgaaagtaaaccactttcttttcattttagcattttcttcaaactagggatgctgaccatttcaaaaacctatagataggtgctgacattttatgtttgtgcccttaccataaaccttaaccaaatcctttagattatttcaggagaatctttcttctcagctaatcctggacacatttagagatctatgaagaaataaattgttctcctcctgatctactgtggcatacttcccgttgttaggtgaataattgagcaatttattttaatcaggagctctttgcagagggggtgctggagagggttaattgctagggtaaaacaactacaggagttcagtttactggggtgctaattgggtaacaggtgagcataaatagtgtggagaagcaggaaattagaacatgggagggacaatgtagattttaagctccacagccctgtaaatgtacttaagtcatcagtgctgcaaactgagtagtaaagtgttttcccttcagacatttcagcctgcagtgctatcaatgggattggcttgggagagaaagggagatggatttactgttgagtaaatgacctcggctgtagcaaacagttttcctttaggctttctgcatcgatgttgtgtgttgaggaaaaaggcaagtgctagtgaagctgggctaattcctagttatgctatgaccagtgactctcttgtaactgtatgtgatatagtttgattattttgtatttagtgtcatacttttggacatctatgagggataaa

SEQ ID NO: 25340 - DNA, 968 bp, Bovine  19866881052014
  misc_feature (1)..(1): n is a, c, g, or t
nacttgaatattaataaagtgagtggtgaagtagtttctttttcaagctttgaaagtagtatattactccacttggctgaaaatgttatggaaaatttcgattactagctcatgtcaggaagctttctattaatcatactaaaatatatatatatctagcaatttctagtgggttctgggcccttgcttgaacttagaggtataaagatacctaaaccatggcttctagtcaataagtctgattattagtaaaatatggagcataaaggaaacaaaaagatttcctagttgaatatgccacagaatctgaaaagatcatagtctgttgtggaaaaatttgaccacttgtagatgagtggctggaggagagtttgagaattaaggaggggccacgccattcagcacttgataaatcaaactggaagattggataatttgttgtatggccaacaaaaaattaaccttggatgaaaggattgcctgtgccctttagaaagtttgtgactgtccataaatccaaggaaaagaggaagaattcaggctacagtataccccacatgtaaaatatactgatatctaatactggatgttgcattattctactgagggctttttatttatttatttacatttaacaatttcaataacagacttggaggatgcatcctagttggcaaatcactaatttttctttttcattgccaacatcattgtgcctctaggaaaggtgactgatcttcaggtgggataaaatatcttgcatgtactcttcatttgatttctgatttacatagtaactctgttcagcaaggaacaccttgcatagtttcttggtgctgacttggattttatttacagctgccctaaattgtgttatcatgacataccggttgttcagtattcaacgttgttcctctgtaacttaatatgatttatttctgacttgggttttctttatcaaatactga

SEQ ID NO: 25341 - DNA, 2185 bp, Bovine  19866881099968
  misc_feature (1)..(1): n is a, c, g, or t
nttcacttctttccctgttggctgccttattgcatctctcagctttccaaatttccaggataagatgaaacaaacatacatcagaaaaacataaattcacctatatctacctggaggaaagcccttcttcccccttataggcaccacccaagccaaggggtggatttttgtctactggctgtgaaaactgaaattagaatcaaaagccctctgggacttccccagtggtccagtggttaagaatctgctggttcaatccctggttcaggaagatcccacatgccttgaaggaattaagcccatgtgccacaactacagagcctgtgctctaaagcctgtgactacaactactgagtctacaccctgcagctactgaagcctgcacaggtagagtctgtgctccacaacaagagaaaccactgcaatgagatgcctgtgcaccacagtggagagcagccccccactcactgcaactatagaaagccctcatgcagcaacaaggacccacaacagcattgataaataaatcgtaaaaaaaaaaaaaaaaagaatccctctatgatctaaatatagtcaaaatctaagtaaataatacacaattttttctgcaaatattgacatctaataatcactggccacatcaaaaatatagactaaaaacagtgagtgaatgttagtatccatagtacctagggggattgtggttcatgatttaaatttatggcttaaattagtaactttgtattttatgattagactaaggacactagcatctgtaaggctatacactattacttagtatctacaatgttcaagttccataaaaatagcttttaattttgctctttttttttgccctgacagcctttgaaaatattatatcatatttcaagacattgcacttaaaacttcttaaagttcataacacttgggcatggggatgtgactcttgaaatatttctttccattaccccattttccagaactacttcacatctctactccttaagattccttttcagtacacagtaaaaggacattcttgaacttgtccacagctatttctaatttgtctgatcttcatcagtcagtttaaaggaggataaaatgtcatctgcctcatccatcactaagtgtgtgtgttaatgtatttatctgattcacttcccctgactcgtctaagctacatgcagtctgaatctttcccatctcctaatttatttcagtcactcttcaagtgtgctggagctgatttctcaggtagactcgtctgaaaagatgccatgctctagcagttctatgagcaattatcatcttaatagcctgcaagcccagctttgtatattcactgttggtttactgccagacagaggtccctttcaccataagccctaatttaggactttcaggtgccttctccatggggaaatggttttttgactcctttgggttgcctggagatggttaaagatgctgtaccagtgtacgaggccagtatggacgctcataatgacatctgatggtcatgtggccaccattgctattattgaaaaatttagctcaacctcctcttgcagatgacatggtagaatagtgtggtcagggctattttgttctcagagctgtgtcaggagacttttcttctttgtcgccaccaccatcactatcatgattgcttcagaatctaacatcgtcatgattacttctgaatctaaatgctgattatgttaggtcttatgcatattaagaagtagagtgatataataagataaatgttaacataggtagcaggtgctgtcttcaggtgaagaatataggtagtaagtgtcacaggattccagaacaggaaggttataatcagaagacacaccaagattatgaggaagctggtggaacgtgaattaaggcatgtgtatctgggcaatgatgtgaccatcactgtgtgctgggaataatcaggcaaatcactgacgtgaagtacttatagagaaggacattgaaagttaacactgtataagtgaaaattcaggtcaggaagactttaaattgagcagtactaactttgatttcaggctagaaaaaattaagaaacagacattcaaaacaggcacctcgtcctggcactaataacttcttgatatgaaagattaccagcaggtgcttcatcccgtctttcattcatcca

SEQ ID NO: 25342 - DNA, 1379 bp, Bovine  19866881102459
  misc_feature (1)..(1): n is a, c, g, or t
ntgggcagtaagacaaagaaacaatcaaaaaatgtctccctctttttttgtattcattagcaaatacatcaataaatagatccacccaatcaattaatcaatctatccttattgcttttctaattaaaagttaattttgatttacttatgtatctatcactattatttaggcaggaggcgtatgaaagaaatttaaaatattgaccagaaatgtgagatgtggcagctggcttggaaataaatcaattaaagcttcataactatgtagccagtggcacctgtcctaagccacagtaatcctctggatgtcaaagtgggagactggaagaaatagttgttacaacttgctacaggagttttctttcattggttggccagaaaatactctctgatactaatgattataaagtgtttgagaaaacagggaagtacaagagaggtctgagacacagcaaagctgattcagacccatgatctggagtctgggcttgggataatctacagagtacagacatgattttgctcaaatgtcatattgacaatttggggattcatcacctggggaggtcattagatgttccctttactgtgctattctcttttagacatgcagtgggtgaccagctttacagaacagagatgcttggtcatattgttgagatacaggcctgggaacaggagctatagctcaccttttgaccaccaaggttggtaattgcttccagaggggcctgttcttctccggtgagttggaaggcagcaacacagttactcatcaaccatctgtattctaaggtgagcgaaccatgctgtccatacccagtgtccagcattttggatgacagatgaaccctcttatctggaagtgatttagcaggtaggatacaaggtggaaatcaaagctagcccaaacccagattcctgaatgataacagcctgaagggccattttggcattctaatgtttcctgccagatgctgtgcggtattacacgatgtctcagcctgtgctctaccacatgccagctgatgtgttgcgtgttgtggggggtggggagggggctggacagtatgagacaggatcaggttccaaacacaaatttcctagattgcctagctggtgtgaatagagcaaagataaaactacctgtgattcattcatatattctttcattcactccttcatttaggttggtatctttgttttactggaatttgcagtgctgaatttcaagttaaaaaagtaatataaatgaaagaatcaatagccaacttctattgttctaatcatcatgtactgtcctatgtactcttatttttaatctttgacattatttctatttaacatgtaaagattcattactaaggggaatgtttatt

SEQ ID NO: 25343 - DNA, 974 bp, Bovine  19866881163477
  misc_feature (1)..(1): n is a, c, g, or t
natgacctcttctacgtctcactgagcactgtgaatgaagacagacgtcgttatctcagtgattacgagaaattctaaatgtagggagattaagctgcctgagattgtccagctaataagaagtacaccctggatgtgaatggagttcctttaacttctaaatccagatctatttaaagaatacttagtgatataaaaagtatataattagttattagtattaggactactaattgtgtggtactgactagagtgatgaggagttcagaggagcaactgatggtgaactccatcaatcagcgatgcttggtcgtaggatgactcagagaaaagaaaaggaaatgttcacttgcaaagagagtcagacttcagaacagcttactaaattaaaacaaaacaagtattttaaagataaaacaacatgaaaaattagcggtaatcaccacatttaccttggagtgatgttgaagaaacagaactcacctcatataatcatcatattcacaaagatatgcacttacctttacacatcagcatagggaaagcaggttttctttttcttttatcttgctatagagtcacatttatggaaaatctcaaagacttcttttattttgaccataactggatacctttttttcccctgactatggtatgtgaaatgctaggccaaacagggtgcagggagacataaccagtttttgcttccattttcactcacttcatgagtgagattttatgtttttcctggacttttaatatttataaatgaaattcaaactccaaaagcattcaatttaagattcttcttgggctcagaacttgctccatatacctcaaattataccactgatatcttgactaataatttgagcaccaattcccatggctggtttcagcatttactatcaagcagccatgttcttttcaagggcaaattagcattcagttaattcagtgttttatttattcaa

SEQ ID NO: 25344 - DNA, 1969 bp, Bovine  19866881234920
  misc_feature (1)..(1): n is a, c, g, or t
naccttgactatgcagatgacaccaccataatggcaaaaagcgaagaaagagcctcttgatgaaagtggaaaaggagaataaaaaactaggcttaaaactcaacttccaaaatgtaaagttcatggcatccagtttcatcacttcatggcaaacagatagggaaataatggaaacagtgacagactttattttcctgggctcccaaatcactgtgaatggtgaccgcagccatgtaattagagacacttacttcttgaaagaaaagtcatgacaattctagacggcatattaaaaagctgagacatcagtttgccaacaaaggtctgtatagtcaaagcaatggtttttctagtagtcatgtacagatgtgagagttgggccataaagaaggatgaacactgaagaattagtgcttttgaactgtggtgctggagaagcctcttgagagtcactaggaaagcaagcagatcaaatcagtcaatcctaaaggaaatcaacactgaaaatttattggaaggactgatgctgaagctgaagctccaatactttggccacctgatgcaaagagcctacacattaaaaaatgatcctgatgctgcgaaagagggtgacagaggatgacatggttggatggcatcatcaactcagtgtacacgagtctgagcaaactccaggaaatagtgaagaacagggtagcctagcatgctgcagtccacagggtcacaaagagtcggacacgactgatagagtgaaaaacagcaacaacataaagacctatctccaaatagttatatttggaggtatctgggcttagaatttaaacatagatttttggggaacatatttcaactcatgacaggaaagaatagcataaataagtattctgcagcaaaaacatacaaaaaaaaaaaaaagaacaacagataaaaagcacctactctatgtaaaattaccaccaaaatgatattaaaatacacaaagtagataagaaaaatagagatagatgccaaagtgtcttgcaaagcaagttgattggtctgtcttctgagtgcagtaggtaataaagaccactataaaggaataatcttgggggggaaagagaaaatgtgagggattaggtgtcagagaaatgtttggatgaatgtgcagggatgaggacctagagcattattgatagaagagaaattaacagtgagcaacagccatgagaagactgcaaattacaaaagccaggatttagtgatagcatatgctgggaacgtgggaaagaagtgtcataaatgacactgaggaaatggacaaggctatatccaggtttagccatggaaatttgagaaagaagtgaaagggagacacttccactttgagtatcaaaatcttttttttttttttacttaaagaaaatttaagggttattttcttaaagtcatgatattgtgtattgtacaaattgaattgaggtaattctaagatatctgaagagaggttcctgatggagagaaaagatttgaggtcacatggaaattattcacaaaagagtgattgatatagtaaagattaacagcaggatgatggtaattatttagacgctgccataataatagcacttattgaatgaatgcccaccgggtgtcagaaattttatatatatattgtctcatctaatcttcacaattactcttgaagatagatatattatttcttctttacagatgagaaatctgaagttttgaaacattaaggaatttgcaagggatcatatagcatgtaagagttgggggagccagtcttcaaatccatccctgtctgacttgaacatttatgtgcttcaactctactttacttgaggataattacttcatctaaggataatgaattcctttcacaggacagagtattaggaatcacacaggaaataaaacttagctgttttctacaggtgggggaaattacattccctcctcttta

SEQ ID NO: 25345 - DNA, 735 bp, Bovine  19866881245572
  misc_feature (1)..(1): n is a, c, g, or t
ntggctgctgtctaaaagacagaatgccagattttttaatatctcttgaaagcagctctcccagtatgccgcttatctcttcagatatgtaatttaataataggttccttcttttttatccctctcactgaaatgatacctatagaacatcattaatacctcacatttatacggtactctgagttcttcaaagagctcgttcatctattatcatgctgtgctttatttcatacaacatcccagtgagtgggtagaacaggctattgttattctcattcagagatacagaagtacaggtaaagaaaggtgaaatgatttcctgaaagctatgcaaatgattagtaaatctggaacaaaaattccacttctctgactcccaatgtcactctcttttctttatctgcctcttcaaacctgtaatgtagtttgctcatcttcagcatttaaattccaatctgaggctgagtggtgtggcggttaccaccccagagactgttgctttcccattgagttaccctccctcatttatcatcttactgtggcactgactgtggctctagactcacatgtgggaagaccttttaaacctgccataaatcagatatattttaccttgctgttgtctgtggtctctgaaaaatctattatttatttaagacatttttcttaggcaagccaaagtctcttctcactatgatgaaaacattaagctctattcaatgacatctgattttt

SEQ ID NO: 25346 - DNA, 1383 bp, Bovine  19866881251921
  misc_feature (1)..(1): n is a, c, g, or t
ncgtgactgttattaagtagttataaagacatgagaatgctatgaaaatagttgcctgtgcagagaaaattcaagtactgttctatggaactttctgtaattttttttcaaaattattttcaataatctgtgaatgtggaatcacagatatggagggacaattgcacatataatatttttgtataaaatatctcatatgcctagcacccttttttctcattacaacattagtcctaggatttattttgctatgaaatggttgagtgtaagtgctttctgtacatcttttacttttctaaatctttcttcacagcagttgttaactgtgatactcttcacatctatctaagataaatttggaaaatgttaccaaacctttggaaataaatgtcttaagcccagagatgcttgaaaatcacacagaattttgggctggaagtagagaagaaagctgacctccagaaccagacatcttttcgtgtcaccatattatctcttgtcttgaggggttgctgtgtacactgttgaaataactgcctaataacgtttaaaaataaagagaaattaaattttctcctgtgagttttgttcttcagtcatatgttttatcccgggatagcaaattgtttacaagcaattacagtaattaagcataaatacaccccagtgaggcaaatattattatccaccttttaacagatgggaaaacagaagtggagagaacaggaatgacctgcacaaggccaaagagggtgtctgccagacacaggaagggcctgaaacctcaggcactccacgtttgtcctccaacttctggatgatccacactctttaaagaaagtttgacttgtaaaaaattggaaaagagaggatgaaggtggttgatgacagtgctggggaaagagctgctagatgtaacagcacaaaaaagagatggtttgagagatgcaaagtgacatagcctgattcctcagaggcatttggggcaaggtccaggctcatcccgcggcagcccagggttagcagaaaaggtcataagtgaaatgtgagtttctcttcttagaaatatatggtcaagctttttccagttctgcatctttagaatgagcctgtgcccctaaaatgaatattactggaaccacagaatgagatgacatgcttgtgatgaagatacagctgccctttctgaagggctttgggatttgtgggtcaaatgtatggttgcattagtattaggaaaattacatccaagggaaaatgctgaaagacaaggaggctaacgtctcatgctgtgtctttctgctcgttatcacatttgataaacagtttgaattcaagcagaaagcgtgtggccaaacagagtaagacagaaatgaaacaatg

SEQ ID NO: 25347 - DNA, 713 bp, Bovine  19866881258349
  misc_feature (1)..(1): n is a, c, g, or t
ntaagcttcaattgaagtcacatccctctccccagtctgacatcatctttttcttaatacaactgtttttttatggtatttttttctttttttccatatctctcatttaggaaaacaaacaaagactaattgtatgtgagtgtgtcgtttggttatggtggtgaggtgggtctcatttctaaacaatgagagcgaagtgggtcacggggaagacaggagctatatctacaggactgaagatcagcaaaccaacaggaagcagacaggagaatgtgaggtaaaaaatggggcactggagaaatattcttgtcccctgttctgtcccggaattgtttgcatgttgacctcaagaatgcacacagttcacccactgattagcagtaaactccattcaggaaattctccttattcccagcatcccgtgaaatgctagttctctttgtacggtttgttcttgctgaatgagtatggaagatctctcagggcatctcttcaccatcttttcagagttgcattgttcccagcacaatgcaatctttccttgcttttgtccattccagcttttcattttgagagcagaagctgcttcactttgttggacagattgtctctgactaatacgtctcagcatcaggatcagcttctttgtactcacccagaattttaggctttatttttccaaaacgaatgtatcaagatgactttctccagtg

SEQ ID NO: 25348 - DNA, 821 bp, Bovine  19866881310586
  misc_feature (1)..(1): n is a, c, g, or t
ncagttaataggataagagggctgggaaatgaagatgaactttttaaatggcctgtaaaaagacagtgttatataattactaagcaaagaacctcaaactcaagctgtactaaatattctaattcttattgatagatctgaaaagtaaattataactgcaatttgaataattgaagttttaaaagcctgatatctaggtttaacattttttaagagtttaaatactcctggaatagtttttgtggagttaacttttaatgattttacatcattttttgaacatgcctaatttttgtttgaggaaaaattgagtgtaagaaaaggaaacaactcaatagtcttccgtttagttcttactttgtataacttgaatttcttagacttagtagggaacaggaagatagtgaatgtattgaaatatactctttcccccatcttcctcattgtcttctctttcccatctctaaatttccccaattaatttttattaatgtgtagtaactttctgttagaattgctttgtgaaaataataaaaggccagactcttgggcattttattaccctttggttgtctgtgagccaaccttttaataattgtgggtgttacttggtctccatttttcagctccatttttcagcttgtcatattttaagagttttatggctaggatgcatatccacctggggttttggatgtgactactaagttgtagtgtttgatttatatttgagttcatgtctttagataaaagcgtccatctccactgtcttcattttagcagctctgcttgttgcctttggaatgtgctttagtttctgt

SEQ ID NO: 25349 - DNA, 1021 bp, Bovine  19866881344264
  misc_feature (1)..(1): n is a, c, g, or t
nctaatctggttttaatcttctttcgggggagggtttgaatgtacgatgctgatttttctgcctttttttttttcctcccctaagcgcccctcactgaccaaaccatgtgttaaaaacagtttccctcctggaagggattatgccctttgactttcacagccgtctctcccttcctgacatcaaggaggcgggatggcggcgtgcgcgctggtgcggagcgcggcgggcgtctgcggtcgcggcggatgtctcactcggcggccgcgcgcggggacgccttgtttcttccacacctttacctcggccggtgtaggcttatttatttgtaagcatccagggtatgtatgcgcccgtgtaaataaataagtttaaatacaatttccaaatgaacaacatgagaaaaatggtcgatttgtgagcgtgtcaaataatgagttgcaaacacagcgtctgcggccgccgcggcccagcccgtggccgaggccgccctgccatctagcgggacgcgcaggaactccgctcacggcctcgcgcggcctcacttaccctcgcaaatgggcccggccgggccgattctcctaaacgcgttaacttagccgtgctatatcctaggaacaagttaatatacgattcctctctgtcttaaggtcattactgtcgaagcataaattaatagagcgactccagttaattccttttggcgtttgcttccgcaagtctaagcgcagacgtgaaaacagccgcccctcaaagttgtggaggggaggaaggaaagaggccgaaaaggagctcagctggaagaacaggctccctgacctaaaagcccgatggaagacgcgccctttagagacccaacataattccccccacagtcaagctaaaataggagggggagtgcagagggtgggcttcttcggggggcaccgtcgtcacaaggcaacgttgtgaacatacagggttcagttttctatgcaagaggagtaagggcaatcagggctcctctttacgagcaagaagggc

SEQ ID NO: 25350 - DNA, 1216 bp, Bovine  19866881357919
  misc_feature (1)..(1): n is a, c, g, or t
ngttgtgagtgagaaaaggtacaatcttattaagaacatgaaatatttatcgaaattatttacacagtcacttaacatttgacttgataaccctgcatctggaatttacactttaggcacacctgtatatatgtttgaaatgacatgtggacaaagttatcctgtcaagtccagcctcaacagcagtttcccaaaagtgcagtgtggtgaaagaatgagaaaccctcagtgcagttacagaggggatcaggggaccaataccaccacgaggtgaaggtgcccacactgatctcaagtctgctttattatactttttgagacttgctggttcatgtttgcaggagcatagcaggccaggtggccttcaatgataatcctgtgcaattaacatttaacatttttgtacccctatttttctgcgtcagggacaaagacccagttaatctttaggtgcctctcaggtgccaaagacaggaacaatctgttgatggctttctatctccagacatacatcctgctttcaagatattttttgttctttcttggattccttcaggagtcacatactgagccatgtcctctcagcaagattgtttaattcttttgtcaggccttttattaggcctgtttcctacattatccttttggccttctttgcaaaattttaacatgtgggaaatattgcaagtatctctatacaatgatatactccatagttgaataaaagaactaagtaggcttctttttatagatacagaaatgttgccagcatattttggcaagtgaagaaactgaagttcaggacagtttatagtatgccaccatttgtataaaaaaagagatgtaataaagtgaacttttaaatgttctcttatatacatgaggaaaccatgtatatgaaaagcatagataataacaggaatgagataaagatttcttaatcattgccttattatatttttattaatctaaaagaattcatttcctattaaaataaaattaaatttaaaataaaagagaaaatattatggaggtcatcccttttggcttctactcagaaaagaaacaaaagtagtgaataattaatgttaaggaactgttattaaagaaaactcaaacttcacttcggagtaatagatttagaattatagctatgcctctgtcagttacaactgggtcagtatattgcattcatcgacttttgcgttcagctcta

SEQ ID NO: 25351 - DNA, 1640 bp, Bovine  19866881462949
  misc_feature (1)..(1): n is a, c, g, or t
ntagggttaaagacagcctctgttatgtggaggcaggttaggagttagagagggaaccatctccaaactgagctggacacacacatgaatagaccatatcttgtaaaaaaaacaacttaattcatgaaaatatctgtgtgtgtttgcatttcattattatagatcctttgcacttttcaaataatttaccttttatcagtttttgtatagaatactaaaggaaggccgtgtaacattttaggggatagagcatcacagagagaagagcaaacactagaagacaatgattttgtcataactcactgatgctcctagaaaaaaaggaatatttccaggttgcaggaggggcagatcatgcattttgtcactacaagctgacttccgcacaagcatcttagattacaacgtttataactttttctctttgcacttagaaagcattttcttcaaaaagtagtctggtggaagaatgcagtctttggagctaaaaatcttcatatacccaaagagaataggccatttttaaaacttctaagaactcactatgacaagactatcaggcagggatgtccaaaatgtccctacacacacacacacacacacacacacacacacacactctcacacacacacaaagagacaatggagaaatgagagaatttttgacatcatttagggtccaatctgcccattagaaggctaagttcatatacattatcagtctcctctaagtgaaaaatctcctttacattttcttgcctagtattatgtcatcatcaggggtagcccaggaaacttgagcagacaagtttgaaggaggttggcaggatgaatgctgaatgatatttatatatattgctttggaagagtcaagagccagccttgtgtattacaaagaattcatttcctatgctttatattagcaaatctgtccccatttttctctctcattgtattatattgttcacttcccaattaaagcttaattcataataataaggtcatatttgcaagagtatataactctgagaaatgtaaattggtctaaattgtttgtttttcatctagtatctcattgaaagaagaataatagatggtaaaagagaaaactcagatattcctgaaagaaaagctatatgccacagtaagggtatcaggctaggtgatggcagatcctaggaatgtggtccacagggtgtctcagtatgctcaggtgaaggtacgtgctctgactcacacagagtgagtgaatcatagaatgagaaatgaacacattttcaataggtttcccatatttttctacatttgcctttttttgtcccccttttttttacaagggtggtgtttaaaaaaaattaacaaggatttaaatttcttataagtttgggaaatgagaaatgtaaattggtctaaattgtttgttttcctactagcatcttattgaaagaagaaaaataaatggtaaaagagaaaaatcagatattcttgaaagaaaagccacagtgccacagtaagggtatcaggctaggcgatggcagatcctaggaacgtgtcatcccaaggaaaggggcggaatgaaatctctgccatacttccctgtgtactgccttccaccagccagagagcacaaaggatccagg

SEQ ID NO: 25352 - DNA, 1264 bp, Bovine  19866881464498
  misc_feature (1)..(1): n is a, c, g, or t
natatgatttgccaatattttattccattttgtaggttgtcttttcattttcttgatggtgtcttttgaaatgcaaaatattttaatttaatgaaatctaaatttatttctttttcttttgtctttgtgcttgtttctgaactctcacatctgttccattgatctatatgtttatctttatgccagtacttactatagctttctattatttctcctcaaatgtaaactgattttcccttgtaaaaagatttttattatttatttatctatttgttgctatgtgtaggctttctctagttgttgcaagtggaggctcttctctagctgcagtatacaggcttcttttgtgggcttctcttgtagcagagcacaggctccagggtcacgctccatagttgtggtgcctgagctttgttgacccattgtatgtgggatcttcctggaagggatcaaacctgtgtcccctgcactggtgggcagattcttcacccctaaaccactagagaagtgctcattttccctttctgtgccagagaacaacttggatagcctgcccaatcattataagtctgtcttatcactttttgagttatgtaatatctcagctggaagggaacttggtgattagctggtccagttatttcattttacagatggtgactctaagatccagagtttagagtttatatatgcaattgtgtgggcctttctgcacacatggtacaaagttcaagaaatcttatccatttgtcatttctgtttcaggttttttgaaagaaatcaaatatcatggactttatacttctatttttctcatttccttcccaggatcaagtagcattctgaatctactatgtaccatttcatgcttttgtacttttccaggaccaatataaagccagtttattatgttcattatttattaacatccttttttcattttaacattgtttttaaggtttgttcatgttgatacatatagctttgattctttaattttaaatattctaacatagtccatttaatgattatatatccattttcatatatccattctcctgttgagagacatttaggttttctccatttatttgttctgttataagcaatgtttgcacatattgtcctcctgatcaggtgtgagcatgtctcccagtggagcaatgccacaggagagcagcagaggacctacagtctttaaaccacatattgcaaattgctctctaaagtgcttctcatagctcctttttttcatatcctcaat

SEQ ID NO: 25353 - DNA, 1502 bp, Bovine  19866881490815
  misc_feature (1)..(1): n is a, c, g, or t
ncagatattgtttgtaactcatttggcaattaatcatgaactatctgtgacatttcacctcttgttatctgaaattgttatttaagtctatgaatccgcttgccttatccctcagggctctgcttctcggtttccaaggtgatagctagctaggagggagattaactcatgctcagccattagttactaccatatcaagacaactctgagtaatgccatgcattttaaacctagaactattcaggcttcttttagaaggagaaaaaaaaaattcaggcccaaagtattaacctagataattttaaattataacattaattaaataagtatgtagaccatttgagtgtgccagacatgttcctttattttatgtacttaattcagattgaatagtcctgccaggtcagcagaaaattgaatctcagtcttataagggctccttgcagcccagctgacacatattctaaaggctgtataaagatattgcaagggtcttaggaggtgacaaagcatgtacgccatcagccatgttagtaaccagtgagatggcctcatccaagttcttaggggatcttagagtctactgctctgctccctctagaccatgtttggtgggcaaaaattggactccagatccatagcatctaattgtccaaggtatgccaagcagtcatttacgccatttcccaagcctcgtcctgagaagggataagatgtgaatcccattacttgagagactctcagagccttatcaccccccagacttggaaaaattatttactctataccttcctctaaccctgatgagaagctttgccccttcctaccctgctggtgtactcagcataaataggtgaggtctttttttttcttttttttttttaatgcatgtttttattttattttttatttatttatttttttaatttaattttatttttaaactttacatttgcaaaactaataggtgaggtctttacaaaaatccctttgtgatgtggttttctagtagctccacttgtggccccacaaatgctcctgatgagaatacaaagcacctgattaaccgctggaacagaagagtaggtcacgcagactgcaaacatctcgataaattctctacctcttgtatagttataaaagtagacgtaaggtttttaatgtctccagttcttagcacaatgagaagcataataaagttattaattaaatagaaacaaatatgcaacctaataaaacttaatgatacaactcatatgtgatgatgatatttgaagaaaaattgttctaggcattactatggctctgactgccaaggcacagcccttttgaagccatcataagtgtactattatgtgttatatgatgatgactcaatttgcctacggttcttttgtttcagctattgtgaccttttttcatacaaatgagtgtgatgctattcagaatttgcattgtgccaaaattactatttacataataaatatgttgtactttttcca

SEQ ID NO: 25354 - DNA, 591 bp, Bovine  19866881658052
  misc_feature (1)..(1): n is a, c, g, or t
naataaggaagctggactaggtccctgcacttcactgtagtgatattgggttggctgcagggctaaggggattagggtgtcatttatggggccaaaaaacaataagttacattctagttcctgctgatgcatgtttttcctttctctaatcttactgcttttaaacttaagctgcatcagactccaaaaaccctccttccattctactcttagtccttattaagagaaaacacaagaatgttgtccagctcagcacactgccagtcatcacagtattgaaggaaaacatcccaggagctaatgaaaaacacattcactctaaattctcctatgaaaatgtggtaaattgttgcaattattggttccatcctaaataatacctcttgcagtgacagctaatacttgtgcttcaggtcataaaatgatcatgagtcaaaatgaccaaaatttgaattatagctatattttcttctaaagacactgactgttgtctctattagaatcagatggcaagctgagccagtaaatgtaaaataatttacttaatgaaattcttagtagcaaccacatgtgccatattagaagacccag

SEQ ID NO: 25355 - DNA, 1801 bp, Bovine  19866881676041
  misc_feature (1)..(1): n is a, c, g, or t
nctctgtatttcaggtgctttactgagctcagatggagttatccctgcagagacccagaatgtgtttccgctctgcaggacagaggatcaatgcatcatataggctcttttggaagtgttccataacccaaattcctgtatgtcaattcaggtacacatccagctgggtaagcagtttactaagtgatgcttgaagaggtctgatagtaaccctcctcactcccttggcaaaggcatggaatggcttcctgcccttttatttctacctccctcaattacagtcctgcttatacatgtgtctctctttcaaaattctaagtattcactttgacatgatttttctggatacagatataaggggtgaacagaatttactttgatttcatgcccttcttagagtatattcattcagctatataacaaatatttattgaacatctagcatctgtcaggcaaacaattgcatcatgatttagtttcaaattaattgaaagctaaagagataattttttcttggctgaacatttatgcatttttatttgtatcatgtggatggaaaagataaatttcaaaccttgtgttaactgtgaaatatatgaacgaagtacatgttcataccattattcagaagactaaacattagcctctttagctaagtgctggctttgacaatggactttgggacatgaaaatgtgtttgtatggtcacttatggttgaattcacactcttgcattttgtatttcacccagaaaaaccaatttggcaaatactgacatgcattagtagcactattttaacaagatcacaaatgttagttaaatatctaaatttcactgtagaggtacagattgccattttttaatgctgtaggtagtagagatagttgttgattaacagcaaaaccccactctccctctctctctttccaccccaccccatacaccatttgcttattattttcccacagatagctagaggaaggatatttgccgtcaagatagctgggcattcagcagctcagcaaggcagtttgtgtgatgcctgtgattccatttgtcacaggagcctttatgagggaacagaagatataactttgcctcatttttcatttcctgttatcgctcagatttcagtcttcagctgctctgttttcctgtacctctactggagccgacattatcagagagccacctgctacccccagtgccgctgaggccctgtcagtagttcaggaggagagagcttcctcccagggcagcagagaagctcgtcccgtgcagaggaaaccacgcctgcagttaagtccacatatgcagggcgaggcagacatttgatgattaagtaactcccagggaggaacatccttggaattgtaaagcacttttaactttacgaagtactttcccacttctgtttcactagatcttcagagcagcctgtaagacagcagagctggaacaattaggcctgtttgtactttgtgtggagatcaagctttctgtatctgttgcaactggaaatggccagactgggggatgtagctaaggataatcaatggagtcactgagtcagtgatggagaattcaatccaaagatgtgcaaggaaagaatatatatatgcctgcctgcctgctaagtcacttcaatcatgtccaactctttgtgaccctaggggccgtgattctccaggcaagaatactgcagtgggtcaccatgccctcctccagggtttcttcctgactcagggatcaaacccatgtctatgtctcctgcattggcagatggattctttactacta

SEQ ID NO: 25356 - DNA, 842 bp, Bovine  19866881864219
  misc_feature (1)..(1): n is a, c, g, or t
ncccctgtaatatctccctgctcctctatgaactctccaggtctgttgacatcttaataagatacccaaaactgaaggctcctctccaccagggtaccaaagcagttgcttgcctattagagggatggcatattctaaaaagacaccttggccttgtggatggaattgtggagttaagctcatttctcacatatggccacgtctccccttcacactgttttctgtatgattgttgcctgtgtgcccctctcccaaacttccagtctggatgatccagctcaggtaggctttgctttcagcctttgctactctgcttcaggactctactttccaaatcttattttcgcattctttgggcttttataatgacccctaaagtcttcattatggtgttctagctcaactcaagctttccttctcctgccccccatcaaaatatatcaactgggctctttgttgttgttcagttgcccagtagtctctgactcttcatataccacatgccaggcttccctgtccttcaccatctctcagagtttgctaaaactcatagccattgagttggtgatgccatccaactatcttgccctctgtcatccccttctccccctgttctcaatctttcctagcatcagggtcttttctaatgagtcagttcttcacatcaggtggccaaagtactggagcttcagcttcagcatcagtccttccagtgaatattcaggactgatttcctttaggatttagtgatttgatctctgtgcagtccaagggactctcaagagtcttctccaacatcatagttcaaaactatcaattcttcgagctcagccttctttagg

SEQ ID NO: 25357 - DNA, 928 bp, Bovine  19866881881170
  misc_feature (1)..(1): n is a, c, g, or t
ntactgggcttcagcttcagcaagtccttcccagggcttaaccaaaagctgtgcttaatacaatgtatctgtttctgtgtaggtttcatgcagtttatccagtcagttcctgttgctgaagttcttgatacagaaggaagcattcaggtacagtatctattttaatgatttatgaatttcatgaatatttcttgttagaaaagtttcagtctctataaaaagtacatagagttagaaatgaaagtctctttttctcacttttcttccctcaagttgttttttttttccagagaagtaaacagtgttaacagttggaaatgtttccaacgtagacagatagatgttcagttccttaaactttgcctggcatataataggcaatcaggaattaatggggaaacagaatttaaattttctgaagtttatggttacattatattgcaaagtatggaaatactgatttatgtagccatcaatgaacgttctgattatttccagtttttgttgttattcagaacaaggctatagtgatattcttgtcatacatgttttacataattatgttctttaagacccttttccccaacctccccctccaaaatcattattctcctttaagataagaaaaggcaagttgtactaagccatatatatctttggaattgtttttatattttaaaatcgtgaattagtgtttattgcaaaattcatactgcatgtgaatagtttacttttgttatctttttaatgtaatttttttcctatgaaaaatgtatgtaattcacactgaaaaaattgatatgcctgagatgaaaaatcatatagtgaagggcttgataaaggatatttactatagtatgtttttgtatttctcagtttagagtgtcccagtaattcagtgggagtttacactttcagaaagacttta

SEQ ID NO: 25358 - DNA, 3288 bp, Bovine  19866880083685
  misc_feature (1)..(1): n is a, c, g, or t
ntgaagagttgactcattggaaaagactctgatgctgggagggattggggggcaggaggagaaggggacgatagaggatgagatggctggatggcatcaccaactcgatggacatgagtttgagtgaactccaggagttggtgatggacagggaggcctggcgttctgcgattcatggggtcgcaaagagtcggacacgactgagtgactgaactgaactcaactgaactgaggggtgggagggaggctcaagatggaggtgacatatgtatacctatgactgatccatgttgatgtatgtcatgtaaagcaattatcctccagttacaaataattttaaaaataagacattcccagataagtaaaagctgagataatttactactgctggaagaaataccacagggaatacttcagactgaaattaaagcatactagacagtaactttgatccatgtaaaacaataaagaaaaaaaagctcataaaagctcattttaaaaactcataaaaagggataggaaggctgtggagtgaagttctttatatattcccctttttgttaataaccataaagatattaaactggattaaaatggcaaagtgttcttagaacaattcccacaaatgccaatgttgattctcatgcctctaacctttagtagcttgttacaatgcgtaacagatttccctggtagctcagctgataaaaaatctgcctgcaatgcaggaggccacagttcaattcctaggttgggaagatcccctggagaatggataggctgcccactccaatattcttgaacttccctggtggctcagacagtagagaatccacttgcaatgtgagagacctgggttcaatccctgggttgggaagattccccagaggagggcagtattcttgcccggagaatcctcatggacagaggtgcctggtgggccacagtccatggggttgcacagagtcagacatgactaagcaactaagcatgcacgcacaatgcacagcacagctgtctacaagaggtatactttaggttcaaagacaaaaacagaccaaaatgaaaagacggaaaaagatgtacaaggtgaacagcaagtaaaagaaagtcagagtagctatactaatattagacaagatagattttgttttgagaccattcaaagtaaaggagaagcataagatatgtttcctaagtcattgattgtctcaccctagggtagtggctaagagagtgaagagcatctgttaccagtttctacctcttcattattgtcccctctgtttctgtggcttcgtgaagcaagaatttcataaaaaactaaaattgattacagatcctatctaacatacaggtgttttatttggttttatctttattaaaattctattatatgtgaaaatatagtcatacttttattaaataacatatacaaaaaagaacacaaaatgtaaatgtaagctcaattgattttcacatttttaagtacacttatataaccagaatctaaatcaataaatggaacattaataacatctcagagcaaccacttttgtttcctcttctaggtactttctccttcaaaggatcactatccagacttctgacactatagataagtttgatctgtttgcaaacattactgaatataatcagagagtgtatacatttttgtgtacggcttcttacacttaacgccatatttatgcaggacatccatactgtggttataattgtagtttactcattcacactgtagtattggattccactgtctgattaactatagtgtatttattaattctacaattgatggatatttggttagtttccagtttgaagttatttgtgtagagtggtaataaaattttttatatatcttgcagtgaatatatgtaaatatttctcttgaatatataaatgagattaaaactgttgggataggatatatcgatattcaactttaataagaatagtcaaatattttccaaatttgttgtatgaatggacacttcctccagcaatatacgagagtttattaattctatattcacaccaatatttgatactgtgttttttactttagctattctggtgagcatgcagttgtattaattgtgattttaatttgcatttttctaaaaactaaaaagcttaatattttaccatacatttattggtcattttgacatcctcttttctggatacctgcttatttttttgtttgggttttctgtatttttcttattgattcacaagtatattctcccaatctacagattgatattctctaaatagtattgtttgatggacattcttaagagtttaataatttttcttttatggttattgattctgaagccatatttaggaaatatttccctattttaggaaaatgaagatattttccaatgcttcttccaaaagatttatcgttttcccttttacatgcagatctgtagttcatttagagttgacttttatgtgtagtgagagatatgagttgagacatgtgcattttcctatggaaggatagtcaactgacccagcaccatttattaaaataaccacccttccccactgccctctaagactaccttcattgcgattttagaggtctattatctttttgaactgttaatgagaattatgatgattttatccagtatgtattgatgcatagaaagccatgaatccagttcctagaaataaaaaatgttgatactattatttctactattatttagtgatttatagtctagccatgcttattacatgtcttgttctcatgcatcttttttcttctttgatcaataagtttcttaataaataatatcattcatagatttaagaaagtagaaaatacaaaaaataatagagaagaaagtaagaatgactcataattttatcaaccaaaagaaaatcactacacatttttggttttcttcttattttttcctaataaatttattcttcatatttaataaagttcctaagtacataaagagccctaggttcaaacggtaaacagtctgcctgcagtatgggagacctgggtttggtccctggatcaggaagatcccctggagaaagatttggcaaactactccagtgttcttgccaggagaattccatggatagaggaacttggtgggccccagtccatggggtctcaaagagttggacacgactgaacaacaatcacacaaaagtatgtaaaagcccagggatttataatgacaacatagaagattacatcttacttatcaaaataattttcaaaaa

SEQ ID NO: 25359 - DNA, 1301 bp, Bovine  19866880220658
  misc_feature (1)..(1): n is a, c, g, or t
ntgctgctgctgctgctgctaagtcgcttcagtcgtgtccgactctgtgcaaccctgtagacagcagcccaccaggctcccccgtccctgggattctccaggcaagaacactggagtgggttgccagttccttctccaatgcgtgaaagtgaaaagtgaaagtgaagtcgctcagtcatgtccgactcttcacaaccccatggactacagcccaccaggctcctccgtccatgggattttccaggcaagagtactgaagtggggtgccattgccctctccgatatatatatatatatatttgagtaaatatatatatatctatttgagtaaatatatatatatctatttgagtaaaaaaaaatatatatatatatttgagtaaaatatatatatatatattttactcaaatagacacatgtgtatctaacacagagattaaagagagagaaatattttaacttaaaagtttatttcaaatgattcatttcagaatttcagatttgaatggtaactttaagatcatctatcataatctcattatatatctcaaggataggaaaccactttaaattaatgataccttatcttactcataaattatttttaattatgttaatttaagtaagatttttagaattaggtattgtcttttgttaattgttattacaactgccagagatttatgattttaattatatacatattagcccattaaaaaatatttaaatagttgaaatcatatcaaaatttaaaataaccataaaaatgttagaagaaatactaaatagctatagtctgtatgtagaaacattagataaaaatatttggtcctggttttattgatggttattacagaatgcctcttgcaaaatgtagcaaaggttatcctagaaccagatttatacaactgcccatggcagtaaatagaagacttaagttgtttcctctgttgatttatttgatgtgctcttacagggaaggcttaactctcatctttttacagcttttctgttttaaagaaaagaatgaatcaaatctcattttttgtgtcactagtccatttcccacattagttttcttctatattcaatttttttgttttttagatccaagaaacaaaatactgtctaaaacttagaaaccctccagattatgaaacaaaatgtttggcaattttttcatttgtacctgaggcgcaacagaagccagacaatcaccataatcactaatacatagcaacacacacacacaaatatgcttacacacacagatgctgggcctcttacagcaagttaagga

SEQ ID NO: 25360 - DNA, 1301 bp, Bovine  19866880361587
  misc_feature (1)..(1): n is a, c, g, or t
ntattttagggttgctctaaattttctaaagcatttatcggagacattataacaatttcaaaggtaagttaattactctttctaaaataattgcctagaatcatgaaagatcatgtgtataatttatcatatacataatttacttcataatacatataaatgactgaattaaaacgattactgaagatttcttatatattttaccatattaaataagtttacaacaccaaattcattacttcatgaacttgcaagaggaaaacttttagaagtatgtaagaaatcttaaattattgttgaaatatgtttctaatcactttacagcactatcatgttcacattttttgatttatataaatgatcctaaacttagtagtcattagcaaaggcctttaatatgctaggaaaacaatctacagacttgttatctcagttctttattctaatcttcctgaataatgaggcgacttcaggatattaatagtatcattttctggtttttatcctgaacagaggcatatgatagaaaccatttatctcaaaccaatttagtatcacactgtagaagacagtaaatggaagaagtcttgtattatgatttatttcatgccatatgatctaaggttgctaactatccatttactttatctcatgtccaatactagattgcctaattaaattctgatgtccaaggagtagctattatcaagccaatggtttcctaagattgttaaaaaaaaatattcagtgcagagtttgtgatgaaacttgttgtttaacaatgttctcttttaagatcgcatttgagaattttgcttaagagagtcctggatttcattattcagctgaagctatattcaggctatggagcaatgcaatgggaaaaattcttttctagagctagacaccaactgactttaaatggcccactatatattgtcttttgttatctttagcacatccatattagttaataaacatttatcaaccctctgggtgagcactctagggggtttaattatctcttcgagtttagtatggacataaacaatattatgaatcatctaagcagcacatcttttttaatgatagataaaaaccttgttattaggagtgaagtttaaattcatcattattctgttttataacataacaattacaaatgcagagtaagtacaaattatcctcattgtcagttaatgaaatttaatctaatctattttgaaagagttaacaagattttatgtggactatttttgggtactatcttcaaacattttttgagaaccattatcatccaa

SEQ ID NO: 25361 - DNA, 2040 bp, Bovine  19866880413018
  misc_feature (1)..(1): n is a, c, g, or t
nagaaagatttaggaaaattgctacatgtcacttttgcttaccatgaactggccatattttttgtttaatgttatcagctaaaatttgggattccatccctttgagaaaattggagaataaatttttggggaaaaaactgtttactttttctgacatgagcctctagcctgagatattatgatagatacatgatagatcttcagaaaaaaatttagaagtaacttttgtgtactaacacagtaaaccttaacaacattggtattatttttaagttgctaagtcatgtccgacactttgcagtcccatgaactgcaaacccagacaggcttccctgtccttcaccatctgctggagtttgatcaaattcatgtgtccattgcttcagtgatatcatccaatcatctcatcccctgttgccccattctcctcttgccctcaatctttcccagcatcagcgtattttccaatgcttcttactactttagaggtttgaaatatcatatgtaatgacatcaagtctatgtgaaaacaatccttaccaggggtatcttagtttttgtttaaatacttaaagtaaaaaaaaaaaatatatatatatatatatatatatatatatatataaagaccattcttgcattgatctcaaatgttttagatgcttttaatttccaatcattcattctaatactccccttcaacataatgaaaaaaagtattttctttcttatgaagaaattttttttatattaggaaggggttgcttgtgcccctcaagtctcatccccacaatcaccttcaagccaaataatccgcttttcatggagacaaatttcagatacattatcatcaaattaatctctttcctttggatttctttatattattatttttttccctgtttcaattcagtgtgtgtgtgtgtgtgtgtttttactttacaatattttattggttttgccatacatgaacatgaatctgccacgggtgtacacgtgttcccaatcctgaacccccctcccacttccctccccataccatccctctgggttattattaaatcagttttaatgtctgattcaacagtactcatcctaaagcacaaggcattcttcatttctcctttctccctaattcaagttgaaatagacatagccaaaatggcctgccagctgttcacagaatgctccacctttcagtccccacccacctagttccctctgcttagatggagagtgtgtcatatgacaaaaaatgtggctcataattacttttacagttcatttgtcctgtgtcctctagcattaagcctaatgactttgacaagaaaaccatcacctggctccatttcctattctgttggatgtcaatttaacatgaccatggggactgttcattagcctctgaaatttccaggaagaggcatttttttttttcctcttgctttcactttaaatcacttaaactattttaaaacaacttgaaaataacattttaaataattatgcataataatataatttatatacacacattgatgtattaatacatagatatatgcatatgtgcatatataagcactaatttctaagtgggaaaatttgttaattaatcacccttaacagtaaaatagcttgccattagtcaagcctcaggttaattaattcaccagatgatgagtgatataagtcctagtgctttcttcctaactacttactattccatccagaagacatgctcaatatatcactcattgagcagcctggcttctgcttctgtagatgttgaattttagcactagatctgataccagtttcttggaataaaagatatggaatgtaatttttctttggcatagacctatttaaagctggtgagaagagtaggaccatttagtattgaacaaatgaataatttagggagcagctaccacctcccatagaggttgaagtagatttcttctaaataatagcaaccaaatgtctagtcagtgaagtctgtatgcctgcaagcagacattcttaacagctccaccgataagt

SEQ ID NO: 25362 - DNA, 1622 bp, Bovine  19866880452691
  misc_feature (1)..(1): n is a, c, g, or t
ntagcttcacaaagttatgactcaaatatttctggccttcctgtgatctaatgttttctcatggaaggaaactttcctcttattgtgaggtaaatacctaccaaatatgtcctaaatcctctcgcaaaagatattattagcactgtgcactcatttataagtaaagaacagttcaacgactctatttgcctttttaatttaatgcattcatgctacttaaaatggttgtgttataacaatcaccattttgccaaaccaaattcacctcataaacattcttttggttaacttgaccctgcttttaaaacttgaaattagaggggaaaggcaaaacatgatctggcagttatataaatttagagaaataaattgattgggattgggtgtaataaagttatcccactggttttgattagttcctcggggtataaaaatgtagtttggttaaatttatattacacacgttacagtccaatccaatttatattagttttatgtaaaaatgctgtacttaaatgagttctccaaatatacatgtatatttctcaaattctctataacccttacatggatagaaactgaaggtactgagaaatatcatgatgggatgtcaggagatgacaacaaagaggagataaaggagaatgagcagagcatattttcttttgcagcatctgtacttctattccagattcattatgagaacttctatagttctagtcatttatatatgccccaaatgagtctactgaattttctttacagcatctatatttctattctagattcattaggagactttctgtagttccagtcatttatatatgccttgtcagcaaactagtcccctcctgagttcacaggctattataagaaagaaagtcccttcatcaatacaatatgcaatttactggcctaataacaaagccaggagaatgaattttatgcagagacctctaacacccaggagcatccttttctatattatatgctctgtgttaaagcatgatgaatacaacatgcagaagtgtttgatgttaatggaaacaggctgtggaattggactaaagagaaaaaaatctttaaaataagaaatcatactataaaagtagcatacaatcatccaagggtgagatccaagaaaatacttttttatatctgttattcctaaatacaaatgaatgccattctattctgtactatggagttatgactccaagtttaacatgtagacattcaattagtggaactcatatttcattattggcatattacactttaagcaataatagatatatagatataaagatatatatagatataaagcacatatatactgatgaagttgtataaagttagcctcttctcaatcactggctgcagatgttatggcacaaggcccgtttgctttcaaatgttagctatgatatggtcccacagcatgccagtaatataaaattgacaaaataaagttaattattaaactctaggcattgcccttcatcacctcactgtccatcttatttttcactttcaaattactaagacacgggatccattctatttctatcattctcttacatcaggaacaagtacagagaattctatggacagagggaaag

SEQ ID NO: 25363 - DNA, 2012 bp, Bovine  19866880533169
  misc_feature (1)..(1): n is a, c, g, or t
nggaatgctgaaggaaattgaaagttaaagagcatgagtagcttttttcacttaaaaaaatatgtatatgcacatataccagcaagttttcgggaaggaattccttaacaataggttattatatatatccaggagtagatatgagttaccattaaaagcgaaaagtgttagtcgctcagctgtgtctgactctttgtgatcccatggattgtacccagccaaggctactttgtccatggaattttccaggcaagaatactggaatggatagccatttccttctccaggggaccttccagtccagggattgaacccaggtctcctgcattgcaagcaggttctttactgcctgagccaccaaagggactctgagccacggaaagaactctgagttaccatgggggttttgattttccttgtgtgcttttttatgcttgtttttagtttttttaaaaaacaaaaacatgaggatatattatttttgcaataatgaaaataaagataaaaactgaaagtatatagctggccacacatgcttttagtaactctgtagtaatctctcactgtttcctgatctgtgtcccactttgatgccctatattacaagtgtgtgtctaatggcaaacagcactgtgtaaactgcttagaggctgcctccttatcttctcctactttacagtataccccattttccttaagccccatcttccatcattcacctgaaataagactgacaactgtgtagggaaactgcttttatagaatgataggcttggagtatttaattgatttgatttgatttaaaaatgaacaggaccttgatcttatgcaagtcaatatcaaagggcaccgtttctaagtgtgtgctctgaatggtttcactgcttccttgagttgcaattctgtagtggggaatcggggtgaaatcacgttagtgaagaaggcatgtgtctggcaagttcccaaggcatgagtatttatggcacgatgaactgtgaatttgatgttgattcacgcacacaacaagcaggtggttcacatctaatttcgttgcctgcaaaaatgagctattttaaaatgtgtaaaatgtttgttttatagaaaatctttagccaaaatgaacaataaataaatcaaggtcagtacaattagattttctgtgaaatggagtaaactcaattgacatggtatggaatacatattctattctagggactatgtaaacaatttggaggatgggatgacaaaggcttgcaaccttttcagagtactttttaataatgacatattaagggctcatatgagctttgtaaaataagggcatggagaggaaccgaagaacatgtacttcacctcctcactccccacaaggaagaagaaaatgagggaggcaggcaggaagggaggaaggaataaaagatgctttccatttctgattgtaaatggccagaaaagagaacatggtcctgtataaagtatgcttgatgtcaactggaataaaatctcaagtgctttgtggaaagttgacataaaaatcttaaaattcctcaagatggcactgtaaatttctcattacttaaattaaaaagtggagtttctattgagcattgttgtttttttttttttttgcaccaaggatactattaatgtttttaaggtaattaccatttcagtttgatcaaaatagccagtaatttaaggctttctcaaagaacactgttctttgagaacagcttactatcctaagacactaggatctcctatgagaagttttcacctctgtacttagtagcacttttccaagctctagatcacatcagatcagatcagtcgctcagtcgtgtccgactctttgcgaccccatgaatcgcagcacaccaggcctccctgtccatcaccaactcccggagttcactcagactcacgtccatcgagtcagtgatgccatccagccatctcatcctctgttatccccttctcctcctgcctccaatccctcccagcatcagact

SEQ ID NO: 25364 - DNA, 1098 bp, Bovine  19866880573153
  misc_feature (1)..(1): n is a, c, g, or t
ncctagctgtgatttttctctgtctattcttcctccctcagctcaggattgggcatccaagtgcactgaatatacacagttacaatcccaattcactgatgcacctctgctatggcaattcaacctggaattgtatcagctcccacttcacccaatttctagacttgccttgcttgtggaatcccaactgcctcagaattttaagaagggactattttaacacaactgtaacacaacacaattttaacaacttttttttaatcacagccttaccatgaacccttcaacaattatcaatacatagcttatgcaaatgcaaggactgttaaagtatgtgttcagtttagtgccggttcatgttataattgagtggtcaggtttatccacatgggcacgtgacggaactaaatacaagggcaatgcaagagattacaataagctccttttctgtgtattatatattcacatttgttttctggaagtagttagggataagatgtttaccttttcactacctggcacaattgatagtctccttccctttaataaaattccctccccaactcttctctcaggtcagattttcacacttatctccgtagcaacatatctatgtaatagaaagatacatcttctgaatggctagcaatacaacatcaactgttagagcataacatttttcatgttgaaaacatctggaattcacaaccagtcaagaagtataaaatgtatttggctctttaatagtcacccaaggttgagattgcttgctttattagaattcatttacaaacaactcttattaaccagcaatgtagtataaaactaagcttaatttcaacatcaaaaaaattttttaattcacaaataaagttgcttataaagactccaatcaccatttgtggaaaagagtttatggcagatttgggctgtattaccaacctattactagtacgctaatacctccatttactggttgattatgtcctctggcaaaattcggaactgtctactactctggtgcaaactaatcagttttcaaaattagttattgatctcagacccattttggtggaccaatttagtggctggttcatt

SEQ ID NO: 25365 - DNA, 1780 bp, Bovine  19866880604913
  misc_feature (1)..(1): n is a, c, g, or t
ntaaattttgaatccaagcatatgagtatgtgttgcatgtgtgcatatgtatataaattcatgaaagtagccaaattaatgctttggtttactatttaatttgagcacaaggaatagacatgcaagaagaactttgtttcattaaaataaggatggtctattcccatctttaaccttctttgggtatcatgtgtttgttccaggatattctgtgcagacaaaaatatgtaaaattgaaaggctatttacaatctgttatatacataattatattgaggctttgcacttagtgtattgactgcacatttgctgatgtgagaaaaagcaaaacaagaaacccagaaattaactacatatcaaatgtttgcttcagtctttgcacattgaataagatatatttcaagttgattttttttttttttttgctgtgacttctgcaggtttatgtacaatatcagcatcttccaaaaacataggttcatatcaatcttcctgtttcctgggtaactatttgaccatattaacttatatttaccttcataaaccagaagagttactatctgactaaactcattcaaaaatgtgcattacttatgtcaagacattaggattttctcagggtttctgtgagtaaataatctagaaactaaggaataataatataaaaatctatctaatggagtgtggattctaagagatgtgaaattatggttaaaatagggtcaccctactagatcgaaaaaggtctttagattattagtatattgacattaattctgtctgttactgttattcttacttgtatcgggtttaattatatcattaaaaagcacatgacacttagtcttttgctgtgcaaataagataaaatgatttgtcctttgttaacttatattttaaaaaacaatgttgtcacctccaaataagtgtattttctacatgagttgaagattctatatatgcagagtccagtaatattagtgcctcattttatacacattttatgcagatctaaaaagctaaaaagttcctagagttctcaggcttacatctttcaacagacatgctactgggattgaataatatggacctggtaacctgaggcagaagtcagtgtgaatttctgcgaactgtgttcaacatagttgtgataaatggggagacttacactattgtttgcaaatagtttccatgtggtaatatattaaataatatcaaataaccaaactataagctactcactggaatgaaatagtttcctaaattacattgacatgtataaaatacagggcttcccaggtggctcagatggtaaagaatttacctgcaatgtgggagagattatggttcagtccctgggttaggaagatcccctggagaagggaatggcagcccactgcagtattcttgcctggagaattccatggacagaggaacctggcagtaagattacccaataaaaagaaattcaaatattaggcataaaattaaatctttgtataatcaagcaaatcagagccccatatttgtagactgttaatcactaagttcattataacttaagggtgtgtgagaccaatacttgcacatgtcttatcatgacccaaagccagaggtggcatgacttagtaatccagtgagacagtggttggaggcagacaaagctaaccccatccacaataacaatgcctcttcaagcttccccagaatcacacccaacactagatcatgaatcaggaatacagagagattttctgaagatcagtgagatctccataga

SEQ ID NO: 25366 - DNA, 1494 bp, Bovine  19866880621965
  misc_feature (1)..(1): n is a, c, g, or t
ncaaattggtcacactttttagaagtgacaccactaataacaactcctaaatgatattaatcatgtttaaagaaaagagagttcgctttagtataacattagctaactcttgttaaattgattttggccttcttggttaattgattttaaacactatttccttagagcttttatgacgagctgtactggagggaaatgacaagattcctcctgaaatactgtctagaaatatgtttccttcttttttcttaaatgaatactttttaaagagactttttcaaagttgaacttttaatatgtaggaatgatacagtttagaaagcaaatatttatctttaaaggtaagtttgttagaattcaatagatatttatgattaagatctttgataacataacaatgaaatatttaataatagaaatataaggaataaggtgaaagactaattattcattaaaagtctaagaaaacaggaatgcaaatgctgcataaggctcacttgttcatttaggcttcccccacccatctcccctttctaatggccaccatgaacccacaactcctttgcttctctgtgacagtagaatgaaacttaggtggtctttgaccacccccagtctccagctgctcctcattgttcactcccttaacagaatcaggtcttgcctgatgcagcacctcacataccaattgaactggctactgaactagctatctcacatgtcaattgaactggctggaggagactgatgttgaaaatttcttaccggatgtcacattctcaggggtctcacatctcagaaagtgagtgtgaaaactgctgggatctctatcacaggattgtatccctatttcaggtccggtcctcctgggcagttcaccttgtgagtatctctatcagctccctattcaagcacagatggtgaggggctgagttccattgtctgctattgtgagctgaatcagagttttagcagggtcttcccctggacaaattacctaagttgctttggaaggaagaacgtcaaatgaaaaagtaatccattaggtggttgtatggggactgttgaatgagagacagggtcaatttagcagcttttatatgcaaagagttgactcattggaaaagaccctgatgctgggagggattgggggcaggagaaggggacgacagaggatgagatggctggatggcatcaccaattcgatgcacatgagtttgaataaactctggaagttggtgatgaacaggcaggcctggcatgctgcgattcctggggtcgcaaagagtcagacatgactgagcaactgaactgaactgataaaactttagaaattcagggtctgttagaccaaatgttcatcccctctaaaactgaggctcaaaaataaagaaaatgagatttcacacaactataattacacatcaagtatttgggcagacctcactgaaaggaagttaaccataaagacatttatgtttttcaaaatactaa

SEQ ID NO: 25367 - DNA, 1233 bp, Bovine  19866880711460
  misc_feature (1)..(1): n is a, c, g, or t
ncaatagatgcagagaaagcctttgacaaaattcaacatccatttatgataaaaactctcccagaaagcaggaatagaaggaacatacctcaacataataaaagctatatatgacaaacccacagcaaacattatcctcaatggtgaaaaattgaaagcatttcctctaaagtcaggaacaagacaagggtacccactttcaccattactattcaacatagttttggaagttttggccacagcaatcagagcagaaaaagaaataaaaggaatccaaattggtgatgcattttcttattgaagttgagagcaaagtcatccactgacaagaaaaagtaaagataagtgtaggttgtggaagtaataaaagcaaagttcaactttatatgcatcaaaatggataatgtccagaaatctctgtcactctctgacactgatcttgaactagtatcttaaataaaacatactccctaattctaagtttgattgctagaaaaatatactttctgtaaaattaattacaattcccattaaatgttattctaataaaacaatttttattagttatgtttttgtagcaaataaaaaagtaagtcttccacttcaaaattaaggaaaaatacatttttgtagatctttttgcatttacaacactgcattccaagtagcaataatataaggaaaattattgttaaggaacaactttatcattaaatcaatatagtctctgacttgaaatcaattggcttagagttttaaatggctttattgatttgaatcataaaagatacaaaagaggatacatttgtacaagttcaataacataaaaaggagaaaatttctccatgagaaaaactcaaacttaacatgtggatgactacaggaatttgtgaacaaagtaaatcatttcctattctatcacaaacttagaagaaaactgctgtccatttgtgatcttatcctcttttctgacctagatattctgcataagatatatatcagtggcttctttagaaagtagtaactcaccccagagaaatgaacataaattgaggaaatgttgactttgaccttcattttaaaagcttgaccaatgctttgatttcatctttagttggtttattttctgacctggaagagcgaaacatatttacatttataaaaagttctgactttcatgactaatggatgttaattgctatgacagtgacattttgtatcttacccatattt

SEQ ID NO: 25368 - DNA, 1723 bp, Bovine  19866880721380
  misc_feature (1)..(1): n is a, c, g, or t
naagaatcccctgccagaaggtgacatgggttggatccctggagggatcccacattgggaagatcaagggattccctcatcgagaagagtccttggagaaggaaatggcaacccactccagtattcttgcctgggaaaccccatggacagaggagccttggtaggctacagtccaggggttggaaaagagctggacatgacttagcaactaaacaacccatgtcagttaaggtggtgtcacacgtgataatgtgcgtaataagaaagttgggccaactcattaaaagtatcatcagtataaacagattctggattgtcagtttctcaagactccggaagaagattttttttcccccatagcctttgacaagagttagaaacaattaatataacgattttaaaactcccatagggaaatagcatgccagctaaggctaaaatttgggaccaatgctgctagcctatatgtgaaaacaaaacaacacattacaagagaggctggtgttgattagtaagaaataaacattcctgtggttcatttgaaggcaaatctgtagtagtcagcagagaatacgtgtgactacatctgaaggttggaattttcaagttcctgtgtgcactgagaaactgagtgccacagcaatgcagatgaagaaaagatggtgtcggatgctttccttttccatctggtgttttatagcagctccagtactattgcctggaaaatcccatggacagaggagcctggtaggctacagtctatggggtcacaaagagtcggacacgactgagcgatttcatttcactttcactatgctcacagttactcttaaaggaaaatagaatgaaagataaaaccaccttcacagtgtcatgttgtttatgctgaatagtctaagccaaattattacttaggaataaattaaatattgaataacacagagtccaaacacaaattagatacactcgagggaaacgtctcactacaacgatagcccaagttaattctacttgcctggaagcaagaagctagtgctaccagtcccaggaaagagggttaatatgtattttgccatttccaccctgtattaaattgcaacaatcccagtattctctactactccccctaatttatttttatccatgaatgtagtgcaggagaccggggttcgatccctaggtcgggaagatcccctggagaaggaaatggcaacccactccagtactcttgtctggaaaagtccatgaactgaggagactggtaggctacagtccctggggttgcaaagagttggacatgaatgtattaccaaataacacattatatatttaactttttttttaatattatttctctggcagtggaatataagcttcacaagggcatggattttgaaatattttgtttcattttaaatccctcactcatagtaggcatccaatatatatctttgaaagaaataatttattaatcttgtaaatttaattatgatacaggggatatgatagtttatgtaacaaatattttttccagacacattctgagaaacaaagactgttctgagccctaacaagagatttgttaattaattcactcgtcttttacctagatgcttgagaaatataacttttaagatattttaatataatttaatattttaagaaatatgttcacatatgtattttacatacatgcataaaacatttgatcacatgtaagttt

SEQ ID NO: 25369 - DNA, 845 bp, Bovine  19866880787422
  misc_feature (1)..(1): n is a, c, g, or t
ncccagagttcacaattaaatgaatacgtttacatctggtcttaccaccaatgcaatgtgatatttgctacatcccaaactgcagatttaagcttataggggtagattataggagtagagaaaagagagtgtctgttcttgcctggtggagggaaaaagagacagagaattgacatttatggaaaacattattagggttgatataaggatggaaattatattataaatcacttagaacaatcctgatactatataacaacctgttcaataaatataaattttatggctttcagaatgctttctaaatttcttcttcttgattttccagtttggtatgatgcaaataatctgtaacaatttgtcagattgttacagaaagctttccagaagaacaattcgcttttccacaaaagcagtaatattacaatcgaatgaagtagaacacatcacaaactctcttggtccaatttaaatttaatgaactcttagctgaactaagtgtctcatctccataaactcagaggcacaaggtttacagaaactgcaacttcaacattctttgacagtaaatatgactataaatcaaggcgtacatttattttcttccagggttctggttttatgccatctgctcacgtggcatcttgcccatttggaacaatgtcagattgtgtaggatagaggtgttgcctctctgctgtgctcctgactcaagaatgaggctagtactttgggagagggttaacatgaggaaggccttcccaggtggtgctagtggtaaagaacctgcctgccaatgcaggagacataagagatgcaggttccacatcgggtcaggaagatct

SEQ ID NO: 25370 - DNA, 997 bp, Bovine  19866880815427
  misc_feature (1)..(1): n is a, c, g, or t
ntcctgagcttcccttgtggctagctggtaaagcatccacctgccgtgtgggagacctgggttcaatccctgggttgggatgatccactggagaagggaaaggctacccaatccagaattctggcctggagaatcccatggacttcagagtccatggggtcgtgaagagtcagacatgactgaatgactttcacttcacttttttcacttattgagggcaagaggagaagggggcaacagaatgagatggttggatggcctcaccgactcaatggaccagtgttggagcaaactctgggagagtgtgaaggacagggaagcctggcacactgaagtcatggggtcacaaagagtcagatatgacttagtgactgaacaacaatataaatattatatatatatatatatatgcatatctttgtaacattaattcctttctgtcctttagacatagttgaatattcatttaaaaaatcagcattgaaattttaatctgcagctccaacttggcagtccagacattctggtattttagtgttaattcttaaacctaatgtagttcacctacaaagaagcattctcagcataggtacagatatatcagtcactggtctgacaccaccatttaggaaaaaggcagatgattggtttgattaaatgtcagaatagaatgattctcacatccacagccatgtcagatttgtcaacatccttcaccctgtctttcttcttgtggtacttatacctaaaactgtgcattaagcaatttacttaggtaatccttttatgagcacctgctacttgagaggcacagagaagtcactagtagaggtgaaaggttactttggggaaaagaagactagataaagcataaacacaagtgaaaagtataattaaagtttctccttaggagagttagttattctattcttcctgtttcatatataagtgcttgaagttgctcagtcgtgtccgactctttgcaaccccatggaca

SEQ ID NO: 25371 - DNA, 1019 bp, Bovine  19866880829489
  misc_feature (1)..(1): n is a, c, g, or t
nagttaggatggcctcattcaacagcatgaagttctccaagaaagtgagtccttctttgtccaggcagagtgcagtttctgttcttatcaaatgtaccttcagtgccaccatctgggggactcttgagatgttcaagtataacagcatcattgatgctgcatatgaggctaactctggttgggcatttgactctcaccgaattttccaaggccttcatgagctgtgcccccttgtcatttaaacatgtgtaacacaaagtaaaccagatgagcacatgtctaacataacatgggagttgcctaaagttaaattgctttgatcaatcagatttatatttaaagccagcagtcttcagctaaatgtggtgaccaaagaatggaagtcttatttatttatacaatggtacttgtgtaagaagtaccaaatctcagaaactgctcaggctacctcatgaaaggcaccattttgaagtttccctgctggtgaccctaattaatagccaacatagaatcactctttatagatatgctttcatttcctgccatttcttcaaagcaaaataaatgttttgcctcacagaaaaattaaatatttctatttcagaaaagctgacaaaactatgattgatatcatcaattattaggacattagaatgaccctcataggattgtgtttccatgaatgctagagtttatcacagccatccagaacagccagcatgattctgagttagttacattattttatacaaataaccactagtatttttctaagctcttgcttctttacaaggcagagtttcaaattactattaggaagaaaatttgtcccttgcaattatactgtacatcataattgcccgttcttaaggcaattttcttttactgatcacagctgtagatttttcaaaaggttaggtaactgactaattcattgccaagtaccttatctctggagacttaggttaagaaatgtcattttgattgtctccatggcaagtcatgtcatatatgaacaa

SEQ ID NO: 25372 - DNA, 1202 bp, Bovine  19866880888713
  misc_feature (1)..(1): n is a, c, g, or t
ntcttgaaaataaaaatttcaaaaggtcagggaaagcattgcaaaggctatcagtggtgtttacatatctaaaaatgcagttttcctgtgattaaatgtaaaagaaggcttcctatggcttcacaatgagcaaagctgaagaactttcaaaatgaatgcatcttgttacgaaggagtgcacactgacaccccacatccatttagactgactcccacaggcatccaaagtcagtccgggccccaagtctttctaagctgtcattttcttctctgtgtaatgtagcttcttgtcagctcctcatatcctgcttctgcccaccctccaggtcttgtttaagctctgcctcttttgaggtgttacattagtgttctactcaataggaataccactttttgacacaataaaataatgcttatttaatgtgatctaatttacattttactcttaaatgctcatctaattttttagctttcaataaatactctttgaatgcctaccttttagactcagtaataaacaaataagagagaattcctgccttctaaagatttacatctagcaagtgatttagaagttttggagtcagcattccctttgagagcataactgaaacaattgcaactttccccagaaaaatttactcacataaaatttagcacagaaatttgtaggatgcaatcattatgatcatgaaaggagagtcaaaggatgctccccaggtaacatttttaattctgttttgtaaaagtaataaactcttttccacctgaggaagtattgaagagttatctaggggaatataacagaaagcacaggcaaaaggaagaagtgaaaagaagaagaagtgtaaaaaagaatgggacatcaaggaaacattaagatttttcattaggcaagagggtggtgtgaacgtaggttgcagatacatgttggaacaagatggtttatgtacttgctaacatgccaggcctgtttgggggaacagataactcatcttcctaggagaattatcatttttctataccataaggagttttatcatgttcttctttcacatctttcactaactttaagcacctcatatgtagtgctttgcagatattaaatattaaactgagagtgaacaagaaagactaggagaggagagagggagaaggttatgagttagtgatctgcagagttcggaaaggataacaaagag

SEQ ID NO: 25373 - DNA, 1101 bp, Bovine  19866880896674
  misc_feature (1)..(1): n is a, c, g, or t
natgagttatttgtgagagaggggtgatgatattgtatttccaaatgtactgaagattaactttatattaaaaagtaaaatccaggcaggaaaatgaagctatgtagcctcacagattatgataattctgattttcaatgtgacagactaccaacaaactttattcacctctacaagaatttgtgctgttaaaattataattaattaaaaaaaatttattgcagtatagttgatttacaatgtattagtttttgttgtacagcaaagtgactcagctatattctcttttttattgaagtataattgctttacaatgttgtattagtctctgctgtacaatgaagtgaatcagctgtgtacatagatgccctccctcttgaatctccttcctatcccccaatacattcttttccattatggtttatcataggatattgaatgtagttccctgtactttagagcaggatcttgttgtttacccctcctgtatgtactagttttcatctgctaatcccaaactcccaattcttcgcttcccaccccacctccccatggcaaccacaaatctgtttgctatgtctgtgagtctgtttccatttcatagatacgttcatttgtgttgtattttaggtatcacatgtaagtgatgtcataggggatatgtctttgtattcctgacttactttgcttataaaaccatgattctaacagcaacagcaataagaaaccctaacctacaactcacaaatcaaaaccaaagtaaaataaatatcacccacaaagaaagtcaacctaccacacaacaaatgccctggtaatgctgctaactcaaaccaaatagtaattatgagggcgggcatggaaaccagcagagttacatctgatcacaaatcaggccttgcctttatgctttctgccacagtcagggccataatcatagtgccccatttagatgccacgtctgggtcaaaagacatattcagagatccaaataagcaccctgagtaggagcaaactattgacctatgaacatctttatttgcttgttgatttttattcaatatacaatttcgattttagatagaagatacatagttgtag

SEQ ID NO: 25374 - DNA, 2296 bp, Bovine  19866880905515
  misc_feature (1)..(1): n is a, c, g, or t
ngcatatttttaaaatttttattttactgtatagagcatgagaatgatggagttatatttttaaacataaaaacttttttttgtttcaacatttgtgaacaattcttctgttggccagtttttttaatcactcacaataaacgcaaagaataagactggtcgttaataaatttttacttcctaagataaatggtgtaaacttaaattgctgattcttatatctttccttgctgctttttttctattgtatacagagttcattggcaaaactgcaggtttcataattaactataaaaactgaggagttcacacagatatgctaataactccattaaacttctccctttatatgtaaattcaagcccagatgttgcatcatttgcaaatcttgcaattaaagcattttataacttcagttatgcaaaggggcaccagactggaaaatgggtaaaattgcttggctaggacattaccatggcaacccactgacctccattcaattagttaccagcgaagattcagctattaattataatggtcaaaagtggatatcatctggctctcctcttacctttttaatatggacatttttcactcaccataaatctttgacttttagaggcaggctcccaaactgaagcattaaaactgatatagcttaagtactgatggaagtgagggtcaagaaaggaatctcatttatcagccatattcaggatagttctccaactttctgtaatctaagcactctgtcaggcaagcttcaaagtgaatattcattactgctcatttttctcattgaactctttgcattctgtgtgtcagcaattacctctcactttagaatgccttccttaattagggccacaatcaccaccagggagcctctgaaatagatgccccatttttggtttagctttacacttttccagggggaaaaaaatagttaatattttcttggcaaaatataaaagaaacgttgtgaattaattacagaagtacttaataaatgatgaaaaaaattctatttgcattagtgccggcttaaacataagaatcttgtattcgatgaagttaaaatatactattcttacagaactttttttttttcttttcttttttttaaattggtgtataattgctttacagtgttgtgttagtttctgccgtacaagtaagtgaatcaactctgcactgacctagatgggtgggatggggggtatgtgagagggaggtccaaaagggagggcatatatatatacatatacatagcagaacatgttttaattgctgtatccacaatcataaaataacaaatactcgttagacttgccaaaacatggtgatcaaccagtgccatacatcttgcactgcactagtcgctgcttcttcattcaacaaatatctactgtacacctacctgtgtataagacagtgttgagggtggtaagggtacagtgatgtccaaacatgacaagttccacaatattgtaaagtaattatccttttctattttaaggagatagaaaatcaaataataaggaactctgcaaccacatagactatacagtctttggaattctctaggctaaaatgctggagtgggtagcctttctcttctccaggggatcttcccaacccagggattgaatccagatctcccacattgcaggcagattctttaccagctgagccacaaaggaagcccaagaatactggagtgggtagtctattcccttctccaagggatcttcctgacccaggaatcaaactggggtctcctgcattgcaggcagattctttaccacctcagctattaggaaagctcaaataataagggaagtatcagttaataagaagtactatgccaagtattaaaatataacaaaataattaccattttgaatagttacaaaatagtgttagtagtacatatggagataagtgtacatattcagaaaagtttttgtcttgaaaataggtagttttttaataaaaataaatttaacattaaaataaaagtaaatttaccttaatattcactgaatttcataagagatgcattaatgagaatgttggacagttctgataaataattcctttggttaaagttcaaaagcaagatttttgatagttgtttactttttaaattatgattagtatagttatgaacattcctgatgtacacaagcaaaaatttcttatgttaatatttccaggagtgaaattgctaagtttaccatagggaatgctcaaaaactccacaggagagtgaggcaatcaattaaagtataat

SEQ ID NO: 25375 - DNA, 994 bp, Bovine  19866880910543
  misc_feature (1)..(1): n is a, c, g, or t
ntaaagaatccacttgccaatgcaggtgacctgggatcaatccctggataggaaagatcccctggagaagggaatggcaatccactcccagtattcttgcctggagaattccatggtcagagaagcctagagggctacagtccatggggtcacaaagggtttcactctcagtcagtaaacaagaagaacacaggaatttcaataggaaaaaaaaaagactaatgtacagaatatgggcttctgaggtggcactagtggtaaggaaaggcctaccaattcaggagaggagacctaagagatgtgggtttgatccctgggtcaggaagatccactggaggagggcatggcaacctactctagtattcttgcctggagaatcccatggactgtgaagcctggcaggctacagcccatagggctggacatagtctcacacaactgaagcaacttagcaaagacaccttaaagaatacattaactattaatccctaatagagattaactgctaaggggctaagagaattccaaagaatgcaaaaattgcagatatagagagcagtcactgcctcagagactgaggcagagaaccaaagggagaaacaaattttcaagagagcccactaagtctaaaatttagaccccattattgaaagtgtggctgtgatactgtatatgatggataaattcattgagatcatgtactctgagttcaacaaagaggaaacttcctattggggaggagaatttactagacactggcccctagaattttcctgagactttgttgtgaagctaccagagaggtcctgttaaaactccagagaaaatttcccccttattgtgcctgtaaaactcagcaagaagccattgagaaactagcagacttcactaaggaaccactttccgagtctctacagatagctgcttggaggtgagaatcataggagattcagaagacccggatgtcatatgtcaccagagcaaggaggagaga

SEQ ID NO: 25376 - DNA, 1086 bp, Bovine  19866880938230
  misc_feature (1)..(1): n is a, c, g, or t
ncatttctatgactctattttggaggatataactccatctctaggattttgaaaatctatagggtatacaaatgagactcactgatgatttaaaaaacactaactttctgcaatatgaaaaaaaaagatttttttctattccgaaaaatggaggtataatttataaattactttttctctctacaggttaatataatttcacttaaagttttctggcatttcctgactaattatgtaatgttaaatatgaattcactggagaaatatgtaactaatgtatattcttaagaatgaagctttatcttcttgtacttcgtcttttgagttattgaattgatgaactaccattatcttaattggggctttacaccatgagataattttatctcacagaattaccattttgtttcttggcatcttactacaacagatattcttggtattttattgaaaagatattttatgactcttcatattttattgattgtgatttaatcacaatcagaaaaattttatatatcaatttaagtaaggaacattctgaaatttacacattgcctcaaaagtaggaaatctcctcactcactatgctaattctgatagggaaactttgtctataacatctaacttgaccaagagctttgagaatattttctttggttactttaatgctctgttagtatttctgggtttctttttcctaatcctagacaatatttaacatttatttaacttaatcagaagttgtaaatcttcaaacattttaaagatgaaaagacattacataattttacatcatttatgcaaacatgatatttatgctcaccttctagagttatgaagcaataatattttcagctttctttaattcacagtatgtaaacttcacaatgtttctaatattctttatgccatttttgaaatagatggattgattaggaaattgtgatgtttacagataagttggggacagataaaaattttgaaatgtatttatatattctactacacatcaatttttattatttgaggagcattgcttaaaaataatacaggtgacttcaaactgacacagcggaacattca

SEQ ID NO: 25377 - DNA, 1598 bp, Bovine  19866880962900
  misc_feature (1)..(1): n is a, c, g, or t
nagtattcttacctagaagaattcctggacagacctggtgtcacagagtcagacatgactgagtgactaacattaagactaatcctacttcagagcttctctttctccagcccaatgctcattcaactaattcatcctttccatgaatttaaagataacaaacataaatagtattgtcttctatgaatcttgcaagcagaaagtgagtcaatctttatggcatttccatttatgccatatagaaatatcttttaattagttgcatttgtttttatataccatcagatgcagccttagctcacaattttgtccttaatgatgattcattagctatgtttcaaaaatatacagtatttattaatatcaggtactgctcaaaatctacttctaggttaagatttgagaagataccatgtgattcaaaatagagtatcagtgcatctatagtgcattacacttctgatatagtaaatattttatgagtattaacaggaaatttaaagcattactgactcttgataggaatacaggatcactgacctctgtggatggtgccattttccttagctcagattccttagctacttcttgaggtcagaatcataattcccaccatattatatttgtattcttattgagctattcatatttgcaggattttacagacaagttagaactttgtcatagttcaaagatatggtgaagtatttcttctctatgtgtttcaggacatagctgatattttagagcagaatggagaacatctggcagtttattcgaaatgcagaatctggagccccattccagacctgctgaattaaaaatctgcatttttacaaggtccccaagtgttttgtctgtgttgttgtttcagtcgctaagtcatgtacgactctgtgactgcatgaactgcagcacaccaggcttcccgctccttcactatctcccagggttttctcagattcatgtccataaagtctatatgttaaggttttaagatgcattgttgtagaaagcacaagcaataaaaagttgtggttttgctggacatgtctttcacacacggcgacaatagaagagttaggttacgttgatcttatatcaagaggaatagaattgcaagaggagaaaagaagaagaaagagctggcattctttcaagagaaaaagataaggtggaattgttgaattgcatcatcattaaatatgcaggttctaaatgttaacaagcttaggttattttagagatttagtgatgttaatctttttataatcattcaagttctttgttgctaagggactttggcatcagattttgtatttctccaacacttacatgtttaaataaacagcatgtttatttagtgttaaaatgcttcatgcagcattgtttacaattgagcagatatgagtttgttttgatgtaactgttaaaaatgatagtataatctactgggaatatgatacggttttccaatcttcctcaacagatttcacattaccaggcaatcttaatgtaaaatttcctgaatcagtgagagtttcatgccaaaaaattagaatatatagtaagatctatgtatgtgtaaaccatatatg

SEQ ID NO: 25378 - DNA, 1128 bp, Bovine  19866881064015
  misc_feature (1)..(1): n is a, c, g, or t
ngcaaattttggtttcgtgacacttggcatttggttttgagtatcatgaaaaccacctcaagatagataaataaatgatattaccctggtttctatttgatttctactttacatgaaaacaaaatagaatttttaacttgaatatgggagtataaataattataaagaaacgtatgtcgttttaatattgtttataattcctttgtttcagtgattatttcagtctttggtgttattgaagccaatttgactactttgtctagaaggtaatcttcttatttctgccacccaaaattcaaaagtaaaaatatctgattttgacttttgaggtggagtaggaattattatgtctttgcctcttcctgctcatcttgattgctctccaactctctaaatctccattttagctcaaaaactagaatgtcacatgtttgatggatttctgttttctgagttttataaagaaatttaatataaattcaatatgtttccaaagtaaatttaatataaactttggttttctatggggaaatatatgataggctataaagatatatgatgcctattttatttttatttggagacattgtagaatagttgcaaggagttaaattggccctgaatatttgttatttgtaaccttatgttgtgtcaatatcgtaggaaacacacaagtaacttgtgactcaaagattgataggtgacagcttctattatcttataactcacatttatcgggcaacaaataaatcaatgtgataaatttattgttagaggtatgaatacgtagctatagtagaatagagggagttttaatttgcttaatttaataattttctaatatctaggtttatctatattagcctgaatgcaaaatgatctttctgtatcaaacgcagactatctctctaaatcccagtcccctatctgaggcagagaggagagccattggttatgcctgtgtgtacaaagggaagggatttataccacaggagaagaactccaaaattacgaatcttgaagttgaaatgggaactgctacacagctcccaccctcctcccttgagagagggcaagaaacctatctctccaaaattttacaagttttaaatgtaatataaacttgac

SEQ ID NO: 25379 - DNA, 756 bp, Bovine  19866881096245
  misc_feature (1)..(1): n is a, c, g, or t
ntttactagtttttgttataattgcatctttcaggcaaatcagccatctgaatgagcttgacaaaggccatctcttccagtggttaggcatttgggaatccatgttttcagaaggaagcatgtcaggccaatgctccaaatgttgaggataaacaagtggaattttctggcatctgtgatatgagtcattgacagttattttcatatacattctctctgacagagaaagattatggagggttttcaacttgccaacaatttctctacattaatttgtctggatattttccaaaatatttatctgaagagaaaggcttattattgcctggataacagtgctttttcctaaggcctcacttttgtggatcatgcattgctatccttcgactatgcttgctcatcactgaatattaccatgatgaattaaatgggtgtttttctttattctaaatcagtgccagagatcaaaaagctgctaaaaatcctttccacaagagtgcctcccagaaaaggatgaattatagttattctcgccaacagatacattctgttgtactctatcactttctacgatccaacaacttgaaactgtgccaagctaattagctagttcagtgattgttatattaagagtccaaataggcccaaagaggtcaccctcttcatactcaagtacaactttatcacttttctcaccaatcagaatgtggcataaagtttcccaacaactaaactcaatatattatcttcatgtag

SEQ ID NO: 25380 - DNA, 1341 bp, Bovine  19866881120993
  misc_feature (1)..(1): n is a, c, g, or t
natgtttctgagaaaagcaaaaacatttacactctcaccagccatgaataagcatgtctatttcactaatgcttttatatatagaaagttctcatctagatatttgatcaattattcagttctcagttttttattgctttctttgtggttttatttttacatttaactataaaaattaagatgtattttctattttagtatggagtgaggtgactgtctaaattatttttaccaaagcctattcaattttcattttgtaattttccctgtcattactgcgtaaaagcagcaagttcctttttaatagttctaacaatatattgaaaattatagtaaccagaatcagtgattgtgctttatgtttgctctgcagaacattttctgtacatgaacttggtgatgatcttttggattcccaactccaagtccctacttggttctcaaattaccctatattccctttaccagggcttctctggtggctcagctggtaaagaatccatctgcaatgcaggagacctgggtttgatccctgggttgggaagatcccctggagaaggggaaggctacccattctagtattctggcctagagtattccatgaaatctatagtccatggctgctgctaagctgctgctaagtcgcttcagtcatgtctaactctgtgcgaccccatagaccgcagcccaccaggctctgccatccctgggattctccaggcaagatcactggagtgggttgccatttccttttccaatgcatgaaagtgaaaagtgaaagtgaagtcactcagtcgtgtccatggggtaacaaagaattggacaggactatgcaactttcggagaaggcaatggcactccactccagtactcttgcctagaaaatcccatggagggaggagcctggtgggctacagtccatgaggtcactaagagtcggacatgactgagcgaattccctttcacttttctgcattggagaaagaaatggcaacccactccagtgttcttgcctggagaatcccagggatggcggagcctggtgggctgcggtctatggggtcgcacagggtcggacacgactgaagcgacttagcagcagccagcatgcaactttctactttcactttccctttaccataggccagtggtaaagaatctgcctgccagtggaggagatgtaagagacatgagtttgatccctgggttggaaagatcccctggagaaggacatgccactcactccagtattcttgtctagagaatccccatggacagaggagcctgttgggctcatggcgtcacagagtcagacacactcttaccacattaacaatctag

SEQ ID NO: 25381 - DNA, 807 bp, Bovine  19866881135519
  misc_feature (1)..(1): n is a, c, g, or t
naaagttgtggtaattattttcttaaaattgtcagaatgtgtgctaatctggggatagttatctttattccttctttggcttattacaggtttaaattaagctgaggtttctttagtgttatttttctagagccactgggattagagatgatggattttgtggtgctctgagtatagttaagctcttgtcaacataagtataaaattattgctgtgtgcagttggtatgttttcgaaggtaattaaagctaaacattgtgcagagaaagatgattagaaatcttcaattcacaaagaaatccagctttgctttgacacctaaaacctcacattctttctgtttaaaaaaaaacaaacttaaactatagaacttttagaaaatttttcgtgctgatttcaaaatcaaccccaatcctgaattattttctgtaaaatgcatgattcttacccctgacagtctaagcactatctgaatattttagaaccttatttgttcatttcatattcctactttagttatagaatagtcttgtatacttttgataggggtatattttaaaaacaaacagaaaatgacagacttaattaattacctatttgttatttttttctttttttctaaagctatccacttaaaattttccttttttttttttttttttaatgctgacatcaccattttattagggatatgaatgttgataaaatgcaggagaaagtaggttaatgccaagtatggtagtttacaccatacttggtaatttggttgcttctgaattctccttttcatctttccacacaaaatat

SEQ ID NO: 25382 - DNA, 711 bp, Bovine  19866881157593
  misc_feature (1)..(1): n is a, c, g, or t
naaaatgttagtaaacccaagaaaactattcagtggaatcagctctatgtaaatgaacaccaacatttgcatatttccttttccttcttcatacattaagaggccccaggtggtgctgaaacaagagtgcagtttgttttgggattctgtaacaatttgtatcttttgctcattcaccagctgtgtcaaatatggtgcatgataactggtgggatcttctcattgaagaaaacattttcttttaaaatctggttcttgatagtcatgtaagtggaaaataacttattagctagaaaaccatgatttagatcttaaacccagagtcttactctaagaaaaaatatagtcccttattgctttagaaaacctaaccaggtacaaagagagtggtattatcagtgaaaaccaaagcactggaaaaaaggagaggaaaaaaaggatcacagaaagaagatattactatgttatcttttctaaatattaagataagcagaaattaaaacttctcaactgttcattttaagaaaattggccatataagatcgcaattaaggatgtttacaaaatgtgtagactccattgaaaaatgagaatgtggagacccttgttcaaaaaacagggggaaaaagtacagttaaaggtactaagacatgaagctctttcttttaaagtattttattatttataaaacacaatggaagaacacatgag

SEQ ID NO: 25383 - DNA, 936 bp, Bovine  19866881163402
  misc_feature (1)..(1): n is a, c, g, or t
nactgtgttccagctgccacgtggaattctcttcatcccctgtggtcgtcacatcagaagtcatccctcgtggcctttccctgattcatagtcttcccttcctctgagggcatggagttcccacttgagtcccacctcttcaaaaaaaaaaaagcaaaactatttttttggaactttatgtctacttcactctgttacagaatatcattttatgtgaataagtactattagactgcattcttcgagcatcatttaaaagggaaatatctgtattaaaaaatcttggctgaaattcaaggttagctactccctgctgctgctaagtcacttcagttgtgtccgactctgtgtgaccccatagacggcagcccaccaggctcccccatccctggcattctccaggcaagaacaccgggagtgggttgccatttccttctccaatgcatgaaagtgaaaagtgaaagtgaccccatggactgcagcctaccaggctcctccgtccatggattttccaggcaagagtactggagtggggtgccattgccttctccgctagcagtgtccaaaaactgggtacagacctcctcaggtatattcaatttttatgatactttttattacaattggcatttactttgaatgccttataccaaatgctcctcttttctcacctagacagagttctcttatcctcttgtggatcgtttgcccaatactgaaactctgtcaggaaatttttgttggttaaattttaatgctgtggactttgtgatatatgaaagtagaaaagctttaataaagaaggatgaggataggtaaatccaggtactgtgctgacccactagtctgtctttatatttagactttttcacagactatttctagtacaattattttacctcacattctttgaacaaggaacagaaccagataatt

SEQ ID NO: 25384 - DNA, 1806 bp, Bovine  19866881268072
  misc_feature (1)..(1): n is a, c, g, or t
ntacgttgaaatttaggataaaactatagatgggttattactccttaaaatgattttctatacctgaaagatgctatattacttcactttctatatatcatgttctgattgtgttttaagccattttttgaccctacagcaaatgagtttcattaaaatttattacagctttattaaatatgagtagcaatataaaatatatccatactaaatcactcatggcagtccaatgccaatctacttaaaataaaactaatgtccttaagctaacttaccagaccttctagtgaatttattttcactaggatttctattctgctaactaatcagctctggtaaagctaatcatttttccaagacacaatttccttatttgtaaaataaaaaaataaaaagccactagctctcaggattatttgtaagcatttttccaatagtctaacacaaatatgtaataggaaaaattattctgagtatctactagtttgttttgcaaatctctgtgttaaaatctaccattcttaaaatacctgacctaccagaatattggagctcataatggtatggttaaaaccacagcaggtactaccctcggaattgtttcttttgactttaataatatttttttcttggggatgacgagtgctgatggtaaagcaaatgcctgtaatagtgatttggacactatttatcttagcttagtaaatatttaggcatgtgccacatgcgtgaaggacaaggacatattatatctgaggctagttgagaagcagaacacagatgtctacgatttatggaaatgtatctgggcaacagttttctgtggtgtttacagagaataaatttcaagaccatgggaaaaatactcaaatgtagaggtctttttaaaatctcatttcacaaataagggcatagagtattctactagagataattttataatatcttgaaagtgaaagcgtttgtcactcaatggtgtccgactgtttgcagccccgcagactgtagcccatccatggaattctccaggcaagaatactggagtggattgccatttcctcctccagaggatcttcccaacccagggatcaaacttgggtcttctttattgcaggcagattctttaccaactgagccatcagggatggaaaaatatctttaaagatacaactaaataataaatattagtaatatttgtataaattttcacctacttgataaaggtgatgccatagttacagttgagttctgtttattttggaagaattctcaatggggaataggagctattaggagctaataggagctattaatagaaaagctaataggaggctattagctttcatctgattaagttgagcacattttctggaacaaggagattccaccagatagaaaaatatctcttttttttctttctacctaaccaagacaaagaagaaggagaaaaggaagggtggttggaggcagagaagagaggagggaggagaaatcacactcaaaacaaacaaaaagccttatccttttatacgtttcataaattattgtagttttgctttgatttctaggtttgcttaattattaaatgttgtgtgtgtgttccgaaatattaaacacatatttgtccagtaccatatttatacatctttataggtttttatttaacctggccacctaaaacaaatttataagtgcttttaagaacttccagaagttaatgactagaaggactatgttaaatagagcagatacagtcatttcagctaagtcatataagaggatcatccttaatattgaaaaggacaa

SEQ ID NO: 25385 - DNA, 1050 bp, Bovine  19866881364430
  misc_feature (1)..(1): n is a, c, g, or t
ngttgtgtttgactctttgtgaccccatgggattgtagcccaccaggcttctctgtccacagggcattctctaggcaagaatactggagtgggttgccatgccctcctctaggggatcttcccagcccaggggtcgaacccaggtctccttcattgcagatggattctttaccatctgagccaccagggaagcccaggaatactggagtgggtagcctataccttctccaggggagcttccagacccagaaattgaaccagggtctcctgaattgcaggcagattctttaccaggtgagctacgaagactattatattcttagacttagtacacactcaggagcagtattttgttattttctatgtataatataggattagaactggtctctaagctttggtatttataggctaattgacaagccataaatttgccactagtcacaacgtatataagtatttatataaatatataatataaatacatatgttttatctcacaactttgtatctactggtgcaactaacagtagtcactaaaaaaaaggttagtatagaacaaataaaaatttgtattagagacttaaataatgcttttggtcagctttattttcacttttatattcctatactgatttaggagctgaaatatcctcagccatataaatcacaacaattacaaacccccagactagggttcaaatgagagttttatcttcaaacacactcctttttgctttgcaataagccttttatttacaaatgggttttcattatccatagaaaatgcaaatgatgcaagttaaactcgttcaagattaattttcatttgagaagtgcaagatttgtcgctcttccttttcacaggcaaatatccatagcatacattaatgtttcatgagaataaacagcatattaaatgaatcctcctggacaaatggcatttggtcctatcatatacaaataattctgacatttgataggacaaagaaacatcactttgacattaccctcggttaagattttaaaataaaacatgggggctggtat

SEQ ID NO: 25386 - DNA, 1200 bp, Bovine  19866881377540
  misc_feature (1)..(1): n is a, c, g, or t
naaaatgtggcctaagtggaaattgacaggcaatgctcttgaattagctgttaccatgtcaataggtgtaaattacaacagggaatgttgactttaattggaagatccctagcattgctctgattttagctttgagatacacaaacaagaagtcattttattctgtcacttcacatcatagtagagatacaagtaagggcaataagttcaaccaagacaaatagaaaataaagcttccttttatcaaaaactctagaaggtggctaggtgcactgactcagttaagggtaggtgttaatgatttctaaagactcattaaagatagcgatccatttcaaagtgtgtttagtttgacagaaaatgtgttggagtaaataggatgaacaaagggaacagcaggaataaacaaatattggatcttcactgcttactattaatagtttaaaatctctaaaatataaatgtctcgaaaaaaaggtctccactacaatttgtggaaagtgagacaggttactatttttctaccaaagccattaatatctgagtcatagatctaagtcaagacattggatcagaattaacgatgtgagaaaccattagaaagcaatttaataagacactctaagagacatttatctgttttgtgtgtgcaagttgctcagtgatgtccaactctttgccaccccatggattatacagtccatggaattctccaggccagaatactgtagtgggtagtcgttcccttcttcagggcatttccccaatccaggaatcaaactggggtctcctacattgcagatggattctttactagctgagctaccactgaattacataactatagttctgaaactctggactgtggactacctaggcaggaaggagttgttagaatgtagaaagcatgaaattactgggaaaaaaaaaaaaaaaaaggcaaatacaggtaagtttgaagatggccaacaaataagcagacaaccaaaaaaattttgatctatttacctgatagagatgacagacacgtattaaaaagcaggtctagggttctgagtctctgagcatcattacttcctcaatacactacttccccactaacatcagaacactgggttctccacagagataaacaattcatcgctgcagaggtttggtggtttataacttgtgccagaagaaaaactcaaggcaaagggt

SEQ ID NO: 25387 - DNA, 1089 bp, Bovine  19866881402553
  misc_feature (1)..(1): n is a, c, g, or t
nttaattgaaagcaaatgatttcaaagcacagtcatttgtgtcccagtttagtcatgatagatctcaagcagccttaaaaacatggcctttaattgtacaagcttgagtttggaggctgctgtcttaatcagctcaggctgctattacaaaatactatggcttgggtggcttaccagccacagaggtctgtttggcattagttctggcagctgggagtctgggctcacggtgccagcgtggtggggttctggtgagaaccctcatctgggctgcaggaggcttacttcttctggtgttttcacatgataacaaggttcctcttctcactagagccctggtctcattcctgaggactcccctctcaggagtgaatgaccccaaaggccctgcctataaataccaccacattggtgattagatttcaacatagaatttaaggggggtggcacaaacattcagtcccttaacagttgctcaaacaagttgaccagcttctaagagtggaaagccagcaattttttaaaatgtcattgtaattgtctataccttaaatggtactttgttctgaagaaaatagtaagaatttatcattaagtcttcttagtaattggttaactttctgcctctgatagataatttgtcttataataaaaatgtgccaccgtgaccttaacactttatagtctctgtcagtgtgacaggtgattttcttctctccaaattaggcagtgattctagggactcaaagtaatttttgtgacgtgattgacatgtgaaaaagtgacataccactttcactaaaaaagatgcatattatgagcaaagaggcctctgtgctctgataaaactaaaagggaaaaactactatgttgataattctgaggaagaaagccaataaaaatcatcccatccccatgtacttcattatagactttgaggtagggtcattatttatattagattcttagaataaagttgaactgatttttaaaatgcaacatatagttgagaagataagaagctattgaacattttggatatgagttgaaagaaaataatccatcctattcattgcaaggtttcgagtc

SEQ ID NO: 25388 - DNA, 1028 bp, Bovine  19866881407029
  misc_feature (1)..(1): n is a, c, g, or t
nggggaagtcaactgtgaagagagcgttactcacagaggctcctgacccttagaaataccctcagctgttctgaaaaccacaggaaatctactttgtttactggaagtgtgccaggtgtttctttttcataaactcgtaattgattaatcatcatcatcatctaggaaaaaaagggcaacattatgatgagaggttgtattttccatctgtataataaatagaatatttcaagtgagaaatgatgaagagaaaaagaggagcaaggcagagggaaaatatgaacataaagttaggcaagtagatatataatataatcatagtttatactcccaagctatttgaattttacatctacaaaataaaacactaaattggcaatatcagttaatattttattctagaattataactgttttagtttctggaataatattcagtcaaaaataatgaagtaaagcacagtatgatcatcattttaaaaattgctacacttagatagtaatatcttattaaaattagttgtgaataaaatagaaagctgacagtaagtgaaaatatattttttaaaaagacaatcatcttccttggaagcttccagtattttttaaaaaatggaaagtggtcacttaatagagacggtagaattggagagaagaatgttaggtatctagacattaaattaaaccatgcaaacatgacaagtaatcaagcagaccttttctaaaggcagattagtttaaataaaagaatatgtccctgtgtgggagaataatttacctacccggctgtacaatgaaccatcagggatgaactttagcagagcctggactacatagtaaaaaaatgtacaaaagaattacggattaacagctcattgtgaggactacatttggaaaaatacaatatgaatattaaaaatagatttcaagcttaagaataaatgattgctaattaataagaaatggccattgtctttttgcctctcattgtagttttattgagtctttgttctgaattaccatttaca

SEQ ID NO: 25389 - DNA, 692 bp, Bovine  19866881480339
  misc_feature (1)..(1): n is a, c, g, or t
ngatagcaagagttggatacacttagagactaaaccccaccaccaggtgacaagtaattatatccagaaatcaagagcatccagtgcaagaatatttgagaatttccaggttttctttctcaggattataagccaagatattaagagactctttttctagggttgcagggctagttgagagaaggatcagatcaaaacctggtttctctctatacagtgccttgctttcactctcaaaaaataagcattttaactaaacacaggaaacaattcaggactgatgttgaaattataagccatattttggatccaagctctcatatactttccacgttttcaggaaggaaaaagaaagagcagtgatgatggaaataaactaatgctaagaaggtgacaaatacttacttgatcctgtttctcaatcagctgttccatgtctagttctaactgttgcttctaccatacatttttctcagcagacaggtaagatggtctgatagtcccatctcgttaagaattttccacatttgttgttatccacacaatcgaagagccgcatagtcaaattattcattcacataatcaaccaaacagaactaggtgtttttctagaattcccttgctttttccatgatccaacaaatgtttccaatttaatctctggttcctctgcctctctgaaacccagcttg

SEQ ID NO: 25390 - DNA, 1119 bp, Bovine  19866880573336
  misc_feature (1)..(1): n is a, c, g, or t
naaaaagtattttatattatcaaaaaaatgaagcagtgactattttcattttgttatatcaactcagtattttcctattgataatgttgcacaattactcaaaaatgctctatttgaagtctgttataattatctaatgaatgtgttatgcccatataattgagtctagactttatttttttaaaactaataataatgataataaaataaattttttgctgaacattcactttatatatggaactgtagggaaaataatacatgagtaatcttatttaattctcacaataatcctatgatgctggtatcattctttcacatcatttttgtagaagaaattagtctcagagagattaaatagctcatgcaagagtatagaccagaaagtgaggtgtcaagactggaaaatcttttattccagaggaaatgtttctgattaacatgaagaccacagaggcttttacttctttttctccaataggctctgcaaaatgctgattatgtgttttactcattagtcctgggaatatttttggtttgagggcttagccctgcagcttttcctgaccttcatgccctgacctttcatttttctcttttttgtctagaatcttctctcacacagcagtgaagaaaaacaatatatttaactttccccagggaaaagaaatacttgtagattaggtttcatagggaaaaatacaaataagcaaataaataaaaataaagtgaaagtaatcatacattttgaagtcaaatgacacttcatcattccttgacttaagacatacgagggggttattgcttaatcatgtaacaaccaattgtatttaaactgcatattatactatagcttttcattttttcctgtcctcatagatttttcctttttttgagtcattattgtatttttaggactgagaaaatatcaagcctatagaacattcaggaaatgcttacataaattgacataaatgaacaacaaatggatggatgggtcacattctataagaaaacacaagccagagccactgggagccattaatcatccatggtcaaagaaggcagcaaacagaggggcccaggttttcaatgtccccaaaattcaaaagagtccaa

SEQ ID NO: 25391 - DNA, 814 bp, Bovine  19866880954618
  misc_feature (1)..(1): n is a, c, g, or t
ntgtggacacaagaagtgcatcgcccaagggcatctctttgggtttaggctagtggcaaatcatgacaggaattcaacctttcccttacaggatgcttataaactgacaaaatcaggttaatgtgaacaccaaggtcaaccacaaaaggaaaagactttcacaaaaaggcagcctaaggtagattagtatttaaggatagcaaacaagtgtaattgatcaatggcacacatgtgcaaccttgggttccttagtacatctggcagacaaccctttcctacccacatcttaccctctattcccaaagcattatccattgttcttaattcactaaaaatgactttacaaataactatttcaaaatgttgataagttaactgtcctttataacccttcaaaaagaaagatgaattgtaaagataatactttgtcaaactttgattattaaaagatagaaaaccatatactgtgtgtttactttggtatgaatctggcaagtatctgaagtaaaaaatatttatccaaatatttacaaattttatttttcctcatggaataaaatgtatagaaagcatgcttatttttaaaaataataatataggattctgtaaagaagacttctgctcttatatgaagatttcaagttgccttatatcttagtctattaaatttttttagaaaaataataataggatttattaagtgcaaaggaactgttttaaaacatgtgtaaaactgtcatagtagatttctttgaataaattttaggatggtttattgtcttgacccgtggcactaatcagtattgttacaagt

SEQ ID NO: 25392 - DNA, 1993 bp, Bovine  19866881077451
  misc_feature (1)..(1): n is a, c, g, or t
nttgtaaaccgatgctaatattactagttaatcccgtaagaaatagaatattccatgactcctattcatgagatacaaagccactggaccaaggaaacctatagctaggtaaccctagaggtactgaggtctacaaaagatgattctgtttttctctccacaagataaggtaaagtatttattgacactatttattgggtatggctacctattttatgccgatcagttcataagtacatatgaaagtgaaagtcgctcaggcatgtctgactcttgcaaccccattgactgtacagtccatggaattctccaggccagaatactgcagtgggtagcctttcccttctcctagggatctccccaacacagggatcagacccagatctcccgcattgaaggctgattgtttaccagctgagccacaagggaagcccaagtatactggagtgggtagccagcctatgcattctccagcagatctttccgacccaggaatcaaaccagggtctcctgcattgcaggcagattatttacaaactgaactatcagggacacacataagtacatatatagtaacctgtttcatcttatttatcattatatgaagcagttataattatcaacattttcctagttaagaaataaactttgaaagagcaataacaacaacaaaaactcaccagtgtcgcccagatagttacagatacagctataatttaagcctgattgactccaaaaacactgaatcactgaatgaaactactatggggaaatgcttctttattgaagtgaagggtaggggggaggggaaggagtaagcagagagaggatgaaactgcaaagtgaggaaacaaaagtcccagaagacatgttgcatgaggcagtttgctattattagctcaccctgccaaatattctacttgattccatcctttggtttagtccttgacaaactctgtgtgccaaatcccctaggtgaagccttgcacttgatactttcatcactagatcataatacctattgtgtatgtgtgtgtggctgtgtgtgccgtgtgcatagtgatttttaaattttttttttattttttattgaagcataattgctttagagaattttgttgttttctgtcaaacctcaacatgaatcaaccataggtatacatatatccccctccttttgaaccttccttccatctccctcctcatcccacccctctaggttgatacagagcctctgagttttctgagtcatatagcaaattccctttggctatctattttatatatggtaatgtaaggttccatgttactctttccatacatctcaccctctcctcccctctccccatgtccataagtttgttctctatatctgtttctcccttgctgccctgtaaataagttcttcagtgtccataaacacttttcagatccataaacactgtttactctgaagatcatctccctgctttctgaggactctatagatgcaccaaaacatgtactcaagaaagagccagtttttattattttaaattgtaaaaatctacaacttttgagaaaatcacagctatcatctgaaagttatatcaacttagtactcataatacgaaagaactaatagctcagaattgaagaaacgcccctatatattggtaagtaatttttcaatgctcactcaccattttgctagaacatttggccttagttctcaacctgtataattactctcctgttttgagtgcagaaatacaaattatccagagagatgcaaacacatttattccagaccaaagtttggggctaaccaataattttacttctgtttatgagttaagaactagttgatatcgagtgtccacaaatgggatcagctagaagcctagattctcaccttttatgtaggtagctggtggtagaattgacatcctgaaaatctttaatagagaacagaaggaaaaagagttaaaggctatctaagaatagggattcc

SEQ ID NO: 25393 - DNA, 1819 bp, Bovine  19866881126581
  misc_feature (1)..(1): n is a, c, g, or t
ngctatctaagaatagggattccttggtggattagtgtaaagaatccacctgtaatgcaggagacagagtaaatgagggttcaatccctgggttgagaagattgcctggaagaggaaatggcaacccactccagtattcttgccaggaaaatcccatggacaaaggagcctggtagactacagtctatgggatcgcaaaagagtcagacatgactgaacgactgagcacacatatacaaagaaatgaataacttctctgacactctcttgcatttcatgcatgagctcagtgcagtgaatagattagcacatttagttttcaattcagtagctgagggttgttatgaaagtcgagtgatacagatggtaggcaattattcatgctgcatcagaaaaccactataaagacactattaaaatatgattgttgattagtaatcatcatggtttctgtgaaaaaaaaaaaaaactttagtaaaaatgaaatccctggtggggattgctaatgaattaggaaaagggaaggttaagatgtcaatgtcattaactctgagatcagatgacctagatcatcattttccccttccgaagtctgtcaatttaaaccagtgcttttattataattatattattaatattatccatgtgcatttctaatgtatcacagcactcatgtagccttgcagtcaatataggtcttcttttttaaaagtcacccttgtttcctccttgttaaagcattcatttaattgggtattgcttttaagggaatttgaaaattcatagaacatgattttgccattggtgaacaacctacatagtgtaacaaaaattttcattgttaataatgataacttaatgagagctccgtatgaggtgaatgtggtcagactggattcttgtagattaaagtagattatttttaactttgcacaataatgtgtcaagatagtatggcctgaatgatgcccctgccctgcttcaacaattcaatgatgcccctgcttcaacattaatatgttgaagccctaacctctggtatttggagtcagggcctgtaaggagattgttcttgttgtttagtcactcagtgtgaccccatggactgcaggcaacaatgctcttccacccatgggattgcccaggcaagaatctttgagtaggttgccattttctactccaggggatcttcccaaccaagagattgaacccaccatctcctgcattggcaggatgattcttttcctgagtcacctgggaagcccctttcaggagattagataagattaaataaggtcataaagttaggaccctaagccaataggactggtgtccttctaagaagaagaagcagcactctaggagtgtgcacacagagaaaaaggccacatgaggacacggaagaagggggtcagctatgagccaaaggaaagaggacctagggaaaacaaaaaccagctaacaccttgatcttggatatccagcctccagtactgcaagaaaataaatttctcctccttactccatctgtcgtattttgcaatagcagtcctcatgcaactatttgtaagaaccagtctaggttttgtcaattccacacctttctgatttcatagcctgggttgactgactgtacctacaaatgcactttcagagctgaatttttctaatcaagtactaataaaatgctcttgaggtatatggagtttgggataagggagtaaatatgtaacttttattcttgttttttaaataccgtactgtttgattctacttttctgactttcccaagtttgggaactttaagattcttgagtat

SEQ ID NO: 25394 - DNA, 1644 bp, Bovine  19866881380392
  misc_feature (1)..(1): n is a, c, g, or t
ntttttaatctgtagcagagcctgacttcccaatacttgctttaagattctattgttttgaagagtcatttctgagattcctttcatacattataacttttgccttctctgctgctgctgctgctaagtcgcttcattcgtgtctgactctgtgcaaccccatagacggcagtctaaatttgaaccaagttactaattatagtattagaatgctatcttaaattttatatttttagaaaataaaaagtactagcatacctaacgaatgactgtaaaatttgtaaaactctgaatatgttatatgtatttaataacaccacagttagtataatttagtaatattatttgaataaaacagaaaaaagtgctcatagcacatatttatcatactcttcaagaaagaggtaaaggaaaccacctacaatatattcaggaaaaaggaaagtaagcatcatggtttacagttagagatgtagcacaggccagtgttggctccctgcaatgaaatgtgaacttctttgaaatatgtgaaataatacaagcagagatgatagatggaggagaatttctgcttgaaacaatgcatagaaggaattatccaaatcaccctctgtgaaagcatgctgtagctgttgttctctttgtaaaagcaagaggagaaaatcaatatatagtaacagaatatatttttaacagtttagttttttctggtttgtttttccaaaaatgtttttgcaacgtgacaaattgaacttgtggaacttgtgtctagactgatactgttgagatcttaacattttggttttttcaagtacaaaatgagtgggatgcaacataccagggttttctagataattactgccccagaaatactgagggtacttggtaaatttcagattccagacatcattaaagatctactactcagtaccttttgctactataacaaattaaccacaaaatttgttaaaacaagacaaattctggaggtcagagtctgaaaaataggtctcactgggctaacgtcaaggtgtgagcagggctgtttttgttctggaagctctaggaacaacctgttttcttgtcttctccagcttctaaaggcttccatcattccctggatctttgcctcctcttctatcttcaaagctagtagagtcacatcttcaaatctttctctttctgctactaaagtcacatgacctttttttgattttgacctccagttgccttcttttaaggacactcgcagcacgccaggcctgctgagattcatggcgtcgcagagtcggacacgaccgagcgactgaactgaaggactctcgtgattatattaagtccacctggataatctaggatatgcttgatgtctcaaatccttaatttactcacatgtggtatacatatttttatgtaaggtaatataagtaaggtttagagattaagacttcaacatctttagggccatttttctgtttaccaggtcaaattttggtagaactagataatctgacttagcaattaaactctgtattcagcaacatttttgttagtacatacaactatttacttattgattcatctatataatcattaatttattcattattaacaagcatttgtttcatacctgttcgatgtgaa

SEQ ID NO: 25395 - DNA, 3234 bp, Bovine  19866881462999
  misc_feature (1)..(1): n is a, c, g, or t
ngagggttttatatttaaattgatatttaaatagaatgagcagtttgatattttgcattacttagtactttccattctgagataaagttcttaagatcttctggttatatttacttcattcctaaagggttttaaaatatcttacatgtaaaaaattttgctagccactctgtattttagtaccttcatccttaaactcttaactatttagtcattacacttaaattttgccagttttaattggaaacattacctcaatattttaccctttactatgggctgattgtgtcctcacaagatttgtatgttgcatcctaaccctaaaagtgatggtaataggaggtgctgctttgggagttaattaagtcacgagggctgagccatcatgaagggaattagtgttctcaaagagtcctcagagagctcccaagctccttccaatacatgagaacacagaagtaggcagtctgcagctcaggagagggccttgaccagaatgtaaccatgcacaatgatcctggacttccaaccttccaaactgggagaaataaatgtctgtttataaactacccagtctgtggtgctttagtatggtataacgcagcctaaacagactaagatacaattctagacgtaaaaatgcagtgaatatacatatatatatatatgtaaaatatctagcacaaattcctggcatatatttagaataatataaaatgtttggggtgtgtatgcgtgtgtgtgcttatatctttgtgtattagtgtataggggcacatgcagagttgattcaggcataaacgtatatctggataaaaaaatttgtaaaatgtttagctataaaaaaatttctagagattgtatttgtcccccaaaccatgtgaagattttattgaataatatgttaattttgttccttctttttcctttcacaatttatgttgttcattatttagttgctaagtcaagccgtgttcttggtaacctcatggactgcagcatgccaggcttccctgtctataacttataccaagtaattatttgcatggaaataccaaccatgttggataacatgcaggtcttaatggaatttgtgaacctgcttaatttatattcccttggcgtctacaagacttcttagtggtcatgaaggagttgtggagggaatcactcaaatacagcatgagtcatttagacaacagttttcagaatcacacctaaccaaaaaatgtacaattctatttggggatcatgtgttatcctgatgtgtttgaattctttatgtacatcttatcatgttataattaaccttcaacttgtttcccagataagtgatgtttactttctttctctttgaaggaaaattcatatagcttctcttagatatatttccagtaaaacatttctcagagcttaacagctctcaacttgataaagatttccatcattaaacagattgcaatgttataaacaaatttctacattaatagctttcctaccaaaataccagtgacaaagtttgaagatgtgagtccacatgtatttgagtctatttctttgccatattaaatatagttttatttagatcacagttcatagaagacacttaaaaggctcaatatttttgctaaaaacacaaatgcttaagatggaggcattcttacataagactaacaattttcatacagattatgattaaaggatccagacggcttttgtccttgtttttctatcccaagtccatcacaatatcttagcagagtactgtatattcagtggacagttaataaaaattaactagggttcttatcagctatatggagactttatagcatgaataatagtagaaatataaacaagtgatgttttaaagctaaatgacatttatatgttttggatcaatgttttctccctctgtgtaatgtacttgataaaatatttaagaaaatataaaatactgtgtactgatcacagagcctttatatttcctttggtcatttctttccaactgaaaggtattctttgaatctgagatccaattatcatcatttgaggaaagattcacactatcaatttaatataaatttttttagcagtctacatgatacatgaagggaataaaactatgtccttatttggtgttaaattgtctacttcatgtaataagcaaatgttgaaaatgagcagaggatgttctgtacaatttttctcaaatgacacagattggatgtccagtaattggctccagatttgatttctggtcaattactcacatttgagaccacattttatgtatcaagtttagcctctcttgcttgagctttttcccatttaataagcactttctatttatgtaatgcctatatctgaaaaatttaatataactcagatttctcattaattctggtgatataactgtgaattagatgagtatgcctttgcagtgatggaaactgaggtagagatagttggagtgggcctcatacaatctcaccatctctcatttgtaaagatctgccttcaaggaggaattgtcacctcatatccattcaacactggtaggtcaccatattcaaaagtttccatagtcactgtcccaagtttttatattttgaagctcattagctgagagagatgcttcagtttttgctactgcatgtacatctggcaagaaaaatctctgcactcagtaaaacaggagtgaggaaaaagagtgactactcaagagcctcactggcgagaacagggcaaattttctttcctagttattaatccattatatcaggttgtaaagcaggcacagttggtcctcaacagaggtctagtttctaaatgtctcagacaataacatatgccagcaacaaagctcaggatcttgggtctaatagtgaggtccttgaaatccgaagaatagcatttcaattttcaatatagtcactaaaataaaggctttgagcattcgatgggaagcagcgagatgacaatgaagcccttacaactggtatatttctcagtccattatttttccgaatacaaaatgaaaatactaaacataaagtctcaggtattactgttcaataatcactctgaaaagaggaaagcaggcatctatactgaaatgtgtccccctagagaaatctcctttttaaagagagatatgtaatgtgaaatgatgcaccaaaggaaatattagcaaaagcaggaatgatgccaaactaaccaaacagtaggaat

SEQ ID NO: 25396 - DNA, 3564 bp, Bovine  19866880406646
  misc_feature (1)..(1): n is a, c, g, or t
nactctgaagccggccatctggctccaggctctgtgctgttagccccgagataagcccgcctttattgtgaaagataatgcttgtacaacatggcgagtggttgatcagcacttgctctcattgtctctctagccagagtgtggtttggccaccacacaggctggagtctgctttgtctatagaggaagccagaactcatcaacagacacagcctgggcctctacaggctcactcttttcctgcctgtttcttttagcctacatcccacaggagatgtaggctaaagggaacttgtcactacaagcacaggcagtgggtaagtctccaccggctgccctccctgccactccttccacggagacgtagcccctatccccaccactgtaagccagcccagcccagaggaggaggtgcaggcaggccggccatacccaggcctaacactatggaggacaagctgccatttcacctcttaggtctcagaattgtcttgcatggtcgaggttatgctgctatgagggaggccctgggggatgagacaccatgtggaagagagaggtcacagggagacgatccaaggtgccccagcccacaccaaggcctcacaggtgtgaaagaggatttcctggacctcctagaccagccctccaccagctggatgcagctggacaggcattcccaggcaagattgcatggagcccagccaacccacagaatcatgggatatcttttcatttcaagcctctgagttttccagggggctgttctacagcaacagtgaaggaacaaaggccaagccctcttgcagttccatgtctttcaatctgctctctcctcagccttctggcctttctctcactggaacactcccgcttgttcttcaagatccagctcacctcgtctttgtcacagatgggaagatacagaacagacacacaatctgccagaaggcataagtatctctaggacaaggttcagttgcttatgagtgaaaccccaaagaataatgctgtaaaaagagagaaggttaggggaattctctggtggtccagtggctaagacttcatgctaccatcgcagagggccccggttcattccctggtcagggaactggatcccacatgccacaagaccggtgcagctaaataaattttaaaaatatacaaaaaagagccaggatgtccaaaccctgagtctgctaaaagaaagaaggttatttctcacataagagacttgtagtggtaggtggcaccaggctggaacgagactctgttgccaggtgcccaggctccttctctattttcactgccatcttcagcatttagcttccactcagttcagaaaggtttcctgagcaactgctgcctgaactgctcctggaccagtgggaagaagggtgagaagaggatcagccacatctccctccctggaagatgacttctatctcgtaccttagtatgccaagcgttagtatgccagctctaaagacagctaaaagctaaaaattctatctagccaagtgtgcagctgaaaatgagtttactatcaggagagaagggaagatagatgtaggaaaagtagcagtctcaactcagggtaaattagaaccccctggaaggcaactgagcactaccactaacccacatgtcaattacctccatcccctgctacttgaaacatggttctcagaccagcatcatcagcatcaaccagaagcttgttaaaaatgcaagatcttgggccacctgctaatgattcgtaattgaattataactattcttggatgatttatttgcatacttgaaatagtttgggaagcactgacctagaacagcagttttcaaccctggttgtatgtcagaatcacctgggaaactttctaaagcctcctgaagcttgggtcccacctacagagcctctcatttaattggtctgggtgaaattcaggcgtttgtgattctgaaaacctcctgctagtgattctaatgtataaccgagtttggcaaatgatggctctaggctatttgggggaaagaatttgtctcctgaataacttctgagtcaccctggctgcagcctctcacctgactctctgaaaatttgtttggggcctctactctcttgctcccatttcaccccattctcttcattttggcttgtctgtccgcactttgtggttggaagtaatgcaggggttacactgtagcgcagcatagcagggacataaaactgcacatccccccaccccgcctttaacaacccccctccccacctggaaatcctccattggtctcctgctcctggctcactggccacttagcatattggtcagttctcagttcctcccttgagtccctatttgaagtattcctggaaatgtacaatttttacttcattgtgcagagcaaattatttctcctctcttcaccttactcctctgaggtttatcttttcacattacaggattcattagggagattaccaaaaaatctactttgaagagaaagaatgccactcccttgggagacagaagtggctgtggaagatggtgtttggaataataatagtaaaaaattcttctttactttcatgcatttcaaaatcttttagaatccatactagaaacactgacacatttataaatctacttctttaaaagtaaaacctttcataaggcaaaaatataccataagtgggcttcccaggtggtgctagtgcaaagaaactgcctgccaatgcaggagacataagagacgcaggttcagtccctgggtagggaagattccctgaaggagggcatggaaacccactccagtgttctttcctagagaatcccatggacagagcagcctggcaggctactgtccatagggtcgcaaagagtccaacacaactgaagcaacttagcacgcacacataccacaagtagagtcaaaggacaaatggaaaaatgcgggtgagggaattcaattcatttcacgaagagctcatcatcttcccaacatatgaagaattcctaaaaataaagaaggaaaaagataatttaaatttgaacttggcagagaatgagtggaaaagtttagagaaggatcaaatgccccttatacagaggaaaataggaaagtatgttcaacttcgatcataattggataaatacaaaatgaaactgccctgagagactcctggtttctggtctggtgtataatgagttttgtaagttgtcactccatcctaataacaagtaaaaagctgaacaaactaaaaacctcttagatctaccagaaaattgaggtcacagagcaaaccactgcacccaaagttggagagacaggcagatacagagaatcacatcttacaacctgcaaggaaactagtacagagtacatcgtgtctggatttcaacaaaaaattagaagacgtacttaaggcaaaaacaaaaagaagtccacagtttaaagagacagagcaagcatcatgcaaaattcagatatgcaaggatgttgaaattaccaaactggaaatttaaaatagctgtaattttaaaataaaggctaaagaaaaaa

SEQ ID NO: 25397 - DNA, 1813 bp, Bovine  19866880505536
  misc_feature (1)..(1): n is a, c, g, or t
ntttgggttttcttcccgttcagatcactacagagtattaagcagagttccctgtgctatacagtatgttcttcttagttatccattttatgcatagtatcaatatgtatatgtgtcaactccagtctcccagttcatctcatctccccctttcccccagtatcccatacatttgttttctacatctgtgcctctgtttctgctttgcaaataagattataccatttttctagattccacatatatgcattaaaatatggtctttatctctctgtttctgacttacttcactctgtaacattctctagggtcattcacatctctgctaatgacctaattccatttctttttatggctaagtaatattccattgtataaatgtaccacagcttctttatccattcatctgttgatggacattgatgtcgttccatgtcctggctattgtaaatcatgttgctgtgaacactggggtgcatgtatgtttttgaattatggttttctctgggtatatgcccagtaatgagattgctgggtcgcatggtacctgtactttcagtttttaaaggtccatactgcttttcatagtgactgtatcagtttacactcccgccaactgtgcatgaaggggaaccttttgttttagtgtgaagatcccaggaaagttgtacaatgcaagctgggacttccacacagcgggtcctcagtgggatagaatagcacagttgctttcatttgccatatcatggagaggcctacgggggtctgggcatagtagaaaactctgtgagttgtgctccaggaaaggaatcctgctcttctatttctaccccttttatagatactttgggagtggggagcctttgaccagcatatgaaaatgggagtggtcatgagggtatcctgcaagagaggagagaccccatacagcctgtgccagctgctagaggactggcacagctgtgccaggagctcgtggagacctagtgggacggtgagacttctgagagcagaagccagtgccctcgccagctctttgccaggcaggcagaaaagagctgccagaatcagccagataagcctaattattcctccccgaacactcacccaaggttgggagggctggaagtggagggtgtactttttctctaaagcctgtccttaatctaaatgttgtgtaattcggtaaaggaacaattaaggaataaaaatttccagaaagtcattcagtgaaagtcccttctccctcttacatcatgggtgtttcaacaggtaggatggtctatgagaaattttaatcagaagaggccacaacttcaagtaagccactctttaaattcttttccaggcaaactcatcactctgtaaataaacctgtagttgcatttacataaaagtatttagtatgttagcatctcctctgaagattggggcaaaagaaaatagatgggatctctttctgtcagttagggttgtgttcatctgcatgctacagaaagctaggttttggtggcttaaacagacgaggagtttgtttttctctcataacaataaagtcagaggtaggtaattgcagaagctaattgagaggctcaacaatgtcaaggctgacacttctggggtcctcttggttggcatttctcttggttcatggcagttcagccacatgagtgttcaaggcaggaagagggtatagccagaagaggtacatgagatgcagctgtctctttctcaggacaataaaagcattaaagaaaccccttgctctgactcagcatacctctgaccgttgacctacacctgggcacatggt

SEQ ID NO: 25398 - DNA, 1843 bp, Bovine  19866880530823
  misc_feature (1)..(1): n is a, c, g, or t
ncatgggatttcctaggcaagaatattggagtgggttgccatttccttctccaggggatctttctgacccaggaatcaaacctgcatctcctgtattggcaggcagattctttaccactgagccaccaggaagccctgtgcccaagtcaaaaagtctcctctagtggtgatggcgtgtggtcgaggtggcactcaatcagtaaccgaacttacgggcactctgattagtatcctgacttatcagtgacccggcactcctgactctgtctagaacatcatgttatttatcttaaatggatcttttgcccaatctgtagatgatattaatttgtttctgctttgtaaatcactttgcactgtaaaatgtagtagggaattgctttaaattatattgactataataagttcctctttcaaaaaaccccagactttttccagaggggtcctgactcctaagggaatattcctctattctcaaagttgagaccgtctcttagaatcttgagatgctttcctttgattttcccagcccggtcaccagatagggcttattgtttcaaagcagttgctagagtaattaatacatctattgattaagttgcttcagtgaaataaaaggtgacttttccacccatgacgggactatgatccagtcgactgaaaaacagtatccttactccaaagagaagaggggaggccagctgctagcatgcttttccctttcatgaaaaaaatccacagcatgaaaagaaaaaccatatttttactaattttctcttaaattgtgtgttattctattctgggtgttactttaaattttcacatgtttctaccataatacatggaatcatttttaagactgaagaagccccatgaatgcatgcatgtgcatgtgtgtgttttgaaatcttgagcacctcatgtcccctaagccgtgagcaggacacagagggttctgcgattaacaggacattgtctctgatctcaagagctcagccagggttggagctggtaaggaaaccacaatcccgactcatcccagtatacacaggaactgtggggacacaaaagttgaaccagttacctggaggaagtagagcccctgagggcatttgtggtgagctcgtgacaagaggaatagagatcaggaagtgtttttatatccaagttcaaccaggaaaacagtagccactctgagtgttatatacaagagaatgaatttcctttagtgagttgattacacaggggacaaaagaggctttgaaggcaaccaaagctgagcaatctcaggagactgtttctccagttagaccaaagggacagaggaagcagggatcagtcacctggtagaagatggaacccaggcaacctgtctagtggagctggagctatggagaagacaagaaaaggaaaagtagtctggaatcttgccttttactctctcatccatcaccaggacctcctttcagttaaaaccagcagggaaccagctgttgcagaacccaggaaacatcagatggccctcctggagtatagagcaggacaaggagaagctttgattgtgaacagtaccaggagcaacagagcttctagcagatgtgacccttcagtggtcttttctttttctaagtgaaaaggatcattgttaatttctaaatggactagtttgagaatgttaaaggagtagaagggtactccagtcaaggcactgagttgggagaatgcatggcttaactaaaaatggccagtttgccagtgtggctggagcagagaagcaggaggagatataggacatgagttgaaaattgtaatagccaaccagtccatcctaaaggagatcagt

SEQ ID NO: 25399 - DNA, 2341 bp, Bovine  19866880533746
  misc_feature (1)..(1): n is a, c, g, or t
nccgagcgtataagagttgtgacctgaaagatatcagactgtgggaaagtaagattttgaggagtattcgggagtgacccattgtgctgagcctgttttctaggctcatctctgccttgactattgggagaagaaggcatggggatttgcaggagagcaggcaaaatattgaaggactaggagacttaaaagatgtacttgactgcctagctgctttagattctatgacaatgtaattaaaaacactaaaattagttctttccacattctattgccttactccttgagcatgtgatgggtgtatggggctgtgtctacaagaatgtgcacttgtgtgtctcctcacaactgaacctgaggcttcagtgattcctagagctcagacaatcacctgatacaaaacttttcatttaaagatgaaattactccttggagaattttcaccaaaggcaaaaaagcacaaaaattcttctcctcctctctacatgcctcattacacagagatagaggattcaatgtttgaaaaattatcatttttgtaggttttatttgtgggacgtgagaactgggaaatatagagctcaatttaacagatgccatctctgcctttacaaacgccccactcctgctatcacacaatcagatgtgtgtgtgtgtgtataaatgcatatgcatatatatgtatatgtatttaaagcaatacatcagagttactatgttgtaaagattttagaactctattcgatgctcagttagacacacttattctgtgagtcaggataccggccaacaccagtgtcatgaagaccataactaagggataattggctggttgtcaagatgcatttttagatgaaaagtccacaatagcaaatacggtggggctgccctgtgagaagaggaagtgtggtgtcttggggtgagccacagaccctgagaggagctgctgaatcccattgtctcaccactaatttaccatctgccctgagtcaccaaaattaccctcaggcctctattaagtgggagtaataagcacattttatcgcagcattaaaagagggcccaacgagaaccctggcggcctgcagacttggccactggcaggctgtgggtgtggggacagggaaggaaatgagaaaaaggaggagaagtgtgtgaggaagataacctttaaaagaaagtccgcctcccccggggaggcatgggggccaccaccagtgactgccccagactccgaccagcacgacagtcaccccccagattgatcacccttccgcagaacagaaggtggacttagaaaaggttctgcctctggaccattccctgagctcatcttaatgtggccctggtccacagcatgtgttcaggctgcggtcttaatctgtgagcttctggtgtttaaaaacatctgaaagcttgaaagggaagggggcagttttactgtcttaaaacaaaacatcctgctccaacctgtcatgcttaaatgaattttgcttaatgatttccagggatttttttggaaatccatataaataattttacattttcttggaattaactgaatttgcagccgtgtggtaggttttgagaggcacaggctttcccttgggttctaataaactgaaggtgtgatctggtggctgagtgtgttagagaccttatctggtttgtttaggttactgagcacatttgccagtgggatccaccaagatcttcaaagaggggtctcagcatagcagactttagatactcataaattaaaagtctgagatccccagcttctcagctgcacgtctatgcaggtaacacatgtccttttcatgggctaccttcacagtttgtccttatcactctgcatatgggtctttctggtgcctcttcctcagatggcaccattgactgagaaacacatgaagaatcatatctgctgaagttgtgtgcctttaaagatactaagagacactgtttagacagaggtgagaagtctagtggtgtgtgtgcttagccactcagctgagtctaactctttgcaaccccatggactgtagcccgccagactcttctttccatggggattctccaggcaagagtactggagtgggtttccatttccttctccaggggaatcttcccaacccagggatcaaacccaggtctcccacattgtgggcagattctttactgtctgagctaccagggaagtctagtgaagggggacacatcagatatggttaggccagcagtgtgggatggtggtatttggtgagcccgttggctctgcctcatggactggtgcaggtatgtgtgtacacatatgtacagatgagggagagcgagtgtg

SEQ ID NO: 25400 - DNA, 2637 bp, Bovine  19866880551505
  misc_feature (1)..(1): n is a, c, g, or t
ntctgtctagtcaaagctatggtttttccagtagtcatgtatggatgtgagagttggactataaagaaaactgagcactaaagaattggtgcttttgaactttggtgttagagaagactcttgagaatcccttggactgcaaagagatccaagcagtccatcctaaaggaaatcaatcctgaatattcactggaaggactaatgctgagatcgaagctccaacactttggccacctcatgtgaagaactgactcattggaaaaaaactcatgctgggaaagattgaaggcaggaggagaaggggacgacagaggatgagatggttggatggcatcactgacttgatggacatgaatctgagcaatctccaggagttggtaatggacaagaaggcctggtgtgctgcagtccatggggttgcaaagagttacagacgactgagtgactgaactgaactgaactccatcctgcctaataatcacccacctgtgaagtcttttccccattggtttctcagagcttgaggcatcttccttcatggcctcattgatggcataagctactaaagacaggacacatttattatcttcatgtgcacacttccagctctccataattagccaagctcctttgtgggaccacagattcagctttcaaaacagaagaggcatgtaaccatatggctgagtgtcaggatagaaggttagataaggctctatactcaccattgggtatcatttccagagcacttctatggtatcccagtaccaaggtacatcaatgtgactgcttacctgcctgaattcttttgtaaagaaaaaacaactggcttatactagaataaaagttcagattaactttagctgaaactggacaatgagttaggaaacatgaattctatccttcttttatatctcagatctctatggctttggacaaatcattgaaacaacagtttcagtgttatattctgtgtaacaagccaattaggcaatgcacatgcctatcaaattaggtaatgcacatgaaaacagattatccactgtgactgtacaaacacaatggggtgtgacatcagtgttagttgctgttactgatgtgaaaaaagtccgtgacagtggccttccctctgtcatttcgtccatccttgaatacaagtgcacagaacgtgcccaggtttgtgctctagaaaggaggaacagttttaggacacgtggtttgtgttctcaggttgtctgcagcatggatcaggagacaagactgacacaaatcaatgacaagcaaaatgtatgcaaatgcaggatcatacaggatcagactatttgtgtcactacagtcttcagaataaaaagggataatgaagctatactgtgattatgtcaggagaggcagcgcttcctctcattttctgggtgttctgtgatctaatcagttggcacttgcatcaggatctactaatcagtggctctattttctgccattcaccccctttcttcagggccacctagctcagagtaccccatgcatctgaagcccttggctcagttcctctgcaggctgcagaggaccacaggctcccacctctggctttcccaggtggaaggctgagtgcagctcccagagcctgatccagcctgctgtcttctccctgcctccatctgggcctgctgtcagtggacggatgcccatggcactggctcacccacccgaggtgaacaaatgggaccagagctcctgagctcctcagggaaagctaagaaggccggtcactggaacccatcattgcttatgatttgtctaccagggaaaggttacagaaatttatgagtgggcaccatatgccagcacaacatctgctttctcataaggggtgtgaatataggacagtgctaactaagtgcattaaaggagagattccaggcatgagaaaagtagtttaactgcttagggggtgaaaattccaaagcatattaggagttcacagcattattattttttattgatagatattattgtccagagcagttttaggtttacagcaaaattgaggggaagatacagagatttcttgtatacatcctacccctacacatacataacctttcccattatcaacatcccactccagagtgcttcaactgatgaacctatattattatccacaacaacatcattatcgcccaaagtccatggtttacttaggactcactctgggtgctgtatattccatgagttcggacagatgaataatgacatagatctatcatcatagtatcatacagagtagtttcactgccctaaaaaaaatctgtgctctgcctattcatccttccttcctcccacattcatttttcaaaataaatttcatgtagaacattaaatataagtgtagatgactctgctctcttcagaggtgctgggagacccagagtccttcctccaatctcttcccagtggttcttgagctactgtccccactgctgggatcttaaacagtttcaaaactattgttctcgttgattgaaggaaggggaatttattttattttccaatattttctgcatttaacactgaggaaaatcttatctcattctgacagaagatgttggacaatgtttcttacagatcagagtctta

SEQ ID NO: 25401 - DNA, 1362 bp, Bovine  19866880552913
  misc_feature (1)..(1): n is a, c, g, or t
ntttatttttaacagagcatatgtgtttattattgaatcccttgcacctagcattgcacctgttgtgatgtgcacattgtgtgtttggagcatataggtatacacccatcctttttgtcctctttcagcacccttacccttctgaagaacagaaaaagcagttggcacaagacacgggactcaccatccttcaagtgaacaattggtaagtaatttggctttgtgtttacacacaatctgctttcccctctggcaacctacagctcttgttttgcattaagaagacacacccagttttccctagtggcttgttgatccaaaggtgagaacacaggatgagccacagcacttgctagattagaaagttttctttctagcacttgctagaaaagaaaacaccgtattgttctacacctcctttataaattgacaaattttaggcatagtaaaaataagtgtttaattcatttagctgtggctctgtaaatgtctcaggtattttttttttttttttatctttaaggacgatcaatagaaagagtaatatccttgtttctatgaaacaagaaactccactgtcacatctgttagattttaaattcgctgaataactaagctcactgagaatttgttagacagtgcattccaggatgggcactccatccttcttatctccctatggaaaaaagaaaaaaaaaagcgtttctactttgaagctattcaaaacttgatgtatctcagggttgtgtaatactgtttctaagtaaatgtgtaaattcctgatttggaagagaagctgagattatgtaccaaggatagccaacaatattctgactcaatgtatagcagtgtggcaaacagcctttgaggaagtatgatttattaccctttgtgattgtgctgaaagccaggtccatataatcacccagagctagtgtcatatttgaagggtatcgaaatctgatctcctttaaaactaagtgtatctaattaattgtcccaatatttttagattagtgtttatgatggggaaaccttatcctctttgaagtaaaatccagaaaaggcccaaagcctgattggggaaaaaggagaactgagaatgccagtctgcagacagaagtgtttctttctgttcaataagtgtcaaagattaatattacagaatctctgattacatggcctaatccattttggtgaataaatttgttctttgatgtccattgcacctacattaacagactcttctctgttagagagcctgggagcctttggggagagatttcagatatattaagccccattacagaaaatgtaattttctgtcaatataatcccatgtattcttcaatttagtatttt

SEQ ID NO: 25402 - DNA, 1143 bp, Bovine  19866880553725
  misc_feature (1)..(1): n is a, c, g, or t
ncaagagtactggagtgggttgctattgccttctctcactgactgtgcccaaattgcttagagttcagtggggatggctagaggataaacaggccatggagagacttcccctggtggtccagtggttaaaaatccgacctgccagtgcagaggacacaggttccatcgctagtccaggaagatcctgcatgccgtgaagcacttcagactaagtgctccagaacctgtgctccgcaaggagaagccattgcaatgaggcctgtgtgccatgcctaaagagtaacccctgctcgccgcagctagagaaagccatgcacagcaacaaggacccagcacagccaaaaataattaaaactaactaaataaataggccatggaaatatagtggaacacccactgtaattgtaggcacctggaatatgcatctacttctgtcttggagaatcatagaagttctcctcaagaaggggcatttttacactatttcacattctcccaagagttttcacatgtataatcccacttgttcctcagaacgcccttttgaaccagctagttcttttatgaccactgtggatggaggaaggaggactcggcaaatggaatcacttgacaaaggcgacacagataggaggggctgccctggaaagtcagaactgggccctggcctctgggtcagtcatgagttgtctgtgtttggggatgtggggggaaacttggagagatgagaaatagtggcctgacattgtgaaatcactgtgtgaccatctgggaatttggccccgattcactgccaagtttaagaagacctggaacaaccatttcacattcaaatagcccaggcagagcttcaaaacacccactttcccatattaaaaaaaataaggcaaacaaacaaggacagaagagagacagtgaacatgatcactcagagcagctttcataatttcagttacatcctttcttttgtgataacaaatagtcacataccatgcgctggaagtttttaggcttctctgatggacatcatcttcccataactgattcttctaagttatgtatttttaacccgatcccacacatgtctttgcactagtgaggggaccaaatacctagtttgggcctgcaggacccacgcttcaa

SEQ ID NO: 25403 - DNA, 2189 bp, Bovine  19866880565323
  misc_feature (1)..(1): n is a, c, g, or t
ntttggaagtgggctcaaggataccgtcccatcttcctctgtaaaacttcctgatcaaaccaatgtgcagtttcgctacttgtcctgcaagacaatgtgtcatcatggtgacagcagtaaaagaatttgaaaatctctaattaggggagctgcagagcaattaacgcatgtcaaatttcacttcatcaagtgccactctaattttccctctaaaaattaatggatttttttttccttttggtatgtgtgtgtgtccccttaaggcaatgttgattcaaatctgctcaagatgcagtgttgcacagctaagcatcttcttgattacaatccgccacacttctaactgcgctcattctcactgccacggatactttgtcaacagtcaaattacaccacgctgataacaatgcataatggtgttcctcctccgaggcccctggcaggagatggggttcataaaaatgtgatgttttcttctcaactgtttctcaaggaagtttgtatgaccaggtcactagttaggcattcattttttgaaatgaattcgttaatttcaaggaaaggagagaaatgatggcatatgaaaacagctcattgaaaaaaggaatcagaagaagaatgaggaattgaaaatatccgtggccaaagttttgcttaaacactttattcgaagacattttcaagagcactattcttggttaaataccaggattttttttttttttctttacttatgggctataaacattggaagcctctcttgaacagacagtatttagattatgagagaagtttgtttaactgccgtatttgccagaatcctcaaaacattacaggacacagaagataaatgacttttttttaaggtcaggactgtatattccagataaatgttgattcattttaactattttttatcctagttgcttgttgcagatctgtatctgagtcaccagcccataggaggaatatttctcactgaaaaaatgaaagaaacacagtgattagatgatcttactttcagtctttttagagattattcagattttatgtctaaaacacaatcggatccagaacaaaaaaggggaaattaaacaaaatgctcgatgtgtatctttgcagattgttcagggagtagagaacattcacatggatgacatttcagttttctcatcatgtaagtatatttttggttatgttttctctagtcatatttagtaaaatatcaaattcatggaatgtacacttcatttttaaaaaattcacaggttgagtccaacttttcattcactgacaactaacttgaaaatctaaaatttgatattttgaggtttgtatttccaaatatcaaaaatttcttccttctcataaggcatgttcttaagtggtctatttcaaacaaaagaaaatgacattccactttcagctagcaaatgttagatttctctcaaagctgattggggactcacttggaagttttgccattagactcacacaaattgaattatattcatctttcccaaatattgttcttcaaactctataaatacagcaatactaggtttcaagtttcatgtgacttgtttacaaataaaggtatcttgagggggggaaaaaaacaagctctttgtacttcagaaggacaaaaacctggaacaatctcgtattaaaacattaacaaaggattgtaaagggaaatttaaagggataaaacttgattatataatgcaatccagcagtaatcaattttaccttcaatatcttgcttttgttttccaaatgctaaataaacaatacataatgcatccctcatcagccaaaccatggaggctctgtgctcaaataacaggaaacatattcaattttcctaacagaagacagttcattaagctgtgccacatcaaataaaactttaatttctccagcatcagagtcgcaatgaaagcaattgaagaagatgagccatatggtacttctatcagcaaacacatattgctcattcccccaaagttttctaattctgctccccagacctgtgtaatatagataatgtgctccgagagcagcaaccatgagctatctagtgtacacttctaatactgtatttaatgggaaataatgaatcataaaagcctagagaagacggcttttgctaacctaaatctcaactgtaatttcattgttctgtg

SEQ ID NO: 25404 - DNA, 2018 bp, Bovine  19866880579122
  misc_feature (1)..(1): n is a, c, g, or t
ncagtgtgaagagccacagtttggaaactactgggaatattttccgtgcacgccttccaaggaaatacctagtggaggggtgcggccctttgggggtggtggaggggcagtggggctgagaaaagaggggagccatgggcaagaagagtgtttatgacccccacttagatgcttggttgttgttttagctgtttttttctccttaagaaatataaacctctagatggtacccagtcgctgctgttaagttttagtgttatggccataaatcaaaataactctatttactggggggaggggagggctggggatgttagagttgtgacagccaattttctgcaaactacgaatggggcgctcattctttttgtatctttgcagatgattcaagccatacaagtattaaggtttcatctgttggaattagagaaggtaatttctctagctttttttctccttttgcttccccctcacgcccaaacacacagaaagggagggttcagaatggctgaagttcaggcttcgaagatatttgcataaacgtctttctttctggtaattagtgtcaaggccaatctttgcgtccatttctctttgcagtttaattacaattttagacactaaaactgggatcacaaacgccctagccttgtattcattcttaataccttgctggctttgtgtaagtagttgcagggctctgcatccccttcgatgcgtagaaagctatcctgaatttgcttcacaggttgtaccttctcttcttcctcctagtcttctttgctacctctgagtggggggaaagttttgtttagtttcagtgagtttctggaagacagtctgagagcagcggcaggtcagatacagggggagaggcggagtgggaggaggagtgggcaaggagtgtggaggaggcggtgggggaggcactttaaaggttctgcggagacaaagcagagttgatagttgtgtcagtttcttgaatctgggaatcctgcacatatcccaccttcacactcaagaaagcgtgtgggataacatgattttgctagctgttctataaatctcagcagtaaaaacttaatgcattgtaattcaaagtaacattaaattgtaagcacactggggtttcttgtgaatttttgcatgtcagtgatgcctgtgtcctgtaagacaccgctccacctatccctaaatgttttgaagcattcttttcccttaaaaaattaatcagtttgatacctttttgtggctgtaagggttccccccccacacaccatatcaggagtcttttttttttttttttttaaggaagcatcctaatatatgcttcttatagatagaaaccctaattaccaatgttaaagggacttgggttgtcaggcatatatcgtataccaacacagtactggtcctttatatacatacatatatatgtatatttaagtttttgcttagacatgttggaaaaggatttatgataaaaataactggacaaaattaaatagtttaccttaaatgtcacccacgtaggtcacctctttaatggccacggccccaggagcagatgaatttaacacgggtgttgaatatgttgtagcctgtgaagcatcttgtcactgtcaattttctgggatatctctattttgctagaaaagaaagttattcctaattctggatgcgtctgggggtctctggaggacaattgccctgtgtttcccctatttagaagtttggatctcacaaggggggtggattgcacttgtcaatgtcatttatgaactcctgattatatttccatttttttatttctgtcataatgtaggtacacgaattatgtgacaatttctgccaccggtatattagctgtttgaaagggaaaatgcctatcgatttggtgatagacgatagagaaggaggatcaaaatcagacagtgaagatataacaagatcagcaaatctaactgaccaggtatgcgcttttcaatttcaacatcccgggaaaaaaaaaatctgta

SEQ ID NO: 25405 - DNA, 4331 bp, Bovine  19866880636007
  misc_feature (1)..(1): n is a, c, g, or t
nggtcctgttcttttcggatgccggattcaaggtgccagctccttttcctgctcgctcacaaatgagtctaaaaggatttcagatcactgaagcagactcctggcctgtcagatggctgggagcagaggaactctgggcggccacaaaacactgcttaaaaaacactaggcttctaacaagctggggaggaatcctggccgcacttttcaggttgcgagctctcaaaaccatgcactatatgtcaaactgtcaaacctttcagcgtgggccatttgccctttcaaataatatttaagaattgtttttacaaagttttataggccatggtctagtgaaagaggccaaccaacaaagaaaggaatttgtactacaattcgtctacggacaatttcttgtgagacctgggcccgtcccagcggagcaaggcaggtgacctgtgacagctcccaggctgtcagagagctcagatttcaaacacgctcaactcaaacatccctggtcgcctatttaagcatgcccaggcatttagactgcgctatctcgtgcctttcaaggcaggataaagcggcatttatcgtattcagaccattcaatgggtcagactgaccgtgtcagcgggggctctttccttggcaggtcaaagcccgactcccatttttcttcccctcctaactccctctccacctccaggactaccagtaccccaaacctattctgagggaggcaaaaacaaaatgcccaaaagcgcctgatatttacatcacaagggctgggcacttcccgtggcagtgggccagcaggtagaaataaactgggttgtcagtcaagagggttctttatgtcatagaggcaaaactcctaattagggagatgaactttcaactgccagggcaaaagaacgcgtaaggttgtggaccctcttgttttgctagaaaccaagctggaaaccacccctgcttcaaaaccatatcactgacaactctgtattgagactccatcttttcaggccacattctctccttaacctttacttctctcctccttgagtgtttagagatagagtctttgtccccagaatgtacctagactcaaaaatcaaggtcaacgataaccactatctttcaatactgagtcaattctattgtgccttgaaagttgtgtgaatgatcaaagtttgcctaggactgtacaggtcatgttgagaggtggttaaattttagggtttcctggtttcaaggttaaatattaagggtttctgttttttctcttgtctgttttctcatgtagcacatcttctagaaagaatatggcattcaactcttaaatggggtgcaggcacactccagtctttctagtggccactggtgcagacacccctatgctgtggggaggtcaggtttcctttgtagtcgggctatctgggtgtgccaggttgctaggaaaaatgtaaaacctaccccaagcccacttctccagatcctgacgtgtctacttagccagaagtcagaggggataatgtttctgtgttatgttaagaggataaatggcgagaattatagacaagcctttctcaggaaccagctagaatacttcagaggctttatggaggtgttttgtcttcatttagaatgtgtaatagctatcagaatgatttttctaaaacacgtttctgatcgtataaccctggcacttaaaatccttctgtggctgccctttgccttcaggataaaggtcacactttttagcctggcatagaaggcctttcatgatctctctctggggtgtttttccagcctgtcttccaccagatccccacgggcactgcactggccagcccacctccagcccagtcctgagtccacctggccttctcaggatctcaccgtacacaaggctctctcacgtccctttgtgtgctagttctatgctggtccctttccctgtagcatccttcctggcaaactccttggtgaaccttgtagattcggctcaaccaccatctcctctaaggagtctttgctggactctaataatctttactattcctccactccagttctgagtgatttttcttctccccacattcctctacccaaacatacatcatactctactaggtcttctgatttccatatatgttccctcagtgtgaccacagaatacgtgacaacggggacctggtcatactcctcactaaaattctctaatcccagagccaccctaatatatagggcacagccttgtcaattgcttattaaatgaatgtgtgaatgcacattttttcactgcatggagaaaatcatagtttcaatttccagctgttacaattttgtttgaaacacacctaaatgaaattcttgaaaaatattcaccaatgaaatgtaagaagacatttaaaaatgcattctccaaagctgggaaattttcttacaatttttaagcaatcttggacaagagatgaactaagagttgaagtatcagacttctttataatgtttactgtaacctttgagaaatacatctcttctccctgaaattacaacttaaaactatttacttaactaaaatgcctgctgttttcttcatttttcctgagttcaatatcaaaaaataaagcaagagctatttgcttccttctgcattttcccctcagtgaattaattatatcacctcgcctccaccacccttgacaatctcccagtttaaccctagcaaagaatctcaactgtccccaagcagacaatttgatcctgagctcagactccagactcacacttcacagctatggtgcaaacacaaaactgtggttttcccttggcttagccaaattatgtgtcagtccttcccatagcacccctcccacacatgccttagcaattcttcagcaacaggtatccagggacattaatatctgatactgttacaaattgacatgtcacaggatcctaggagacatcagaaaggtttttgcaagataaatgaaaacataatacaccctcataagccttcttccgcattttcaaaagaaattgagtgaacttcttatatctccaaatctacagccagtagacatatataatagtctaaatccaatggttaacttctacatttaactttgattagggttctgttaactcagcttctcttttgtatctcttctcatccttaggtgttgaaggtttccttgttcttagttcaaagggattctcagttgatcaaagaaaaataacaaaggaaagcagactctcatatatttttatttaaccaccacagctttcctgaaattgttgaggtagttcctttgggaaccaagatgaggtgttgttggtacctgcccaacaacaggcagtgctgagtcctagaagggactttgcaaagtgcccagtgggacagagtgcatcagtggtactgatcaacaagttggaggaaatgggagcagaggagaagatcaagagatcaagaagagcaaactttaagtaaacatattcttggcacttataaaaagaaatatctagctatgctttctaaggttggcttcacagaaattcactatgaggcttttcctttctagttgaatttaggcttgttaaactatgacagatatttattaatagttaaccactgtggaatgagctcacagtctcactctgccctttagtggactcctgatatcacagaaacccccagggaagagatggagaagctgagcctggaagcaggagctctctctataaacctactgtctccttttttaaagagtaaatgtagcattgaaaaatgagctctggatatatatccatcttttgcacaagctgtcactcttatcattcattcattcatttaacaaaaatgtactgaattcctactatgtcccaaacatgaatgccaacccctagagatacaaacggtgaaccaaaccaaaagagtccttgtttcgatgtgctttccagttagagggcacagatgttaaacaaaatagtcacagcaataagtatacaactgcactccatcagaaagaaatataaatccatgagtgtgtgaaacaaaggacattgacttaggtgggagtgatctggagcagaaatctccagaaggtgagagaaaagtcaactcggtagtgggcagcctgaaacagcagacggaagggaaatattgcaggttggaattgcatgtacagaggccctacctgtctggagaaggcatgaagcaaccacagtaccaggacctggcaaagcaagaggaggtgaagctggagaggaaagaggagcaagaccacacagggccttgggggatgtggtcaggatttaggtgctcatccctaggcttctaa

SEQ ID NO: 25406 - DNA, 3456 bp, Bovine  19866880663905
  misc_feature (1)..(1): n is a, c, g, or t
ntctacaaaggagtaactcatactgtccagaaaacgcttatctagtaaagatgattaggatttaagatagttaaacatactggatttcagttaaaaagcctccttctttgtgaatttttggctgagtgtggattaactacctgaagccgtggctttcatgtgattctagcaaatatgaatttttattttttcagggaatggaaagtttgcaggacactaggtccaagaactatcagaaaaagaaaaatatccagttgtcctaccatagacaaaggtttaggaattttgttgatacctcttttttccccttaacaatgaccagattattgtgatatttaatttcatccaggctcgttcatttctattaaaaaaatatatcctgaacaactgaaaattgtttaatggagacagagtgctgggtctccatagcttgaggctgcctggcaattatgctgcatgaaattaggcacagtttgttccaattacttaaaatcagatcacatgaaaagtgacagaggggaaaataaaagggttgaactttctcattttatgatatttaaattatgaaatcagaaactgcatgatgtaaagaaacaatctaaatttgcactgacaatttgcaggccatagattgctctttgaagctataatgattcaggtgactttaaagatccaaagagaattttcctgacaccccttgcataaataaaatgtgaatctcttttgctttctaagaatttatgtaaaacttgctcacaaacaagcatgcaaaaatactcttgaaaacacagcacaaataaatgactgtgacaattctcaattttcaaagtaactaaaggtaaatggcataaatattaatttttatccagttctggtcataatattaaaacacaactaacaagacagggcaaaaggtgttaccattcagctgtggtgaagagggaccattgacatgtttattaattcttttgaaaatcactgaaagaagacctggcaaaactgtaagcaaattatattatagaggatgttatagattggaaatgacttaggtacatcagtatacaaccctatatagcaaatagtaccaacaactagatgctaaaatttgcatatttcagtcaggtttgtattacttaagaattgctagcctggagaactcccagatgataaaatcaaggaaaagttacctgttgttcaaagtctcatggttagtgaatagcagtgtaatttatacaatctaatagggtcatatataactatgtagtttttcaactagtatagatgtagatctactatatgtatatatacgtgctttgtgctcagttgtgttcaactctgtgcaaccgcatagactgtagcccaccaggctcctctgtccatgtaatttcccaggcaaaaatactggagtggatcgccatttcctactctaggggatcttcccaacccagggatcaaacccatgtcttttgaatctcctgcattggcagggattctttaccattgtcccacctgggaaacccttcatttggcttgtattgtgtggcaaatatttatgcaataggagtcgtgttttaaaccttgggcagtgaattgcttttaggtcagtgttcaatcattagattttgcctgtgatgactggcatcctagtgagtagggtgattgtcacctatgatcttcaccgattatggaggtgatatactttgctttgaaaagaatgggtaactatcacttttaggaatgaagtaagaaaagtagtgctgtggatctcggattagactgtttatacttcctatgggctttgaaaaaaatcttgtcatacattttgatgttacatttgagtggaaagtatctgtgtatcatggcaagttagagccattcctttgtctcatcaatatttggtttcctttatgtgaaggtctgggctttgaggatggtgaatgagaaatttgagggtgtttgagatgcttaaatgagtgggaaaagaaacatgaccaaggaaagaaataatcagaatgggtgtttctgagtgtgatgcttgcttttatggggataaagcggagagaatggtgtgagaatgataaggcaggctagtggagagtggggagggtagggcttggcatttgagttgagacttgacaatgacattggagtaggaacttgcgagtaggaacctacttggtgtgttggaagaatggaagatggctgaacagaaagtgaggtggggtgaggcgaagaggataccatctagaaggtgggtggggctggatggtggtgagtcttgcaggcaaggtgagtgtatggaggtttttgaagggggacaggaatggagattatgaaaggccttgccacacccttctgtcatgaagaggcttagatgctggatgggaagcaggaagtatgcctgggtcatgttgctgccgatcgtgccagccccgggccagtgtcctcacctgtaaaacgggagggacaatagattccatttatgtccctcaaagggatataatggggattaattaccactttgtctgtaatatactcgaagctcttaagagagcagcactatattccatgaaagcaaagccttattctaattgtgtatttattgattaagtgacaatcaagtcacaatgcttatgggaaaaatggctacatctctgcttgccacaaacgaatcccatgtgtatagatatagaacatatttaaacttacatataagagcattgaagtggtcattaacgagacttctaagcatctaatcggacattattaataagattgaaagctatgttaattaacattcaatagaccagaatttaatttctgatggcacatacagtaaaatggagagttggggtgctttttcccattcatatagagaagagaaagttgactatcaggacagtttctatcttgggagagtttattggggtgaagtgttcaaaatagtcagtgtctcaactagatggaaatcatgtcctcagcttctctcccaggctttagaaatgtatatttcaaacttagatatagttgactattaaatagaaagtatctgtgccaaaactaatcttagtagaattctaaacatttttacaagaagtatggatttcattttattatctaatcatgtaatattttttgtccactcttaactcctgagacttgttcttcgcacgcaaaatgttctggtctttgaccttactacattggcctgtgttcagaatcctagagtatgttgacattcagatagggaaccaactttggtagaatttcatttggttgtgctttacagaagagttgaaatgaatagtgtttttttttttttttttaaatacacccacttcaactttgatatggagaaggcaatggcaactcactccaaaactcttgcctggagagtcccatggacggagaagcctggtgggctacagtccatggaatctcgaagagtcggacatg

SEQ ID NO: 25407 - DNA, 1296 bp, Bovine  19866880675222
  misc_feature (1)..(1): n is a, c, g, or t
naatatgaatgtgatatatttctttttaattaaaagtagctgcattgtggtgtgatttttaataacttcagtgtctttggatttgtacattttagattcatgttggaacttgtacaccaccacgtgctgattgcaaaattcattagcgcgtaaatcaggttttagcgatcgtcttttaagcaaagttagtttgattgtgaagcactcactggttagcttatttattatgaaggtttttcaggcacagcagttaagttaatcagtaacaaataaaagatttaaacctatagacatgtcagccattttttaagaaaaacaaacatttgggacttcttaataaacactcatgaaaatatgttgtaatgtttacttcagaaaccatatttccatattacatgcaaagtttaaaggagattttctagtcctgttgaaaacaggaaggaacatacattattttcttgagtttattacctgactatatgtccatagaagacacttcacttgatttgctttagaatcaatatgcagtttgctatttttgtttttatacatggcttaagatgttgctatcacttatgataaagtcctctcacttacccatgtctctggtaggtatatagtgtcaataactttaaacaagatcaagtgaattcattcttagaaggttttgatgttataattctcttactccataacattttatggaagaaaatcatgataccaaatataattacgaccaaattcaaactgatgggcaaaagcttcttttcctccactgggtcattttagaaaataaacaaaaagtgtgagacatcatgactttaacagtggatttatatacaaactgtgaaactttgaaaaaatctctgggtctcagttttcttatctttaaaatgattggaaatggaagaggattgaagtaggtcgtatctaagctcctcgcaaatgttgaaattgtatgatcttatgagtccattctaatctccttttaagtcccagaggaacaaatttgtaactccaaagataatgcaatgccgtgtgatggtgtcttttcaacaaatagtcacccatagtgacgacttggtacttagacaaagttctcacaaagttaagggaagctttcaggtttttgtctacaaaatccaggtcaatcttacctgtaatggggccagacaaacaagatttaagggcagaataaacattctcaacattttggggtaaattattaagatgattgttcaaatttccacttgttttaccagagttttctctataagacttttgggaagttcaagg

SEQ ID NO: 25408 - DNA, 1597 bp, Bovine  19866880692859
  misc_feature (1)..(1): n is a, c, g, or t
natgagctttgatgagatgcactatttaaattcacactagctttctaaatgtttttcagaatgatttttacttagacaaactgaattaggaatatcattcagcactggtggtggtggtgtagtcagtaaatcatgtccaactcttgtgaccccatgaactgtagcccatcaagctcctctgtgcatcaggttttccaggcaagaatactggaatgggttgccatttccttctccagggcatcttcccaacccagggatcaaaccctggtctctcttactgcaggcagattcttcaccatctgagctaccagactaccagagtaccacctgagctacagagaattcagcactattctcttctgaaacaagcattttgaaagaaaaaaaaaaaaaaattcaaggacactctggggttggcaggctccttatatttgtattatgagttccacctacatgaggaactagaacacatcttcccagtttgagatgttgacgtttcttctgctgttcccaacttctaaaggactccaaattttattttgtttatgctcactttctggtgatctcactcccaccttatttataccatttataatgctgatgactcccacatttttgtttctagaccaaatctctctgctaacttttgactatctcattgacatctaactgtttactggacttcttcacttgaaagctgttatgggttgactcatccccccaaaacgatctgttggagcactaaaccctagtacctccggatgtgaccttgttttgaagtaaagtttttacagaggtcatcaagttaaaatgaggtccttatggtggactctaatccaatatgactggttccctctgggaaaaaaaaggaaatttagacacagaaatagacacacacacagagtgaatgatgtgaagacacacaaggagaagatggccatgtgactggaatgatgcatcgacaagtcaaagaacaccaaatgttgctggcaaacgccagaagctcagagaggaaataaaggatcccttcccagagccattacagaaagtatgccaatgtcttgattcagatttctagcctccatatgtgtgagaaaataaattgcaattgtttgaagctacccactgttgggtatttttttgtagcagccttgaaaattaatacagttgcccaatgaacatctcagacttaaagtgctccaaacagagttgccgccccatcccctcccctgctgcttctccccttttctatccatgggcgctctatttttctggtggttcaaaactctttagaattatccttccttcttattattaatgtatagttgacatatgatatcatgtgtttcaggtgtacagctcagtaaatcaacatttagatacattaaaaaaccatcaccacagtaagcctagttaccatctgtcacacatgaagttattacaatagtattgattatattccctacatccttgtgatttgtttatttcttaactggttacatgtacctctttattcctttcacctagttttgctcaacattcctccttctggtaactgctagattattctctgtatctatgagtctatttctgattt

SEQ ID NO: 25409 - DNA, 1729 bp, Bovine  19866880715100
  misc_feature (1)..(1): n is a, c, g, or t
naatctttaacaatcttgtatagcttggttttcatccaaagtttatatttaaaatattggctactcgtgatggataagacaggggaagatagaaaacaactaaaacttttctctacttcattcttcacttattcattcaacaaatatttttgagaggcttctatatgctaagctctggagttaaagcaaataacaaaatagatgtcattcctgccttcttggaacttaggtcgagttagcaagctttgagtcaacactcaagaggggatgcacaatgtttctcaaacttatttaaatatttttcaagacctaagtgttcagcaacaacacgtgttccaaggaaaagactgggaaatactttgccttaaactgggagatgcaagatgacggcacattagctgagctgtcgacatgccaggtttggccagcatagtaattgataaagctttgggaaacgtctttatgaaggggctgctctctgctattgggcacagactccaccatcatcctttggatgttacctgtcctgcttcaaacattcacattgcctaatggctcctaaacacacttgcatttattgtccccctctcacgacacagaatcactgctgctctgaatgcctattggcatctcagaaaaaactaagaaggaatgaaatttggtgatttaaatatgccaggtggagataaagtctgggtgatggctgtaaagcaaaaatgcacatgcccaaacgggaaaacagcagagactacaggcatctctgtggaatagcaggaagcaaaatgttgtcatgggaaaatgacttgggagacagaccccacaggcaataaaatgagatccatgccaccctggagtgcactcgaaacagaactcctcaaggataagactgtgagataaaatacagaatttcctgataaatttgaatgtcagataaacagcagatacttttttagcataaatatgccccaactattgcacagggcacacttataataaaaaaaattatttggtatttatctggaattcaactataactggaaattatggggttttatttgctaaatctgcaaccctactcaagggacaactaaccagtggcttggtggcaacttgcagatttttttttttcctaatgtgaagaaaaggaactagtgggcacctcccatgtttagacgctcctctcagtggcctgttttggattataaagactggaggacatgcaaccattagaaatgcagaaaggctgaagttcagctgtttgagaacagaatcaatggctttgggcctgggaggggactgtacgagccatctagacccaccctctgtagcaatgctacagaaacagcttaagcagtggcttcattataaccagactgaaaaataccactgcaggggtgttggacataggcacccagacttgcatcttgctctggacaaggaagaactatccagaggctgcagaataccaagccaaattctggttaatggtcagaggaaggaaactataatttttcattttcaacatcacctaatgttttctatgcttcgttctaaaggctttgaagaaaaaaaaaaaagcactttgttcatgattaagttttatgataaaagtatatctaattccacagaaatgtctgtgtcttcaaaaacacagtcttttcgattcttagaccatggttttctccccactggaatgagggtcactgttgcactttaaaattaagctggg

SEQ ID NO: 25410 - DNA, 2087 bp, Bovine  19866880765018
  misc_feature (1)..(1): n is a, c, g, or t
ntgagcagccagaataaagtgtgcattgcatcccagaggcatactaatataaaaccattgactaaaaggccaggccaaaccattcatataagtctcttcggaaaataattgattgtttctcccactgtggagaattcaaatcatttcttaatgccaccccagacatactgaatcaatcaggaagggccaggttatgacagagtaacaaaagacacctcagatcccagtggcttaagacacaaggggtatttcttgctctgactatgtatcgtgctcaggttgactgagggctcacctccacttcaccccactctggaccccagatgtgcagagcttgcactatatgaaatgttgctgattgaagaaaaaaggaagtgatagcagtgattcacatgtgggctcttaaagcttataaccagaagtgatcctcaagacttcctctcatatttcagtgatcagagcaaaagccatatctaacataaaggaagcaaaagaatattctaccaattatcttaaagtagcaacagagaaatgtttagtgaacaatagatactaaaatatatcttaacagttcccagaaatgtaatcctcccaagatggagggtgggcatgagtcttgaaacagtttactttttaatgcttactaaactctacgtttaattctgatgaaaaaagtgggggacagatgaacagactcattaaaccagaagccaactctggggttgacattgtgaaaggatggttattacttccagatctctgaataaattttcaaaacaatgtaatgatatgaacccaatgatactgataattttagaactctagctagtagactttcatttctgatacacagacaaaagtgagcatttccaaaggaaattttatcttctgaattaacatataccaaaatatttccagcttttggtgcaaagcaaaattattcattatttttaaggagctaagaaaagaaaatattgtaactgggaactttaaaagatgaatgtgaaaagccaaaatgctataaatgttctctgtatgccagaaatgtctgaactttccatttttactaaattacatctaatgtaagcacatttggccttttccttgcttcctcatactatgatattccaatcaaactattttaatataaactaaatcttgatccaatactattatctcaacccaaagctcattttaaagcagcgtaacctttaatgagatatatgtacaatgggtacgaacagtgatatacctaaaaacctgtttctccagaaaagtaaaatatatttaatatgttattttatcatcaccttcacattccagttgccatgcaattagagacagtagtctacatgagttctcaaggagtgggaagcttctgctatagagcttctgattcctctcctgccttctttaacagaatacttgattttccaggaaaagagggagagcgctggggcccatgaagtatcactgaaagtaggcagcaaggagagaaaagaaataaactccagaaatgaatattctgtccagcttcaatactaagcaagtgcacttgctcaagggcaggcatcagcgaactttgtaaagagccaagtggtggatttgcttgtctgtttaagccatgcagtctctgttgcaactattaactgtgcctgtaatagtatgaaaacagccataaacaatacacaaacaagcatggtcctgtttcaataaaactttatttataaaaactggaaacatattctgcccacgggcgagtgtttgctgatccctgctctccagaagaaatacaaactagtgcttgaatcattgatgtggccatcagtctgcctggcttctcatgttcttttatatccacttgtgtgcatgctaagttgcttcagtcgagtccgactctttgcaaccctatggaccatagcctgccaggttcctctgttcaagggattctccaggcaagaatactggagtgggttgtcattttctatgccagaggatctccctgacccaaggatggaactcatgcctcttatatcatctgcacggcaggcaggttctttaccaccagcaccatccgtaagcccatc

SEQ ID NO: 25411 - DNA, 1184 bp, Bovine  19866880817970
  misc_feature (1)..(1): n is a, c, g, or t
nttctcaagtctcacatctagcaatgggctggtacacagtggacattccattaatactcagtaagttggtgaatgggactacttctatcttcaccttttctaggtttgggagcactcctgtcatcagcttaaaattcacgatatcaaacaataccttttattggcactaagagaattcctttcatgtggggagatgttctgagtgcttggtaaatcaaatattcacaacacacaatcccctccaattttacaggctgaaatcataaagactgtggccaccatatcttaccatcccagtatcccagctcagtccctcagcatctccattttaatcatcacttatctgaatcttaaattggggcttccctggtggctcagatggtaaagcgtctgcctgcaatgcgggagacctgggttcgatccctgggtcagaaagatcccctagagaaggaaatggcaatccactccagtactcttgcctggaaaattccatggacagaggagcctggtaggctacagtccatggagttgcaaagagtcatacacgactgaatcactttctatctcaatctctccagatccatttacctcattccagaggataacgaccaaaaggacaagagtattctcacctgtacccctgtccccaggtacagggagaaaagactggagaatggagctggctcaccataaaatggtcagaagagggtgacagaaactgggaaagacactcatggcatcacaaaacaatcagcactgcagttcatatgaagacaagctgtcatctgtttcagccacggcaatcaaacttagcttagataccaaggagttaaaatgtgaatgggctgaatataaatctagaaatccagacaaataaagcaaatattgatcaagcacttactctatttgcagcactgtgctagggagctgagggagatgtaaaggagccctgcaggtgcagtgaggatgtcagcctatgccgtcttcctggattagctgggtgaggatatgtgggttctaatgcctgtcaaagagattcttctgagcaacttccaaggatgctctaaatctcggaactaattatatttcactcttcattttggctgctaggaagctcagagccaaattaactgcctaccttcttacaactggacatgagcctagtaattcataatgttccatgc

SEQ ID NO: 25412 - DNA, 886 bp, Bovine  19866880846889
  misc_feature (1)..(1): n is a, c, g, or t
natgtaacatcgcaaggccctgagcctcatctgtcaaaggatgctacaatccccatccagacttggactctgtggttctgttgcagtgtttctaaaattttaatccatgctccctttgataaacttcaaaaaatctccctatctctttgttaacttactatttcaggagaaatagcatgacaaaaatcaagttaattcttaagatgcttttttatactacattcactcagaatgattctgatctgtcttttctggccactccctccgccactacttggccttgaggatgggaatcctagccataacccatcgcactgtccattctgtacacaatcctgccaggtgaccagccgtgggggctgagacccgacatctttggatccacacaattctttccattagctttacaatatttcctcctccctaccctttccaagtacgtatgaattctgactcaaactagagatcaaatacagtcaaccgtagcagatgttctagtgatacaggccagcaaaacccttcaactagacaacaaccctcaaaactattcatttacattcaaatcagcatcctaaagtagaacatactggaaacttaaagatatttgtttttaatcatggtgcatttaattccatcctttggcaatatattattcttgaaaaacagtgaccaaatcaatagaatgccagacatctcccatgacaggaagtacatttttgagctaagttacatttggtatccaagaccaataattcccatgggcctgaaagagttaatgtatttgcaaaaggaagtacttttttccttcttcggtgacaggatctaattttacgaggcattaggtccttcagccacacggttaagagggtaaaagggaaaaggagtt

SEQ ID NO: 25413 - DNA, 869 bp, Bovine  19866880880043
  misc_feature (1)..(1): n is a, c, g, or t
natactggtataagcctcccatatggcaagagcagcccaacagggcatcaataaaagcttctgtcattgattcaattctctttatttttatcttacagctgatatcactggaagcataataatgctataataaaagagatgataatatttggtatttataaagttctatttatttttgctcacaggtgcaaagactaatgctaataggaggcagaagaataacttatgaatacatgccatacctgacttccaaaaatatctcctacaagcactgaatacatagaataaatggataggtggatatggtgctaattatacttgtcatcaaataaaattgcaacttgcacaaagaataaaatttgattttatgtatatgtatagacaatcattcatatgttgttatctatatcactattctttccataaacattaatttagcaactactctgtgcttagcactagcaataaagtggtcaacaggatagacaggggccctattctcaagctgcttacattctagcagctaaccaaagggtatataagtaaatttatttatattcttataatatagtataagtcaagatagggaagagtaacaaccttttaatggaatccctctctccaaatctgctgaaataatacagagcaataactgaactcaaaagttaaacacttcagaaccagaaatgcagagagaggaagctggctggagcaactggtcaactgggttccaggtctggaagcaaacactggagctaggaattcagctccatataaaatgagaaactgaaattagggactaagctaaaggtcccctactgatgaaatgaaactgaagttgtagatgggagactactgccctatttttc

SEQ ID NO: 25414 - DNA, 1441 bp, Bovine  19866880898675
  misc_feature (1)..(1): n is a, c, g, or t
naatctgacattttaataaatggtataaaagatactatgtgaaataagtgagaatacattcatttaaatatttgtcactagaatccaatttcaatcaatttaatgcattcatgtgtacagaattaaagcaattggtaacactttgctatactgtctctgaacactctttttccaaatagcatttcttaatctaggaaatatgttcttgttaaagggaaatataagagtgcaaatatttttaaatgattttatatttctgggcttcttggttcagaagttctaaaactgaataaaacataccataaagagtttattctttactgaaaaaaatgcttatttctacatttattgaattatacacctgttgtttattggtatcatgagtatatacagttaaatacaaactataaccagaactaagtcattaactctctttaagatgtgcaataaccatgttctggctttttgatgcaccactgtatacagtataaactaatgcaggataaataagttgtgaaaataaattttatattatttataatcctcaaaaatatatttttacccttgatagtctttatgactccatttataattaaaaggatttataaagatgaggtaaagaactttgaatgaagtgttatgtttctttaagaaaaacttaaatggtatttttccatagaaaggaaatgctgtttctaagtttactaagtaatacttctaaaatgactgcaactttttatgagtttaacaagtttaagcaacattttatagtctttttttccttcattttgacacaatatcaagtcttaaattttacaatggatttaaacatacatgattccaagtcatttagaaaatagtagtaagtaaataattagcattttgagtgatattagaagttattccctgacaacatatgctggcttagaattaattgttatgatgaattcccatttctctagatttttccttacactttacaacacgacatgatcacatgttcattattcattagttgtaagtgtctgggttgttgattgttatttagcaagacagagctatagctctttctttttcttatcattttctccccgctgattggcaagcctcctatgcctgagatttgaacttgaactagtgtgctgggtgtcgtttccctatctgagtacttcacgggttcttacccacacgtgggtttgttttcctgagaagaggaaaaatgttactcactttaaaatggaatgaatagaaaccaaagtcatcaaacattcccaaacccctgtgctttataattaggtgaaaaactgaaaactggtattcttgtttgctttccccaggggctgtgaatacttgatataaagattcatatcagcctctttgggttcttcctcttaaggccttaatggttggttttcagtaactgggattcttaactgatagt

SEQ ID NO: 25415 - DNA, 1219 bp, Bovine  19866880927741
  misc_feature (1)..(1): n is a, c, g, or t
naagaagaaatgggcatgaagttaaaaaaaatatatggttatccactacagtgtcttagattgggcttttctaatggacaatggtgacatctcatatattttatttatttatattttaaataagagggctatcctagtactattgataagcagacatttgtaaatagtcttttatgctggggttgaaattggtgatgaggttgatcatgttgacactggtcttttgtaagatgatggacaactgtctacacttcgggaggcttccaggaagcactgatagacttggataaactcctgttggcctccccactgctgtgcttccatgacacagctgtgaggtctaataccgcgttatgaaatgagtgatcacagatggtgccttgtgcatttagcgccacctctcaactcagttccagaggttgtagaaattgccatataaaaaaaatgacatttctttttactcagggattgccttgtaaatagtagcaactcaggtaatattctagagttctctggataggcttcaggagaggtgcatagacaggggcccagagaaaggtctccaatcttcccatttccctgagtcaatgcaagctgaacacttaccctgtggagctgcatcacacacatattttgccctggataatttctttaatatcaaagaatcaagtttatactagcttaagacacattgcaaacaacagtacttcctggactgagtatgagtaattagctgtgagaggcatgaccgtttggcccccaacccatattgacattttaagacttattatagaaatccacatagtgttcataacataaaaggctagccctttaatgaacatcttatctgggaagcccagctacaatatatttctagaacctcataatgatcacgtttactttatgctctggtgctcttaagctaaaaagaggagggggtggggggtagggaatggatggagaaaaatgttaatttaagttctgtggttaagaccaaagcaaaaactccacagtgttgccatgttagagtggactgcaaagcaagtacaaggacttatttctcataaatattcagcaacatctctgtgttttccttgaagtggcagcaaatccaggaatggaaggtcttgttttccacaactgcttatgagtttgttatgcttgggcataaattacagaagccacgatttcaaccacagtggaaaagactataaagatt

SEQ ID NO: 25416 - DNA, 2689 bp, Bovine  19866880936280
  misc_feature (1)..(1): n is a, c, g, or t
nttttataggctttagcttaacctagaaaacctcagtcaaaaaaaaagggtcagggtagttagaaaaataattcagtaatattttctcatgatgttaaaaatacacttttttcactcaaattccacttgtcttctttggaaaccagcaacttcttttagtctttctacctaagaaagaatccagtgagtcagattttggagtctgttgtttcctcccagatctatgtcccttatcttttggtaaaagtagccagatttcttttggggaccatatgcagtctcagtggggccatcatacaagatgccatgatgccaacaattgactcatctattctcctatggatggattttgaggttttccattctttttctattgtgaacagaacagccatgaataatttatttgagcttaagttagtcaaagtgaatttttgttacttacaactaccaaatactaactgatctatgtaggaatacagaaagttctcaattatcatgcaccattgtttataggtatagatcattgggtacaaattcttttaaaagtatcagatttaagcaatccctaaggatactcttgcacactgctctgctttcacagagaagtattgcactcatcctagttctagtcatctgtcatctaccaattgtggacttaattactataggctttaatcaactggattctctttccctcctaatgagcactgaatagttaccttgctagttgaaaaaaaaagccaagggtgacacaaattgctaataagtatttgcaaagatgctcaaattcattagcaatcatggagttgcaaatcagaccacaatgaaataccgtttatacacttcatttgcataaattaaggcattttctaatatcaaaaattgaaagaggtgaatctataggaacttttattcatgtacattgttgaaaggaaagtaaatttgcacaactactttgaaaaaaatgtggcagtttgctctaaagaatataaagttgaatattttacctagaacacaattcagggtaatacacagtgaaacttctgcccttgtgtcccaggaaatatgaacaaaaatattcattgaacttctgttcacagcagcaaaataaattaccaaaaatcaagcaaaaaaaaaaaaaaaaacccctgagaaacagctcaaatgcccaacaacaagagaagtagatgaacaaactgtagtttaatcagataatcaaaaattatagagcaggaaaaacaaatagactaaatttcacaaacaacatagatgtatcttagaatattgagcaaaaatagaaattctcagtaaactacacaatgtatataattttcataaagctcaaaaaaccatcaaaaccaagcaacatgctatatggatatatgtgtatgtatgtgtgtatgtacatgtatgaaaataatttttagtaaagcaagcaatgcacagcacaaagtttaatatcaggtttggaggaggcagaggtttgtgacatgggagaattgtataaaaaattacaatgaggtttgtgatcttaaattgagtgacaagttcacaactgttcattttattattctgcttcatcacttacatgtatgttacatacaaacgcatgttgaagaataaataaaaataagccaataggaagtaacagcttcatccaaggacaggaaaagagactgatgtacaaatttcacaagtaacactgtagatgtcttggacaaaatctgaatttccacttactaataactcaataatctctcttgctctgagctttctttttcatttttagggagaagggtatagtttagctctaactctttgtatacctttcatggaccacttccccttgaacagtctgcagtattttaaccacttactaaccctataacctgagggtaagtacagtgagatggtaaccagtctctcatgattttgtgagtcacatatgtttaacgtgtgcattttcttcataagggaagaggccgtttctatcagaactataaggttaatgtattccttccttaccaatctcccactctccagataccaaccaatccttctgggaaaaaagcttttatcttatcagagacctatactttggggataatgcagcaatattttattattgctgctaatacgtgcatgtggctagagacagagtatcgctttgttctatgaaaacataaaccttaacagtcagtttaagtggcttctttcctttggcagctgcctttgcaaaggtctgaaagtgcctaggcctaactggagaccttggaagagactcttgcccataaagagaagagaaaagaaagctattgctacctaagcccactacagccaaacatgtccaagtacacgatttgtccaagtatggtaatagcctcagtcactctgaattttaaaaggcgacaaactgttaacaatgataatgcctgggcttaaaaacgagtgcagaaatagattaaatggactggcatatacaaaaatgtgtttttctggctaaatctttgtcttagttcctcctccattcacatcaactgtacttcttgtaataaaaacttggactggagcactaatccatatttatattatcctgttatgctatattatgctgaaagcaacccaatttgctaatagcttgttactttctagcagcatttcccccaggtctaataccattcaattcttt

SEQ ID NO: 25417 - DNA, 1744 bp, Bovine  19866880986633
  misc_feature (1)..(1): n is a, c, g, or t
nttagaacgattatgatttgagtacatttatttatagatgcaaacatcagtcaattgtgagcgaacattgccataccattcccaccaccgggtaataagagtgaggaagtacaagagggcatttgttagcattgctcaccaacaataatgcgtacattctcacgagcagagtactgttcaaagaaaaggttttctcctcttatctcttctatttaaaagcaattttgtgtagttcaatacagccatgtcctatactctgcttgccaccaaggttcctgagcccagtttcctctctctgcctgaaaaccaattctacggttatgtgcgtgtgtctgtttggaactgttgcatgattcctttaagccagcatggttgctaccttagaaaacacttcgttttaacttgaaaagtgctaggatttgttcagcatgtttattctacagaggcagagaaagatctgtaataaatacttctttccaatccatcaagaaactcactgatagcaacaggagttatgcatttggatctgggcagcacatggctccatgccacattcaacttacagattaaaaatagaatctgttccagatgcaaagtaaggcacgttaaaccaactgcctctacctgaaatgcggaaaccaaatctaaggaccacagccatgatctaggatgatgactctgacccacattaacctgtctactgcctccacctcacgtatgaaaaataagcctagggaatattcttggaacctcaaaggaatgcttccactccttgctatgtagcttttattaacattccatcatttagtggagcaattaatgttttccaaagctgattcctttcctatcaagagcatcaggacatctggaaacaaagtaatgggcagtctttctaaaaatacacaagcctacatcctgggaaagaaagtgaaaactaacagcgaaacaaaattccagacacacaaaatgaggtacactattttaaaggccaactttcaatgtagacacactacggaccaggtgacagattgtgagtcaagaaaatactgtttcagtattaaaaaacagtatcctggattcttcaacattctggcaaaagtggatggaatggagttgtatcggcaagtgttaagagtacactattttccatcctggaatcgattaagtcgtaggcaggtaatttgaagattctacataaaaagaaaactcagcagtctggggaaagacaggattagcacccactgagagtccatgaacacgaaggcttgtgaaacaaagcatctactccgaggaaatgctcatcaatcagctgtcaagcaaaggggggaagtcacctcatgttcagagcagtaaactgatgaaatgagtcaccaaattcccatgatagcttgactggccccttcctttccatgcagcccctggtcaccatggagccagagccttctctgcgggaaagcaggccagcagagggtggtggccgggcttccaggagctgccctcagaaagggtgggaagaatgtgcagccagggtgtgggggagaagccatatgccacaatgaccagcctactcagggaggctaccctgagaatacagggaatgtgccggaagggacctgtggtctagagagcagtgttctgagacttggcctgcttccagcctttctgagctcctctacccctcaccactcagtctggtccagtctcctcctcaaaggttctccagagcctcctccttctgactcaa

SEQ ID NO: 25418 - DNA, 1479 bp, Bovine  19866880994799
  misc_feature (1)..(1): n is a, c, g, or t
ntagctgagctttatacaatgatctttgtcctatcccatctgacaaactctgatgtacatatataggatagatgttaaatctatctatatattttataatttatagtatcatatgatttgataagtgagctgtttgaagctcagagttttttcttggttttataatatttatttatgagaaatcttttgtgccatgcaagtgaagaagtcacaaataaagacggcaaattaggagaagatgggcatcacagagactggggttgggggggaaagatacatgtaaataaattttacatatatttaaatctaggaggaatattaatagtttggaaggtgcaatgaatagtcctctgagtcctgaccttttagaaataaacctaaagatctagatatacaaatggtatgacagttatgaaaatccaaatagaaattgaatggatatcctattaattcttgccatcaaaacactgaattactaaagtgaaagtggtggtgagatttccaccaattgtattcactgctaatttaagtattactaacagaattcatcattattatgaagggtccaaggtgagacaaaagaaaacaaattcttgcgctatatgcagaacctctttttgtctgccaggggtggacagattgtaattactgtttaatataatacacatttaacgttcttggatggctttgttgtcattgttgttatttttgcaccatcttttatcttggtgtggacttcttgtatggtatgttggaaatgttttctgcagagagaaaaaggcaaatagagtcttgttttgtaaagagtttgtaacaatacatgtttacaaatggcttattttgagatggacaggtgaaaggtgctatgtaagtgccaagtattattatctgtctaaatctagctgagtgaacaaatctttttaatgcccgttttaatgacacagttgttccatatggtagacttcaaatgcataaaacaaccctgagttagtatgttccctggagagaaccagagtgtccaggtgtgtcgtattttaaactcagagtgaaattaagagacagcttttcaaaacgcaggctcaaactgccacctagaccaagttaatttctctctttattgtttcagacaacacagggctattccattaatgaaacaaaaccatgttttatctactgaaaagcaggtcctaatcctgttatgatatctgggcctgtatggattttggtaagaggaagttctctggcactaagctactgagattggattatttatataagtttgattaagtttggtaaagacttgagtatctttctggggaaggttgattttgtaagatggtgtttcatggtgtttttcaggtcttgatgcatcttgttgatgatgggtcaaagctcctcatggcctttaacttggcagatggcaacaaggcacaggaaacaagggctgctagctttgaaaatcatgggacattcataaaa

SEQ ID NO: 25419 - DNA, 1409 bp, Bovine  19866881015085
  misc_feature (1)..(1): n is a, c, g, or t
ntggatgtaaagctggagataggggtggtgggggcagggggttggaatttaaagataatatagagccaggcaggctgagataagcagagatttctactgatttaatatttgctttctctgagcatcttgagagcagagtctgagaaacacaaaggtcaggccctggtaatggagtgcatggcagttcacgatgcaagcactctgaggggagcgcttgccacaagaggggggatctccggcaggcagcagagtggagttgctcggcgcttattataaatgattgatgaacactgcttctaaatttagaagagctctctaaatggacatttactcacaaggaaaaaaaaaaaacattctgaaaggtccatccttggaatgattttgtttatggcgctgcgatagttccgggcaattaatccagaattgcgtcactgaaaagattttatattcttaagtgttcactcatgtagttaaagtaaattatgtccttttccaaacatgtttcaaagaactgtactgggttttaaaaatcctggtccctaaatcctacttgtttgtttaattaatctgaaaataactgctccttctttgtttcttaatcacagatcacatacactgtatttgttagcagctgtgaatgcgagcatgtcccagtgtgtttttcttgattgtttaataagagttgaataatactctatttaatccatcaaataggacattacaataacattgatcttttgtttgacagcaaatttgtttgataacaggatagaatataatgtaaccaaatcagtgtcagaagtgcatttcagagaatccaattaaaaacacccatgcacactccagacatggagcagtaggccaaagggaccagtaacagcaagacacactgggcaggagggtactcagggacaagctggccttgccaaacgtccagagcttaagatcaagacaagcacatcctaaggaggtggccattgtgttgaggagggccagcctacttctaaggtcagaatggacaatgaccctcactgtgttcctcctttcttggcccaaatgctataattcttgggaccaaagatcctaaatcctaccttcacttactggcattccttctttcaccttctgctaccacatagtaagggttcttgaggaatgctattttcacagaccagcatccttcttcagtttcaaacctgtataaaagaaaccttttctttatagcattctctttctctgggggtggtggggtgggggtaggggtcagacttccttggtggctcagatggtaaagaatctgcctgcattgcgggagacctgggttcaattcctgggttaggaagatcccctggagaagggaatggctacccactacagcgttcttgccaggagaattccaggacagagga

SEQ ID NO: 25420 - DNA, 1421 bp, Bovine  19866881018066
  misc_feature (1)..(1): n is a, c, g, or t
ngtgttatggaatctggctatgtaagcagaggaaaaagatttaaatcacaaccattaagaagataataataaaaaccttctgtgtgaaacaggctttcagcttggggttgaaactcctgcctaggtttttcttcttcactttgggagtttaacaagagcttgttaagagaagcctgtacccaacaccttgatttatatcactgatgtgtttctgaaaagctgcagataaattaaattttgtttttgtaaacggaatctcacgtgtgcttggtagctcagttgtattcgactctttgcaatcccatggactgtagcccaccaggttcctctgtccatgggattttccaggcaagaatactggagcgggttgccatttccttcttcaggggatcttcctgatccagggatcaaaactggctcctgtgtctcctgcattgcaggcagattattttacctgctgagccatcagggagagataaagctgcagataaatcaaattctgtttttgtaaactgaatctcatagatgttctaggaagcttctttcagcccacttaactctgccctgagtccttacttgtacgtaaagtgaagggcataatcttatgcttgaaaatacaaatactaactgctgagtttcttatccaactgctatgttcccagtttaccttactgggtttcccacaagtggaactgctgatctgaaatgatcacggcctttttccctcctcttgagaaagcagaaatgtgggaagggtgatgagccttgtttttcttcacgtatttagcgttgcatcatgtgatttggaaaggcataactaaccccttgagttttctaaacacaagccccatcaatacaagcttgtgatgcccataaaagcaggggaggaaatacagattggcctgcctacttctacagcagagccagggcatcactgagaagctgtggctgccgctcttctccggccgccgctcccatctcagaagtcagtctcatgcttggtcctgctagcagctctctgacagaaccagacacatgtggacagtggaaaagaagaactgcaggagaaattctggcatcttcctcttccatgtgatacagctcctcagccccacctttctagagcatcctcctcatggagtcctgccctgtatctttctgttccctgagataccaggactcatcaaacaggttggaggaggctgttttcttgccaggggaacgtggccctttgcactgcgattgtaatacaatctttcctctctggggctgtgaatgctacagtgcaaaagcgtgtttgaaaacctcttttatcattcattgtctccagactgaaatcatttttgacaacctctgcagaaaacaagcagctttctggctactggcgagtcgattaaagggaggaaacacatgttcactgt

SEQ ID NO: 25421 - DNA, 757 bp, Bovine  19866881023712
  misc_feature (1)..(1): n is a, c, g, or t
nagaatctctgtaaacaacacacacacacacacacactcctttaggattactggtgattctctggttgacacattagaaatggcagaggtgaatgtgtgcctgggaggtcctggcctctggcagcaggagggctcagggactctctgttcagcctcctctgggctgcatgaggggagctttctacatccttccttgtagttgctgaaggatgtggcaaggacatgaattgtgtgtggctggctttctgtcctgcttctaggaaagacttctgtgtttatctgcatttttctgagcaccagttggctttgtagctgcctcccaggccactttgtgggaaagctttctttatggtgggtgacgtggcatttcttgtcacttcctcaaattccttcccgctgcctatcagcatcgctctagacttatctgggttgagcttcagccagccagagctaatcctggttcctatttcagaggggcagagtgacagcaatgacgctgccatttcttggcttgtgacctggggtgctggtgtggggagcagagaaaagaggtacaagaattggggcccatgggcttgcttttcagacctggtacctggagtctcctctatcctgtcatcactcttttttctcccaaaggctgacaatattgttgatttcagtgtgcacttgaatgtaacttttccaactgtaacctgaagaaatcaagggtaactattgcctgaacttactctcatcccatctgctgaggtcagcc

SEQ ID NO: 25422 - DNA, 1401 bp, Bovine  19866881037208
  misc_feature (1)..(1): n is a, c, g, or t
ntttatagattcctataattttaaggttataaaaggcctttatgtcatttaattcaggggtccctaacctctggaatccaatacctgatgatctgaagtggagctgatgtagcaacaatagaaataaagtgtacaatgaatgtaatgtgcttgaatcatctcaaacccccaccccccgaccaattcagatccgtagaaaaattgtcttccacaaaactggtccctggtgcccgagtgattggggaccattgattgaattggaaccccagagttttactgaggagaaaagcaaaccctagagaggctgccttgcctcagtttaccacctcatcgagggggaagctacatttttccatcttcagcagctctttcctccgacaacaggaatgaaagcagaggcccacaggctaacgtagcatccttaacaaccctagttattgccttgattgagcttatctaatcaaagcacagccctcatagaagggaatttccaaaaagctgcctgaggctgctgatcaacaattcatttttagcatttctttttaaattgttctaagtcgttgcacctgggtcacagtgacagatgaataagggggttgaacggcgacgttctgggcaccaggttggtgagccccctctgccatgtatatgcatgagctcgccatttgcataaagtgaaaaagcatcgctcacaataatcagcgcattcatcttaataattagtggcaataatgttgaagagcggtggtctccacatacgatctctgaggcaccatgggccatttctgttgcagatgaatgatcatcaagagtgacaagttgatgtctttggatcgaccaccctagttccttgtgctttacagcctggcagctggtcaggaaactggggtgatcggtggggctaatgctgtccttccaacaagaccagtaaaaaggagtgatgtgacacctgggatgggggcttaagaaagagcccctgaccactttacgggcccctttctcagccatgtgcatagtaaactagccgtaactgcaaagcaagaggctatttgtcataaagattatgactctctggttaagtgcttgaaagaccaccacttgcactcagaccttctccataaaagattggcttggggtctgtaatttgccaatacttctgggtcaagagaaagcggtttcatatcagaaatgtaagaggatgttttaaggcccatggtacagtgccagaaaggatagaagtgttcataattttcactgttttttttttttttaaaggccctatcaggttaaaataaaaaaaaaacgaagtcacaaaggaatccacttgaagatttgaagagaaactacaaaggacttcattaatacaaaaggggaagattagtcagagaacaaaagaataag

SEQ ID NO: 25423 - DNA, 1441 bp, Bovine  19866881089071
  misc_feature (1)..(1): n is a, c, g, or t
naataaaggtgaaacaaagaggaagtctcaccctcacatcaagacactgccaccagcatagctaggttgggtcttcatcccagttccttcttgtccttcccactctaagtagtatatgtattagagaaacccactgcagtttgcatgacaattttgcaaatagtaactcatttgaccttcaaaataaatttttgagtatagtgtttatctgtcccatttcacaaatgaagaatgagaggattcaataacttgtctacattgaaccagacctttaagataaatgaacttgagtcttatgctccagctccagtggtctctttgtttgtacagccccatagacctgattgatgatttacagtagggttaatgatttagggaagaagtggtttgggaatatgtgagtttgttgtgcttctgagaatacatgaaatagcatacaaggggcttccctgatagctcagcagtaaagaatctgcctgcaatgcgggagatgcaggaggcacctgtttgattcctggattgggaagatcccctggagaaggaaatggcaacccactccagtattcttgcctggagaatcccatggatatgtgagcctgacaggctatagtccacagggtcacaaaaaggtcagaccagactgagcacatatgcatgcatacagaattggatgcaaattttaaaatgtcagataaaaaaactggatcaaagctttattttgttcaagaaactatttatatatctttatgctacaaataaaatgtgaatgttttaagtcatcaaagaaaattctccaagcattcttaaatccatttgaaacttaatttttatataaaaatccaactatcaattataagccagcctaatctgagccaaaagaagtctacagagatctatcctggaaaagagtttcaatgagaggaatacattgacttggttggtatggatttaatataatgaaataacttttatttttatacaattttaaaggttactttccatttacagtcattataaaatattggctatattctctgtgttgtacaatacacccttaagcctatctttctaaaatgacatcttttattaaaaataatgcaactttttctctttgtatatttcccagtaaatcaaataaccccttctctcaattaaaaaggcaggaaagaagaaaggaagaggagaaaataatatttactgagcatctatatagaaacataggcacttgaataggcatgcttacatgtgatttcatttaatcctaaaagtaaccctttgtattaagtacactttatagccacttccctgatggctcagatagtaaggagtctgcctgcaatgcaggagacctgggtttgatccctgagttgggaagattccctggagaaggaaatggcaacccacttcagtattctttgtctgggaaaatcccatggatgga

SEQ ID NO: 25424 - DNA, 830 bp, Bovine  19866881105754
  misc_feature (1)..(1): n is a, c, g, or t
ntttttgatcctttaaattgttagagttatagtggtatgtccctaatcctacatcctgtaaaagtcctatttaattaaattaatgtaactgaaatagttcagttggctttacttgttccttttctctaactaaatatcagcttacactaaaatttttattaatcacagtaatgagaatttttatattaaatatatatattacatttagtttaaatgttaatagtctacattattttaataaattgctctaagggagtatatatgaaataagtctctcatgcagattttattggttgctgcatagttaatagacactaatgtgatcagagcctggatgtgatcataagatcagtagttaaaatgattgaaatataaattagaagctggaataattgtttgttagaagctcagataataactgtttggtaatgctcggagggtcgaagaaataaagcattcaaatgtgcagcaggagcaggcaagagaaacactttgaggcagacaaaggctctggatgcttttctactaattgctctttccattctttctctttctctgaagaggtccaacatgcccttctgctcctgtatcttgctccatttttgtttctcagtgaaccttctctccagcaacaagacctcctgtattctttttctctcttttgcttttctactcacagtgcttaagtcacgactgaggatgacaaactctcttaccagtatcttgctgttaacatgcctgattctttgagaactagtagaaaaaccactcattttctgtaggctgggattctctttcttactatggcaagatcagcagactgtgtaaaa

SEQ ID NO: 25425 - DNA, 1000 bp, Bovine  19866881113729
  misc_feature (1)..(1): n is a, c, g, or t
nattctggggcaactgcttttttctttttcttagctggttattgaaatcctaatgggatgggtgatgaattttcttaggtcaggtaaactgaaaaggctacagctggaattcttcacccagaagaatcggagttaatactaatgatcattgtgaattagaagatcaaaggcgaagcatcagcctgttctccaagttgctgccccagaggccattagtgacctggtagagctctctcccagcctcttgcacacctccttgcctctgccccagcctttcttccccatcctagttatgcacctctgacctgggggaattacagtccagtccgttgatgaagagggatggggaaaaacaatcaaaagggaaaacaaaagtccaacttgaaaactgctcatttatccaggtacataggacccctaagcagatgaactctgactggggctctgtgaatttcagggtgtgattgagatttttgtgctcaaatggtttatacatttcacagatgattggggcctttatgtggtaccttatgtgagggacttttgtagtatcttgatggcaatttgtcagattattttaaaatttttatttgtttccaagactaagttaaaaatatgctataatttggttttctgatatactcttaattgggttgattaaatcaaggattaggttcaaaatggaagtgctcatataagcacagtttaagttgacggttgctgatgcatataactgttggaacactggctggccatttacacttcaacacatgtatcaatatcatgtcttccgattcctcctggtgatgatatatttttgaaggcaaaataccaaactcagtcaatgaatgtgcaactgctcctccttaatttatctttcgagttaaaattggagcgttacatacatatgtgtgagtgtattcgctaaactagctcagtctagcccttaggaattttatgtaatataaactggcttttaactttctcagtgtttaagatt

SEQ ID NO: 25426 - DNA, 1256 bp, Bovine  19866881281688
  misc_feature (1)..(1): n is a, c, g, or t
nttttatttttactttcatagcagtttttttttttttccagtggacatcatattatatatttacttgttattgtctctatgagtcactaaaatataagctcaaaaagggcaggagcttggtctgtcttgttcatgatggtgttcccagcaccttgaacatataggacctgaattagatttaggtgctcaataaacttatgttgaaggaatgacttgctgatttcatatagaaagaaagttgctctatgcacatgactcaaacattggtcattggttatgacttactgcgttatcataaccttgtactaaccagttagcatttgctgcttaaataaccacccaaaaatataacggttccaaacaattgtctacttagcttatgatttgtgggactgggacttgggctgaacattcagctgggtggctttcttggtcttagccaggcttgcttatgcacctggggtcagctttgagtcagctatgtggttctgcttctgggggtttgctgactgttacctgtaatgataggagtgacaaggcatgtgtcttcatctagcaggacaacccaggctatttggatgacagatgttcagagtttcaagagtaagagcagaaggtggaaagccttttgaggcaaatgttcaagaccagtacaaagaggctctgctacagtccatttgtcaaagcatgtcatcatggcagcccagattcaactgatagaggggaaaagtccacctatacaaggatggcactgcaaagcctgcattcaagaaagtggatttaggcaaaggaagattttgtggtcacttgtgaaatctactaccaagccatcagggccttctgagccctgatctagacaagtgtctcttctactaaagcatcatcacatcaaagcaaccttatctagaaagttcaaatgcacatgtagggctaacatcctcatctgcatattcaagaagcctttcccgtgagggagggctgattgtctgccatctaacagccatctcctctcttttctcccccacgaaattaattatgttccatgctgcatgcatctttgctcagctatctaccttacctctcaataaaaagagatgctgtttcaaaataaatagcctgatacactgtaaagaagccgcagatacttagaaacaatattttctaaatatttataagctatatttccagtctgttacattcagtgaattacgtaaataaatatcagacctgcaagtcaccatcccacagcgccagtg

SEQ ID NO: 25427 - DNA, 635 bp, Bovine  19866881328170
  misc_feature (1)..(1): n is a, c, g, or t
naaacttgaccctaacctgcacatgttataatgagatgttctgagcatcctattctgaacctctgatcaaaaggcaggtcctgatggctggtttggcttaaaagtactctaatagggatcttccttctacacgcatgtaaactttgggtgggagaggtgtaatatatgtaaccttatattgataccatcagccttatcctgagggtgtgactagaaattcagcctcatagtgaaccctgaaaaccatgccaggagaattttgggggctgctaatgagaaccataaaataacactaaagaaagatctgaatgaacacgccagatgactgcgtttgtactccctgaattgggtggaagatttatgaatcaagtttggggctgccttagcatctagcctctcataaaatttggccgctgccctgtttaaataaaatggaagataaaagtggtttcaagagtgtgatgaaacgattgtgttattgaaatgctaatttagatgtggtaactgcctaagaaattccccgtttatgaaacatgcccagtgaaagctccttttctacaaagttgtgtgtgtgtgtgtgtgtgtgtgtgtgtgcatgcatgcacatgttctactgtttgacaagcacttcaatg

SEQ ID NO: 25428 - DNA, 700 bp, Bovine  19866881377389
  misc_feature (1)..(1): n is a, c, g, or t
nggaggaatataaaaatagagtcaggcatcctgatttcagatgaggagccttaggcccaaggggggtgggacggatgggaaaaaggtctctgttcaaacaatgaagagagcttcttccattgcagaaatgtctctcattgcaaggaatgcccacacatggctcccagggcccttactgcttcctgagcttgctcggcgattgagcatctcaagttgaatgtatgaaaatgaatttgtggccaaggataaaagtgaaactgatagcaaaagatgcaagttttcagctcagtgtaactcaacataaaaggtgtatcagactcccaagttctgatttgactgctgtaacaactggttgtcagtagcccttggatgttaccagaatgaaagactgtgtgcagaaacacctatcccagtgcctggcatagaggaagccttcagtaaatgctatgccttgtactctgaacagccctccacctccttcaactctacctggagcctgagctctaaaactgcttgatccacatatctgtatgtgctttaatatactgcacagcagattttgtttgtatttgcaagaagctgcaatactccatcagatgtttctttaaaagcttataaattattctttaggctttctttaaaaaaataaacattgaaatgaatatgtgtgcattaaagttcataatcaataaaggatgat

SEQ ID NO: 25429 - DNA, 1289 bp, Bovine  19866881479063
  misc_feature (1)..(1): n is a, c, g, or t
nttgacacagccaacctgtcctgccccactggttaaatttgcacttggtgaagaccagaggagtcctttaagagatctgacacccatcccttggtcagatcatcttgcagggcaagaaagtatcataagaagctgagggtattagccagccttgcccttgatgtttcctgttgaggacaactccagcagactctaaaacagcactgaggttacagatgtcatctctttggaaggggcgttcagccctgtagcatgcctgctggggccaaaactccctccaacagacttttcagccatggtgtatccaagtgtggtccctggactcgcaaatcaggcatcacttgggaacttgtcagacatgaacattctcaagctccaccccagaatctctggggaaagggcccagcagtctgttgaaaaaactttcaggggttctgaagcacactccagtttgagaactactgggtatagcacttagctgctcacaaatctggatgagtctattttgggagtttttcaaaattagatgaatattacatttttgtggagtatttcctcagtaaaaaaaggctctggttacattaaaacacagtcaatgtgcgcacatttgtgtgtgtgtgtgtgtgtgtgtgtgtgtgtgtggcatttgggggtaggagtgacaacacgaaaggccttgttcagagacttctgaactcttaatggcaatgactcagtgaacagggcagagagaatttctcaggattgccttcatcaacttctaatctgaattcctggaaaatcttcattttggacccacagagtagagagggcccagactggaccttggcacagcacagcctcagggtgcccgggctgaggacccagacccacttctgttaggctgtatgacctggggcaagtcccatgttctttggggcatctgcaggagaattggtcagatgatgtccactctgggttcaagatggcgcggaccacagaggcttcctttcttcctgttacctcctctgtgcattgaggactttagtagaagagaccctcccaccaaagacctctcctaccaggaaaaacgtttacaaattgaatgatttctaggttccctttcaattctcaaaatcaccaggcaggcctacgcgtggtgtcctaactttgaagccttgtggggatggagtttatgcattgtttcaaagctctggaggcctcctctgaagatttgttttctggtggtgggcttagcaactctggttttttccccccttaatctattttcttttacaaagaacaaatgt

SEQ ID NO: 25430 - DNA, 947 bp, Bovine  19866881613533
  misc_feature (1)..(1): n is a, c, g, or t
ntgaatttgcggtgtccctgacaaatttgaactctagattgctggtactggtcaatgagctccactgtcgtttagttgctaagttgtgtctgactctgtgaccccatagactgcagcccgccaggcccctctgtccatgggcttttccgagcaagcatactggagtgggttgccatttctttctccaaggaatgccactaacaaccaacaaaaggaaaaacgtagtgcttccaacgcttattaattcaaaagctcagtgaggcatcttttcttaaaaagaaaagcctgaagtaccaaaatgttttgtcagtatatatatccccccttaggaaaaaagatttgtagtcaaatccaccaccacccttccccccaaaattatagttgagagaatgaggctcagagtgaagtaaaaaatccccagtggacagcctgctggagatcttcccaatacgccaccctggttccatttttcaatgttgttttcatttgaaactagattcatgcagcttgcctgtgcaaaatgagaaaaaaaaaagggggggggtggttctggaaaggaagagaaggattaaataaaaagttctgctaggatgtagccatcatgatctaatgcaccatgggcagcccagcttcagggaatactgactttcaagggctggtgctcccagggacagctggcactcagctggtcattgtgttggcctcatgttgcctctgtggctcccataaactcaactgatgctatgtaggtttttttttttaacttgcggcacaggaaatttttcctcaatgtgtgtaagagctgtttgattccccaaagaaaaagatttggcaagtcagttaagaggaaagtagaagcactgaacacatgagcacattttaacaatgtccaagtgtaacttttattgccaacagtagacatgcacggaatttaaacacagcccaaa

SEQ ID NO: 25431 - DNA, 796 bp, Bovine  19866881663590
  misc_feature (1)..(1): n is a, c, g, or t
ngcctttgataaacagacgaaaaggattattcattaaaaagttgttacttttcttcatcttaaataagcaaatctagcccttaaaataaaaacgagatgaaattaaacattatcgcaagacgtggaaaacatgcgtgctgtcacttttgggtccataataaagataaatcagttgtttttagcagtgcgctctgagtctgtgaagggcatgacagataataggcttggaatttctgaagttattgtacagtaaaatttgttttttcctcaggcattcaatcttttttctctagtgattttgtacatgacaaactttttagtgggtgcattaataatctataagtaatgggttgtcaggtgtcagttagataagattaaaagactgtttaagcattatccatttgcttctttgcatgagttttataggtcaagagaaataactttttgaattgtggttgtttgcacatgctggtttttcctccctctctccctcactccctctctctctctctttctctccctctctctctttctctcgtttggctctggtccagaagtacttgcaagaactgtattacattacataaatcctgcatgtaggagcagattcgaaactcacactgtgtgaatcaaggggacacatgtctcccctgacttctgtaaactttttagttttgaaaatgttactctttctcttctcaaaggaaactttgtcaggggaagcctcctcagtagaggaactgaagctcccagcctgaggagtttcctagcaagtcaggttgaggtctattcttgt

SEQ ID NO: 25432 - DNA, 945 bp, Bovine  19866881926083
  misc_feature (1)..(1): n is a, c, g, or t
nacatgattcttcagaaaattctacacccattaagtaaggaacaggaagcaagctaatagaaatgaaatggttaaatgattctgctactcagtatcttattttcctccccaaacatattaatttagaacacagatcaattcaaattgtaaaattccagattctctggaattttctggtggaagctggagccacggaaatgatgacaattaaaatgaaagtggaaaaatgcatttatttgcacctggaattatgcaatgctaacacataatgactctaaaagacatgatatttatctgtacaatgagggttaatcttttctactcagggctatgccaatcttggcagagatgccagccatatcttaaaaagataaattccatatgctttgtagagttatagcatatttcccataaataatgtatacaacagactgtaaataaataatacatttatccgaactgttcaagagtaaagggcagggtggttactcatgagacggactctcttatgaatgaacaatttcaaataaaagtaatgtccaatggtgagttatcacaaagttcttacactaaaatattcttaagtggagagcagggaaggggtattcaaataaccccagatcaggtgggaactttcaaataaatgttccaactaaatgcaaaatgcccaatttaattttattgcttaaatttctattgtgattgttgcatcgtagctaatagcattttacctgttttctgcaattcttaattctctctgtacactactggtttttgtttttgttttgttttggttttttgatcaatgaaataactagatttaaaatgtcaagtatgagtttttgtcccatgaaacacatagaatcttttcattgtatgaataattttaactacagtccatagaaaggaagggtactacggaacaaaaatttaaaaagaacccat

SEQ ID NO: 25433 - DNA, 871 bp, Bovine  19866881946031
  misc_feature (1)..(1): n is a, c, g, or t
nactgagttaaggagaggagaaacggccaagagtctgtgtggcactgacgacactttccatgatgccctctacacctggtacctttgtccaatctctgaggatttgctctagagccataactatgacacaaaacaccaaactgccatgtttgggaagtaaacaacaaaaaagttttgtggctttagccaattttaaggccatttgttcccactgaaacttgaaatctaagaaagggaaacatgactttgggtctatttgattatgtctgatacctcttctcttttcatcaaaggatactgacaaggtgaactagattgaacatggtggtcctacatgatacagtttctcaaactttagttgacaattactttagcattctccttcaaggataaagccgtctcaagaaaatttcctgtttaagcctaaaaacaatggagaaatccagaaagctctagaatgtaactacagaagagtgctccccagcaacactgcccaccaattagttagaacatgagaggtctctttttccaccacatcagttaaaaatctaaagggttcctaccaagcctgccactgataatcttattcagagagtaagccatgatttgaaggccctcaaggaatggtttccctccacagcagcctagaacgcttgacttaggtaaaatagtagctatggaaagtcaaaaccaccagtccgtgcaggttccaataataaaacgtacgtgcaatgaatgcagttttggactgtgactacttctacatttgccacggcagtacaagtttccagaactattgttggctggagttttggtctaagcggatcagtcacggtcttgaaagtcactgtaatcagagtaaccaacactc

SEQ ID NO: 25434 - DNA, 901 bp, Bovine  19866880490920
  misc_feature (1)..(1): n is a, c, g, or t
nctgagtgactgatctgatctgatctgatctgattgcatctatcattttgaaacagtaatactgtaatcctttccagacaaatatctgtgtatgagtcattctctgggtagtacctctgtagcttctactcaatggggcttttagcttaagtcaatattttcataagatatttttgcagctcaggttgcatgagctttaaaagacaggaaaattgtatttggaaactgggcaatgttacacagtaatgagcattagcagtggtaagtgaccctgatcacatcacaattctgtttcagggcttttgatgactctaataatagatttgtttggtcataagcacaaaagtaacattattaaaatatttatagaaataatatacaaattttgcataaaagcaagatgcaatatttggaaaggtttttattttttttaatttatttattttaattggaggctaattactttagaatattgtggtggttattgacatacattctcatgaatcagccatgggtgtacatgtgttccccatcttgaactccccttccccacctccctccccatcccatctctcagggtaaaatgacatttatttttatatatcggtaattcatgacattgtacaagagacagggatcaagatcatccccatgaaaagaaatgcaaaaaagcaaaatggctgtctgagaaggccttacaaatagctgtgaaaagaagagaagggaaaagcaaaggagaaaaggaaagatattcccatttgaatgcagagttccaaagaatagcaaggagagataagaaagctatcctcagccatcaatgcaaagaaatagaggaaaacaacacaatgggaaagactgcagatctcttcaagaaaattgaaagtaccaagggaacatttca

SEQ ID NO: 25435 - DNA, 950 bp, Bovine  19866880533766
  misc_feature (1)..(1): n is a, c, g, or t
ncagtttagcaaaacccatattaaggatatctgaagctcccgcttttagcttatttgaatgcatttcttttgcactccctgttttggaagacttgggagcaataggtttttccgtgcttttagttatctctttatcaccctcttgaaccatcctggaaactatgctggagattatgtcagtgcatttggccatttcctcaataattgaagtaagtgataggttgtcaatatcgagagactctgaggtagctttacatccagaacttactgaactagtatctgtgtcgacactacataattttgcaatgatatattccaaaattgttgtggaaatgagctgaatattagactgcaattcagtggctctttgctgattcttgtttgtcttctctctacttaccttagaacaagatggctgacagtgagggtgggcccctgtgagcttgcataacatttcatagagtgtttccccaatattatctaacacttgtaatctggaattctctttcagatcttttccattaatgacactatggagagcacatggagtagctaaaattttgtaaaaagattttttatcctgtctgcttggcaaaatgttccctttatcaactttatcagatccatgtgaagctgttggctttgagttatctgaagagagtgaaatattgctttgatctggatgtccacttgataatatttcacaaatacaagttaataatggtgattccatgatgtcatcattgagatctgagacaagagattctaatttcttagtgtcagtaaaacatcctttacctgtgagggatttggtatagtttctttccctaagatttaggtttttctcactgagttctagttcattctggatagcacgcaaaacgatgtttaccactttagctgtgtaagtactaagttgagattgtaatgaagatttgtctgcaagtgaa

SEQ ID NO: 25436 - DNA, 1104 bp, Bovine  19866880669226
  misc_feature (1)..(1): n is a, c, g, or t
naaaattcactcatttttagtgtaaaattcagtatctttttagtaagttttcagttgtataaatatcaccacacccagttttagaacaattttttatcacattagagagactccttgttcccattttccttttgtctctttcctatcttgagccctctgccatcactatctgctttccatcactatagattgcaaggtttttattggggattaaaggatatttattatagagctgttttacgtgaggaagtttctcaaactgtatttgtataattttgataatcttatggagtaagtagtcattatctccattttagatatgaggaaacctgggattaattgattaacatatactcaagatcacatcttagagatggtgaagaaatcatttaattcaaatctgacagataccaagcctccgtttatttttttacatgcactgctttatagtttatgccatagtgtttacaaatgctttcatatattcaattatccatcaagcagttattagcatttaaatgtgtgaagtttcttgtgtctgactctttgtgaccccatggactgtagccccacaggctgctccatctatgggattttccagccaagaatactggagtgggttgccatttccttctccagaggatcttcctgacccaaagatctaacctggctttcccacattgcaggcagactccttactgtctgagccacaaggaaagctttaaatgtgtaaggcattggaatctcaaatacagctttgtttctattcttaaggaactcatagcgtgtgggagaatgtgacaaatatgtgagggatatgattcaaaggacatgaactagggcaaactctgggagatggtgagggacatggaagcctggtgtgttgcagttcatgagtcttgaagagtcggacaggagttggtcactgaacaacaaaattgacaaatcagtgtatgtatgtatgtgtgtatgtaatgtatgtgtccgtctgtatacctttatgtatgtgtgtgtatagaaataatcaattctgcctgaagattcacagatgactcctcctcagaaatggtgtttaagttgacacctcagaaggtgttcacaagt

SEQ ID NO: 25437 - DNA, 3060 bp, Bovine  19866880746696
  misc_feature (1)..(1): n is a, c, g, or t
natccgcagtgattttggagtccaaaaaatattcagttagtgaaggatttatctgacactttggtggacagagcactatgttagatgtctttagatgatataggatgatggaaagacatgagcaatatgaatattatacacatagagaagaagcaacatttagaaaatttactaacaacattgtgcctgttctttggtcacgtagaattcttttaacaggaaagggaaggctttgcaattttcatcttatctcgaaccacataacaataagaatttacttgtgtctgcaaatctgtaataaaaagaaataaaaggggaagaggaagaattgcaggaaaattataaagaatagaatgagcgattattcacacaattttggtagacacacgtttgtgtgtttacattagcatttacaattttatggttaaaactctttagatataaatgcacacatcaaagttagtcattaaattcatagccaatcctccatggtacttgtgatatttttcattacctgaaactagaggaaaccgatgaaggatattcacaaccaatgtttgaagctgatttgcaacttctgtgaaccttgatattgaatacattgtagccgtgcatcaaaatcataagctgatctatgaccaaatttgagacttaggtaaattttcttttctttaggttattaagaaactttctatacctttgtgtgatatctcaatgagaatatttcattgctgtatatttcatcacatctcgtcaaattattttgcttgtggtgctatttgttatttttatttgacataacctttctcatcatttttgctaactgaatttgtttctcctcaagagctcaaaagaaataaggtttatttcacatttttattctgatttattaaagtgtttcttatgtgttcagagtgataattcttggttttttcacttaaaaagtcatttttctgaatatttaagtaatatttatacagtattttaaaatctgacatttagctggaaacaatccatgaaatatttatatgaatggaatgcttcaactaatacataaatatcaacatgaattgtatatgttgaattaaattctgatatagaattatttctaccaataacaaaaaataatatagagaagttttcatgaggtttattattagagtctgaagaaattaatctttgccacaaactataatataacaaaatataaaatacattacatatattacccaaacatcataaaaatgtacagttatttaaaaacaaagaaaaaaatttaggcagaagcattgaaaaggaatttaattatggtgacttacttgtaattataatatttactactatatactcataattttctgttgatatgaccaggattaattatgctaaccacaattgtgaaaattaagataggtttgatattatccatttatttacatagttgtaaatataaatacatacaaaggaacattaaaaaaaagtcatgtaaaaatctgaaatgaagaatatacatcattaaaaggaaagttaacgtctttctaacttttgcatagcttttctcatagctttagaatatgtccctgtatactatttaggaagtagaaaaactacatcttcagccaagattgtgttgttttctcttgtccttttctatcatcatgcataaatcttttgccattaaatgttttacatatgagagactggcctcatttcttttgcgtatgaatgggaaaagggaggataatggtatccaaataagtggaggtcaatgaaattaaaacaggaatattctgattttatgggattgaccacattgataataaaatgttcatatgggatgctatgatacatcaggccagttctaaccattagtcaatcaaccttaatgacacattcaccaatgtcaatattcagagaactagatcaatgacttcttaaagtccttccttaaattatgaatctataatttaatgcattatttggatttactagtgtacctttttcattctcatgagattaaaattggtatatttcacatacatgtaaacatggtctcctttttcattaaaaggcctttactgaacaaacatttcttttaaaaaatctattaattactgcttcaagctagaaagcagttacaacccaggcaaaatctcttctgtaaacaattggaaactataaaattattaaaaattgttttcagagaccagaaaagaggcagctcagaactacgattcctgagataagagaaataaatgagatgaataacaaaactgccatggctttccgcctacaggcaatttctagaccaggaaaacacggagagggaacccaaacaaagcctagtggcctggttgatgtaggaaatagtgactgcagtctgacacatttatggagccctaacagggtcaagacttgggaatggcaacccactccagtgttcttgcctggagaatcccaaggacagaggggcctggtgggctacagtccatggggtcacaaagagttggatgtgactgagcagctaacactaactttaaacaatctctagagtgagtctagaatgcatactgagtcacttcagtcgtgtctaactccttgcaaccccatggactgtagcttgccaagttcctctgttcatggaattctccaggtaagaaaactgcactcagttgccatgccctcctccagtgatcttccccacccagagatggaacctgcgtttcttaggtctcctgcaatggcaggtgggttattaccactagcaccacttaggaagcccaactcctccttatctgcccccaaagatctaaagaattgtttggaagggatcaaaatggtatccaataacttttgttattgcccaaacaaacaaaaataaataaaacattctttaaaggaagacaaatctaaacactcagcaaggtaactaaaatgtttaacatacaataaaagaaaaaaaacttactactcatgtctaaaaacacaacaatgtaacctattacctgaataaaaataagccaatagaaacagacccaggaatgacactatcagaaaagg

SEQ ID NO: 25438 - DNA, 4030 bp, Bovine  19866880758574
  misc_feature (1)..(1): n is a, c, g, or t
natgggggagcctggtgggctgccgtctatggggtcgcacgagtagtcggacacgactgaagcaacttagcagcagcagctactttctacgtgatccactttagtgttgttaatctttctgtcactaagtaacaaggattcatcttattcctgctttcagaaatacattcctcattttcttataaaatccttagctacagtataaaatccaaagttcctcagaatgttgaaggcacttcaagtttttactaacactctcctcaagatccaccgctcttttcaaagcttttcccacattttaggtttttgtaatggcagtccttacattcaaacactaaagtctgaattagtaatcttcttctgcctcatatattactctaaacacagtggttgaaaatagaaaacatttatttttccatggtttctgtcagtcaggaatccaaacacagatttgctgggtatttctgtttcatggcttctcaagagtctgcaatcagggtatgagctgggactacagttgtgtcatagctcaactaggataggattcatttccagactgtctttcatgattcttgatgagactgaatctcatgtctgctgtatcatattcactagaaatgagcaaataagtccaggccataatcaagggtagagtattacagaagggcttgaatcccagcaggcaggggtagggaggggtgaggtggggagcacctccaaggctgcatcctgcagtaattttttataaacatatatgaatgattgtccatagggtgatttgggattgtccataatattgggttaaatattaccgtcaagtggaagatttaaaaaaaaaatactatatacttcgtatcttaaagaggaatccacacatcttgaatgaatggaaagtttcctcaatgtatcttctaagttaaaattttgctttgtttgctttagtcgctcagtcttgtccaactccatgcactgtagccctctggggtcctctgtccatgggatttcctaggtaagaatactcaagtgggttgtcatttccttcttcaggggatcttcctgacccaaggatcaaatccacatctcatgcactgcaggtggattttttttttttttttttttttaccactgagccatcagggaagccccaagttataatttagcagactaattagatgtttttgaagttaggttttctcatacttcctaggtcatgttttgtatacatatgtactgtgaagaaaaagatctctacttaaaactgtgattttcttaaacatgtgttttttaaattgattttccagtataggaatttcaatgcttggcttgtagtctcatgctgtcacatcctttcatgtcctgtcttcacagtgttcatgtttatatactaaggtttattgatatataagaatttatattccactcccccatagttctgagaaaacatcctgtatcagtcagggtccagttttaatatagagattaaacactgtcagttgttttcacagatggagcccaacaggggataaaaggatgcttagggcacatagagaatctaaactgcataaagttcctaccattgttcgaacagggaaaccaaagggaagaagtgatatgagtctagtaagcctgagtcatcctgactgctgctcagacctgtgatgaagggctgcgattgatggtgttcagagagcagaagataggtgtatgcaagttggtgcttctgaaactctgactcctcagttcatgtttctggctactgttcatgctccagagggagtgacgcgtgactgctaggtgtgttcaaagatgctggattctagatttaactctcctaaccagagagaggtcaaccagactagtgagctcctcattcgagctttctaatcttccaccagtgactgctagtaggagagaataattctcagctggtaaaggaattggctgaatatagtttgcagatagaggggtaggcctgaccgaagaaactataaaggtcaagcttcctaacagaaagtgtagtgttttgaggttactaatgacctgcccacagataaagttctgtgagctcttaaaatgtcatatggtttatttagatattgatataacaaaactgtcccaggttgggtttctgataaacaggtactgagaaagaattggtctgcaagatatttattagagattaatatctatttccctggtggctcagacagtaaagaatctgcccacaatgagggaaacctgagttcgatccctgggtcggcaaaatcccctggagaagggaattgtaacccactctagtattcttgcctggagaattccatggataaaggagactgatgggctacagtccatggtgttgcaaagagcttggacacaactgagcaactttcacacacacacacacacacacacacacacacaatatctgtagtgggagggaagagaaagaatttaggagagcaaacttcagcatccgtcagaattactcagaaattgctaatacccactcctagaatatctaatcagctgaatctgcatttcagagatcagctgaatctgcatttttaaaagatcctagttacactgctgctgctggtctggtctttatgtcaaaaaactcttggactttttcgagtaatgctgactcaaaaaaagccttagtcaacctggaaaggagctctcaggagtgttgcccatcagatgatacccagctgggcccaaaggatcaggtccttgtctccttatcttctttagtctggatacaggtgccctgggaacggcatgagggttgtgtaaattcagctctttgcagctgaggcaggctctgaggaattatgagctggaagctgtttgcagaccttcttctctactgttaggcaggaagccttcctgatgggagacctggctgtacatctttacatctaccaaaaagtttgaaataatgtttcttcgttgtggactattctaaatgtttgcaatttccaactaaattaatgtagtgtccaatattcaaatcaaatacaaattttagaactgcagtttctcacagaagcattacacaatggaggaaataatgcttataaaatgaatgtgatatctctgtgttctcatattgttctgaaataattgtgcaataaatctataaacagagctattttacaaaaataacacaggatgcaattaaggatgttagagctcttttgaaggatatagatgtaaagtccaggtataataggtaaaatttatgattcaattacacaaaatactcactttgttgcaaacataaactatgttcagaccacggttggtctaattatgaattcatactgaaaccaaaaataaacttgttgataaactatagcatatttcaacattaatattgaagtatatttaaatatactgcatcttcagattaattttggaatctacatatattttaaagcactaaaactttctgtttgtacatatccagaaccacaaaaatattttttattcagaaggtaactaccaggaggttattattttgagaaatgaatcaatcattcgctatagcaaattttatgtataaaattatcccttttattttgaaatctaatcttaagcatgaattagactttttattttcggctgccctttgcaaatcctattgttgctgagtgtacatctcaggtgctcttttttaatggccattctcagctaggtacttccaactcgatgacttactaacaagcttgttcaaaagttgcagtgagaactctgatattcagattaaaagatgcaacacctaaaataatcatacacctggctgaaattagtgacaagatctaaggaaacttatatgagaatgtcccattctccatggtattcactttgaaaactaaaagtaactccttcgagatttggagctaatcttcatacaaaaattgatatgttttcaacaaaagggaacagataggctacatggttgacagtcctacaagatttcctatgtgaatattttatattgcaataccaaatgaagcgattcaat

SEQ ID NO: 25439 - DNA, 933 bp, Bovine  19866880797926
  misc_feature (1)..(1): n is a, c, g, or t
ntgatgggaccagatgccatgatcttcgatttctgaatgttgagctttaagccaactttttcactctccactttcaccttcaacaagaggcttttgagttcctcttcactttctgccataagagtggtgtcatctgcatatctgaagttattgatatttctcccagcaatcttgattccagcttgtgcttcttccagcccaccatttctcatgatgtactctgcatataagttaaataagcagggtgacaatatacagccttgacgtactccttttcctatttggaacaagtctgttccagtgaaaattcagagttgatttcctttaggattgattggtttgatctccttatcaaaatacattagagtttttaaaacaaacaaacaaaacctcaggaattcaattaaagtttgtaaaaaggctcaagaattgctcagaaatacatttttatttgtctctactgtatttattaatctaagaattaaggtgtcatagttttactggatgaaacaatgctaatttggggcactagaagataaatatactcaaatttctcaaaattcacttagttcaaaagttattattgctgattctgtttgctaggtactatccaaagatcaatgcaagtgggaaagcaaacttatactgagatttgagagattctgatactgcttttcttaagctgtagccctatagggcatcacataatatgaaacacataatcagctttcagtatatatttaccttcattaatcataaactgtaggcaaatcctgagcttgaaaatttagacactttattgttgttttgtgttaatgattattgctctttattcccctttgggttaacatttttgaaaactacagagtacagatggtagcaagtccttgcagaaatgtaatcagcatatgtgaacatgatgtattcaaacag

SEQ ID NO: 25440 - DNA, 1100 bp, Bovine  19866880900387
  misc_feature (1)..(1): n is a, c, g, or t
ncatgaaattgtctctatgatataagagaaatctgagacagtaattaacaagtgttatgtgtcattacaaggaaaagggcatcatctcttcagaaagtgtgcaggtttcaacagcagattcattgaatgtcaataaaaaagtaatgagctttccaaattttgcaaaagcaatttctataaagacctgaaggcttttaggaagcaagagaaaatgaaagaacaaatctactagagacagagttgatgaacttgtccctataatttttaagaagaacatgtctactggtaactcgatttggaagataattttttaacctgtatttcatattttcactttctataataagttttagtgatgattttggcttacttcagcaaagtattagttgacagaacttcctgtttgcaatttgaaattattacatcgctgcctgtaaagtctattttagcaagtctctttctgcaacttgctttaaacatttttttctctaaagcagttttaagttcacagaaaaattgagcataaggtatagagtttccatatactccctgcctgcatccatgtgcagcttcccccactatcaacatgctacaccagtgatacatttgttacaatcaatgtatccacaatacttcactatcctccaaagactatagttcacacagggtttgtgcttggtgttgtatattctataggttttaacaaatatacaggaacatgtatatataattatatatcatgtacaggatagttttactgcccccaaatcctctgtgtgctgcccccaaagccctgacaaccactgatcttttcaccatcgctatggtatgccttttcatgaaaattaagtgattggaatcatgtattatatgacttttcatatttttttcacatagtaatatgcagttaggatccctcagtggcttttcacagctaaacggctcatttctttttagtgctaaataatattctgttgtctatatataacagtttgtttattcagtaaactattgaagtcatctcagttgcttccagatttggggaattaagaataaagtttctataaaaatccatgtgtaatgtttttataaacaagttt

SEQ ID NO: 25441 - DNA, 764 bp, Bovine  19866880938070
  misc_feature (1)..(1): n is a, c, g, or t
ngttttgttactgctttaatatgagaggtgtgcaggtagatgaattgaggcagtattgtggggtacagaaagtaatatagcagtgatttaacttctgtttgtacactgctgtgcattatgctgacatccgatactttcatattttgcatgcattgttccttaggtttccctgtgccacttcaagattattctctcaataccaccctggccttggactcactctctaaattaaaatgactattattaataagatacatatgtttgcttctgtacactatgttttaaaataaaacaaagttaccaatagattatattggaattttaaactaaagcccaagaaaaataggccattaaaggttaatagggtttttcttacactgtaggaatataattctctgtactcttgtcaccttcattctaatcttgaggtacagctgttgaataaatggatctgagattattacacagtatatattcatgtgtaaaatggaattgtttttaaagttcattgcttcaactggaatattcgttgtagctttcctgtgaagaaccctgctgtggtatgttatgatacactgaaaacacactttactctttcaggttactcatcagtgcctggagaatgtgctatctttaaaattttgtttatttatttatttttggttacactttgcacctttttgtcagaaatgatatcagttttagcactattcagtggttacgttaaagggcaacatataatatttctacactagcaatgttat

SEQ ID NO: 25442 - DNA, 1032 bp, Bovine  19866880947563
  misc_feature (1)..(1): n is a, c, g, or t
ntactgtaagaaacaaattgttcttaaagctgaagctaaaaggcctttaacagaaaaattggggtcaggtccttgaccatgtatcagctatacccagaatcagtttaatattttctatggtctgagagtaaaacacagttgatatctgatcaatgatagtgttgagagtacaagggttttcaggcattcacagcagtaaatcaatatataataaagttttcaacttattgggcataacaaatggcaacaaacataatgaaaaccatatggtagtggttaatggtacatttaatgtcagtgctaactctatttctccacagataatggctataaatttgtgcagcacggttgactgactcatttaattctatcaagtgattttctatgtagtaacaaggcatttttctctacagcttaatttttggaattgtcatattatctgtgaggcacaggacttaagtcagtacttacaagactaaataagcctttcaagttacactgcaactatatcgtggaaactcaacatacacaaacagcttgtcttgtaaatagtatatctgatttttcaaaataacacacatgtctatttaaaatacgttgtgttacatcaaatgttatcatttctttaaacatgacatttattttatagaatttgagattgtaaaagcaatagttatagaaaattggggggaaaatacaaaacctaaaggggaaggggagtcatttctaatatgctcacccagtaggattttggtattttccctttcattatatggattaagtatctttctttctaagacaatatttttacttagaggaataaactcaagccatatggaaaagtttatgggcaccattgccttctctgagagagatcaagacttgactgtaaatgacaaggcctaggatatagaagatgctatgaaaatatctttctgatcctgggacaggaaagaattcctaaaaaggaaaaaaaaaagaaaaaaaaaagaaaaaaaaaaagaaaagtttaaagtaaataaaaataacaat

SEQ ID NO: 25443 - DNA, 1949 bp, Bovine  19866881004743
  misc_feature (1)..(1): n is a, c, g, or t
ncaagggagatttattattgaatgagataaatgaaactgttgttatcatctctgctccatgtccttgaaaagaatatttttcatgttagaaaaaaaatgtattacttggttttcttgcagcattttttttttttttttggccaccaaaatattttctaggctacactaatatgaagatttttcagcaatttacagaaatggtgcttatgagcatatattttcccttttactactgaaaggaaaccatgggaacatagcatccaattttgtttgacagaattctggttagaaagccacatgtggtgtgtttttgttttgttctatagttgtttccactgtgtcgtgtgattcatcacaaggattttgagaacggaaaatgtcaccaaccaaatatacaaaattaatgagtagtttactccattgcaaagggaaggtagtgaacagtcaggcagaacaaaagcaacaagaatccctgggtataaagccatttcagctaatgaagttcaggtttctgcatgtgatatgaaattgtcagagcaccaatagccatcttaagttttaagtctctggaaaatgataaatgattattcttgcattcgctttacataacttatcagttaaggataatcacatgtttaaagcagccaagagaaacagttgcatacacagctatcagtatctgcagagcaattttagaatgaacttgttactagcagccagattcatttctaatgagtcctatgtccctgtggccacatataaaatgtgatgccaggtttgttctcttatacttatgagccagaagtgttacgattacatttgcaaaaaagtgagttatggatgtctcttacctagctcattttgaccaaaacttgtaaacaaaaggagaggaataataaccagagactattgaactccaaactcctgcctcttcactaattgtgacattttataattctttcccagtttcatcacccttccattaccaagacaactctggggtttttccagagtaaggtcagcttacctctgagttctctacttcaaattcagcagggtttgtactcaacaatctctttctatactcttcagagctttttggtttcctgtgacttgaggctacagctatttgtcttggtaccaaagatgtcttcatttccataattagtggattacatcaaaacctaattatcggggacttctgtggtagtccagtggctaagactccgtgctcccaattcaggaggctgggatttgttccctggtgagggaattagatcctacatgccacaactaagagttcatatactgcaactaaaaatcccgcatcccacaaagaagactgaagatctcaagtaacaagtaagacctggctcaaccaaataaataaatattaaaaaaagaactagcataaggataaaaaaaaaagacaaaaagtctaattactaaaatcctacacataattatgaaaggatgaaacgttttaagccaagaggatcacaggtcatcctgtctattaaaaaaataaggaaactcaggatgatatatgggcaaaatatcttcatttcctttccagatcctccccctgccccaccttgctgttttctcaggagactgactgttactcagatttctgtgccttctggcttctacctgggttcagccctggtgaattccagcaggaagtagggaaagatgaagggtgtgtcgtgggcattcattctcccaactccctgcctagagctggtcacatcccttaagattgctgatccttaccagatcatctgatctgcatgaatttctcttcattcaagtttcagtaacatcttctctcatctcttgaggcggagctctgctactgttcgtcctgagtccctgttgatccagcggtttcctgcatcccattacagtttgataacgagcctctttttcagtaagctctttttgag

SEQ ID NO: 25444 - DNA, 1004 bp, Bovine  19866881138054
  misc_feature (1)..(1): n is a, c, g, or t
ntagcatggaaacatatacactcagtatatgtaaaaaactagccagtgggatgctgctgtatagcacagggagctcacctggtgctctgtgacaacctagaggggtaagatggggtgggaggtatgtgagagatttaagaaggagtagtcatgtgtatacttatggctgattcacatgttgtatggcagaaaccagcacaacattgtaaagcaattatcccacaattaaaaaaaaaagaatggaatatgtccattttaagtttccaatgccttgagcaaacaataacaatatctttttctatttgtgtaaaggactcaatggacttttaaaatgtacctaggtgcctgggttatgtgctacatttttctaaaaagccagtggaaagtgttcgttataccaagagaggaaaccacaaagttatttgcatgattggtccactgataataataaatgcccaaaaaagaacaaaaaatatttacacctgagagattatagctattgagttgggcaatctttcttttagcaagttatagtatattttaatgatctttgagctatcttaacaaatagctgtttttcagctccttctacattgaaaaatttcaatttttagaactttctcaacttcttccaattaacttctcaaactaaggttgatatatcacttagtatgttggttactttaaaactaggttgattagatcctataaaatgctgttactcgacaattgtatacaaatggcttccttgaaaaagcttttctttaaatctgtaggtttcaagagaacactttaacaaatgtaaaatatatttcagtcttacacatttctaaaattttgctctcttttttcccctctggaaatatgagtcaaagatatggtggcatataaataggggaaaaattgaacatataatccagaatcataagagagttttgagttttcctttataaaacacagttgttctatagaaacatgaacattcaaaatatagtcctgtccag

SEQ ID NO: 25445 - DNA, 1366 bp, Bovine  19866881195966
  misc_feature (1)..(1): n is a, c, g, or t
naaactgcaggtgctcatagacttttgtgaagaagattcattgatacactctgttcagcaaccttagcacaaaaatgttttgacacattcatatgtgttttcttttggtaatttcccattttcctcatcctattcaggtggtagtcgatttgtgatttttcctgtgggcattttctggcttcccataaatagaagttgtataccagatttctataccctggattttgtttcaaaagctttagtccactgaagagaagaggatcgagggaaagagagcaaacagagaagggtttcccaaattgcaaatgatcttggggaatggaaagatctgtgagtttcctgtacctcagaaatctactccttgtgccctttggtgttcctagccttctctatacatcttagctttgttggtctctgggtggggtgaagccaaaacctttccttcctgtgcagaaagtctggggaagctgtcacttgccttgttctttttttcccaagaaggaaaattcattttggttggggagtttcctcttggccctgaacagtgctggcttggggaatgggttgatgcagcccgaatgaagctgttttttcttccctttctgtgtagttattgtcaaattcttctctgttgaaatttcttaagtggacttcagaacctcccagaaccattttgtccatggatagctgtgtaattgttgatcctagtagatggacaggggctagacatttctactttgccatcttggtgacctcactcttaagtaattcgttttagtttacatccaaattacatgactatgcactattgttcccagtgtctatttttctgattctgggactgcctatgtactcagcgggagaaatctatccattgttttctaggcagtctcctcttctccctgtgttgaatcttaggctaatttacccaaatatcaatcccttccatctctaatatttttgaattcctgaaatcctgtcattggttgaggtgcattcttgctgtgtatatatgtgtgcgtgggtacacatgtgcacacgcatgtgtgtgtgtgtgttttacagagagtagatgacagattcaaatcttctttacttttctttccttaatttaatgatagtttagaggtggaggaaatagtcctaagtggcttgattcactcaagtagcttcttaaaaccactaaattgaattttggccaggggaataacatctacaggatttagaaggtatatgagtgctgtgctgctctcaaaggatttatttttcaatcttttaatgattactacttctttgatctacttccagatttcatacatgcatcacatacattttaagatcataaattatctataatagtttagca

SEQ ID NO: 25446 - DNA, 833 bp, Bovine  19866881234531
  misc_feature (1)..(1): n is a, c, g, or t
nccacctgggaaggccagtcaagggtatatccctgtattctcattatttttttcttaaagtttaaattgattgtcttaggaaaactagcctgagacttttagaatgagcctcagagctggaatggcaagtcccagtaagtcatataactatacagataaacttatgccaccaattttcctattgggttggacaataacaacaacaaaaaaacacattctcatatatccatctgaggaacagaacagaacaaccatttctcacttttttttgctattctttttatacttacctcaaagggttttatatctagtcgtcctgtcttgctcaatgaggtccgtctttctctcttcaactcccttatagtacatgtgtctgagggataacttcttccacctattgatgctcttctcagttctgctatgctatgtccagtattctttaaacattccgtctgaagtttctcaaggggttgagtttttatagaaattactgctaagtgttctgagataatgtttggatctattttgaggggtttattcccaacatgtggaactattttaattgcagagtcctctacaattgaatctttagttgattctttatttaagtcaggaatcatgttaacagcatgctcttgtgccttttcaacaattctgttaatgtctagatctccaaagaaacaagcatttgaattctttggactagctgaatcgaagggaaaatttgaaacttcattaataattaaattagccacttttttagggaaaactccgtttgtactttttatatcatgataaagatcctttgggttccagattgttgtagtacatta

SEQ ID NO: 25447 - DNA, 1041 bp, Bovine  19866881308168
  misc_feature (1)..(1): n is a, c, g, or t
ntccttatttaaccactctttgtatctttgattctattgtatcctgatcaccgaagccgtctccccttcgaattctctggatccaccagggctggaccccggcacctggcttcatctgttaatcatttcccttttgttgtaaatatcatcagaactgggagagactacttgggatccagttgatgcccttatcttcctacccaatgtgtatcacttggactaagtttgtgaaactctctaccctttctatagaaacctggtcactgatagttacatttctcacttacgcttagttgtgtcttcttctcccaagacgagtttgtgacagtcacacattctgaggtagttacatcaatgttagaatcagttcttattagtgtctgttcagattccgtctgttttgctggtgacacttcagtcattatagtcacactggatttgggctgacattttcctactgacaaaaattttttcagactgcgattgctcattggtggcttagggtgagccactgtgctggtagtgagcttcatgtcttcttttacttgatcttcaagtgggctttctggaaattcttcttcttcttttacaacctcttgtaaaacaacttcatcttcatcagaagctaagctttcttctttattttctaaattttcttgacgaatatcatgagttattaaccaaatgataagatcttttttgctttggacatcttttaaaagctccacttcggtgatgtcgggctttattaaactctgaaatgaatttctactagaagtctggaattaaagagacaatgaatgttaaaaaacaaccaattcagtcatttttgctgtggttctactgtattgaatagtaaggcaactttcacatggtttctatttcaatttagtaaaattacttatctttaagtgccttttacttatatattagtcatatatttaaaagaaaaaataaatgaaaatcataagcaatatttgctcttttctataattcttttttgcattcaagattaacagtccagttcaaagaagagatcct

SEQ ID NO: 25448 - DNA, 907 bp, Bovine  19866881795713
  misc_feature (1)..(1): n is a, c, g, or t
naaaatattgtgaattgaagtctagagaaggcaagaagtgactttttaaaaataaaaacctttggctacattaaaatagcttttgagttatttttatttcctgccttagctaaagaacttccaacatcaataaatgtgaagaattaccatctaacatttttaccaattgaatatgtgatgataaatttgctttttataaaatgttaagatattttcttagatatgctccattctttataaagtatagctaatcacttaaatagcactacattcccatcaatccatgccattaaaaaaaaatggattatgtaagctgctctctgcaaaagggacattttactcaaatttatgtttttatctataggcaaagtaaaataaacgagcctcaactatatctatgcaattcattttccttaaaaaatataaagaaaatctgggatttctcaggatattatgttattcattgtaatataataaataatacatgtgttttttgtccctagttcctaacacagagcttggaaatccattggagtgtcttatgtttttcataatgggatcctttagatcatagttgaatttatgctaagaaatgactcgtggtgggcccttagatagtttcagtagttttgagggagaggttagccatgtcagaaagaccaagcacttgattagagggttgaaacttttgcttttatttctcaaactctaaggaggggagtgggactagagattaagctcaatcacagggtcagtgatttcatcaaccatttatatttaatgaaactcaaataaaatctctgatacctgaagttcggtacattctggattgctgaacacattgatatgctgacagtgtctttcctggatatattaaatataataaactgatatttttatgttggca

SEQ ID NO: 25449 - DNA, 1434 bp, Bovine  19866880345367
  misc_feature (1)..(1): n is a, c, g, or t
ntctaatttgtgtacttcctgttagaaaaagagggttcaccttgagtaaaaaaagaaaatctccaggaaccctaaattcatatgtccatatttgccatctcatttttttcctctttctggtgaaactgaagtgctgatttggtagggaaaatgattttcccaactttcttgtcttaacaactttatgaatctaaactttataattttcaatgtgttgtagaaatggaagaagttccatgaattttgaaaaatattttcacatataggagaaaatttagaattattttcattgctcctttacatattagataatccttaatggttcaattgatgattataattacattttaacaataaagtaagttaaaataatacagtgtactttcactttgatttcattttcttaaaaataaaatactcacaataacatagcctatctttcctgatttgccaggcaaagcagaaataaaatcatgctgtctgtgtataaggtaaaaattaactgttgtgacacttcatatttgtattcctctcttatcttctacattttataaaactaaagagtactaattaaagttactatacacttgaggaactaaaaagaggaagagatccttcaatataaatattcgatctaaaagaatgagaacaagctaggacagtatagcatgtggtttaactaagttttatataatgaatgaaagaaaccgaactagttagccataatttagggtagctatgacactttgaaatgtacaagagatgcataataagcagagaaccataaaatatttgaatcttttcaaaataacttctttactaataactgtatgatttataatgttgtctatgatgcagacacaatcactattaatgtaccacaatgttttaaaatctcagagtcattaccctcaaaaaccttagttctataaatattcctgcctcattcattttgtcatactgtgcagcactgaaataatataaagtgacatttactataaaaagcatacctctatgtgtgttacaacatatatggctatcataaaattccaagcacaaatagagacatctctgtgacatgtacctatttatttcagaaaaggccatttgggagtttttaattagcctagtaacctatctaaacttgtcaagattattacaggctgcatggaagataattatactgcagataatttgtgcaacaaatatttgcattcaatctacgaacaactttcccaacccttgaaatagtcataaaaggacatgctaagtcacttcagtcatgtccaacctctttgtctgtagcccaccagacttctctgtccatgaaattctccaggcaagagaattggagtaggttgccatgctctcctccagggggatcttcctgatccaggggactgaacccatgtcttgtgtctcctgcattggcag

SEQ ID NO: 25450 - DNA, 1337 bp, Bovine  19866880352365
  misc_feature (1)..(1): n is a, c, g, or t
nattctagctggtaatggctgcttgtcaaagactgagcccgaggcttgcccttattaaaaagggagattagaaagtgttagaaaaatcttaaagatatatgagtcccaaactaatactttctctttaacagaatcatgagggttgaaagaaacttgacttgggtaagaaaactttctattttgatataatttcaaactttcccccaaaggtgtaagaatagtataaaaaactccagtacagtttttatccgcatttaccaattttgaacattgaccacatttgctttatcatttacacttctctatatacatttataatgttttttttttttctgaatcactgaataggtgcatgtgcataccctttgtacttcagtatgtatttcctaagaataaggatattctctgttataaccacagggaaataatcatatgcagaaaatctaatatggctgcaacatttctcgataattcgattttgtcaattgatccaataataacatttatagcattttttcccccagtataataggcactagttcagatcacattgtgcatttagtggtcatttctcttcaaccttctttaatctgaaacagttcctcagccttttctttgcatttcattcttgaagaatgcaagctagtcacttaatagattgatcctcagttgtctggatggttcctctcataagatatggaaaagatgggcatacttttttttgttggagtgtagttgatttgcaatgttgtattagttcctacatacagcaaagtgaatcagccacacatatacatatatcctctcctttttggattttctctccatttaggtcatcacagagcactgagtagagttccctgtgctctagtcagttctcatagtgatctgttttatacatagaagggaatggcaatccactccagtattcttgcctggagaatcccatggacagaggagcctggcgggctacagtccatggaattgcagagtcggacatgactgagtgacttacacacacacagtgtatatatgccaatcccaatcgcccaatccatccctccccccaagatgggcataattctgattctgagctatttaatgccatgtccatgttcttatgatatagtgtcttttatcccagcaagaaccacccacaccgacagtgagactgaaagagatcatgtccactgttccttttcggaccttttcgtttatatttctgaagaaagccagatgctggttttaagcaagtcacattatctataatgaatcacatcatctgcagtatttcatgttgtttctggtgctaccagatgttgaatagacagccaaga

SEQ ID NO: 25451 - DNA, 1325 bp, Bovine  19866880409534
  misc_feature (1)..(1): n is a, c, g, or t
ntgctccttccaccgtattgctctggatctgttttgggagccagggatgaagaacaaaatatagtcttcttatttgatcacaatattaccatggcagagtattcaattcggagaaggcaatggcaccccactccagtactcttgcctggaaaatcccatgggcggaggagcctggtggggctgatgtccatggggtccctaagagtcggacacgactgaacgacttcacttcacttttcactttcatgcattggagaaggaaatggcaacccactccagtgttcttgcctggagaatcccagggatgggggagcctggtgggctgccatctatggggtcacacagagtcggacacgactgaagtgacttagcagtagagtattcaattagtggttttgggaaggaaggaagagagggaaagaaagtagagaggagggagggcaggcaggtggcagcatctttagacaccaggaagagagcactggtttgagcattatctcaaaaaaagaaaagatgatgctactgaagggaagtcgctcagtcgtgtccaactcttagcgaccccatagactacagcctaccaggcttctctatccatgggattttccaggcaagagtactggagtggggtgccattgccttctccactgaaaatgaagctatatctaatcctctttcctcatctctttcatgaggattatcacagctaacttgcatttgtttgtctgatataaagaaagaaagtgaagtcactcagtcatgtccgactctttgcgaccccatgggcggtagcctaccaggtttctgcgtccatgggattttccaggcaagagtactggagtgggttgccatttccttctccaggagatcttcctgacccagagattgaacctgggtctcctgcattgtaggcaggtgcttaaccatttgagccaccagggaagtccttgtttgatataaatatatatcaaatcagataatacctgtggtgtaagtactttataaaaaagcagactgatacgtacatgaagctttgttgaaattattatgaccagaccagctcacttgtttttgttttcaatttttccttatgccacccttcatttgactttgggttaaaaaagaagactcaagaaaaaaaaaatcctcatattctccagaagtcattaaaactagctactaatctttttccctttggctgaacattccaaatatgacaccacttccccaaatgcaaaacattcattattttaatgatacttttatacaggaaacactttctgaatggcattcatccaaaatcttaaagtacactaatcttcaag

SEQ ID NO: 25452 - DNA, 950 bp, Bovine  19866880451728
  misc_feature (1)..(1): n is a, c, g, or t
ntatataaaacagattaaaaagcaaggacctactgtatagcacaagaaattatagtcagtattttataataacctatagtggaaagaatctaaaaagaatatatacatatatatgtatagtagaatcactttgctatacacttcaaactatcatgacattgtaaattaactagacttcaacttttttttaattctcttttcagactaaagtttcttttgattatcattgtgtttaaatcacattagaaaagtctaccctttctaaacagcacattggtataagatgtgaagaagttcttgattacgtatgtcagttccgtgtgtcaactcctcatgttactaagaattccagggctatcaatttaattactcagaattgattaaagatgagacagtgtacaaggaattgccttgttgtttcattttggttatctaaacctctacagtccatggggttgcaaagagtcggacacaactgagcgactgagtacacacgcaaactctgcaaagaccccaggccagaagtgctttgttattaatatgaccccatgctattatggccatcctttttagtcacccatcctaagcggctcttctcatccactttttctggataactcctgagtaagacccacttcactcaagtaattttctcaatattcatcttgctggctgggagtgaaattcaagttgaacttcaattttatattgacaattttctgttgaccatggcaaaagattttgaagagagtattgaggttttcatttaagtttttttccctctgggtctttcattaatttttctgctttacatttgaccttactttaagtttaagaatcttttaagcagttgttttcattacagcacaagaaagagaatgtttttactgtgcataagaatggtcatggattcagagctaattagagtcgtaagaagccttaacatttac

SEQ ID NO: 25453 - DNA, 782 bp, Bovine  19866880489090
  misc_feature (1)..(1): n is a, c, g, or t
ntctaaggaccaaaaataatctatgacttgggaaaaatcaatgacttcatccagcagtattcagacatccattctacttccacaaaacccaaggcaactgcttctatttatcttgttctagactttgaccctgacacctggctgccaggcgctgcctggttcaatgtgtcgagcttcactaagaagatctgaattagaactagattttcagaggagcatgtttcaaacccctatagtacattccatgaaataatttgcttaaaagagatggaaaacttcagggaggaagaaatgggagcaaaatttaatcagttggaaatgacaaagaactggacgtgataatttcttctaaaaattcagcagcaagtcttcaacaaagttttacttccctgtattttcaagatgatgttgtccacgtttacatttaccaaaaggtcagtagagtgaatcgtgagttattcttcacccagaacccagaatggctgagtccttcagtctcagaacaataaggaactttatatatgctagcaaattaagtttggacaggccaacagtcaggttttctgtgtgaatacttagggttgctggaacagctatgtactgagaaaagtcacagaatatattgatgatgagttttaagtaaaccatgggactgataataacattgctttgggtatatgaagagttcctgacattcagatagtatctttttaagtttatatgctccatttcatttgaactcaataataggtgagcctggtgttatttttttctactttaaa

SEQ ID NO: 25454 - DNA, 1777 bp, Bovine  19866880505217
  misc_feature (1)..(1): n is a, c, g, or t
naaacagtatctcctctgaacatttctgtcggatggagtagggacaagaaagtattcaagaagtgaaataacttgtttcagaaaggacagaacctgtagaaaatgggctttgagtatctagtcacaggtggcagatttaaagtaccctgaagcaattctctttgtttaagttatacaagagcatgcacccctataaacaccctttctccagaaaacagggcaagaactaatatcagataattgcaactatcatgtaccagaatctctcccatgcctgatcctgtattttactgtgagatgttgtttagttgtaagaacaacatggtcaggtggggaatattcatttaataacaagagaaatcaagtttcaaagttacaaaccttgcctgcattcacagagctattcttgcagaactagactctgaatctaaattctctctgagcctatctttaacatcatgcattggcccttcagaacaccaacaaaaattcttcaatggcaggagctataatgaagaaatacatcagaaataagtttgaacgtgggtggaggagactggtaggctacagtccatggggtcgctcaagagttggacacgactaagagacttcactttcacttttcacttgcatgcattggagaaggaaatggcaacccagtccagtgttcttgcctggagaatcccagggatgggggagcctggtgggcttccctctatggggtcgcacagagtcggacatgactgaagcgacttagcagcagcagcagcagccttcctatttggcatttaatcaatctctaataaaactatttttatgccatcaacagtgctggaaaagaggctgtgatggaatcagaaacaagaactacttaatgtacactgtacattacacacttttacaagaacaaaactagtttggatcaatggtgcgacttggtacatttccctgcctgtcctaccaggaagacaggcagcatttctacaagagaatttgtgccaactgactaaaattagatcgtccacatttatgctttgagttggtgtcattatctcagtggcagtgtgggagtttaaacccataatctctgtgtatttagaacggataagacctgatttgcataactgcaagagctcaagaaaccactttgccacattacttcattctggtgatgaattttcaacgtggaccgttcagaattcctcgggagaggaaaggaactctactaattaaatgactgatgtaccaactgacagcaactagcaagtccagcattgaatgacattgggttacaatgtgactctatcaaatgtgtgaatatgggtttcaggaatcccacaatggctaggacagcccaaagtgggatgacggttccttctgacagcatgctgacactgaggcagtgcatctcatcagttgggcacactccatagatggccagatcttaatacagagcaaagggattttattttcacatttttttctcctaagtcaaatgctgcagaaacatagggcgaatgagaaacattttttataaccacattacacaaagcatcataatctgtcagtgactcaaccacatattggataacagtgtgaaaggtatttaaaactttttcttgaggaatataaattcatactcatcataggcacagtagcagagttcttaggaatttgcagaggccaaatgtgatagcccattttttttttttagcctgttatgactgaactcagctgcaagataattgcctattcataatccactatttttacttta

SEQ ID NO: 25455 - DNA, 1552 bp, Bovine  19866880507006
  misc_feature (1)..(1): n is a, c, g, or t
ngtttttagaaagatttgcttttcatctgtgcaaaatcgcacatgggacttatcctgccttgctgcacgagggaagtgtcaagtatatgacataatggtagtatttttgagactacagtgaaaaaaaaaaatcacccccattccctgcctcggacctggagtcttaagctgtaattacgatgccatgatcagcatgttgtgttttgtcagctttagcgctgaatgggtggcagcttaattccatgctgctggtaggagcctggtgcagctgttcagaaacgagaatgtttgttgttgtttattgttccgagagtcgcttttttcctctaacagactaatgaagagatgtttagtacatttgcactggtcgactgattgttgcaagcttgactttcaattgatccaacgaggtgaaataaactagcaagctaccccaagaaaagattcactgagattctgcccttgacataaaaatgcatgttcagtttacagctgtttgtgtatataaattctacactgttgtataacatcttcacagtttaaacaaggaattattacattttatattaaatttatatattaaattgaacttcatgattgattctcatgggataaaattattatggcagacatcatttcatttataaaactaaatgtgggaaaacatagcaccatgttcactttcattactaaaattaaaaacgtaaattttgtgagctctcaagagtggcaagacacagtgtctaacccaaggggaatggacagattcattgttaggaataaaattaatatggcagaaaagaatatagatttaaaatggaaagttaaaaacactaaataaaatgaatgaaactttcatgatgttctgaatgtagtctgtttcaagccttgataaatattaaagggttcttgaaatgaaatatgaaagccaacttttcttaagaaactggacatgaaaaagttttcatggactctgaagcactatattatgtttatttctatcttttatttctatctaaagtaaggatggtgattggaggggaagggtgataacaatcacagaatcataacaagaggaaaaaatcaaccaagtgtcataggacatcagagaatagtaggcatggaaatgccatggttggatgtgtgaagaacctgaagcccaaccagaaaggtgaaggggatgctgggaacagccccactgtacccaggggtcatgagcctcagagcagagcctcttttgtgatctcatacaacattccatacaaaacaattcaatttagatgtgtttctcttcttctggagagagacatggtattttcagctcacagggttttcttattaagggtgtagaaaacttcatgaagtatatacaagtctgaaaagatggagttttgcttttgtggttggttagagatggtgaggatagaaagatctagggaactaggtagaagagagggagaggaaccaaagggagataagccgtgggtggggaaatagagctggaaaaatgagaaagaaaaatacagaggaagaaagagcagggagaaggacg

SEQ ID NO: 25456 - DNA, 1427 bp, Bovine  19866880512695
  misc_feature (1)..(1): n is a, c, g, or t
nctctttcttatcccatgtccttgagttccagctctgatttcctgactgatgttctgcctggagtcttcacttttgtccgagtccttcagggactgaaatcctgattctgtattctggtcctctgggttcaattttgtagcttgtcatagggtcttcctgatgccaactacttatctgtttcattttctgctcctgggccttcctgaagactgtaacgattggataaacatgctcacctctcagatttcagggcctggactttctctttattatattctatcaaatggttcgctctgtaggctcttaaaaccatagttctgacttttgccagcaaagtgatgtctctgctttttaataaactacctaggtttccatagctttccttccaaggggcaagcatcttttcatttcatggctacagtcactgtccactcttgaaacacccagacttttgaacatagctagacttcactcacaccaaatcttccaaccacactctccttgcctttgcactaatcctgcccctaactctaacccctaggtctttctggtctctgtccttgcctggcctgtcctagcagcccctcactgagacctgaccatcagagaacataaattccccatctcacactcatccttcaacaatacaaaaacattaggctgacctccccataattcatacttatcagatagtagtttacatttagataatccagggaaaaatcagctcctttaaaagtcacttaataaaatacaatcttgaaggttgatggggtgaaaagcaggactctagagctcaacaacaacaataaaaaaatataaagagaggaaatcactttcatgtgcaggcaggtaaattaaatatttaagaacataccacagcaaaactggatgtttttcaaatgaacagttctgtgaaaagaggcttaggtaactactggtgttaactgctggaaaggttaattacatatcctcttccccgtttttatcatcataactctttagtgatgcatgctttccttaattatacagccttgtccatttcctgtgtagtaattgcagtctcagatgacttttctggagaaaccaccagacttcagctgaagccggttctggttatgtcccagccagtaactgggagccttttccttcaacaaggcacaaatgggcttaaacacatgtagctgagttcccgtcacaaaggaatgttttaaaaatatcatttggatgggtttaaaaagagtacaatttcttcagaggttaatgcatattgtttaaagagaacacgcgtcactgtgtggtttggccaaggactgagttcagaagcttttacgcatgctgaatacacatgatcctttttcagtggactgcctctgtattgattcctgaagtgaaacaagaaatctctctggcccttgtaacgata

SEQ ID NO: 25457 - DNA, 1985 bp, Bovine  19866880521614
  misc_feature (1)..(1): n is a, c, g, or t
ncgaggagggaaatgcatcttaaaactggacaaatgacaaacacttcccacatcacttggcagccgtggatcagctcgtgaactaaccagttggaaatctggttgatgtgtcagtctttgtaagttcggtgagcaggaggtatgctccttggcctgaacagtttttgaaactgcacatctgaatctcttggcccatgggaccccaaggcactaccagtccgtgagaccctgcctgaggaccagccttcctcgtttcccaatgacatctcttcctgctggcgctgacgcagtggtgattggcactgtctacaaaggaatctgcaccacatgcattccttgtagtaggatggtggcagggaactggagttctacttatgcttatactgttaacttatctggtatctgagaggaacaatgtctgtgctgcttcctactgtcctcaacaaatattaagttgctgctccaccttgtagtccaatggttagaattcggtgctctcaccgccatggcctgggttcagttcccagtcaggaaaatgtttttgtcttcccaggtggcactgcggtgaagaatctgcctgccagtacaggagacgcaggagatacaagcttgatccctgggtcgggaagatcccctggagaaggaaatggcaacccactccagtattcttgcctagaaaactccatggacagaggagcctggcagacgatacagtccatggggtcacaaagagtcggacacgactgagcgactgggcacgcatactttgtagggttattgtaaacgatcaaagggagacactccgcccccacaaaaaaaaacacacgaaggtctttgaaaggatggatgagactaatgatccccaaacatagctgaggacattttcttctttagtgaagttatttactctcattcctttggttcttgaaggaaagataatcccagcagcttgttttcctagcctttccttttatttgccccttcggatagaaaacgcctgttctgaattactcagctatgcctagaactccaaagcacgcctgtgatcatgcccttttacacatttaatgtggaaaaacctcactaatgagaaagtaggaacactcagggataatgagctgccttcctcctgtggccctgatgtattcatgtgtcacttccagctctgcagcccagctagctactctgctgtcccttagaggttcccgcccccgcctcccacacagccagcaggctgccacagaggctctccccaccctggctgagccgcccctgaaaggcaaaccctggatttgttgatatttcctctacaaagggaagaaatgtttagtaaatcaagcaaacagaagtgatgcaacaatctccaacagcttctggtttatgattgggacacacacagataaacggagcatgttgcccaaggccatgaaactctttggatgggtcagactcccacagctgatggagaccccaccctgatttgatccctggttctttgacctgttggtgaaggatccggtccgccgtagggtttgggggagagccaaacactctatagcaacactggacagaggagatgtgcagggcctaattagtcacctatactcacagcccaggggaagaggactccgtcacacagaacccctccgtgagtcacacttgggaacagaatgaattagcaggggctgtggaggcaggttttgtagaatcaagaggatggggtgcctgcctggttcccaagggaggatgtgattgacttgtttgaataattctgtgggcgcccagggaatggaagcccagtaccctgggataagcaggcactgtggctggttccctggagggtggcttggctaaggcactttattcatggagcagaatggggaggaacttgtggtgaggccagtcaaagccctctggtttcagatgttaaggtggcacataatctcggcttcttttaggcctattccacacacccctcaccacat

SEQ ID NO: 25458 - DNA, 1702 bp, Bovine  19866880534785
  misc_feature (1)..(1): n is a, c, g, or t
ntcctgtcttgagcccaagattacaagctccaggtcgtagggggctcttcacttgccttccttgacttctgtccccgtggggcagagcagggacccggaagatggtcagctcttccctgcctggactgggcctctcacagcctccctttcctccctgaaactgtcctccagagactggccccagccagcaaacggaggtggtggtgggcccccgaagagaatggggaatgtaggcagtgtcaaaaggcactcaaattccaatgtttaaaagtactgtgcttaaagaataaagccagattgtggccccaggctgccagtttttgacctctgttagagcctcccatactgagaaggctcgagggattccttcagaataggaacagtttgacctaacaggaactatggctctcacttcagtcacgagacatatgcatgtatttttaaacgcatgttctttattctccctttaagtaaatagatatttaaaaaacacagatgcgtgactctactatgtgactcacagtaaacaatccaatggcaacgcccctcagccttggagcaaaagctaaaaaccacttgcccccttccctccttcctccccccagccttttattaacaaatcggtgtggggggctagcagggagggcaagtgtatgaatgagcttttcaaaaatgacctgtaggtgagaacagctagggtacccctcattttacactacagaatcccaggctgtgcccttcttttaaaaaccatttaattatttcctatgttttggcccttttttcatcctccagtccttatttacatatgtttggcttgtgtgggcattggaatctcaagaggatgttatcaactccactggtgaatgtttttggctctttcaatgtaagattcctagttcacagcaccttatttgtgtttctctgattgctgctaatgggatcctgtccaaacatctgcagggtaaggacttgggggctgagcctgagggagatgactctattgtggccgaggatgggtcctggggtgacgatggtgacctacagttcagaaatcaacatgcagtaatccagctctgtaaatcacatccagatcgtggccatggttaaagactgcagaggaaagctcattagggtgggagggccctctgccgtcttcccagccccctgagcgaccttggacctgagctttacatcttcagctggataatgagagggagttgaatggcttctggggtttcttccagctttaacattctatgactgtatgatttgttgtttgtgttaccaagcaaaacttgggtgtgctcaccctcgagcagtaactaaccaagctattgacacagggtggtagtgaaggaaaactgccacatttattgcagggtgcccagcaaggagtctagggacgctagtgctcaaaagactctaactccgtgacggatttcaacaaagcatttttttttttcatttttggaaagtatttatttatttatttgactttgccaggtctttgttgcagcactcaggattttcagtcttcagctgcatcatgcaaattctgagttgccatatgtacgatctagtttcctgaccagggatcaaacccaattgagagcgtggagtcttagccactagaacaccagagaagtccctcagcaaagtatttttaaagtccagaatgagggaggaggtcacaggccat

SEQ ID NO: 25459 - DNA, 2150 bp, Bovine  19866880621790
  misc_feature (1)..(1): n is a, c, g, or t
ntatttttctataggttgcatcctcttttaggatctaacacactagaacgtatgacagttgggtttaagaattctccaactctatacaccagtcagaatggccataacagaaaactctacaaacaaatgctggagagggtgtgcagaaaagggaaccttcttacgcatttggtgggaatgtaaattgggacagccactatggagaacaacatggaggttccttaaaaaaccaaaaatagagataccatatgactcagcaatcccactcctgggcatatactcagagaaaaccataattcaaaaagacatgctccccagtgttcatagcagcactatttacaatagccaggacatggaagcaacctaaatgtccactgacataggaatggatgaagaagatatggtacatatatacccagtggtccctgaccattttggcagcagggggatgatttcatggaagataattttcccatagattaagggtaaagggggtggcttgggggatgattcatgaacattgtatctattgtgcactttatttctaatctaatgccatgattgatctgacaggaggtaccagtccatgacccagaggctggggactcctgatatataaaaggagtttatttatttttttttactcagccataaaaagaatgggaataatgccacatgaagcaacaaggatggaactacagattgctaaactgagtgaagtaagtcagacagaaagacaaatatcatatgatatcacttatgtgtggaatctaaaaaaatggtataaatgagcttattacaaaacagagtcacagatgtagaaagcaaacttacagttgccaggggggaagagagggatagattgggactgagatataaacactactatatataaaatagataactaataaggacccactgtatagaacacggagctctactcaatactccgtaatgatctatatgggaaaagaatctaaaagagaatggatatatgtatatgtgtaattgattcattctgctgtatggtagaaactaacacaacattggaaatcaactgtactccaacaaaatatttttaaaaagaattctccaactctagatatttgcagaattcattgacctctttgctgcagccatgaaaggaggtgggggggtggggggtgggcaggtgggtagaaaaaaaccttctcagacatacaaagacctggactttctctatgtgaaatcaacagtcacagagggccactattgatctggtttgttttccatagggaaaggagccagcaatgtatttaatttcacttctcctttagcagaggtttcaaaattaaagatgcttctagaatctgtaacggaagaattccattaataaggagcaagagttgtgggtttagggtgaacttggtagggtattccttaaggaaaagacattattcacaagttcggatcatgaaactatcaaaatgttcaacacatctatacaatctgattaaaccatttcagaggcatatttccatttaattcgtctgctgccaggctacttgagaaaaatgctgtattttgtgcatattttggacgaactgcttccaaaaccttgacaatatgtttagtttgcataaatcaggcaaaacatattttgttttgttcagcatgctctgaactttcacagttatttcattatctgttcagatggtcccccagccttgcttcaactgaaagggaaattgtaaatgttgttaaaataaaacccggctgatgcattggcagctgtgcaatttgcaaagacccgggttcagggatctagcttaaatccaagaagcttatcttcactaacttctcacggtgatgagcattactattcatcacattttgcagaagtctgtccaatctttcctctttaaggaatctattttcattttagaagaatccatcttatcccatcttcccttctgggtctcaagcattgttgatcctaagttttttcctctgtataaaatatcctacaatttgtctttatggtgatataccttcaagtcacttaattgtgacaactttttcttttctgttttctcttattattatcttttaccattaattaaagaaaactgtattcaaggatttttttttcttttatatcatgtcaattt

SEQ ID NO: 25460 - DNA, 1031 bp, Bovine  19866880659996
  misc_feature (1)..(1): n is a, c, g, or t
nagaagcccaatctatgattttaccagcctcataaggagaatcagaaagttctgggccccgaacaagaacatcttggggtcttcattgtcaaacaaagtgaaaaaagttcatgtagagtttcaccagtagacaggtgttccacaaaatattttgagttggaagatgagtctgaagtatttattcctgttctgcacaaaagattctcatcttgattaatttgtgaacttttgattctttggattgcaatttgtcacagatcacaagcaatctttggtcatggaggttgggagaacagaaacttctgacagatttattaccacaagtcatatatctcagctacttgacacagatttccttttgaactcttccattagtattcttgttaccttcccactaaagctcacctaactcacatctgtatacagcataacaaaacagtctttcttcacatgactttcttatccttcacatttcactggctgtcactgggggccggcagactctcacctagccagcagaaagagctcctgattccaagctcactgcagcttccccgggtctttgtttgaatttaatggaaccacctaccctttttagaggaaagaagcctagatttaatgggtgcctagaagcactgcaagcctttttcttctcctttgtttcaactccacataacattcaggtgagtttccccagaagtggaccctcagacatggatctgactgagagcaatttacttgggaggtgatcccaggacgtataagggaatgggaaacggacacagaatcagacatggaagagaacagaggtaggaaggggatgtctaagcttctactttgggtgcagtgaacgcctctggctctggggtcactggggagtggcaagtggacagatccggaatggaaggaaccgtcaagcctttccccatacgtgccagctcatgtccctccctctggagccttctggttatcacacgtccccaccagagccacagggagaacagccaagagcaaaaaagtagttaacagtt

SEQ ID NO: 25461 - DNA, 1692 bp, Bovine  19866880675341
  misc_feature (1)..(1): n is a, c, g, or t
ntctagtagagctatggtcaggactacagacaatgcccatatgcccggggcagtgcttggcagagtacaggtgttcaatcaacgttcgttcatacttcacattttggttccctttcctgagtccacatcatttccacaaagacctcaagctcctttagaacattctcttgctttcttcccctttattacctacagcctcggagcctctagatggaacaatctggcccccggtacacactcaatgaggctcaggcaatgaagctaaaaagtgaaaaatgaaagtgttagtcactcagttgtgtccaactttttgcaaccccaaggactgtggcccaccaggctcttccaaaatgtggcgagaccagttattagaagtggaagggagtggggccctgtggccaggaagcaggtcactgtcgtgtttggtccaacccaatgccaggggcggggtggggggcgagggagaagcctatcgtttctgagcctgcaggttgactcctaggctctagtaacgtgccctctggtttcctgaccctgctcaaggtcacacacacgtgtgacaccttccgtagactcatcaccccaggatgaggactttggactcttgtacctcaacccgggtttgatccttgagttgagaagatcccctggagaaggaatggccacccactccagttttcttgcctggataattccatggacagaaagagtgggacatgactgagctactgacatacgcacatctcctcccaagacaggacgaggaaactgcatggtggaagatgaaagagcagtcagtgtaaactgccgacaagtctgagtttgcatcgacaaatcgccactgtggtttggccccctggatacctggtgtattcaatgtccttcctgggttactcacttgacttcaagggcactgttgtagggacaccatggaaataaggacaaaggaacctctgccacagggcccaggcttctggacaccacgaagagctggggctcacccaggatggatgtggtttgggaatggaaaggtctgggttattctggtgccctgctagtggtatgagtaccccttaccatgcccagattgttctgtcttcgtcttttcaaatagttttttcaacttctgctccttccttcactgttcaagccttttttatgtctcctgtttcaactcctcagataagaggatttgagtaatttacaaggtcattttcattcctgaaggcagttttgccccaaaccacatcacaggtggcccctaggtcctgaaagggttaccccagatctagtgcccacctgatccaataagctgtggccagggtggaggggtcccaggcagcacgaaggcacccatggggaccacagagagggagtgggtttgtgactcaggactccctatttctaccctcatcccacaaaagacgtcaagaaatagtcaatacttacggaaagttgacttccctggtggctcagatggtaaaagcgtctgcctacaaagagggagacccaggtttgatccctgggttgggaagatcccctggagaaaaggaaaatggcaacacgctccagtagtcttacctggaaaatcccatggacggaggattttactgcttccccctttcaattcaagctccacagtactgctaaaatgctctttgtatatgcagattaaaccccatcaagaaaaaa

SEQ ID NO: 25462 - DNA, 1834 bp, Bovine  19866880760763
  misc_feature (1)..(1): n is a, c, g, or t
nacattactttgccaacaaagatccgtataattaaagctatggtttttccagtactcatatatggatgtgagagttggattacaaagaaagatgagtgccaaagaattgatgcttttgaactgtgatgttggaaaagactcttgagagtctcttggacagcaaggagatcaaaccagtccatcctaaatgaaatcaatcccgaatattcactggaaggactgatgctaaagctgaagctccaatactttggccacctgatatgaagagccaactcattggaaaagatcctgatgctggaaaagattgaaggcaagaggagaaggggacaacagaggacgagatggttggatggcatcatcgactcaatggacatgagtttgaacaagttccaggagatgtgaaggacagggaagcctggcttgctgcaatccatggagctgctgtcggacatgaccaagcaaccaaacaaccacaatacagggcactggatttgataaacatcttacaataaactttgctcccaagttcttctatcttcaaatagatgtttttcttggacttcaataaacagaaagatgggagcattcgtgggttccagggcatagccctgtgcccactgacaagttctatgaccttgggccagttgattaagctttgtgtgcctcagtttcctcaccagtaaaacaaaagctccctcgaagggttgttaggagcatgaaatgagttagtatttgtccagtgctcagctggcactctgataaacattatttaagtgtgtgtttaataaataaataggctgggttcactgaacattcctttgtgggagaagaattactctttatttctattgctcagcaacttgttcacacaatagaacccagctccaagtacatgggagcaagacattctccttatcgtttctttccaccaactagaagacattccacaaatgaaagcatttatgagaaatacatataatcaaacatctctcctaagggctcagatccgatgtctacttaaggaagaaaaggcagcctccgtcttagggtgctccctttctgcaaaccctggggggctttccatatctgaaatggagagcatgatgattccaagagaccacgtttcgagattgttgaagcgattttgtcagtttatgccctttgtgggtgggtgggaagattttccagtctgcaaccaattctttccaactgctggagaagagaatattcactcatggttgtttctgctcaggtcaggggggtcacaccgtgattttttttcttttgtccttacaaggaaatcttgagaactttcttcagacggggaaccaaaaatagtggcaaggaggaacggttgccaaggatgtgtccttttttcccccctctttatttcatttatagtaaaatcttaaatctatgagagtggtttctcacgtcccttccactagacactgtttatcccgaagggtaattcatgccgcatttactccaagctctccggatcgcttatgtttaaacacctacagcagctaccactcctttcagttcatttttacttaccaatcatttttcagaactttatactcaacctctttctgtctctgccaaatttcacaggatctctacagcctctgagagaggcagcattggataaatgctaaatcagataaatgcaaaatgtgaatcagaccatcatgggctctggggacagaacatgggctcaagtcctccacccaccactggctttgaacttgggaaaatgatctgtcctagcttctctcttaacaaacgtgggtaacaatacagaaggctccccttcagtcctcacagaaat

SEQ ID NO: 25463 - DNA, 3029 bp, Bovine  19866880762730
  misc_feature (1)..(1): n is a, c, g, or t
ntctgacactgtttcctctgtttccccatctatttcccatgaagtgatgggaccggatgccatgatcttcgttttctgaatgttgaactttaagccaactttttcactctcctctttcactttcatcaagagattctttagttcttcgctttctgccataagggtggtgtcatctgtgtatctgaggttattgatatttctccctgcaatcttgattccagcttgtgcttcttccagcccagcgtttctcatgatgtactcggcatacaagttaaataagcagggtgacaatatacagccttgatgtactccttttcctatttggaaccagtctgttgttccatgtccagttctaattgttgcttcctgacctgcatacagatttctcaagaggcaggtcaggtggtctggtattcccatctccttcagaattttccacatacagatttctcaagaggcaggtcaggtggtctggtattcccatctccttcagaattttccacagtttattgtggtacacacagtcaaagactttggcatagtgaataaagcagaagtagatgtttttctggaactatcttgctttttccatgattcagcagatgttggcaatttgatctctgcttcctctgccttttctaaaaccagcttgaacatcaggaagttcatggttcacctattgctgaagcctggcttggagaattttgagcattactttactagcgtgtgagatgagtgcaattgtgtggtagtttgagcattctttggcattgcttttctttgggattggaatgaaaactgaccttttccagtcctgtggccactgttgagttttcccaatttgctgacatattgagtgcagcactttcacagcatcatcttttaggatttgaaatagctcaactggaattccatcatcacctccactagctttgttcatagtgatgcttcctaaggcccacttggcttcacattgcaggatgtctggctctaggtgagtgatcacaccatcgtgattttctgagtcgtgaagctcttttttctacagttcttcttgccacatcttcttaatatcttctgcttctgttaggtccataccattttctgtcctttattgagcccatctttgcatgaaatgttcccttggtatctctaattttcttgaagagatctctagtcttccattttactcttttcctctgcttctttgcattgatcattgaggaaggctttcttatctcttcttgctattctttggaactctgcattcaaatgggtatacctttccttttctcctttgcttttcgcttcctttcttttcacagctatattaccttttgttttgactttaaccttggttctcctttcattgtaacatgtccatgagggcagggttagtatttgctgaaggactgaatggagaccataccttggagggcatagatatggtcagtaaaaattctacccattcagacatgagtttaaccatgtcatgaatgtggtacatcacagtggttaaaagtcctggctttgggatcaggaggacttgtgtttgaatctcacctctgccacttacttgctgagtgagctgaggcaagtcacttaacttctctgaatcccttctgcaatatcatatttatactgacatcacagggctggtgaaaaatttttttaaatgatggatataaagcatttagcatcctaataaaatatgggcttaataaatggtagcaattattaaatacttaatgaaggggaaagtttgaattatggaatttttattatagaattattactctaatatacatgtaataactaaactacacatggtgactatcataatgtttgagaaaattatcaacagacatttctgaaaaactatttaatttagggcaatcagtgccataggctaaaaagaaaagaaggcgtgaataactacttagttgaagaaagagatcttagtacaacctagtaaatgtcttgaaatgttctccataaatgactatgtaaaaatcacttgaattagcatttcagttgtttgtctgctacagctcattaagtatttggaaaaaaatttcctgagtattttacttataatctgtgatatactactaagggtctatgaaaactcatttttgaaatttattttaaaaaacttttatcggagtataattgctttacactttctgctgtacaacaaagttaatcagatgtatgtacacatatgtcccattcttttcttgaacctccctcccatttcccccacccctcccaaaaagcctcatttttttgcttccctggtggttcagatggtaaagaatctgtctgcaatgcaggagacctgggttcaatccctgggttgggaagatccccctggaagaaggaaatggcaaccctgtccagtactcttgcacagagaaatcccatggacagaggagcctggcaggctacagtccatggggtcgcaaagagtcggacacggctaaagtgacttagcatgcaccaggcgctgaggtttgtcaatcccctggcattattttatcccttccttcagatggagccagtaattagaaatctaagtcagttctgaattaggtattcatgataactgaagaaggcagcagctcagagaacattccaacagagccccatgactgatacactgggagggagcctggttgactcatagagaacagccttgacctttcaaccttgcaaattcaaatgcagtttgtcatccaatgtcaaatgaatttggccgtgtgtagggctgcaggatggagagatgttggcctggaaaaactcgagagaacgtgaaagaggggcattgaaaaccaaaatccacaaaatggttgagaacgcacatcattatgcgcctaacaaattcttgtttcaagataatggccagccctgtgattcctcaggcagttcagactcttaaacagaagaggtcgaagtgggaaattgatgctaatttttttctctccttggcatggaattaggtttgtatttctgtttcatcatctcct

SEQ ID NO: 25464 - DNA, 2462 bp, Bovine  19866880771016
  misc_feature (1)..(1): n is a, c, g, or t
nattaatgaccatacactcttaaaagttgtgttttgaaacaaacataaaaaccattaggaaattctagtaagaacaatgaaaaaaatgcttaaaattatttttagcagtacatggatttcaactaagatccaacctggttttcttatctaaagatataatgaccagattttgttaataaagacatgttattccttaaagccttaagttcgattctaaatttttgggttgtctttttctgatgttttttttttttttttctttaaaatgtagagtaaaatttggaatgtttttccttaaacaaaaaattgtgctttaaatttggcccaaaattttcctgtttccctgaactatacacccacacccacccaaacatccatacacacatacaaaatatataattcggaggcaaaacttggacattcctgagagctcaagggatcacattaatttgaactcttaaggtaacttagaaataatttgtcttagtttttattggagtaaaactgaggctaagagaggttttcaagattcacccaggattaccccgcaggtagttacatttctggagctagagctttgatttcctgtaaggcaaagtggatccaaatgagctggcttctagcacagtctgaaccaacaagacagccaccagcaaatatcctgtatttgtgttgatacgacactcaggcatgtccagctctttgcgagcccacggatggtagccggctaggctactctgtccacggaattttccaggcaaaaaaactggagtgaattgccatttccacatccaggggatcttcctgacccagggatcgacccgcgtctcttgcgtctcctgcactggcaggcgaattctttaccactagcgccatctgaactgaactgagtgccgactaccataacacctgtgcatttcgcggctctcagtaaaaatggtggaaatattgctttcaatcctccaccacttgggggcgctggaaacgtgagggtgtgtttataggtgctgcaattacaggatggtgccgctggagtttgcagctctcctcacctggcagtgttccctcctcacactgggaaatactgaaagacccattatcagggcagcgttctttccatgtacctcatttccagacccacctctatgtggtcggggtgggtggggtggcagtctgacttaaattgctctgcttttagtgtgctaaaagtcactttttagaattcccattttgacatatgtacattctatctttaggtttttagatagaaaaggttatgttggatacaagtggaaagtagtcatctttaggtggccaatatatagttttttgtttttgtttttttaaagaactgatttacagaagtgaagtgcaattaaaaaaaagtttagttgtgtaatatcaccttttaagtatgttcagatttttaaaaaaatgcatttctgtacaggctgtgacatgatacatacttttccccacaatattagggatatgtaattgaccggcaaaatttcaagcctcaatttcaagtttttggatatctggtcattatatcttgcctattttcatgatttataaataaaaccacaaatgccacaactaagcagaagcaaaaaagaaaaatgcaccctgtgagtcatatcatcagtcaataaaaatactgtattcctttaaacaaatgtacttataagagctttataacccaaagcaagatatgtgagatggtttaagaagaggttgcagttttgcaacaagaagtctgtacagctcctccaggcagtagcctgtgtctcagaaacttgtttccgtctgttcttgacacttctgcatcccaagccccattatttacaaagttatgcattttgcaagctcaaagcacctttgcgcctcgcaattatgaacgcatgcaatgacatttcatcctttcatgtgcaaattctaaaattcatcataacagaaaagctcacagtcaaaactctgcgatttgaaatgaaaggatcaaaaatgtcagacatggcagaatacggttcctaatagagctctctttatttgttcactgttcttcatttttgtttgttacaaaaatggagtcttgattctttatttaaacagtactgaaactaaactgttcatgccatgcaaaaataacattttatgcacttttttggggagggaggggcttcccacgttttagttcacaggccttattaaccgcatttttaagaaacaagtttttttgttttttttgtttgtttgttttagtgttattattgcttttgtaactagtcacatgctggtttcacgtgtggggcagtaacctgtgtctcccgggttggaatgaatttctggggcaaacaaatggttttccatcttgcacccttcttgactgttgtcctttttcacttctgctacaccatggtaaatgtctgtctacagttggacttgtgtccgggcagaggaag

SEQ ID NO: 25465 - DNA, 698 bp, Bovine  19866880856612
  misc_feature (1)..(1): n is a, c, g, or t
ntcctctgaatttgaaggtgagctgctggtcctaagtcgaatgcagagagaaagtaaccaggtaatcaagaaaacctatgggctctactgcaaaaagcttccacagtacctatgctccttcttgcccaggggagaattatttacaaacacaaaggactgtctgcttctactccttaatatgaaacttcctgctaatacagtgtgaaggctttaagccataatgtttagaaaaagtccaaattgtgaagctctaaggttctcattagaatggtaacttgacaatattgcacatttttcacataataaaacaacgtcagaaagtttatccagatatcgaaagacaatatatgtgtacaatttggatgagttaacatcataatgaaagccttcacttttgcacttcctggcttttgtgtgtcattattattatttatgatttgaatgctgacagccaattcagcattgcataagccatagagtaagcacaacttccaccttggggcttattgaatgaatagcacaggcaaaatatctcatattaaaactctccagaggtagctgactctcaaaggcacaaggagctttgtcattaagacactagtcccttttctttatccttcttgaccatttagcttaatttgtgcccctctttgtttggcagaagatcattgaaacaatgaaagaagatgttaattttc

SEQ ID NO: 25466 - DNA, 819 bp, Bovine  19866880897990
  misc_feature (1)..(1): n is a, c, g, or t
ncagagggattttcttaaccgttttgagaacttgacagcacttgtcttgtgaaatcatatatcaaaatagcgaagtaaaagtataagagcctgctgctgatcctgcaatcttcacagcctttctgcacagagaacatttttttttttttgcatgagtttgtgtagtacttttgccaatagagttgagacatattttggagtactttgttgaaaaaatataagatgtgaaataagcctgaatgtagagaacttaaaaccagaagaaaaaaaaggcacattttaaagctttcagccttgtcaagaaatagctattttgtctttccgatagacggcttttgagcctgccaagaaaaggaaacgaaatttcagctaacctatcagaactttattttcctttccctatatgccagctttgaagaggctgttctgttttctggttcaagatcatgttttcattgtgtttcctgtaccgtactggtaccctttccactcagagccagtaaacagaacatcttgaaccttcagttttggaggtaaagaagggaagaacggaagtaaggataggaaggacagaatctttatggagcatcttctgtttgattggggaggaatgtgatgggctagaaacccctggaacataatttaaggtgtgaaacaagcaaattccttgtcatccaaggataaaagtaacaatatggcacactttagaccctgtgtttgtttgtttgttcagtcgccaagtcctgtaagtagaccccttggactacagcccaccaggcctctctgtccctcaccatttcccggttcatatccattgaa

SEQ ID NO: 25467 - DNA, 1788 bp, Bovine  19866880987249
  misc_feature (1)..(1): n is a, c, g, or t
ntggccgaaaacgggctctatgtctcactatcagaatctgctcgacctctaattaagtgtgtgtccttgaaccagttatttacctgagctgccatttcctcatgggctgtggaaggactcaagaagttgtgtatcaaagtatttggttcagtgcttggcaccttgcacacatattctaaatgttagcactaaaaagtcatctcttgacttccctggcggctcagtggtgaagaacctacctgcaagtgcaggagatacaggttcgatcacgtggtccgggaagatcccacatgccacagagcaactaagcccagacactaccactactgagcacacacaccttagagcctgaactccgcaacaagagaagccacttcagtgagaagcctgcacagggtaactcgagagtagcctctgctcaccacaactagagaaaagcctgcgcagcgatgaagacccagcacagccaaataaacaaataaaaattatatttgaaaaagtcgtgccttcccaggaaggcagctgttggaacagtgaggaagagaaggagaaagaggaggagaagggagagggaaggatgaggaaccagaggagaggaggaagagaagaaggaggaatgttctgagccagcaaccttagctataacttccgatacagccttgcatttggtgctgatgactctaaggtgcttgctaggagccctgaatgcaccatagaaatcctttaaggagctggaggagggagggagtcagggtggttggagagggaagcctgacattgaagggaactatatctgtgcaagtggctatttttgtcagcccaacctcagtgggtgtgctattgggagtctacttttttttttttgatccagctctttttatagtttctggtttttcttaaaggcaacccttcctccatcttttcccaggctgctgaactgatctggaagattgcttatgggagtatttattatgtgcaatctggaatagacaacatttaggttaggaattagctacccctttaagatgtagaaataatctcaccatcaacccaagcagagattcagcataaaggtattttatccatcaagacagcaaacacagcattaccgtttcaaaagggctttagattggcagcacagacaccctctgtgcagggcagcttcagtgagaaaatgagctcacatcagtacatcaatgcggcctatgctctctgttcttatgatgaaaccttgattttgaccatttcaaaacattttcccattgtcatcccactggttcaactagagtccctgctttcaaagagcttttatatgaagttagactgtctgatgcaaaagtaggacatctgcatcatttggtgctttgaaaatacctttttgaagaattgtttgaacattccctacctgttggccatactggaaagttatttttaagagcctggatgtgatgatgactgttgaaccatggaatccatagcacaatggcaatgcatatgtccccatgtgtccctggaagaagagagctgaatgagactcattgccctctcctctgaggcttcaggaccaagcatccagactgagatgatgacctctttaaagagaaaatcagtgccagtgtgctggggtgtgctctagggggctatctggctgactggtgcatacagcatctcacagtagaggaagattttcaatggtttcagataaaggtcagccattttagaaaaatacgaactttttgttttcgcccttattctctcccctggagccaggcaggggtccactgcagg

SEQ ID NO: 25468 - DNA, 1371 bp, Bovine  19866880998371
  misc_feature (1)..(1): n is a, c, g, or t
nctgagtattattccctgtgctatatggtaggcccttgttggttatctattttatagacagtagtgtgtatatgttaatatcaacctcctaatttattttaattgccttttcccctttagcaaccatgagtttattttctatgtctgtgggtctatttcagttttgtaaataagttcatttgtgtgtttttttagattccacaaataagaaatatcatatgatccttgtcttaaaaacttaaaatttttaatgaacatgtttatgtattattttaaagtaaaaattaatttaaaatccagtcaagggaattccctggtggtccagtggttaggactttgcactttcagtatggagggcctatgttcgatccttggctggggaactaagattctgcaagtcacacagtgtagccaaaaacttttaaaaattaacaaataaaaataaaacctagtcaagaagaggagagaaggaagagaaagaagcaaggtgttgttctaactatatgatcattccattgtttctaaaagaaatggatgattagaaagttgatcttggaattaaaaaacaaacaaatacatccttgactcaataagtagggtttttcgtttcttttttgttttgcattgatatgtacagtgcaaatgaaagaaaatggttttggtagctcttggcttgatggtcaccatggaaaatgattttggaatgttagtaattgcaagagattgtttatcttgttactttcaccctgaccaagcccacatcttttctctaaagcgtgtcttatttttagagttgataaatcaaatgtattgtcgagatggaatgcggcatgaaatgcacttgcaaacaaaaacccagccttattcagcagttctttcagcagaaaccaaagcgcagccactatgacttttctctccacgaggctataactatgaacacttcttgagagagttaacatgtgttattgtaaagagaagaggaggaggaggagcaggaggaaggggaagatgaggaagaaagaaatctacctttaaagaaaatttggttatttgaactaatatgtagcagaaaaggcaaaaaccaaaacttaattcttattcattccaagatttgagaccacaagttttaaatacgtaatacccacctaaaagtgaaattgtcagttgttcagttctgtccgactctttgcaaccctatggactatacgccctgccaggcttctctgtccatgggatcctccaggcaagtatactggagtgggtagccattcccttctccaggggatcttcccgacccagggatcaaacccaggtctgctgcactgcaggtagattctttaccatatgagctgccagggaagcccacaaaac

SEQ ID NO: 25469 - DNA, 894 bp, Bovine  19866881140997
  misc_feature (1)..(1): n is a, c, g, or t
ntgaacagactgttacccatctacttatgactttgtttgcctgtgaactagcctcagatatttaccaaatttatcaaactgtcccattgtaaaaatggcttagtaaagaaaaagggcaggaaatgactgttgaccagtcattatattacagaaaaacatgaacccccaccccccaccccacaaaccaagacccataaaggaacatatccacagatgggttcttttgcatattacaagatgcccaagtgcccttatggacctcagttgtctacagtgccctcatccacaaagccttatgatttccacaccgtgtcagtcacggaattacgcctcttctttagtttctaccaccgctccaagtaccctaagcattttatgagatttatgaatcacactcaagacctgttgccctaaaattcctcttggaccactccctttccaatcccctacttcttatgctgtgatgcatcctgcatctcagctcacctccccatccggtggatgccagcagaccttgcgttttgtttccctcctcacaattctcaggcagctataatgcagagcaattcatctgtcccaagctctacttcaaacttccatcacccgccaaagcttttagcattctagttagaatatccacccttttggggaatgattcaattattaaacatatttttgtgtgtcactgacatacattgacatacacagaggatttcttcatactgtttagtgagaaacactgttaaaatccacatcgttgaaatctgtttcaaaaaggtcagtttacatttttaaccctacatgggcttcccaggtggctcagctggtaaagaacccatctgccaatgcaggagatgcaagagacgtgggttcaatcctgaggtcaggaagatc

SEQ ID NO: 25470 - DNA, 1548 bp, Bovine  19866881195139
  misc_feature (1)..(1): n is a, c, g, or t
natactcatttaactttataaacctctttttgtattcccctggaaaatacacccccagtttgagaagcactgtttaagtggcagggacacagactgactccctgagggaccctggaggtttccgctgctgggagagcccattcattatcacctagctcagtgaccagggacaaacatcaatgaggaaaggctatttgaaagaactcaaaataacacagtcccaggtatggttaattcagttctgctgactatcctaatgggtgtaaattgccacaagattgttttaactcaaagcttgagatcgatcataagaggatagaaatgggtacatggatatacgtcttgggctggatcccaaatgcaagagtgacaccccagactccctagagttcatttaattagtttctaaacatttccactagaaatttcttcactggggcacagccaacagctctgaagcaggcatttagatctagcactatcctgatatgagctggatttggtaacaagatgaggatgtgccaagtgtctgttcccattaatttcttgtcaaaagcgtcttagtcgtgtagacatgaggaaagtcaacaactcaactattttctcttgaaatttgtaaagaaaaaagtatgtagaatattttagagtttttggtcatgtttaatcctccactccagtactcttgcctggaaaatcccaagggcagaggagcctggtaggctgcagtccctggggtcgctaagagacggacacgactgagtgacttcactttcacttttcactttcatgcattggagaaggaaatggcaacccactccagtgttcttgcctggagagtcccagggacaggggagcctggtgggctgccatctctggggtcgcacagagtcggacacaactgaagtgacttagcagcaatcctcagaacagccttctgaatcaggtgttatttatcaatagaagaccagggaagttatgaatcttcttcagattcacacttgaacttgatgaagagtagaacgagacctcattcacatcctgtggtttcacgtccagtgttccagtgaactacaggaaagtctgttgagttaaggagtgttttttctctattaatattcaaaataatgaaaataaaaaacagaggtgtatttattgtcacacagcttgtttaaagcagcagaggatcatgccaaatgccaatgacttgagataaatgacattgattgtctttagcacatacctttgcccttttggaattctggtcataagagacacatctctgtattaaagagaaggatttattactcatgatatacacattaggcaaagactgaaggaagtcactgattttctagaaaaaaataaagaactttagaatgactgaatctaagttcaaaagtattgtctaatagaatttgattggcatttcactattcattcattcagtaaacaagaggtgagcactcctatattctatagaaggcattgtgcttggtgcttggtgctgggtacagccccccagcctcatggacttactactcatttaaa

SEQ ID NO: 25471 - DNA, 776 bp, Bovine  19866881227141
  misc_feature (1)..(1): n is a, c, g, or t
ntgaattttttttaataagcagaataaatgtcaggacagataaatctgtcacaaaagcaaacagaatctcttcataaatagaaaatcacacggagacacgggccatcctgttttttgtcaacttgcataaacctcctttctttcgtctgtcctcggatcgaaatcgcccacatccatcatcctgaggtcaaaccagattttctggttgtgcaggagtccaagacaaaacttattaacgattcccggggggttgatcagctggcagtgcaaagctcatagctccagaagtgaaacgttatcatggccgtttccttaagcatattgctgcctttaaagattattttgcatacttgtttgaacagaagtttaatttaatttacaacctaatggctttgtgtccagaactatcagacggtagacaaatcttcacaggcaacaactttcacagaggatttggaaaaaaattaaataagatgagaatgagatatagaattagaatacaagggggcacaggagagggaaaaggggagaggctgtggagtcctgtggtggtggtttagtcgctcagtcatatccaacaaaatgcaatcccatgggtgcagcccaccaggctcctccatccatgggattgcccaggcaagaatactggagttggttgccctttccttctccaggggcttttcccgacacagggattgaacccgagtctcctgcattgacagacgagtctttacttactgagccaccagggaagcctgaggagtcttgtactctcg

SEQ ID NO: 25472 - DNA, 1942 bp, Bovine  19866881242890
  misc_feature (1)..(1): n is a, c, g, or t
nttgtaggtacaagtctcagaaaagcctcatttcttccctaggaaagttcccattatgtctgtggcattcaaatattattctttcttcaacacaatatcttcttaattacagccacatagaaaaagaaaaaggttgacacaaggagtaatatgaaatatgtgaggggagaacaaggtcaaaaaacacaagttcatttctaagcaattttctcatgtggactcaactcaaatactgacggttgaaaaaatgtaatcaaattgtattcctggccttaaactattatagtgtcttgttaaattacacgatgtgaacatatgggaaataacctagtttttacaatatttcagtgcagttttctatttgatctaataacctgagtgcttggattgttgcaataataagtatcctagaagtacatatgcatatttttcaacagtgagaaatggattaaggtccacgctccaaggctatttatcttacggcccgagcagagaagttggaaggagttcctggatttttttctaatgtgtgtagttgattagagcagctctcctcatctcataggatttcatttgagaaaggacagatttgcgcctgcagggtttcagtgtttatccaatcttaaaaccctggacatgttacagaacagcacatgggcttccatctgtttgctctttctatggatctttttttttttttttttggaaggattgaaaaggtttattatgctaaaaatatattctattctatagtttccaagccaagctgagataattcattttccaaatcctctaaggatgaggatgctatattcacccgttctttaatactttaaacctagaaagccctagtagtagttaagcaaaagtcccaaagtaaaacctgaactagcaatagtgtcggtggctctgcttttgtagcactgagagaaagcttaacattttagatagtttgaaaataactccttgtatttgttgttgttgttcagctgctaagtcatgtccaccaatttttgacccccatgaattgcagcacgccaggcttccctgtccttcaacatctcctggagcttgctcaaaaacatgtccgttgagttgatgatgccatccaaccatcacatcttctatcacccctttctcctcttgccctcagtctttctcagtatcagggtcttttccaaggagtagactctttgcatcaggtggtcaaagtattagagctttcacttcagcaacagtccttccagtgaatgttcagggttgatttcctttgggattgactggtttgatctccttgctgtccaagggactttcaagagtcttttccagcaccataattagaaagcatgaattctttggctctcagccttctttatgatccaactctcacatccgtacatgactattgaaaaaaccatagtttcactatacggacctttgttggcaaagtgatgtctctgctttttgatatgctgtctagctctgtcatagctttccttccaaggagcaagcatcttttgatttcatggctgctgttatttttgccttattcagatcaccataatattattaaacataaatgcatgagggctatacctgcacacggtcattatctccaggttaatgttcagttcagttcagtcgctcagttgtgtccgactctttgcgaccccatgaattgcagcatgctaggcctccctgtccatcaccaactcccagagttcactcaaactcacgtccatcaagttggtgatgccatccagccatctcgttctctgtcgtccccttctcctcctgcccccaatccctcccagcatcagagtcttttccaatgagtcaactcttcgcatgaaggcggctaaagtattggagtttcagctttagcatcagtccttccaaagaaatcccagggctgatttcctttaaaatggactggttggat

SEQ ID NO: 25473 - DNA, 2383 bp, Bovine  19866881300319
  misc_feature (1)..(1): n is a, c, g, or t
ntatggtgtgtctgtgtggagtagtgatggattcaaaggttacttctttcctattgcctttgagatacctgctaaacatccaaatagagagtctgagtagaaagttgcctatactaaataggggttactttctaatcaactcttttatagcattaatgtatcttaaaataatgtaatgagttgtcattacatttccctctgtgtaaagttgattggatggatcagatgtgaatccaacacctaaattaaaaataaaagtaatgttcaaaaggtgcttggaattgagtgtgattatctagcaaaatttatagtggatgaaccacatctggacctagagccaagtcactgctgtgccttttatcactggtgtgtgtggctcagggctgccttcattgacttcgggccttagaaagtctctgtggacattaaagtcaagtaatctctaacagtaggcatttaatgagttgttttagcattggatggtaagttcttcaaattcataattccacttcacactgcctttttaatccaacaccatcttcactgaaatgcaacatttgaaagaatctcctagagaaaattgcttattattcctttgaccaaagagtctctctgaaaaattatttactttggaaataatgactttaatcaactgtaggtcaagttggatgttaatagaaagaggaacttttaaaaacaattatttttgtaaagcttgtagaaaatgcaacatgctgcgtaattgtatcatgggtaaaatccgaacctgtttctactggaagaaaagcattaggttcctgcttcgtcttttcctcatcccctagactctcctcagcgaagttttctcaatgaatgcagagcccaggaaaaggcatttttccaacacttcccacaggcttgtgacacggtaattctagggtttggaaaattaatgtcagttttgacaccgatgctatcttgaagttcccaaatgtatcagtctattaaacaggctttggctgccatagagtaaatataaaagtgtctctggggagattgagtcatttttactggtggaggggggtggatctttacatctatatctttatttttatgttttcatcaaagcttagagacactgacagatgaattctttagaaagtatgataaatgctggctttccccttaaaaataagcaagaaaatataccttataaatcctgaaacctctctttttcaagcagactgtcacagatacgcccactcatcagtgcgttgactaagttggtgacaagatcttgggatgcaggatgccgaggtggcatgaagggactgggtctctgtgcagattgtcaacatgagtttgagcaaattctgtaatctctctgaacctcagtttcctcatcagcaaaatggagactgttgtaaagattaaatgagaaaatgcacttgaaatgcattaactcaaagatagaactctttcctgtctctttttgttctaagtcagagaaagtgagcaggagtagaactcttaatattagaaaaaggcagccactaagtgggagctggaggatagagctgaggcatccagcagattgaagtctcaggtttggatttgtaaaaagtgtcgaaggtggccctgaaacctggaattatcagttgaatggacttctgaaaataaaagcaagtatacaaaagtgatttataggcagaggaaataaaatagctacaagatatcaactatctcctgccccatgaaaaatacattttatttaaggaattaaatgctatgtgactattttgggcttcccaggtggcactagtggtaaagaatccacctgccaatgcaggagatgtaagagatgtgggttcgatccctgggttgggaagaccccctggaggaggaaatggcaacccagtccagcattttcgtttaaagatttctaggtgtagtttttcctttccatggatctttacttttttatgatccaccgcaacatgaagtgggttagaacactcaccactcttatctagtcctgcttccaggctcactgccttctcattgccaactgaccaagaacagactcaccaccatgggaagaaccacctgtttagtgagatgcaggtgtcattcctttggttgcaatggaatgatctggccctgctggagtcattccaggtggctctctgaatcacttgatttgatatcatatttggaacagttcagaatcctcacaaggaggaaaagatcactgtgctgagtggtctgctgagattctaatgggatccagtccatggcagaggccttggaagattttcccagcaggctgctgcatgtcttgtttgactccacatctccatcactaaacctattcccacatattttgagtatactgaagtctact

SEQ ID NO: 25474 - DNA, 1454 bp, Bovine  19866881302100
  misc_feature (1)..(1): n is a, c, g, or t
nattccgtggtcctcgttatacagagtgggaaatggaggcacagggcgattaagtgaattgcccatagctagtatgtggcagaggcaggacttgaatctaggcagcctggctctacagactgtcctggtagagaaggcattagtgcactggtgttcaaacttgacattgtacagtgggaatcacttgttgcaagtcagccctattgggatgatgctgaaaactagggatggtggggactgactggaaaaccctggcgaagaagcagtgctggctaatgagaagggatctgactctggtttgatcactgatgcttgtctaaaaacaaatcatttggtgcctccatccccttgattgttaagtgctatttcttggtgaaagactttgaatggtgtttgcctgtgtgagtgtgtgtgtgcgtgtgtgtgtgcttgtgtgtgcctctctgtgtgtgtgcatgtgtttggagggattaaagcttgtttggtttggggctaaaggccccatacagtgttcacacaaggataagtacattctgagtgccactcagaaatctgtatgttctctctgtcagcgttgctaggaaaacaaggctggtctcgaatccacaaaggtcatggagaagaccctgaaatgaagtgtagagacgtaggctcttgtcagagctcctgctcaacaaagaccttatcttgggaaaggtctcaatgggaagatgaattctccgtgactatgcgggcaatgcagagaattgctacagaggctatagagagtttaattccttttcaaaaaagccttgagaacagaataaacacattatgcttggctggtgtattcaagaagcctgctctataggaaaagacttttagaatgattctttcccctttcctttgccagtgcctgtcaacgcacgataaaaaactagaatgagggggtccacataccagccctgaaggtcttttttgttacactgaagcagagcattgacgcaaaatcaagtttctatagtcagaaaacatttttaactttctcctgtgcccttcccttggactgttttttgttttttttttgcgggggggaggggagtccaaaaaagtgttttcatagtaaatggtaatccgtatctaccaactcctctcaatctgctataatcttgctttgtccctgccccgatccctgggtcaggaggaggacatagaaaccctcttcagtattcttgcctggagaatcccatggacagaggaacctggcaggccacagtccaccaggtcataaagagttggacatgactgaagccactgagcacgcatgcacacattcttcctggagctcttgtctcaggggtcactgatcctacttgtcccagaattcaacatcactttacagcccttacatttctcgacccattggtatgactgtactctactgacactcttctggaaacttctttccttggctt

SEQ ID NO: 25475 - DNA, 1269 bp, Bovine  19866881306443
  misc_feature (1)..(1): n is a, c, g, or t
ntccgggagatgtgaattcagttcctgggtcaggagtatcccttggaggagggcatgcaacccactccagtattcgcttggagaatcccacagatagaggagcctggcgggctatagtcaatagggctgcaaagagtcagacacaactgaagtaacttggtacgcgtgcagcctgacatcagaccccaagtgttagcctctattctaacctgactctcagaactccatgtggctgggcaaagatactatgtgactagaagatctaaagtccactctgatagcaacacacgtgacagccagcaaccaactggccatgtggggcttcagtctggccccctgaggccacctccctgaccctgggctggatctcaggagggatagtccaaataggattggtagttggggggtggatagtcatctgaaattgtttcaagtttatgtgccaaatcttcgaaaatgtaaatcaatttttgaatgcacttaatcttctaaaatacatttgtattaaattacattgacttgtcatgggtcagaatgccctttcttttcatccatctttttattgttgccaaaacaatgctctataagcatagacttcaaatctgtcacagcccccagagttatcaactttaggatgagctccttgatggcattgtttcaccaggtcatttttgggagataggtttttggtttctcttcatttgcatgttatcttggattattctcgtttgtggagttgtagaaaaatgacaggctgatatctctttagtatgagattaacaaatgacccaagaaaaacactccatgcatcaaaagcattcttcccctcatctgtccattttatataggtgtccacttatattccgaggaaagtaagttgtgtccgtaaatgtgaactcacacatttcctgtgtttagctcaacagtttggtggaatcatcaggttctggtggcaatttctatacttctttaaacacaggcatcaatcaggatacagaccataataagcattctgaaaaagctgtacattaagaggtaaaaactgcttgaggaatcacaaatatttattctaaagcagaccttagttcagttagggctatttgctgacagtggtcatctattcaacaccccaaacctatcccaataggagctagttcataattccaatgggcagtccacacttattttcaaaggagaaaaatccggatagaaaaaacaaatacatgttaagcacttgaaattatagacgattatggggtctacaaggac

SEQ ID NO: 25476 - DNA, 1735 bp, Bovine  19866881345022
  misc_feature (1)..(1): n is a, c, g, or t
nccctggggatatcagacaatagtccctgattgagtaggggagggaggcagtccaaataagtatagtgcagtgtgatgaagtctacaggagagataagagggtaatgagaacacagtgggagaaaccattaaatatgaccatgagagattctgtgtaaaggtagaagagttttggaaggagattaacttggccatgatgtgtttttggaaggaatatttgaagatgtgtttaaagaagtcaggaaaaactttagtggaaatgttctgatacaaattaagagaaacaattattagatgaagaattatagcaagatggcaagggttaagaatccagagaagttttctccacaacagatgagagaaaaggaagaaggatagaaatcaaccacacatgacaaccacctcctgccctctaacccctccaagcccagtcttggcagcaaaggtgtctccttcctaacaccaagggcttccccggtggctcagatggtaaagaagctgcctgaaatgcaggagacccatgttcaatccgtgggtctggaagatctcctggagaagggaatggcaacccactccagtattcttgaatggagcattccatggacagaggagcccggtgggctatagtccatggggtcacaaagagtcagacacgactgagtgactaacactttcactttaccagcaccaagatattggtgtaccttgaaagagcagaaatgacttgtatctggaggttcaagaactaaaacatcatctcagaagaaaaaggtaatataaaacatacttaaaaacagaatatgtggtttaaggtccagtttctcaaggtcagaacattcaagaagatgaaatggatgaggagcccaaccttagtcactcatgagtttggactcccatctttctttaattccattctttatcttgaatgcttcagagcctctgaatgttgtcttcagaatgcagaatggaagaatggccatcttttccactatttcctttaactaatttttccctgttatattttctcataaattcaattttcctagggttttccttttgtcttttttggctcattacttttcagttagaatttgttttctttagcctcctttgtcttccttccttccttcgttccttccttccttccttactaaaatactacaattgccagctgtcaccacccactcatgacatcctcctggtataatgtgactgagcagaagcaagtgagaaatgtgtttaactctcaggccccaaagcttctttctacatttcaactacaatgaaatctgtgggagggcgtttgtaatgacttaggtagatagaaaattaagggataatgcagaatttttttccaaagaaaatatattttgataggaaaaccccagccactctatgagccaaacctgtaagtgtttaattgctaaataattgtatttagtaaaaaaaaaaatacaacagcatattttcagcagaagagatctgagatgagagggatgttaccatcctctatattttaaaagattcataaattagatggtattatggttggcgtcaccaagacagttttgttccaggggacaggagagcaagggccatgccttcctagtgcttctactgtttccacaaggatgtcaggaattattgggagttgtgttcttctttatggaaatggggtcacaaagagtcggacatgactgagtgactaacactttcactttaccagcaccaagat

SEQ ID NO: 25477 - DNA, 879 bp, Bovine  19866881485942
  misc_feature (1)..(1): n is a, c, g, or t
ntggtctttacctccccttctgctgcatccgaagaagagccaatgaaaacccttggagcttccctgtcactcaaaggccattaattttttacaagatgaaaagtactttttccaaaaataaaacccagagttatcatttcagtaggctggggaaatgtacattcctttttatagctgcaaatgagagcagttccataacaattctgaatttcttcttctaatgctgcagcagtattctcttcttaaaagaaaacaaaaaaaatgtagtaaggcactcgggtgtcctttagaacctgagccacacatgtgcccaacagcgccctcgtcagcttcctccacagcaggcgatgatttcgcccatgtacctgtcacctttatctctctggccctcgggttctccgttttcaataagctgttataaaagttcacatgccttcaggggtcccccatggaatgaaagtgagtgaggggatgaggagggacttattgccaagggagaacttgagtcatctctaggtaaccatcccaactcatttcatggtcctgtttggattacccaaagctgactcggcccatcttaactgtatcagttctcaaggaccaagtgtgcgtggatgcttgtgtgcatgtgttcatcactgccctgcactcaggggtcctctgccacagggggcagtaatgagcaggacccagtgcattctctggattccaaacaagatggtctgctggcagagagccccagggagcagcttgtttatgttttgttgttgttgtcttgtcctacacagtattttaagaaatgtgtgaattacttggaacatttcattgttgttcagttatgtctgactctttgcaaccccatcgactgcagcacgccag

SEQ ID NO: 25478 - DNA, 702 bp, Bovine  19866881520359
  misc_feature (1)..(1): n is a, c, g, or t
ncttctaataaacactgcttctattaaaaatatatatatatatatatataatcccagttaattcttgccaccatgtttttgttgaagactttctagaatcccagatttttaaaaagtggtaaatgaatacaccatatggttgtattagaaatactttttaaaatgttgtatatgtgtgtgtgcacacacacaagcatgtatgcaagcatgcgtgcttaaaatacctgcttttttcttcatattcaggttcagtagtcacagtagaaaaaagaggagctagtctgtaagctattacatattgaatggataaacaacaaggtcctactatgtagcacaagcaactatattcaatatcctgagatattgatatatgaccttttgcttgattttaagacaaaaaaaatatacatgcagcccttccaaacagttggctggtacagtctttttggagtttatatatccattgatttgttattgagcctgtaatttgctacttcttccgaagataacgccaataatgttcattttaagtcttctcctacgttaaaaatccctttatttcagacatcttaaataaagtggggctttccccccacccattttcttttctttagcacagaatatcagaagtgctactgtttccatgctttgtacttataaactaacattagactaaaaatgtattgtctaaaatagcatctg

SEQ ID NO: 25479 - DNA, 1745 bp, Bovine  19866881594570
  misc_feature (1)..(1): n is a, c, g, or t
ntcaagtccaactctttgtgaccacatgaactgtagcccaccaggctcctctgtccatggaattctccaggcaagaatactggagtgggttgccatttccttctccaggggatcttcctgacccagggattgaacccaaatctcccacattgcagacagactctttactgattgagccaccagggaagacctaatacacgcatacctaacgaatattaaataaattaatgaatgagttagtgactggatacatggccttaagtcagacagcataaattggtacatttatacctacaggaacaggaaatttccccttaaagataacacagtaggatttggcttatacaaggcaaggagccccgagttttacactcttgcccttttgccagacaacctggatttttggtgaagagttagtggaaatatatatattagaatctcaagcaggaaacaagcaaagaaccagacagaatgggctacagattccaagtacaaagatacttgtagtagatgactaaacattttaaggctgtgctgctttataaaatatatcacttcaggaggaatgaggccacaaactcttacctcaaaaaattctttgaacttaaaaaatatcacatataatgcatgtatactccccacacctctgaagcccttatgaaaataataagcatcagaattttatgtaaaatccacttgacaaatataggcaaatctcaaataatattacatttttgaagtaaatgtaaagtcttatctttatatatttctcttaaaatgttcatgaggagatgccctatcaacttttatgatacatacacacacaaatatatatacacacatacatatacatattacaaaagtaaacaaagtactgataaaaactggaaatctacaagataattccattctgatccaatgcatttttgcttgataaattataaggaagtaatcagttccttgaaattgtctatctcttagagagactaattcctaagaagtgtatgtatatatatacacacatacatgcatatatatacacatatatgcatatatatacacacacatacactggtctctttgaacaccattccaaaatgccggatataaattcaagaaaaaaattttcaatgattaaagaccattttccacagatacacaggcagatatgtaagaaacctagatggatatcatatgctcttaaagttgccaacactgtgactgaaagcctgcctatcttttcattttacttctctagcagacagacttactttcgttaccatactggaaatgacaaggacaagttcatgttcacagctgctccaaggcatcagcaaggaaaacttaaaagccaaacagagaagaccagccaaagtagtaattttcactaatctcatctgaatattcagcaaacatgtatgcctggaagactcaactgtgggatttgaagacaagtgagactgaaaatagtttcaacagatgcatggattgattctatttagaaaaacacaggagaaaaagaaaagaaacactagaattgtcaaaggggcaggcaatggagttgctctctggagtggtgtgtgtgtctgtgtatgagggaggttggggaacactaacatggagagggcagggtgaaggctaaaaggagggagaacacaaagagaactgccaagtattcactcctttctccaagagtctgagttgtgccagaaaagaaaaaggagtgcattagacacaactgtatt

SEQ ID NO: 25480 - DNA, 749 bp, Bovine  19866882047015
  misc_feature (1)..(1): n is a, c, g, or t
naaattcataatggggaaggagctacatcattctgtttcttaacaagttcgctaattattctgaagtaagcaaaaatttgagaattgttgctccaaaaagatagggatatttcctttactagctttaaatatgcttgtgtatagatgtacaggccaaatacaagtgggaaaactctcaaaaaaaacccgatagctcccatctctttctggagaaggcaatggaaacccactgccagtactcttgcctggaaaatcccatggatggaggagcctggtaggcctgcagtctatggggtcgctaagagtcgactaggcgacctcactttcacacattggagaaggcaatggcaacccactccagtgttcctgcctggagaatcccagggacagagaagcctggtgggctgccgtctctggggtcgcacagagtcggacacaacacaagcaacttagcagcagcagcagcatctctttcttctcatcatcacaccttcagacatagactgaaatatgttccatataagataaaaacatacttaccaagggtttttccagcttcaattcttgtcaaaaattgacatacgtatatagttctcagttgataagctgttagactggacagtccatgaataatagctgaaagtgaataaagtaaattttattaaaacattaaaacaaaactccaaacttggccctgcagtacctctgtgtggtttgctgagcaagaaattaacgaacgtcacccaaag

SEQ ID NO: 25481 - DNA, 1499 bp, Bovine  19866880128439
  misc_feature (1)..(1): n is a, c, g, or t
nctcagccttcttcacagtccaattctcacatccaaacatgaccacaggaaaaaccatagccttgactagatggacctttgttggcaaagtaatgtctctgcttttgaatatgctatctaggttggtcataactttccttccaaggagtaagcgtcttttaatttcatggctgcagtcaccatctgtagtgattttggagcccagaacaataaagtctgacactgtttccactgtttacccatctatttcccatgaagtggtgggaccggatgtcatgatcttcgttttctgaatgttgagctttaagccaactttttcactctccactttcactttcatcaagaggcttttgagttcctcttcactttctgccataagggtggtatcatctgcatatctgaggttactaatatttctcccgtcaatcttgattccagtttgtgtttcttccagtccagcgtttctcatgatgtactctgcaaattcagacttaaattgaagaaagtagggaaaaccactagaccattcaggtatgacctaaatcaaatcccttatgattatacagtggaagtgagaaatagatttaagggcctagatctgatagatagagtgcctgatgaactatggaattcacaaattaaaccctattaactccaaatgatgtaaatgagatctcaagcccaacagtggctcctcaaatgtctctgcctgatcacaaacttcttccatcccagactgttcaccctccaccttggttccactctgatctgaaatatgagaactactgatgttcctgtattctgattcatctgttcattagagactggaattggtgttctgctaggaaattctgctgttgccaccaaagtctgaaagttgttcaattaagtctcattgtttttaacttcctatgccattagcagagactaaatttgccaagaaaatcactaacatgagtgcaaacagaaatcccaatctccacagacctcctaaaggtaatgttgaacatgtaaacacgtctccagtggtttgctctggctgtccaagtggccacttccatttaccttaagtgctcactgggctggtgtgtgtgtatgtgagtgtatgtttgtgggcttgtgtgtgtgtgtgtcagtcgctccatcagtctgactctttccgaccccatggactacagctctccaggcccctctgttcctgtgtgtgtgcaggccttggacaagaagggtccacaaaaattccagggatgataagcatcaagcatccccatgtctatgaggttatttaaggatggaagaatggcaggctcaatttcttccttttcttatttggtaagagaatgggtttgtgtcatgagaagagccaagctctttttgtgcattagctatcatgaactttttcatggttcggttttggttttctcagctattaaatggtgagatttgggactcccacaacaaggtcattatgagaattcaacaaaccaaaggacagaaag

SEQ ID NO: 25482 - DNA, 2499 bp, Bovine  19866880207750
  misc_feature (1)..(1): n is a, c, g, or t
ngagggagggaggcttgggtaaaaagtgcaagaaagcccagaggaatgccaaagaagctgggcaagacggcagccactccctcttctttctaagccagccagcctgcacccatctctctgcctctttttgactttgttcccaaggccggcacctgtgcagaaaccatcaccctttccacagtctacactataatgccttgtcgttgctctttttgcctaagtgcaggacggcaccgctcaccaccatctttctgcctccccccagagcacgtgtttaggccccacgatggggctggctgccggctgcctttgctatgtgatcattcctcagtgagggagcaggtgtctgtcgtagtcatcctggcatcctcacacctcggacagaccacacctcacctggactggatgggcagtgggtactgaattcagtgaaagcattcttttctccctggatccagttccttaaattaagttcatatttaaaaaacaacaaccctcaaaactccctcctcaggttagggaaactgagatgtacttaaaataagcatcacctccagatgaatggacaaagaagctgtggtacatatatacaatggaatactaccccgccataaaaaggagtgcatttaagtcagttctaatgaggtggatggacctagagcctattacacagagtgagtaagtcataaagagaaaaacaaatattgtatattaatgcatatatatggaatctagaaggatggtactgatgaagctgttcacagagctgcagtggagaggcagacacagaggagagacttatggacaagggcgggtggagggggaaggagagggtgagatgaatggagagagtagcatggaagcatatatactaacatatgtaagtagacagccaatgggaatttgctgtatgactcagggaactcaaactggggttctgtaataacctagaggagtaggaatgggcgggaggtgggaggatgattcaagaggaaggggacatatgtacacctatggttaattcatgttgatgtatgacagaaatcaaccaatattgtaaagcaatcatcaatcaattaaaatatttttttaaaaaaataagcaccatttcagttaatttaataggattggaacacagattctgtcaggaaatgagtatgacctttgagatcagatctgggtctttagccgaaatctgtcgtttactcccaggtaacagcaggattgtgccttgtctccacacctctgctgcctcttctgtgcattaaggacaataaccccttctcagtgtccttatgagagttagatgagaaaactgatataacagtactgatatatgtaaatgctcaacaagtattcactgtttcttcccttttagtttaattctagattaagctgcttttgatggtttatttccctttcttcagtattaaggaatcatttctaatacacaaggttcgatccctgggtcgggaagatcccctggagaaggcaatggcaatccactccagtactattgcctggaaaatcccatggacagaggagcctggtaggctacagtccatggggtcacaaagagtcagacatgactgagcgacttcactttcacttttctagaagtacacaaaaatactaattaagtagcaccccccagttgacaacatccacctcacaacagttattttaaagtttaaagtgatggagttggtcatggcagcctcttccgacaacctgccatgagacagcctatgtctcagccctccgcacaccgtatttgtctcactttgaattgtttataactgatcaattcaggtttttgacaaaaaaatggttaaagatcaaaagctaagctctggtgatcttcatgagacttttattcgtgtctcatctgcaaggaaaatttgtgtgtgaataggaaaaacatctctttcagtaaatatagtcactaagtgtatttggctgtattctcataaaattatctcccattccttgtagtttgtcataatgggtttcaaggactcctctttgctcgacacaggaatatttactgacagagaatacgcagttgcagtccctccggctgtaacccagcaagtagcacctattcaccttcgaaactggcatctccatattactcatgccagtcttttctcactaattttatgattataatgaggcagtggtgcactagttagcacagatgaccttctaattgaaagactgtaaattcaatctccatcgctgggcaccgacagaaatttaaataaatacagctcctaaaacccttgtgatgagcggcctaatgaccaggggccagcagagcccaagtcatccgtcacaggggactgccggcaacttctgggtgttaactacacgagtcattaggagcaggttgccctcacaaagcgaagtgagactagggactcttccctggctcagatgcaggcaccatgccttgcttttctgcaacatatgccaagttgcttttttgtcaaaccg

SEQ ID NO: 25483 - DNA, 2005 bp, Bovine  19866880264924
  misc_feature (1)..(1): n is a, c, g, or t
ncagagacattactttgccaacaaaggtccatctagtcaaggctatggtttttcctgtggtcatgtatggatgtgagaattggactgtgaagaaggctgagcactgaagaattgatgcttttgaactgtggtgttggagaagactcttgagagtcccttgggctgcaaggagatccaagcagtccattctgaaggagatcagccctgggatttctttggaaggaatgatgctaaagctgaaactccagtactttggccaccttatgcaaagagttgactcattggaaaagactctgatgctgggagggattgggggcaggaggagaaggggacgacagaggatgagatggctggatggcatcactgactcgatggacgtgagtctgagtgaactccaggagttggtgatggatagggaggcctggcatgctgcgattcatggggtagcaaagagtcggacacgactgagtgactgatctgatctgatctgaatttgtgaattacgtagcttctcaatcactagacttatagagtgagtctcaggaaagcatgtgtgttgaaatcaccaaaataatatcaaatctcacggatcaagcccaggcagcatacttctccaacaagcctttcacctgtgtgctagatgagtagaaaataaacggcttaacctccttgggagcacctcgctcctgactactttctgtcataaatgggaaaaacattcaaacaaggaatccccaaagaaaagaaaaagaagctgcaagtgtgggaactggcctcaaggcattgtttagtgtccccaggaaattctgagggtccgactctagtactaaatcttattcattctaggcttccataatacatgtgatggaagccaactggaaatgctttgaggttccagcaaataagatgtaaaaatagtgaacctattttataaatgaaacctcattttctgtatatatacattataaacataaacttagatcatcaggtgggcagatagtccaagatccagaaatgtcctcaaaagtgtcaggatcctcaggtcatagcccaacctaatcccacagaattttcacaacatctgcttaaacgttctgctgggagcaggcacgtgtttccaactccctcaccttcaatactgaaactcctctctattattagtatttttctttttaccagacagggatttcttgctgtaacatatacatacatgcactggataataaaacttccctgattaccttataacagcacattaaaaatttactaagataaaattaatgtgattttaatagtattgttttaatatacagactgtcaggtgacaaggagaaaactatttggaattctgcatgcaagatatatgcctctttcgcagccccttccaaacaatagctgaactggcagaggaacttgtctattcacatttctgagaggtgcctcccaggggaaatggctgaagttgggcccttttaaaatgtgaccggacagtgcttttgagactataatgtggagaacttccctgcatgacagggggaccagggcaaagcaacacatacagagcgttgtttcctgtacacgctgctgtgagattcagccagagaacacaacttcaaagaatcttttgatggagaaaaaatgttttcattcgcccgttttatgatactgctgcaggatacttacagttgatttactataatgatgggacctggctactgtcccaaaggaaaagaaatcctgcctttctcccgccacattgattattcgcagctagaggtggggacgggtaagtgatgggttaaaggggaagatggctggaacgcggcaaatagagatcattagattcccaccacagtcatttgtgcaaggcctgtgacccagggcaggaatgttcccatggtcaggtgcctgctcacactgaaccccaatagacagagcagacctcccacctctgtagggctgctgaggatctgaggggctggggagaagggcaggcggcttccac

SEQ ID NO: 25484 - DNA, 1247 bp, Bovine  19866880395217
  misc_feature (1)..(1): n is a, c, g, or t
ncctctagagtctgcatttataaggagttctctccattaggattacctaaaagtaaatattagaaacccttctggaacatagcccacttagcctgtacttttacccataaaactgggcctgcctatcccaaataactaaatgtttctagtccaagaaatgttccttgtttgtcaggctgtcctagggggtgcctttttaaatgttcagcagaaaaagcagacatctgtcactcttaaaaacaaaacttcatttctaagtggtgtaattaaaatcagaacaagagacttaatagtacttgtgcacagtcacccacagccattaaatagcgtggaagggctagctgcaaattcaaccagaaaaacacaccttacacaatgtttatttcatcgtaggaaacattatcactggagagcaataaagactcataagtgacttaaaattgggactacctggctttgttttgtgtccatgattatgttgcattgttgagacaataaagtagatcctgagagaatggaaggggtgccaatggtagaaacacaaagacttcctcccaggtataaaggagccaagtgagcagcactaaatgagaacacttgaacatcttgcatgggggcttgagatcaccccagctcctgccaggcagctctcctggggctcagagaggagttgggttgttccccatggaagaaatggatgagatcagcaaaggatatgcaaaattacaagaaggatagcctttctgtcctagagtctaagaggaaaaatgttaaagtaaaaagaggtaaaatgaatacctgggtgctaacaaaaagggatgcagtcggcccaaggcttcagcgatgccaaaagggtgaactcagaaaacacattgcatcctctgatgaattcctgattctcatggaaaagaatggttcagagcttaccagtctctaacagttaagtctaccaggtcaaagccatttgcatcagttggttctccagctcttatctgtcataatttattcctaaacactgaaagtttacccttgaagctttcatgttcttcacggataaagaaagagtcacagttgagtcctcacaaaagttgcccacaaaatccttttattttatcattcgtatttgtcttcctcttggtatggatagtatgaaattttcagtttacaaaaggatttaatcaacagtgaatgttttgaatcagattaaaacacaaatattttaagagcgatgtatttattctgtcctg

SEQ ID NO: 25485 - DNA, 1642 bp, Bovine  19866880433921
  misc_feature (1)..(1): n is a, c, g, or t
ngcagactcatcctcatttcacagaatgttttggctttatgcaaacagtgtatgagaaaaaactgggctaaacatgctaaataaatatgtgtgggggtaaaaaacaacaactttcaatttcaagaatccttaagcatgtgagggtaaagactcaggacaagaattgtttctggaggcttcatagatttcctttcctgctcagaagctgaatcgcagtgggagctggatttgaaaatgaaaagcctgtgacaactttcttctccactcttccccttcccctctaggtggagctgacaggcagcagtgtctttgactatgtccacccgggggaccacgtggagatggcagagcagctgggcatgaagcttccgcctgggcggggtctcctctcacagggtaccgctgaagatggagccagctcagcatcttcctcctcccagtcggagacccccgagccaggtgggacttgcaatcccaacatgagggttggtgggcaggacctttgccaatgattgcactcaagttgccagtgtgaagagactacaaataggtctaatggtatttaacaattccatgcagctttctgtcctgggcggtaattaagtaaggaagagatttgaaaataagaagacattttaataagtataatccagagatctaatttcaggtgaactaaatgcacagaaggtaccagttcctttagattctttttcaaattaatggaggggaaaaggttcagatttggaaagccctctgcctttcattgttaccatggctaaatgtaatgcatttatttatttattcagcaaaattgatggcaaagacttttgaatattagcttgtggagaattaaaggtattaggggcttgcagaaatctcagtttctttttcttttttttttttaagcatcagaaggtacttgaaagatgtgaacagataaattaaggctaaaaagaaaacagaaatggctacattttaaactgcctttctaccctcagtatttaattagatcaattgtatagaggaatgaacagaggtgacattcctcattgggattccttccaggactcttatagactttgcattcagaatgttcccattttcattgtgttgtactgatgataatttaagtattaggggaaaatccatttataaattaaacaaaatgacttgatatccatcagtcccctagttcatcaagctgttcaaacacggggaagattggctggtcggcctgggtcttccgagagcgctggtaattagatctgcgaaggatttattctttgctgattggggctttaaattaattgaagttccacatttgtggttttgtcctttttgtacttttttagaggagatatttcatattcttgtgtggtggagtgcttggccaagcagcagtggtttaaatgttaatttttctcatgagaagtttaagatttttaatgaatcaaggcctgatttgaagtgcaaagttttatttgcttacttgggaaattatttttgccctctaaagatgtttgtactttacttgatatgttgttttaaaacagattcacaaaacaaaagcattttgtgaaagagaaataggaaaaaagaaaaaaaaaaaacatacctttggattaaccttaaaataactcta

SEQ ID NO: 25486 - DNA, 1276 bp, Bovine  19866880483550
  misc_feature (1)..(1): n is a, c, g, or t
ntttaaatcatatgttgcaaatatattttatctcgagatccagtcttacttgaccaatagtggccacccccagcaccaagatgaggtttctgaagccacgtccaaggctggtggagttaagagtgccatgactgataagtggtgattgccttgggtctgaaaagggtgaaacggcaataggtgcccatgtcccatccctgttcctggtcttttcattaacaccagtgtgtccttcatctcccattaggtacttttgaagtgaaatgaatgctgggattctatatttccccacttttcaccaagaaaatttagttcattgttaaagtggcaatattaccaaaatatttagcttttgagtctttgataagcagcttcaattttagttatatcttttttttttaattgaactgcagttgatttacaatgtctcaggtatatgcaaagtgattcaccattacagatatatattcttttcagattcttttccattataggttattacgagatattcaatacagttgcctgcgctatacagtaggtccttggtgtttacctattttacatataatagtgtatatctgttaattccaaatctttataatgacctaacaatcatcagttgactcacttaaacaattaatctatttaaaggggaaaattttttgtgttcaaccttgttttggcaaaacaaaaaatgctttttgattctttgacttttaagccagttccattagacacagtctaaaagagaaaagaaatcgtgaccttcctgctattccacctccttaggtttggatggctgtgcttttctcttcaggtcatgtgacaccacagcatgatctgacaagtaattaactactttagaagttactccagcatacactttgaagcagaagcaattctatccctaatagttgcctggcagattgattcttccttctggctcttaaaactctgtgtagtaattgccccagaatttaaaaattatctggggaattccttgtttcacatttagggtacaaatagctagtgatgttctgtaacgtgtttgtgaagggatggagaatcactgtatggataagaaagctctctctttttactacaaagacctggaaaacccttatttgaccagactgtagaactgagtttcaaaattagtaaactggtaacgtgtcggaatatgtgtttctcaagagctgtctctacaggacccatcttctcagagtgaatgctctcacactcaggcactctgggtatggatttgcctcctttaatg

SEQ ID NO: 25487 - DNA, 1356 bp, Bovine  19866880496722
  misc_feature (1)..(1): n is a, c, g, or t
ncacggagctatgggtgtgaccagctttctgttgtgaatgtcatcaaatttcaaactgaaggtgagttttaggtccattgaaaatttaggtccgagaaatactgcatacacaaaaaagtgtatgtgtttttccaatcatatggctgtttgaaaatactttctgcataaactctctaacctattgagtgttttaaaacaattttcagtgaaaacatgtttcttaatattaaactcctagaaaggaaggctttttggaaatccagtaaaaagtgaaaacaatctttaaagaccaattggtagggttccaagagagtgtgtactttgtacctgctgaggaagtgctgtagtttggttcatgcgtgcgtgctaagctgcttcagttgtgtctgactctctgcgaccctatggttgtagccggccaagctcctctgtccacgtatggggacagcacaaaaagattctagccctggattggcacagattcgagcacatcccagcacttacatgaagccaggctcagaagggaagcggcaccctcagacaacccccgtgtatgtaggaagacagttatcctgctttgctcttcagtggtcatttttacaaagcaccctttatttagcctcatcatccatcatcataaaccctctataacctcaactgccattgcctctgctctgaatttcctctaaattgtcaacacagcagtggtgccaaggagcgtgctaggatctggtgctggccctcgaatcctagctgaacaggaggtaactgggagtgcccttgccttacggtttctctgcggagaaactcatcctgtaaaaatgctgggttcccatgaagttaaaattggggagtggagagaggcaccttataaaggtaatgactcttttggggctctcttaaggcagcacccaaaatgctgagaacctctctctgtggactgcctgtccaagaagtagtaaatacctatgcagaattagcacctgaacagagcaaatgtatggtctccattacccatgcacatggccagatgttctcacctcaaaaaggtgatttcaccctgccagccaacagaactagctcaagagaaaatgacattgaaacactagcagccttatgccagagagagttgtacagggcaaggaaccattcgtaatctaattaaatatatctgggattccaacaggatggtgttgtagtaaatgtataaaacaagatagagatataggcgctgttatttttattataggtcttggccaaagaattgttttgtaaacatcactgaaagctattgtattggtttttattatatcagatatactttgaagtttatttcttagtccctgagtaaggaaa

SEQ ID NO: 25488 - DNA, 679 bp, Bovine  19866880526995
  misc_feature (1)..(1): n is a, c, g, or t
ngaacatagtcaatgtttcataataattataaatggaatataatgtgtaagaactgtgaatcacaacacctgtaacttacataattgtacagcaactatacttcaatttaaggaaagagaaaaaaaatttaatgcagatttcttgcctccatcccaacacatcctgactgatttctgtggataggaccagggatatgttgttaaggccatacggttctgcatttttccacccacaaacaggtgatcttcagacctcactttaagaaacctctacaagcaaaacaaactgttacagattttaacagcagcaacttattagaagagaacagaggtacggaaaagtaaggtaattccttaccttatttcaggtaaggaatatcctacgttaacccaagcaggagacatggaagatggacctggaatcctggctgcctagacagagagcaccattgagatgctgctgaagcaagatggagcccggctcctgaagtttatttcctggatgtaaatcagtgtctgcctgttttgactagacatgcccctcatcccaagtgagaccaaaaaaaaaaaaaaaaaaaaccacctcagagaaacctctgaaaataattaagcatgatgattctggattatctttaattagagggaggctcggagcacaccgaggcttggagggtcatcc

SEQ ID NO: 25489 - DNA, 2266 bp, Bovine  19866880534790
  misc_feature (1)..(1): n is a, c, g, or t
ntaagctcatacatttccccacacaacacaccagtaattgagagcccagttttgggggcaaggaataatgactttatttggaaggccagcaaagcaaggagatagtgggcttgtgccccaaagaactatcttgcctgagttagaatttgaatattgtaaagcaattatcctccaattaaaaaattaaaaaaaaaaattcatgcttggggctggtgcactgggacgacccagagggatggtatggggagggaggagggaggagggttcaggatggggagcacatgtatacctgtgatggattcattttgatatttggcaaaactaatacaattatgtaaagtttaaaaataaaataaaataaaaaataaattaaaaaattaaaaaaaaattcaaagtttgaccacgcaagaaaaactggaaacaacctgtatgtctatcaacaggtgactggataaacaatggaatactgtttatgtactattgatatcatgcaacaagatgaatgaacttttgaagttcattcaacttttgaacttttgaagtattttgaataattaggttgagtgaaagaatccagacaaaaaaggacaaaagaagggtgggaagagggagtaaattaaaatacttcctggttccggtcagcctctggaagggatgtgttaatttcttcctccctgcagtcattcagaggtgggcctggtcaggatgtttcctataagctaaacaaaggtattttagtttcatgcttattacctgagaagcagggttcccagagatgagccattatgtactattatttagtcactaagttgtgtctgactctttggggaccccaagggactgtagcccaccaggtttctctatccgtgggattgtccaggcaagaatactggcatgggttgtcatttccttctccagaggattggtgtgacccgacccatgagtcaaacacgtgtctcttgtgtctcctgcattggcaggcagattccttaccactgagccaccagggaagccccccattatgtatcatttaagcttataggcaaaatccctttagtgattaacttgtaatactgaattgagtacaaaggttatttcctattacataaggacagatgagaaaagtggagtggtaggtaaccatggtggtccttgaaaaccttgttcaggagcgtcataggtcaagaagagccattgttgttttataagcaggggacagaatttgagctgattaggaaacagtgtctaaggaaggacagaaatgagacagggtgagcagttgccagagccgtgtagtgatttaggtgagagagaatcgtttctgtagaaatgaatgtaaggggcagatctatgagatggaaggggtgtggagtggaggagaagagggctttgaaagtgacctgaggtttctagcctgtgcatactgcaggcagggggctgggggaaggatgctgctgagaggaagaacccaggaggagggtctgctaggctgggaatagggatcttctcgagctcacactgcatttgagggtctggcaggatgttccttgggatctgacactggaaaggcaggtctggagctcaagactgtagtcagggcccaagaggaagatttgggagttggcctcacagtggtcacagttccaatggcacattgtttcgcttcctcagctgcctaaacaagggcttggctttctggctgtgtgagtgaagacaggtggatgggtattttctggggcctgaatggctgatcctgatccgcacaacacagtccttggatccctgagattccaagaaaggagtaggctaatcttgtcctcctctacttagcatagttttgcctcttctccctcagttgtccagcttctcaatctgcaaacaacagctggagggtgagtgagggtcaattcaacagctgtgtgctggaaaccaagcaggcgtccaggatgaacgcactgtcgggccacagctgctgcggagatgagcgtgcgtgtgtgtgtgtgtgtgtgtgtgtgtgtgtgagagagagagaaactcatagcagggtgtgggtcaaaattgctggctgtctctcttttttaaacagacttaattcactttagttttcttgtgttactgtggagtctgcacagaagcactagtttgagtctttacaagatggtcagtgaattctcaacagggaagcttggcgaacgccatctctttccagaggtcaacggtgagacagctgtgggtcttggagctggcagctgctctggccccattt

SEQ ID NO: 25490 - DNA, 986 bp, Bovine  19866880554687
  misc_feature (1)..(1): n is a, c, g, or t
nttggttttaggtacagaactcatggaatccaccaaaaagctgcagtggcaggcccaggaaaggcagaagtcagggcaggtccaaggacctcggcagcccaagttcatggaccttcacttagaggcccaccattaacacagaccccctcaccctcactcttgtctgtgtgcctcatggcgtacattatgaaaacagattccgtggattaggtatggaaaaacgtccaccttcatccaattagtggggtgtcaagagatgggttctcatagcctggtttccactcaatagggcttgtagaaaccaattcttggagttaatggtagaacagggacccagggaggctcttggtgtgagctgctgcttgtggaaggtcctaaatgatgtggcagttctcaagcaggagaaaggttttaatcattaaattgcagggagaaattcctggccttgccttgtgcagtcaattcattcctctgggtctctaagtgcgttgcttccttgctcctggtctaactactcacttagcaaacaggagtctccatggaaggcactgacctgtgatttatgtgtcataaaaggcctggggtgtttgatgcctgtacttatctgcttgagaagaaacattaaatgagagctaatggaccctcggcctctaatgcggctgctgcttgcttaatgtgtggctccatttcaatgtagctccctggccaggccaagctgattttcatcctgcagcgttcaacgaagctcatccacagccacagccatgagaaggagaacccaaaggcccaggagctgcagttttctccttgccgcaccctcaccattgaacgtctcttgccagcaagatgttttatatacaaaccttcagtgttaaaatcctaatgtgaagtgaccatttaagctgaagacaacatttcaaatgatggtttaacaatcgattgtgggatgggagatctccttgactctatactgaacaatttcttgt

SEQ ID NO: 25491 - DNA, 1022 bp, Bovine  19866880586560
  misc_feature (1)..(1): n is a, c, g, or t
ngcacaaagaacatccttaacaaccaatcaaccaaagaaagacaaatgccaagacactgccatcatcagccctgcataatattcagaaataacaataaggttaggataagatcaccggaaactcagaccagcggagaatgttaatgacagaaacatagtatttgtgctcagcgggaaggctgacgcaaggcaaggtttgaatcaagtgagtgtaaatacttagcggataaagccaagagtttattttgacttctttgttacttttgggtacgggggtttgggggactggtgaaaatattaggaaagtttccttttttctagaaacaagaatgacagctagacaagccctgcaagtaccctgcttaagtttctcaagggtagatctctaaacaccctgccagattaattaattgtaacactgcctgtgcttgagagaaggaaaatgaggcactagggttcattgtaccttgtctgagaccactcaacctgttcgccttacaggtttgatccctaattcccacaccccttgtcgacttaattgccttcttggagaccgcatcacctccctctcgagttcaggttcctctctctccaatttccgtggtgatcaaaaaaatcttgccctcgacccctgtcttctgctcccctcctctatggatccaaacatcctcttccttcagtgcaaagtggatccgacagggcagcaggcttgggtcctctggttccgggtgggtcagcccgtgcagagagcagtgtagggaacatgcaggaggaagccggagacagccggggaagggaagaggtctctccagaaccatctcttccctcgcccacgtctccctgagcactcgtatactctgttgcctccctccctctgcggggtacacacagctttagagttgaggaggtgatgcttaaggttgcccacataaggcaaacagtaaacagctcttaagaaacataagatcactaatgctttgtcacagaaattatatgaattgatcggccacgcttaaaaatat

SEQ ID NO: 25492 - DNA, 1476 bp, Bovine  19866880638328
  misc_feature (1)..(1): n is a, c, g, or t
nttgcctttaaaaaaaaaaaaaagatttctgtgtaaataattaggctgggttttctttggctacattttcatttgaaggatgcaccctaattaacttaattggactcccctgttttgtaagcctcctagagcacccatttctacccagattaatccaatctattatgttagtgtttcccaaactgataaataatcaccaagggcacttgttatacatattcaaacacaccatggcctcgaaaaccagactctccacatgactgaaaagccaaaattttaacaatttaacatggatgcaaattttggaaaatgatgattctgtgttagttttgggagtttaactctctgctggcatcttcatcccaaatcctcttacacgtggattatccctaggctctgagagcaatgccaacacaacttcttggtctacagccaaatcattggaataaatatacagcttcctaacacaggcaattcatcaacatgcgggtgtctactctgaaagggagagggctcctcaagaagattaggtatgtgtatgccaagtctcagtactttatagtgacagtcattcttcacgaagtgcaggaggaaatgggtgggtcagttctccatgctgccatttcagagttggatgacaaaggcagtcagtcctttggtcatcaagatctgttgaccagagcacttaatcaaacaccaaggctgattcaatgacaccagtagttcggtgttgctctgaacagactgtcatccctgttgggactgcttatcatcctgttgccttccattcttaccttgagggctatctgcttcagcctctcatgaatttactcttttcatttccatctcttatcttggaacatcttgcctttccttctttaacacttaaaacttaacgcacgtgattattaaagtgaatgattactctgagcaaggcactgtggggtggtggagcaggatggaaatctactaagaaaaataaatacatactcagccaagttgtcaaggctataaaaatgcttaagccacagttcctgctctaaaggaacttaagtttactagggggataagacaaataaataacccttaaaacttggcaatgtgaatagccaagaaaaggcaggtataaagcaagcatttttgttgcagaaattaacacagtttggtactgatgtaggaataaatatattaatgaacttcaatagtgggtgtagaaatagtcccaagcatataaaaatagttaatatttgataataatctcatttcaaattggtgaggaaaatattgattaatcaataaattatagtgggacacctgtcaagacttctggaaaataaattcagctgaatccttgcctcactccttacatcaaattaaaaaaagacattaattaggaattcataatagaattataagtggccaataggcaaataaaaaatatagttcaataataaaagaaatgttaactaaagcttt

SEQ ID NO: 25493 - DNA, 823 bp, Bovine  19866880639072
  misc_feature (1)..(1): n is a, c, g, or t
nttgttggtgtctttgctccctcttaccgtaaatcacactatgaataagacagcagaatagccttattttaaagtcctaaatatacatcatgtccctctttctgacacactgtgggtcttcatagaatgactcatacccagcatgactcataccaagagagatggtgtccattacatcaaggatttacaaccacaaagaggtgcaaaacttgggcggctatgtacacaattgaataatgcaatttctaatgtttatttcctcttccattaacaccaaaaaaaacctaccttcttaaatgtgaataaaatgtgcattcagagacatctaaaatactggccagttcctcactgaaaagagcatagtgatgctgggaacgctgaagaggggagttgggggcagtttgcaagcttttggttgccaggggacacttaccatctgtgggtcgaggaaactgaatgctctcgaactgatggcggaaagagccaaagcgctgaaaaacaagggtcagtacaagggttaagtgaaagtgaaattacgctgacccagaaatgcaaatcagtgtgccttagctctctgtagaactcgaggtgcccaaacactccattgtttcttcggattacctagtgtcccaagagaggcttcagtgattcagagaaaagagatgaaatgcagagggaaacagcaggcagtggcagaatccaattttatttgagaagcatctccacagtttatagtggccttctcatagggaagaaaaatgcacttttgaagttctgttccctttctttgtactgcttttctacctttaataggccaaattca

SEQ ID NO: 25494 - DNA, 2133 bp, Bovine  19866880659077
  misc_feature (1)..(1): n is a, c, g, or t
ntgaaggaaatcagtcctgaatattcttggaaggactgatgctgaagcttaagctctaatactttggccacctgatgcgaagaactgactcattggaaaagaccctgatgctgggaaagattgagggcaggaggaaaaggggacgacagaggatgagatggttggatggcatcaccgactcaacggacatgagtttgagtaggctctgggagttggtgatgaacagggaagcctggcgtgcttggggtcttaaagagttggacatgactgagtgactggactaaagtgcatgtcattagtaaagttcttggtgtttttttaaccgcttgagaatctgcagtttagaaatgacatagaggttcagatcataaacctggggaaaatgcacctcttttgatgcttattgtcatatatgactcagcgataggaccttgcgttctttagtttccgcctgattcactttaggtacgagcaaaccaaatacagccaaatcagtttccctagaatagcaaatgatttctatataaaccacttgtgatcgagcattctttttattctgcagagaagctttagaatattttccactcattgtccaaataatgcacaggtattgtaatgactgcctggtattaattgtttacataggagataatattgcctttactttcttctgttaagtgttgtatattattcttttggtgctaaaatcctggggtagtctttaaattataaacatataatatacttgacagcctagcttataccaaaaacgggaactaaaatatataaaaccaatctagaaaggtctttattctgaaagctatgtcttgcccttcagagtttttgtttttattgacattaataaccaacatccacaatcctttctctaaaagtggaatgcatctccccaaccaggtaaaatagcagtgtgtatgggagtaatttaggggaagacagaaggagtcctaaaggggaaacaagggcaaagaagaaatgatctttctgccaagagaattagtttactttagaaagaatattctcttacacaattaaaactgtgacattttaggagatgcctgttagtcagaaaacataaaattatcaataacaacccttgctattttgacaattattttcttttctctttttggcttgttggagaagaaagaaagcatttagatacatgcagaacatgtaagtaatctcagtaagatgatattcttgggattttccatatttatatattttttcctacattgtattttcactacccaagagcccgggctgttatttttttcccaaagtctgaagatcaccccatggattaacaaatgattgaggattctctcttaaaagactctttaaaaaactgtcagaatcagcctgagacaaagatttattatgaactatttaaagggcttaatatatgtatccccaatgagcccttggagcaaactaaaaaggaagagtggaattctcaaagaataggacaaatctccaatgccccactttcttcacaccgtgattactgtttactcaaaggataaaatgcctaacctgtcacacaaagtcttcagaagccacaggcctgctgatgtacagtaaaaacaaaacaatgaagaccgacagtcatgtgcttgagaaaggcagctgtaatttacttcctaacctgttcgctaacacactaatgtggctacatcttgtcgctggcgctgatccctgacccacacagcaatcaaacaactacccgagtgccggctgtcacagaagctgggaccgtcaccttaattatacatttctggataacaaaccctcccttaatgagcaacttttctccgccgtgccttcccgctcaccccttctgtccttgaaaaggcccattgtagatcactgtggttggaatttgtgaagcatattcataagtagtcttcctaacaggtaataaatactacctgagcatgctgtttgctttatgagaatgccaagatacaattaaaattataggcttgcactcatgggaggctctggagaagaatcactcaagaccgaagggaaacttctcagtgaacttagaaccacgcttttctcttttcatatctgtaatataataatactttttatgtcaggactgtt

SEQ ID NO: 25495 - DNA, 1867 bp, Bovine  19866880660624
  misc_feature (1)..(1): n is a, c, g, or t
ntaatcaaaatagtgtatgtaacatttctggtgctgtttattcatgtctaatctaaaagattgctttaaaaatcatgtttataaaaacagctcccaggagagtttacaaagatacacatttcctttgaaaagcctctgagtcaaaagatgtaggattttcatttgaactcctgtttgggtatagaatttataccctgcttcctgctttgataaaggctttttcccaatggggttgatgcagcttcatggtgtatctccagggggttgtgcaactagatttactcctgaagcacgtagcccattcagagattgtgttgttagtttatgaggcacttttggcattaagacccttcccctctacactccccgttaaaactcagcaaacagaagccaacagcaaggtcctcaatgcccctgccatgtttgtattacttgggtgggagcctagacttgccttagacaagacacctagcttctggaattgttccatccccttgaccactgagccagacccaaggggaaatagcaaggcaaaatcaccctccaagagatggactgcaggcagcaaggacaggtcctcaagcctgggtcttagcttggcatccagctttctcgagcagcgtggtcctggatgtggcgccgtaaccgcagtggctttcattgtcctcctctctgtgtatgcctacggaagggtgcgatttcattatttctctggaccacttgtccctctgaatgtatttctaagtttttctcctgtttgactatgcctactgtgtgtcaggtattacgtcacaataacacatatccccttgtcctttcccttgaggaactcatagtgttgaagagcagatggcaccaggaaaaaattttcatccgaagtgacagagactccaaatgagttgtgtataaagaccaatgaggaactgatggaggtgacgtgtgagtcaggtcttagaaaatgtgttggaactgattttgccactaatgggcttactttttctgagtaatggcaaccagcctgctaaagggggaagtgtaaactgagaacttgtttgggattcactcagtaaactagctgactgaacccattaggcaaagtctagactctgacttcaagcaattcagtgaatatttaggctttaagtatttcagttattggaggaagagaccatctggaaagcagactctctggaactcactctcaagtttcctgttgtaaaaatgttcgagggatagttttgatttgtggaactcctggaattaactttgctttatgtttaataatacctaatttcccagtctcatggcagacagaaaataaatggcatatttaaattgctatgtaggtgaaaagaaagaccactactgaagaatgggttttaatttaaatttcagaggacattttacaaagtacatgaacctaacaggtaagctggctccttgagtttgctcttctgtagacaactgaccctggaaggtgggtagcagatccagtgctgggcagaattttgtggatctttttcaagttacctttatgaggaaaaaccatgggtgtccaccatgtgacataatatccatcacttccctggctgtacaaatagttttctaatttgatgttgtagaaaatctttcactgtaaaaatactccttttctttagatttagcacttaagatgtcccccaaccccctcttcccaaaattcattctaattgtgaattttgactgtctgtgtttattatatttataccagatagtatctttgtcttctcttctgccatgggttgagacaatattcatccagctggctttccagactccaaacttaaatggtgcccttcaccatgtgggactggcttaacatttgaaa

SEQ ID NO: 25496 - DNA, 702 bp, Bovine  19866880719805
  misc_feature (1)..(1): n is a, c, g, or t
naaggaaactggtattgcatgtgttatcttagatttatttgtggaattctttgagtctgtgtcttctcgtccatctgtttttgttcatcattcttcccagtactgccacatatagcaagtgttcaaaaaatatttcgtcaatgaattaaatattgaaaagacattctagaagtaatagaagatgagaaagtgctttagaaatagtttagtgctgcttttctcggctctgctgattaagtacatggcagataccgtaactatcagagttccagataagaatccagaaaatgctatcttttacagtgtcatagaaatagaacctttgttccttctcaattgctggaaatatacttgtctttgaatgaaacgaggcattggagcaataaatatgcccttttgccctggctctgaatttatcagttatagttcccacattaaaagcatgagagtcctcatgaaaaagtcaaagaaaggaaaatagatcttcaagctctgcatggagaccctaggtcaaggtaaacatctaggggaggctgaaagcaggaaggtttgggaggttgccagtgtggtctgaggggatctgaaagcctagcttgaccaggaggagtcctttattggcttaactggagggtcacaaatatctgtctttagtgatttctctttgggtttagatttgactatagagttctataaaagtgctaa

SEQ ID NO: 25497 - DNA, 822 bp, Bovine  19866880730647
  misc_feature (1)..(1): n is a, c, g, or t
naatatgaagggagggatctcattttcttgctgaacatgggaaaggaaacaggcagctctgtggcctctgacagccgtctcgtcaccatgaagggagccaggctcaggaggaagccaacacaggggaaggcagaatacagtgtggaaagaacctgggaccttggtgacatcccagagcagtttatcttactattctgggagtctgtcctacctctggacttccagttatttgagataatgcatttcctcatttctaaagccaacttaatgtcatggttttcagctactcgctgtcaaaaagataccaccagagaaatggtcaccagtagccataataaatagtgcacactttttttttttttttacttaatttaggtgctaggtcttcattgttggatgggcttttgtctagtggcgctgagcagaggctactctctagctgcagtgtgtgggcttctcattgcagagcacgggctctatggcactccggcttcagcagttgcagctcctggggtatagagcacagactcagccgttgcggcacacaggcttagttgttctgtggcatgtaggatcttcccagagctgggatcgaatgtactagttccctgaccagggattgaacctgggccccctgtgttaggagtgttgagagtgctaagtcttagccactggaccaccagggaagtcctaaaatatatatatatatattaaaaaatatattgtttttccctcttaaatctttagttcttccatgtgctggtcattgtcttggttggtgttaagtacagtccctgccatcctgtgtgctggtcagttgga

SEQ ID NO: 25498 - DNA, 1542 bp, Bovine  19866880760822
  misc_feature (1)..(1): n is a, c, g, or t
nttaataaatctggtcagatgtgggaaggctttaccattagcaaaagacatatgtataattttatttacagcttagtcatttaagtgattatggcaactagaactataccagtgactatgaaagtgaaagtcgctcagttgtgtccgactctttgtgatcccatggagctgtatggtccatggaattctccaggccagaatactgaagtgggtagcctttcccttctccaggggatcgtcccaacccagggatcaaacccagggcctcccatactgcaggtggattctttagcagatgaaccacaagggaagcccaagaacaatgggtgggtagcctatcccttctccagaggatctttccaacccaggaatcaaaccagggtctcctgcactacagacagattctttaccaactgagctatgagggaagccctatggcctttgcaaaaagacaagatgccacctttaagaagtctccaattatgccaaatggtggcgttgaaacaacacatcaggtggtaaagataaagtagaagtggatatggaactataaaaaaagaaggacaaaaatctatttatgcaccttgaaagatgctttgaattagggtcatatagaggaaatagaactgaactttgggcttaaaggaagagttaaatatgatattatagcatccaaatactgttaaaaaaacactcacttttcacagctaaaatatagggacatcagagtgttcatggcaaatcaattagttgagtctggaatctaggatttcttttcctgtctgattgataatagtccacataccttgaatcattgtgtgtaaattttttaatggattattcatgataataagagacataaatccacttaaatcttacaatagaggaattcaattttatataattatctccataccccatcttcgtaaaagttcttgtataaatagccagtaagtcctgaaactggctaatatgcattttcctaattatctttctcttcaggtgaatgtggtagcaagtcatagattatctgaaagtaaagaacagccaaagaataagaaataaaggacccggataactcaccaattagagaaatatcccttttattttcaaaaccaaaataagcaaattccaaggggtgaaacaaatgaaagaagaaaaaggcacaagtaaatgcattcacctttcctccagcgctcatgtccccttcccttgaagtgctcaaatgttagaaaggaagaaactccgagaggggaaaggtcactcagaaagaagacacagtgcaaacgccatgtctgtaatggagggcaatgtgaagtaaactcctgctctgagcctgtaatgagagagaaaagaaatgaagagctggaaaggtccaatgtcagaatttactataggtaaatttcagtgactgaaaggcacaatgaccaataaccacttgcctgagacaaaaacgatgtgacgtgctgagtctgcttagcccatctctctccccaagtgtttggctccgatctttcagaccactgttctcgcctcagaact

SEQ ID NO: 25499 - DNA, 1083 bp, Bovine  19866880775476
  misc_feature (1)..(1): n is a, c, g, or t
ngtctcctagtttatagtctatgggaacttgtatcctactcttgtgtgaaaattgtataaatcttaattgtgttgataatgcttttcaggtttactctattctgctactgctctataccttccttctattaatttctgacagtttcatagtgaaactccaactaataatcttagtttattgacttacaacaagtgtaaaacatagtggaactatatgtaactttgttctgtattttccaagtctcctgtaaatgtgttaacatattgtcataatttacaaaaataaaaaagatgaattatatcgtgttaaagtgatcacagtcctctgacagtaccatctttctcaacatatcctgcgaggctccatccagtgctgattccctccccagcactgctcacatgagagctgcttcatcccctgttcccccaataagatgaatcacccagcagatccagctctccccctcctcctccacagtgaacttccctcattaattaaccttgtctggaagtgagtggaagagctgatgagaagccgtgacatgacacagctgaataacatccctatttatctgttcattctcagtaaataaatctaacagcttataaaacattcaaataaaactggtaatcaccccccctcaccacacaataaacacaaataaaaagaaacagcgatgataatttctccatactcccaatattctccctaatttattaccattgtttgcttatttctttccccttagttaaagattcaagatgttaagccttgctcgatgcaggtcactacattttcctccattttttcccatgaccttggcacatgggctgttctgactttctccgtaacttttcagggtcatcattgttgtcacggacagtaataatggtaacacaagtgccacttactgaagcctggcagggactgtgccattttctactgattttacccaagccccacaacttcatataaaaacgtcctctgtgccgggcattgttcaaggcttacattctcttattatgcctattttgcaggtgggaagcgagacttccagagcttcaaacttgcccacggtcatt

SEQ ID NO: 25500 - DNA, 1113 bp, Bovine  19866880818403
  misc_feature (1)..(1): n is a, c, g, or t
nttggatgtcagaaatcctaattttgaaattaacagtggctgaacgttcattcgcaccttagcatagataggacactccacatacagaaaacatgtttcatgcaagagcaaagaccaagtccagagtcataatctacattattttaccattctaaagttaagaatataaaagctctaatcttgggaaattccaacatttcagttaccatagcaacataaattaagacctatgaaattcatgaaatgcctttggcaacctgaatcttatcaattttacaacacgctaaccaatctctcaaacagtatttattatatgaggagggcgaactaatggaatgcactatggctgtcgccagtgtgacctcttcccattggacagtctagagcttgcagtagccctgttcttgtgggttagtgctctagccttgccagggatagtaacaatcattctcatcaggctttgaaaaccttatataagtcatcgggacaggagcagctacagaaaagtcagaatcagacattttctttgatattaattcttctctaaaaaaataaagcagtggcaaagcaggtctttctagggacaatctttagatgggctgtcccacagcccaaagggcacattgggaacacccttaatttttaacagggaccgaggcaagggagaggtaggtacttgggcagcaccgggtgcattagctccacctacagtgatttgtagtcctgtgacaaaggggcacgtcggaggacagaaaacggactatcttatgccaattttgtattttcctgcctcactgaaacactatacatttactagttgttagctgtgtagtgtcagccagtttgaaattctataggcaaactattagatgtagcgagtattgtcatgttaatgctagaaagatgcattattgctattccaacttttctccatttcagttcttcatctttcccagtttgcactggtttgtagcaggcatatcccagaaggaaagaagggtggaaggggtgaggtatattttgaaaaagcaatctctagtataattcaatatcattagataacttaattgtttgaaaaccaacagaaaattattactacattcatacaacaaa

SEQ ID NO: 25501 - DNA, 1731 bp, Bovine  19866880820780
  misc_feature (1)..(1): n is a, c, g, or t
naatatcaatccatagagaagcatctgaaaagatacaatcaaaatgtttacaatatattcttttgaatgtatgcattttctcttcttcctgtcactctttcctgttgaatttttgttgtatgacacttttacaattaaaaaatgtatttctaattagacttgtcagggtataaattaattactgcatgcgtacactataacacacatttttacttcactaaaatgagcatagttccttttcacctctgaaatatcagctgtattcaacacctttgctaggactcagaagcgaaggggataacacattttcctttattctgacatgcatttccattaattacatgctttctcttgtgttcatcaacagtaaacttcagggtaagtttttcctaccaattttaaacagttctgcatggccaattttcaggtctgtcaagaaaagccaagactaatatcccagtgtcatgtttatagccatctgtgtagaaacaaaatcagctttggacagcttttatcttgctaaggttcacatattttgatgtgcggatgaatacttgggtttagaagcatcagaggattaacatgtttggcaagggagggagtggatctcttcttcaaaactacctcttccaagaattgatggaatgagccattttggaagaaaataaaaacaaaaccaacaaaacaaataacaacaaagccaaaatgaaacaaagcacagtagttttaggccagagttggagcttaactaagcaagaaaacagagtgagtagaaccattttgttttatagtcataagatgatgtccgcagttgtaaagaaatgcggcggcaggcagccacacctggtctgcactgccccgggggcacggagggtaaccaagcatggctggacgcctgcaggctggggtggacgaggcgcaggaggctctccagccagcatttagcgcccacaggtcatgtttcggcctttcaagtacatctgccatctggcctcacttgctttccctataattatttccctttcccctttctgccctggagtcatcttaaaggaaattattaagtataggattaagtacacagcaagcaatgattttttttttttaatcaaatatatctgagataccagcttttacatcatacctttggcagtttcttccttctgaacaaagaagttggttgttctgaaatctatgtccaaaaagctggcttctctgatccctgactgccttgtggataagcccctttagcactgacctggtttgtccggtggccaaatcctaggacctcctggatcctagagcattttacatatacatgggacttccctgggggtccagtggttaagactctggacttccagcgcaggggacataggtttgattcctggtcagggaacttagggcttcccttgtggctcagctgataaagaatctgcctgcaacacgggaaaccttggttcgatccttgagttgggaagatcccctggagaagggaaaggctacccactccagtattctggcctggagaataacatggactgtatagtccatggggtcacaaagagttggacatgaatgagtgactttcacttagcagggaactaagatctcacatgccatggggcacagctcaagaaataaaaataataaaataaatatataaaaattattgccaattatagcaagtgggttgataaacactgtgactgtagctttaagactactaaa

SEQ ID NO: 25502 - DNA, 1318 bp, Bovine  19866880826031
  misc_feature (1)..(1): n is a, c, g, or t
natacctatgttggctgttacatgaatgagcatgtggtgaattttgaaggcagactttgagaacatcatattttagtaagaagcttgaaagatacattgatcaaaacattcagcaaagcaaaatacattattttcggtataaaatatgacccagtatttcttcattgttcacaccctcctttcattgagcgcctgggccttgaacatagtagcagtctgggagatgcttgttaattttaattaaaattggattcctcccagtctcttaaagtcttgaacctcccggcctgggtcaaacagctgaaggaaaggagaataaagtaccaagaaaagctagaacaagatcattgctaaaatatttgtttctgggtttattattttattcaaaagtctaggaagtgaccggtctagaatgtggcagcaaactgctgttaatcccatttacattttcagagttgggatccaggttttcaggtttgttatgggactttatgcaaaactgggcaaatcgatagcattctaaaaatgccgtctgttctccagctcccctcctggtcacaaacaagcgaggctggcgctgggctcgcccggctcctagagcgaggggtaaacccggccgggtgagggactggggagaagggctgtcccgggggcggtcccggggcggagcctgggcggggcccgtgacgcgtggagtcggccggctcaggggctggacctcagcttctccccgcctggggccgccgccgccgcaccagtggtggctccacatttccaaaaggggccctccgactcttcactgggccagtctggcgctgagtcgcggagctccgcacaacttccgctggtctctaaacgggatccctcctccccagagttgcgggcaactttcccctctccctggtgccgcggtggcttggggaccgtggccgccgcaggtagctgaactccgggccacgctccccgcgtctcggctgagcgcacacgcaggtcactctctgcacgctgggggtccccaagactcggctttgcgggagggatgcccctaggacatatcatgaggctggatctagagaaaatcgccctggagtacatcgtgccctgtctgcacgaggtcggcttctgctacctggataacttcctgggcgaggtggtgggcgactgcgtcctggagcgcgtgaagcagctgcactgcaacggggccctgcgggacggccagctggccgggccccgcgccggcgtctccaagcggcacctgcggggtcatcagatcacgtgatcgggggcaacgaggaaggctgtgaggccatcaattacc

SEQ ID NO: 25503 - DNA, 2378 bp, Bovine  19866880877543
  misc_feature (1)..(1): n is a, c, g, or t
ngctctgttaacatatcggtgagcagagagtggattcatttcttatttgatgacattggaaggatttttcattctgcctcatcgttctgatatagaatctttctttcttcttgttctactaatttatacacgtatttctgtaacagacccaatgcttttatgtgtttttcttcagataagtcagcaaatacatagaatgagacagagctgtaaagaacatcaagtttctgtcaaaacagttcataaatattcagtagagtttctgcaacacgtaagaagttatgaagatggcattaagataccagtaaatcctaagaaaacctatgctaatcaagctatcacatcttattatattttattcttttatcactttattatctctcagtaatatgtgacaccccccccccccccgccaaaaaaaaaaaaagccctacaaatcctaatttgctgaggcgagatagaattcccgtcttgtcctgggtcaggattttctaaccatgatctcagagtctccgggcagttaggtttccaaaccacttgccactaacacagtcctctctcaggcatgaccttctatccaaatacagcaggtgtcctctgtggaaacaggtctggctgcaaaaggactcctgataaagggcttaaccagtagtacccctgagtcccctcagtaatcttaatgccctcaagaaatctacccaaaaaaagcagcatcttccaaatggtctaagaaattccaccttaaacggcagatttgatgaccttttttacatgctaaaaatggactttgtatgattgctaagactgaaatatattgaaagaaagaaatcagttttatcatcttgctttatcaaagtacctatcctcttaagttattccagtatgaagatgactagcagtgttgctgcctgctcctcatttgtggcaaaccctttcaatcaaaggagttatgaattcactgatttgcactgttggtacattgctgtagttaaaaagtatttgctcaccccagggggccaggcaaaggctatcgacttgctcgcttgatgtaggaaaaagacaaattagtcccctatcctatccaccagcagggggacaatgacccgacctggaaaagtcaacacaaaccactgtataatatatttacattttttttttccaggaaacttcagaggtaccaaatcaactgtgtctagtgtgcaaactgcatgcaagctaatagaatgtgaaataaatttgaggacggctaggtggtttagcttgattaaaccctgtgtgtgatggcgctagtggctatggcttatcctggaggaattttgatagctttgagtggggaaaggcagagagaaaggagttgtaacagaatgctgtttctggatatgactgcttattactcatcacctgtctccagccccatatacaatctcagctgtcttctaacacactaagcaaacaggaagaggaagttttattttagagtctgtcagctagagtaaaggtggacaggtgagcaaattctcttcttgtgctagggcaacaattccattttgcatggatctgtgccttaagtttagtaaacagaatatgtttgctcatttttttatattaccatataaaatgactgaatttactataaaatgaagaggttctcatgtttgtaccaaccagaagaacacagtattagggggaaaatgctatacctttccattatgtaggtcagactatagatcaaagatgggacaaataaccagtttaaagtggaatttctcaatttctactattggtgatttaaagggataattaagaaataataatttttatgaaactttgtgaaaagtcaggtaaggaacaaatgaactaaccaactaaccacagttctgtcataggcaggggaaaaaattataaaagatgaccttattatctttcaaagttccctgaaacctgctctttctcagcacttataaaatcctatcatcataagtcagataaagaaaaacaaatatagtatattaaagtacatacatggaatctagaaaaacggtactgatgagcctatcttctagggaaggaatggagacacggacataggaaatgaactcatggacacagctggggaaggagaaggtgagatgaatcaagaaagtagcattgacatatacactgcatgcgtgttcagtcatttcagtcgtgtccgactctttgcaaccccatggactgtagcctgccaggctcctctgtctatgggatttcccaggcaagaaaactggagtggattgccatgccctcctccaggggatcttcccgacccagggatcaaacccatgtctcctggactgcaggtagattccttaccactgagccaccagggaagccccata

SEQ ID NO: 25504 - DNA, 1860 bp, Bovine  19866880885669
  misc_feature (1)..(1): n is a, c, g, or t
natttcataataccaaaaatcatcagttgctaatagcagtgataactttttcatcttcttccaattatagtcttttcttgtaactcctcaagtgcttcttccctcttcctagcgattatctaacatgtcactattaatctgttcatatatttactgtttgttcaacacctactatgtgctaagtaaatgaagtcctttaatgagacagttatggtatcacagaagggaccctataccaggcatcagcatcccacaagccactcctggttctgtctctatcagctggcttatgttaagcatggattttgagccacctttctcactcacaaaatgaaactgacatttactcacaggattgttgagggaattgcaagcataataactatgaaaatgctttaaaaaaaaaaaaaatctagtgttttaaacagcttggtagatagtgcaccacaagtctttagggttcattttgtgacttttctgcttttgtaggcgaacaatggtgtcttggatttttacgctctaatgccatatccatagcagctgctgttgacttcagcatccaagttagattatcccacacagtttttgatggaattcgtccctaacttaatctgtatgtaatttagtttgctgccagggaagtaaagtacatttgctgtaaaccccaactccgggttgctagccggaaaattcagtgtgctttgtttattgcttttgtttcatatataatgtatatgacctcgggatgatttgttcagggaagagaacttgaggagttacccttgtacctagaatctgctgaaggtgtgctgtaaaagcattacttactcctgagttacccaaatcaacttggaataacgagttattctccaggggctattttctctgcaaatttatgagtttacagttcatgtttcttttttaatgatacatctagcaataggtcttttctgggctttacaaaagcctagcatttcctccatttcgtgtttatgaagccagctaacagctcttctgagttgaagttctccaactttacaatgcaggagaaatgaagatttgcatcaccagtcttgaatatcctgatacctagtcacatgacaaactttcctgagcaactttgtcatctcagtgaagctgcttcccctgtctgtcagacaagtcctgttcacctgctctgaattcatcacctgtagcccccaccccgcccccagcagctttgacccacaaccagaacttacaacagatcacccaggagggtgggtgaacttttgttcttgactggagtgaactccagtttggataaacaggctttgaattatttattccacaaatcagaaaagtttatcttcttcttttgatatattatgagggacgaggacaagttggaggcagcgtatctatggcatcaatacaaataaaagttcagtgtttaataatatgtgaaattagcaactaatgctttctccaaaaataattcagatcagactgaacctgaatcagtctctcaagtggtaacaggaaagtacagttgactgacacccaaaatgatgatggaggagtatgtgtcttaaaggtataacttatccactgatttactgaagtttcattaacaatcacatgaatgacatgtgtgtatcaaaacacagagcgatgtttttcccttgataatatatactgatttctttaatatgtaaatgtcttaatgctggtggcacttggatgagagattgttaaacttgttacaaaggaatcgtttagttcttcagctttgcgttggcagggtgattagacatactggcatgtcacctcagtgtgtctcctctcactgggtaccattacgataaatgactatgagat

SEQ ID NO: 25505 - DNA, 964 bp, Bovine  19866881015507
  misc_feature (1)..(1): n is a, c, g, or t
ncattagcatttccatggatggctgggcagcttccttccccggctcccactgcaaagagactccttgccagtgcttgagccttgttcaccaagtcaaggcaattctccaggaaaacaggtcagctgatgcaaaaagggaggcagcaaacaaagagctgaggccaccagtggcctttagcggagcctcaagggttaccccctttgcttttcctattaagcacttatttaaactgaaatttacatgtttgactgcagtccaaggattaatattttgagcccatcctattttaggcatatagtaatgaaaatcagacctggtttttgtctagcatctctcgatttcccaagaagagagaaaacatattcaatctatttgtgatttgtagcctgaggatgcaaacttatctgcatgccctcctaaattattactttcacagatttccaggtatccctctcagtaacatttttcagaaagcaaagctttgaacaagtaaggggggaaaaacttgtctgaacacgtgggaattttataaatgtggagttctgttaagctttcaggtgtctgggaagttgtgtaaatatggaccgatgcttgacagtcttgtagctgtggttttctgtttgagccagaagatgacagatgtctctgggcagcatttatgtggtcactccaattgcttctcacagagcaatcaatgaagcggcaaaatggcattttaagtgcagtgttgggcagagttgggggagatggagtgggagtaggagggtggggaagaggaagaaagaattgcacacctgaacacaaagtcagcaagcacttgtcactgaggccacactttcacatgcccacatgtgtcgctataataaccactcagtgagtcaggactaaagacaaacaagaaagtggtgtccaaaggaaattttggtctgaaatacttcacatacaaatctacttttttaaaag

SEQ ID NO: 25506 - DNA, 1772 bp, Bovine  19866881040829
  misc_feature (1)..(1): n is a, c, g, or t
ntcttgcctggagaattcccatggacagaggagtctggtgttctacagtccatggggttgcaaagagtcggacatgactgagcaatcaacactactacataactaaccaagttaggtatataattaaaattaattttgaaaaaagttagtgataaggactataagtcctattccaattttctgtcttttctaaaatcattgtagaaaagcagttaacattcacctttgccatttctttgaacatggtctctttctatattcactgcacatgtacacgtactgcctatccttctatctcgttgctctcctagaaacacatccttattttcaaagagagagttttgctttttacaggtgtgagaaaggaagcgaaagaatgaaggacctctacagttccattttcataatagaagtctgttgttctggaatgatttatatttgaataaggaaaaatgtaaggaacttggaacacagacaaaagtaccttctcatcaaaggttgtctatcgtttcatgaatcacatgtgatggatgagatttatgaattagaatctgtgtcaagagatttacaacatactaaattagttatgacatctcctcgtcggtgcgcataaactttcaacaaaatatctatatcatcaccacaggagcatggctggccagtgttttcattccactgcatcacacccagcccctgtcaactgtggttgatgaattcttgaaggcatgggcttcagatcaattaaaataaacaccacaagctgatttatcaaatcttttctgaatgctctcagaaaatgtcaaaaatctgatccattgacagagaaaagtcagagaatcgtggcagcctatgggatcacaagaccttttcaaaaccatcataaatcaccatagaaaacaaatggggcaccatgtgataagatttctcttgacagctttgcctcaacaagacatatatgagataaatggataccttcgtctatacccaattgccagtttacaaagtttcaagttgtcaaactgtaaaatacaccggtatcaaagtccttccaaataatataccttttttgggtatacaagagtggatttaaaataacacccccttcacatcatccctttcattattgcaagctatgtaatattcctgctagtaatgtgagctttctaaagtgtaagtgtatgtatgtacacgtgcacacatacacatgcacagcaggcttcaaaatgtaccttcatatacatcctggtctgaactaatgaaacttttccatttctcactattcaaagaaaactgctttatagtgctaaagtgcatccaatcaaggtaccctttggttttttcttaatcatcccagtcttgtctcatttcatataggttaagagcacattcagagacaagcaataacaggctaacctattctaatctataccaggaacagagaaatgcttccattaatgagtttttacaaatattatcaaaccctataggtagaggcacagtgtactgggttttgtatttcagagtaaattttaattctaaattataccccatatattcctctttaggaagcaaataggataggactaatttttcaaagcataagaaatcctatgaactagaaaaagaattccttgtgctacacccacgactggcagtatctcactgattctctttctatacctgtaaggccttactcaaattctcccctctcatgaacctttcctcttcaactgtggggggtgggtttagttactaagtcatgtccaaccatt

SEQ ID NO: 25507 - DNA, 1331 bp, Bovine  19866881079873
  misc_feature (1)..(1): n is a, c, g, or t
nacagcccagcagctaattggtattaactactctactgaagatctatttaatgcacttaggtaagactttttatttccatgaaattggatctttggtccaaaatttaatctcctgccaaggactctgtactacgtaggtgacgtaacatgtcattgccaggaatataaagaaattgatccgattatttgctaaataatgtttcttcatcagggctaagtcctcctctaagtgggctgtcaaagagaggagcaaaaagcagtcagtattagttggatcttccaggactccaattcagccatgaaaaaaatcagtgcactaaaaactgatttggtatatagattattaggttataggacctttgtctggaaggaataagcaaggcctacgaggtctgatcgttttgcaagtaaaaatattaactaaaatgaaagctataagacatagtattggaatgatatgatattccttcagaatatcatcattatcattctcatgacattaataatcatgaaagaaaacttacctaccattatagggaacataaaattcctaataaacaactttgtttctttctctcttgctgaaggttttcaaaactgttctgaaggaggaatgtagtctggcctgtctaaagctgttcttacattactcccatggtccctggacacagaagggcagaatcctcctcagtcttcagattcactttcacagataagaaaggacactatgaccaaagctttctataacctttagcctaaatttacacgtcaacaacaagagaaaggtatgtgtgcacaaaaatgctagtgagcccttcctgcccaagatggaggaaatgaatcaaaccattaaaacgctaaggcaggagaatgagtttattcaacaagtatttactgagcccttactatatgccaagcactattttatgtgctaggaatacattccattgattaaaaaatacaaaatccctgtcttcattgtgcttacactctggaggaaggataccaaacaatgaacattataaataatttacatagtaagttagaaggtaatgagtactacaggggaaaaaaaaaaaaaaatagagcaattgtgagaaggaagacaagtcttatttggaacatttcctaaaccggacacacacaaaaatatgcttctttcttggaaagtctacgtgcctgtcagtgaaaaaagaaaatatttctggccccttaatgttcatgggattttcaagcaagaaattacaggggttttaaaaatatgaaagtggaattgaaaactaagcagagtaactttcataaaagaggagctccatacagaatttgtgagg

SEQ ID NO: 25508 - DNA, 798 bp, Bovine  19866881080838
  misc_feature (1)..(1): n is a, c, g, or t
ntgaaagggaagttgctcaatcatgtctgacttttagtgaccccatagactgcagcccaccaggctcctccatccatggaattttccaggcaagagcactggagtggggtgccattgcctgaaagagatgctgagcaccttttaatagtcacagagataacaagtgactccttatatatgttctacaaatagggctatcttcacagctgagcttctggtttcaaattagacccttaatgaattctttcttctgatttaaacctgcagctctggctagtttacctcctaattggaattaattaatctgtttaccattggttaatttgaatttttttcccacttactctcatgtttgaatattggccacaatcttaaagatattcatactatcaggcacattcttatcatttgtgggaaagatgaaaaaaaaattactgagcataatttgtgtgctatacacgtcagtatatatgtttgtctaaatttttatacaattttaaagtttacttttcacttacggttattacaaaatattctctgtgttgtacaatatatcctcaagtctattttatacctaattgtttgtaccttccactcccctatccccatattgattttcttccctcctctctctccccactgataaccactggtttgttctctacatctgtgagtctatttcttttcgtgttatttcactattttgttttattttttagattccacatataagtgatatcatacaatatttttttttctttggctgacttacttcacttagcataatgccctccaaat

SEQ ID NO: 25509 - DNA, 1198 bp, Bovine  19866881107679
  misc_feature (1)..(1): n is a, c, g, or t
nttcctttattttgatgaattagatattgctacatagaagcctgtgggctttatctttaatgtgcataggagtaatctgttgtgcatgttaataagcaattcctgaatctcaaggatgctcatttggtcattaacaacggagccatgaagtctctgtaggttttcaaagtttcaggcagttttgaaaaactaagtcttccttaaaaatgatcttaaaaatccaggccttgcctttcaggtagttgacaatccttgatatttctgagcttttagtcattcatccagcatttagtctttcatcatttttctgaaatgagcattttcttaaaaaaaaaaaatggtacttatctccatgaagtaaaacaacagcacttaataaaaggacctaggctgaggtggagaagctctgtgttctacttgtatctgtgtacccagctaagtgacttcagccagggtacttaacacacctcagcatcctcacgcgtcaaatgaagatgtcacttcctctcctgaacccacttcagactgatgctatgaagaaaataaaaatgaattgaggctaagaggacagcacagaaactcaaggcatgattctgacttatatcatcacagcaatggcgggtcagatgaggaggataatgtgccgccctgctctcgacgcaggccaagttgcaatgcttcaagttcaggttcaaactatgtgaaagtacccctgccccaaaccatgcctttcaggccgttactttttctgtgtgtgccatacttctgaacatgtgtgtcatggctcatttaccaaaagttgagagattttagtcaacgttcaaggagcacgtccacattttcaatggcaaaaggcacattttgatcaatatgttaataaatcatgcaaatactgtatatacgagtatactttttaatagaactggcacaagaaagtcctcaatgctgcgaagtaagaaggggtgacacaagaaaaccactgctttttctttcaccttttagtcttgtgataaatttgcatacagcagaaaatacaccataaagatcaagtatctcaagtggaaattaaataaagctttgtcaaacttgacagaaccaatcatatacatgagaaatgacaagacaagcagtctttaggttaaaaaaatcttctccccaatttgcatgttttcaaaaatttacatacattatttaaaaa

SEQ ID NO: 25510 - DNA, 1914 bp, Bovine  19866881118361
  misc_feature (1)..(1): n is a, c, g, or t
nactactatgtacaaaataagctacaaggatatattatgccacacaaggaacatagccaatattttataataatataaatggaatacaacctttaaaaattctgaattactatgttgtacacctgtaacatataatattgcacatcagctatacctcaataaaaaaaaaagagcctccttcctctcacatgcctgagagatcaaagtttccatcccataataagctaacaaaaaatgataataaaatatggcatgcagccagtacagaaaaatgtattccatatctgctctgttccaaatctcttgatctccacagcaaaaatgggaaattagagccaagcagacatctcacaagaaaagcaaataaagacaaaatgaatgcttcgagtcactagacccaacttagggaattcatggtaaaatctgactgcttcatccactccttctttcccctggggacagggaaaggactgaggagccaggactgcgcctccgcctcgcctatctcttcctctttcctcctcccttctccccatctctccatcttaaaatgcttccttctttctctttctagattgttgttcttttctacagagtgttgatccctggattttcctggattgtcatgatttctgttgaaagactctcacagcagaagcaacacccacatatatatatgttgcctttcttctgctttcttgctccatcagagctctgtggagttattcagtttaattacttctggcactttgcccatcaaaatgtgcaattcttcaaagggatggaaatgacagtgaatctgcctcctcccgagcaattgaggttttcctttgaatcctgttgtcttggaaacaagtgagtttcattgaacatacacctaccataatggttaaaacatcagctagaggcatcactccccccacaatccattctctgttttgcccaactcagaggatgattggctgctagactagaaacaggctgtgagtgaagacatctggattctagccttacctctgaaactattcacatggctataggcaagtcaaataacctttttgagcctctattcccttatttagaaagtggaaaaaatagaacctcttctatctatctcaaattcaatgggaagattgaaagtggaaatagacatgaaaaagcactttggaaactgcaaaaggatgggcaaatataatcacatacttgaattattttcctcttgctcaaaatgaatcatgaaattttagctcagatatgtataagttctgtttattatcttgtcataatggtaaaacagaccacctttaaagacctaagcacctgagagctgaaaatggtcatcagtgaccagtagttactccctttatggtccattctgctaaatgaaaagtaaccccatgcagacaggaaagttgtgcccactactgttgacttccctggtggctcagacagtaaagtgtctgcctacaatgcgagagacccgggtttgatccctgggtcgggaagatcccctggagaaggaaatggcaccccactccagttttctcgcctggaaaatcccatggacggaggagcctggtaggctacagtccatggcatcgcaaagagtcggacacgactgagcaacttcacttcacttcttcactgttgactactcagggtatagtaccaggaacagcctaaagttacttctgttttagtcatccctggctgcataacaagccacccgaatacatagtggcttcaagcaatccttttctttggctcatagttttatgaatcagaaattcaagaaggtcttgcctggggcagttcatctctgccatatccaggcagttgggactggaggacccacttccaaggtggcttcttctatacatgtctgaaacctcagtgctccttggcaactctcca

SEQ ID NO: 25511 - DNA, 1863 bp, Bovine  19866881121841
  misc_feature (1)..(1): n is a, c, g, or t
natgagggtttggatgtgggaagtttattttggaaagggatcatggggaatagaaatgggggatttagaagagatttagttcagagatgatgacataagttgactgatttatttatttttcaagtaaaatagttaagcaaagtaatacatgttcccaaactggccacccaaaaataaccagggttaacatcggtgaacgtcattccaggcctctgtttgtgctggtaaaacaatgggtggataggcgtacttttgcttgaatgcatcacatttatttttcccattgaacttaacattgtttgattctttttttgggggggcctataattgctttacgacattgagttggcttctgctgtacaatgaagtgagtcagctgtgtgtatacataacatccccctccctctgggacttccacccccataagtcaccccagagcatcgagctgagctccctgtgctatacttcaggttcccactagttatctatcttacacatgctagtatatttcagttcagttcacttcagttgctcagtcgtgtctgactctttgcgaccccatgaatcgcagcacgccaggcctccctgttcatcaccaactaccagagttcattcagatccatgtccactgagtcagtgatgctatccaaccatctcatcctctgtcgtccccttctcctcctgcccccaatccctcccagcatcagagtcttttccaatgagtcaactctttgcatgagtattcatgccataaatttaaatcaacaagtccaactcttctcatcatcaataaaaatacagattcacaagctgtatacaattcagtattgaaataaattcacaggaatggtgaggattcactgtaaaagtcttatgtgccacaggttggagataaaactgatgcagttagggggcaattgaagtagtgttatgagagactataggacctgagaaagaaccagtgactgtgagatgagaagcgaaagcgtgcggcatgtgatatctaactgataggacttgatggccaatggcttatagaaagggaggacagtttaagatggtagccttggtgattggagattggtaatgtcctccactgagatcaagaatcctggagaagggataggttcgggttggggatggacgggtggtggttcattttgcatatgccgagctgggggtggggggctgtggcaatgtatatggtatgtgggtctggagtcaggagagagggtgtggctagggttatggatttaataaccttaagcgtttaggggaagataagagaaaaggaacttgcagaggagacagagaagccccatatactcctgtcagatcagacaggtttgtcgttttctcctgtgtttcttgcaataggtcttagacatgcaacctccttcctttcctgggtgctggcatggccaattctgactccccagaggttctgtccccagagggaggtgatgtccccagcttcttctaattcctcttcagattcctgaagacaaccaactagctcctcttagttatctgtccatttatttttgaaatacattttactcctaatcactactgcttaatataataggaacaatacaatttacaaacccataagatttagagaatcttaaaaaattcatatggttttgattcccaatctgtgttcctaactcccttgctgagatagtaactggaattccctttggtccctgctttctgctttcatccctaaaaaatgagagtattaacccttctctctccttctgagtcactcttctctggggaaggactccatcatgacctgctttctggcaaaggctcaggatgcaagctggacagaaagatatgtgtgtttcttattcc

SEQ ID NO: 25512 - DNA, 1012 bp, Bovine  19866881177574
  misc_feature (1)..(1): n is a, c, g, or t
ntgatcttgggctagttgggttctccaagtctcaaatgtctcatctataggatgaaaataagaatatccccttcttcccgggttgccatgagggttaagtgagaatacaatttatacatgtacagtaagcactgaataaatgtaaaccctgtattttttttctcattagctcatatgttttagtcttgaacattccacttctaatataaactattaaaatgaaagatgagtggattttctacttttactgaggttgtgttgattggcccaaaggtagaaggtagcttaggggaacaacacaaacagggcttctccattgctctaaaacaaaggttaggaaataaaatgacccacaagccaaatccaacttcctgtctacttttgtaaactttgaatggaacacagtcgtacttgatttgtttacatattgtctatgtctgcttttgtgctcaaatagcagcagtagttgaatagttacaacagagaccacgtggcctacaaagcctaaaatatttagtatctggccctttacaagaaaagttttctgacccctgctctacaaacataaaaaatccaatttttccaagtcacataactctgaaactgcatacattggaaactcatctcctcatggaaaaatgtaaaggctaccttcagaaaggtacctacatttacttcacctcgcttggtgctgtgtaaggctcttgcggatagaagactcacaaggagggtccttccccatgaagaatcccagtgccctgattgagaatcaggtgaatatgcagtgagacagatttctgtgccaatgatcagagcagatggctggggcaacactcaggccaccgtggtttgttattcttttccatatggccgtcagctccattacacagaaaggtggattttgaacagaggccctctgttgtcctccatctcacttccctgtctattggagggtactgagtgccaccaaaaggatgaggactaccagacagagaatcattctcagattttt

SEQ ID NO: 25513 - DNA, 1721 bp, Bovine  19866881232112
  misc_feature (1)..(1): n is a, c, g, or t
naaccctggtgaaagtgaggtgtaaatactgctatcagtcaaatgagaacttatatggattgcttctgtggaccattgcaaacaatgagctgaaagttatgtttccaacatggcaacttagcaatatccattgcccactgatagttcagattaaacacatagacacagacacatgcacacacacacacacacacacacacagagttaaggcagcagcccaaagtttctctctcttgaatattactatagaaagctgagaactgattatagagatgattcttttgtttaaatctgagttttcttactcaaagcactttgaggcctttcttttagtctgatagtggagggcatctcatggtctgtcgtccccttcccctcctgccttcatctctcctcggagggttctgtttatacgtatggagatgttttaagcaaactggagcctttgttggcttacaggagcctagaaactccatttattccagagatcaacaacatcaaattggccctgccccctacttcatttcttgcattaaagggctatattagtcttgccatgatgttaaatcaataacaaagaaaaccatttgatccgtgtttcttttgttaaagggacagatgacgtacttcagttatattttgtatcttatattcaaatcaatattcaggatacttaagcagggaaaaatttcccagaaataaatgcattttctatactcagaagaaatcgtttattattctagagtgtatgtgacttccagaagacaatctgaactattactgatgaattactattttccatggttacaggtgcatatgcagaggtgtagaagttcaggttttggattgtctagatcaacctttatcaaattcataaaatgagttccataaacacagaacttcacatatggacatgaattgcacgctcaccatggaccaggttttgctgtagtgctcactatgactgtcctacccactttatttcataggagtctcacaaaggagcttctattggcactctcactttacaggagaggagacagacacttaaggaagttaaacaatatacttaaggtcacggagtcaggaaaggcaggaccaagtttaaatccttggctgtctgatgtaatagcctatgggcttagtcactcttcagtaaggtggttttgaggtaaggagggttagaaaagggacgtatcttgaaacccttgaaatctgcaaagttaggtaactgttgctttggaccactggatccagagattactttagagaaacagaaattgtggaccttcacaactgttgttgaggcagctcagtacatcagtacatcaaagagtgctgagcctgaaaaaacgaggaactgtgcttctgtttactttttagttctaaagtctgtttttttttctttcttttaaaaatcttttttttttttgacttttaaaaaaaattttattttatttaaaaattttacataattgtattagttttgccaaatatcaaaatgaatccaccacaggtatacatgtgttaattggccaaagcctcatggtagatgatattataaaaatccagtagcttgagaatatacttacaaagaaattatcataattttggaagggcattcattagttaaataaccgtatatacagaaaggtcgttaatctttgcatcattgacatcattttcaaactgatcgtcattttcattattcttaggtagca

SEQ ID NO: 25514 - DNA, 1283 bp, Bovine  19866881232820
  misc_feature (1)..(1): n is a, c, g, or t
ntttgaggctctatgtctctgaaaagtgtaacagtattcaataataacctgccttccgctgcaactcagtgatatgttaaagattgcttaaaaacatgttaagtgttgttgtgggaagactggttctttctttgcccaagaggctaattggttgggaagagttttaattgtaccaagagaagttcagcttgggggtacgcccagcactgggcttcccgggtggtgctagtagtaaagaacgcaggagacataagagactcaagttcaacccctgggtcgggaagatcccctggaggaggaaatggcaacccactccagtattctaacctggacaaactcgtggacagaggggtgacagttcatatagtcatgaagagtcggacatgactgaaacaaattagcacacacacacaagcacacacagcactaatgtaggggacagtagggttttggtccttctctggaggtttctaaaagcatacatggaattcatcatgtaggagtctctcctcctacacaagtgtgaacagactagataccatctgggtgtttcttcctacctgaggttgagaaacattccaggtgtccggacatatcagtgcttcccctgaagcctcgcttcagctctgtgttgtcttgaagtgacaactatggtattccaagcttcacaaaatgtaactgtcttgtcaaatcaatagacgaattttcagggaagaccaaaaattctgtcaacccattcagcctttctaagactacgcatatattgcctttcaatcaacccagacacccagaataaattgaaggagaaaaaacttccagagtagaacttacaggcagaggttatcctgatgaaaaatgcaaatagaggagagaaccaataaaatcaaatttttaaaatcctattatctcgttttagtccctgctcacctctgcacaatggtccattacaatgtggtttccagtgtcgttttaaatataactgacattgtttctgatcttaaagaatttacttcccattaccaaggcatgacagaagttctagcttgggatatgtcattttctgccgggactaatcagctagctattttaccaactagaggcataatcactagccattctgtgaagtgtctgtaaactctaagtatgtcagtaactgcagtccaggcatgccgctcacttataggtagctccttttccattatacagcttttataaagcatgtagacaaacaagagcatcccatttttgagtaattctagatctttccagttggtttcctgtgt

SEQ ID NO: 25515 - DNA, 1589 bp, Bovine  19866881256421
  misc_feature (1)..(1): n is a, c, g, or t
ntggcttattgttgcctgaaacggttgtaagtttccagttgaagggaaacgcatcttttaacctgcctggaatagccctagaggcaaagtccttgagttctttaatgatgagtggtgttaacaatatcataattgtcaaactcctcaaagaaaagtagcatggaaatgtaaaccattcttcatcttaagctgttcttttgtaataaactagtgtcttctctctgaaatgtatcttttccctctgtccactggacagatcaggggagtgatacagtttggctaatgacccattagcatccagatcccaagcaccttggcacagtggaggaatgttaagttctgtggattttacctctaggacacaagagtggtggtgcccaatacctccatgttgtcatgccctcagccccgtagctcaaaaacagtgaatcagaacccagaagtcaacatgaatgggtaagtgaagcccctaaccaacagaccaaactgtcaccatgccatagagggcaacagaatccaaagcctggagaggccccttgtccacacttcctctccagcccgtggttctcctcttggggaaagagcatcagtggagtagagatgccacaaaagcctgtgacatattttggcccccaaagaatctttttcttgctgcatacagaaatcacacctcctaattatgccatccagtcctgagaacattaaaaggctagtgctctgctagtgaaaattcataggcacctgctcttgattttcttcctacttagaataattttcacacagctgtgatattgccaagtgactattcaaacgttgaggctcagacaagaagggatatgttggatgtttgggttgtaatgatttcagctcttcctctttttttacagcatcattagtaatctgtcattctaataataataattcccttttgacatcatggaggtaagaagaaatcatcactgacatcaaaaatgaggtgatatttcagcagtattatttcactgaagataaaatggaaagctttattactccccatgcctttaaagaaagctgaacaaggcatatgctgaccctagagtttatctacttgagttccttccagactgatatgaaataactaattttaattgttccagccagagtttcagaatgtggtttcccccaaagctttccatctacataatggaaactttctcaaaaacaagctttatccatccataacaaccaggggaatcaaaagaaaagtctattgtaactaagaacaatttataattttcattcttcagcataccttttgttccaagtatttagaaattgatttcactcaatcatgcagtcaatactggattgtgtacctgttgcgtattacacactgggactgggtactaggaagacaaagatggataaaacagaatccttggtccagaaaacggagcaagcacacaaagaaagggccaagataatagagatcttgttcaaggataatgggaggaagtacagacaaaccctgacttatgtttttacttatgaacttgcaactttacaaggtgcaagagtgatacacattcagtagaaaccatacttcaaat

SEQ ID NO: 25516 - DNA, 1917 bp, Bovine  19866881260460
  misc_feature (1)..(1): n is a, c, g, or t
nctggggattcagaaatgatagggcactccatttaatggttcatacttaatgtgcccacttgcctgttcttcccagctaaatagttaaagtgccatagctctgttgtaagctacagtgattgcccaatgcgtggtttttatgcaacgttcatttattcgtgtaaccaacagatagttattacctcttaataagagtcagatactctgctatgttttgaagttacaaaaagcaacatgtataacaatgaattaataatttgaatttattaagaactctgcaaatcagtaaggacaaataagccaagaaaaaatgagtaagtgatataaacatgggattcacagaagagaaaaatataaaaggctaaagaatatttgaaaaggtgttcaccttcactaagctagggaggaaaagcaaattaaaatcagcacaagatactattttatttttacctactagtatgacaaaaatgaagtttattaatattcagtgttgttgagttgtgggaaaagagctgcttcctgtgcttctggtgggaatggtaaatgatccctggctttggaggccaatttagtatctattaaaattgtttctatcaagaacaattggaaacaacctaactgtccctagagtggatagataggacatggtctattagatggtgaaatattactcagagaaaaaagttagagctatccacatcaacatggattgatctcaaaaatgtatcatagagtgaaaagagcgagctatagaattgtatgtattttatgaacatttatgtgaaaagacccacaaaaattaacactatctattttcaatggcatagctaaacagcctagtaaagacacatattagattatagtagaggttatttcttgggttttggttatctcttgggtttgggggaaaggattgaagaaatctaggggacttcatttatatttgtaatattatatattttaggcaaatatatcgtataaaattataatttatttctaacaattaactagagagaaacaatgtaaagaaagcaattcttgtctttgactgtggacaaagctgggattagaacccaggtctctaatttttagtgcagtcatttgtctcttggatgttagatacatttaatttgacttgctctctgcaaagtgagatcttttccagttggcatgaaagttaaggcactttatttctatctttgtagggaatagatttttctttacttttttttttttgtctgagccacatgacatgtgggatcttagttccctgactagggaatgaacctgtgccccctgcattgggagcatagaatcttaacccactagactaccaggaaagtcctagatttttcatttaaatgaatttttaaaatttgaatagatgtctagaatatttataatttatatgttaagtattattgttgttgtttcatcgctaagtcatgtctgactctttgtgacctcatggactataggctcctctgtccatgggatttcccaggccagagtactggagtaggttgccatttccttctccaggggatcttcccaactcagggatcaaactcatgtcttctcttttgtaggcagattctttacccctgagctacctggaaagcccatgtgttaagtagagagactcattaacctacactcagttcaggaatagaagacatgcatttttcaaaatggaaatggtaacaacttttggattctcccatcagagacaaaacctaaagggcttgatagtttcatcagcaccatttccacaatcactagcagccaaacaaatggccctatttggaaaattggaatcttttcctttttgagtgctaaatggctactcggtgatttatttgggctgcttctagagggcaagaagtcacacaaagctctgagtagatgtttccagag

SEQ ID NO: 25517 - DNA, 2269 bp, Bovine  19866881383433
  misc_feature (1)..(1): n is a, c, g, or t
ncttggaccatagaggccaggtaacctaagcccctttaaaggataaagacaccaaggcctggaatcacataattagttgcagggtgaaattagatggcaggcatccagaccactgacatcttccttagagtggagctgtttaagaacataaggattatgtagcattgatggagtactttttcttcttttcagagcttcacagtggggagaggctgagttggtaaggaatccagcctctaattatttgtggcttaagtgacgttcattattggctcagtggtggctcttataatcctaatagctgcttccagggatgggtaattccctagtcattatagtcaacttcattcatctcttcttccctagctaggcccatcatttctatctgctaccaatcacctttccccaagccatcctttgcttggtggtatcatttgttaaatctcaattgcggtaacctcagaattccatctctgaaagatgttcaagctaacagcttaactttagctttaagatggcactgcattgacattcaaagacaggatatggggattgctagctgcatggggatatagagtttgagagatatggtaatttaagccttaagatcattgtaaaactgagctactcttcagccttacttttgttctagtatgcagtatgtatgaggcctttcaggtacatgcctagttcacatcttcatgtcaccactgggagtgacttggcactcacggcactgaagctaattcttgagccactagtgcattagtgtgggctctacttgactggttatttcaccaaagaaacagtctttccatttgtgaaggaaattgtgaaccaaattgctacatgtatgtttgaagatgtgcttttaaaatgacaaaacccctactgatctaggtagaaaataaacttactctttagcggaaagacctgcctgctaatcattcatttacttatcaaattttaaaacaaaagcaaaacagaaaaagggaattctctgatggtccagtggttaggattctgagctgtcactgccgagggtacaggtttaacccctggtcagggaactaagaccctataagcactgtggtgtgcgtcctgccctccaaagtaaaatttaaacagatatgttccatgttttaggaactgttctaggtacttaagaatacatcagcaaacaaaaaggaaaaatatcccttttctcatcttgtgttaccaatatcttccctgcaagtatctcatccctataaagatattttaaaaacaaggcaatgtcctgtgaaaataactggctttttacacttcgtctattttttcctatcccttcctataaattttccagggaacatttaatggtttgttactttctttgtagtaattccctaatactaatttttagtaggatttttagtttggcttctttctctatttctccacttgaatgatacaggtagtgttttgacaaaaggaagagaatcatttaatttgataattgtcaataggaaaaagacaagctttgaaaaatgcattaagatgtctgtgggtttttttctctgaactggatttgactgtcatttatgcttctctgatggctcagatggtaaagcgtctgcctgcaatgtgagagacccgggtttgatccctgcttcgggaagatcccctggagaaggaagtggcaagcccctccagtatccttgcctggagaatcccatggacagaggagcctggcgggctacagcccatggggtcacaaagagtcggacacgactttcacttttcagtgacacacagcagtatgtgagctcacagcagtgtgtaagctcatggcagtgtgagctcacggcagtgtgtcagctcacagcagtgtaagctcacggcagtgtgtaagctcacggcattgtgtaagctcacagcagtgtaagctcacggcattgtgtaagctcacagcagtgtaagctcacggcagtgtgtaagctcacggcagtgtgagctcacagcagtgtgtaagctcacggcagtgtaagcttaaggtgtgcaacactgcttttggatgacagcttgatagattcaagttttacattttataactagaaataactcacttgaaaggcaaatgttttaattatggttgccaaagcagaaacgtggtggaaaggggaggggtaaatcaggattttgggatgaacacacatatacacgctactgtacataaagtagaaaaccagtaagacccactgtgtagcacagggaactctacccaatatct

SEQ ID NO: 25518 - DNA, 1194 bp, Bovine  19866881434397
  misc_feature (1)..(1): n is a, c, g, or t
nagagtcctaaaagtgctagcatacatctggacctcaggttggtcgagagaacaggatggttcccagccatctccttccctcccccatcaccactgcttcctgcctctatatgataagaaagcagcaactacagtaccagtgagggaatcatcaacagagggggaataacacagatatgctgtcacattatggtggcatttgccaacgtaaaaattattacaacttttgctgtaaattgttctgtaaatttcacaaaatatgcaaaaattgacatttcaagggctgagatcatttaaatttatttaaaatttgaggcccttgagattcagcaaaagaaagtctatttctttatctagctttcatctgtgtgggtcttgttttctttttttagttccttgtttataattcataggtcacaactggccatatttgggctttgaccacttaatccagttttacccatcaatttctcctttgtctcaggcagcagatataaattctctgaatcccaatttttctttttttatcagatcatgcagcaatcctggcctgtctcaaaaagttgacagaaaagcttgtgatatctggaaagcactctaaaatgtttttgacatagattggttccacagtctttacagagcaccagtctttaggatacttttctcattatgttgtcctctcttaatatccaccctaaaacacacacacacacacacacacacacacatcctttctccatgctacagtcatgtcacacatcaccaaggccaagcttccttggttctctccctatagaacattcatcaaaatccatgcttctcacctgagacccttagaaagcttctcttctaaaactgctgctcttgtctgtcacatgccaattatgtctttttacatgagagacatccctgtcagagctgggataaccagagcacatttgccagcccttgaggtcacatggccatggtatgtgtgtactggggattagtttgttaggtagcctctgaaagggcccgtgtggcaggttacttctgcccctgtcctcagaaaggcatgttaaagcagaaatctttatcagaaattaaactcttttctaagttgtcttctctccttctccctcaccacccttagcaccatacccccatgctcttgaaataaagtgtaagggagcagttattatttcgattttcaat

SEQ ID NO: 25519 - DNA, 637 bp, Bovine  19866881562726
  misc_feature (1)..(1): n is a, c, g, or t
nttgatgactgactagaagtggtgaaaagaggctgggatcctggataatgacaatattcacaaagagtccaagaggaaaagtctggctgaaaagacatgaatgctgttaggaagaggctgaatctgaggtacctgagagacacttaaatggaggtatacagggggcagttgggcacatgggtccggaactcagtagagaagcctgaacagaagctagaggcatgtggattttcagtacgtgctggtaattgaagccatgactgcagacggggcagccagggaaagcaatcagagtgggaagagcagactgaagcaactctacatttagaagatgaaagtccaaagggacccaataaagggaactcagaaggagctaacagatttgacagcaaagaggactagccaaataggcaaagccaaaggaggaagggacaaccagcagatcaaatagctcagggaggacaagaaaaagaggaagggacttaccaatttgttttgcccatatggggcttaactgatgactcattgattgtggaatgataagggcagaaaccagattagagagggaatgagaggtaacaaaagaagagataggatcagacttatcttttgcaggaaggagagagaggatgatgag

SEQ ID NO: 25520 - DNA, 623 bp, Bovine  19866881669888
  misc_feature (1)..(1): n is a, c, g, or t
ngtaatggatgtggcaaatgtgtggattttgttaggatttcttctgacagccatgaacacagatatattttaaagtaatgtaactgtcctaaatctcgagcagggaatacaatgacttctagtattatttttcacttctccaatgacactccagaagttatatttgataaattccttagaagttatttgacttaggaagggccctgtaccatttaaccttggttttgttctactcagacctgtgtccaaggcccatctaatgtaatatatcacaaaggttaatacgccaaggccttcccagagcatgattccctgggaccgcttttagggaaaacaaccttaaagtgaggctttttgcaacaccggtaactattaccagtctaggtttaagtatgcctcttttaagcccctttctcctctataaaaaagcataagagaaaaaacctagtgcgtcaagaatcaggaaaggtggataaatatacataatcttctttggcttggccaatctcaagaaatagaagctggaaacaaatatagactatcaagaattgtgctgctcttaaaaatgattagttctgctttatattcatgatcactgaaactgccatgtatgatataatctg

SEQ ID NO: 25521 - DNA, 657 bp, Bovine  19866881768400
  misc_feature (1)..(1): n is a, c, g, or t
nttgagtatttttgccttaaaacaaggtagagaaaaaaagacagtaacttgaggtcagaggcccagttatacactaattctgtatcagtaaggctcacaataattcggaaagagggtccatttattttttttatttttttatttttttaagagggtccatttaaactgatgcttacagaggcttttgatttgcccacagttgtatagcagggaagtgaccattaattcaagtttgtcttcttttttaactcttagtacaaaattctttatgataaaaaaaataaaataaaataaaaatggcttatacttgaatgaaggtgagctgagcctgggcaggtagctgtgacccctgggccactacacaccaacaaagacccgggcttcgtagcctgctctgctgctgcaagtcccaggggatacatatgacaaacattcttcaccagtaacttagtcgagaaacccaggtttaagaaataaaaggaaaataagactttccatcctcacatattgcatggacaacttcaaggattcttagtgaagagaatattgttaatgacaaggagaaaatattttgattataaatgttaatggactagacagaacagacaagtgaaagacgttagcatatgttctcctgttaaagaagagtgactattt

SEQ ID NO: 25522 - DNA, 995 bp, Bovine  19866881820768
  misc_feature (1)..(1): n is a, c, g, or t
ncctgggagcttctgagcaacagtgagcacctctgagcctaactgtgggaggtcactggaagcctcttgaaatgcagagtgaaatctgccgcctgacacgttcaccctagctgtttggctgctttgcatgcctatggggcaagcaggctattttgagcagatttcataaccctctttgtagctgctgattgcacatgtgtttccagctccgttcttgtggcgagaatgtttacagagacggtgcattgtcagagaatgaagagaaagcaagattgggagattaggaggacaatttccatgtctagacagagttcgcacagccggcgtctgcgccaatcagggtccctggaattcggcaccctgtgcagaacaccctctgaaccctttgtctcatccggagaactctactctgaaatctcccaggtggtggcaaggggagaagagagctctagggcatcctttctgagactaaatccagagtggatttctgagtgttgtcataggaaatcaaaatattgggaaaatctgtgaaagcctgcatacaattttcttaaaaatctcaaatctcaagcctgattctagcgctggtgcacgctgcctttcaatgtcttggccagcaggactgtcttcatcattgtgttgcttatttatttatcccagtctgtttacctcctgtcagcctgatggtgcgcctgcttacctgtcttgtttttaatttatccctttgcttccgtttgccaccctggcccactgcgttcacgccgtccaaaagcactgctactcagttgcactcagctttcatttttgagccccaccatgtgtgaacaactggctccatcgatccccttcttgaacctttgattccatttgttatgtgtcccttttgccctattctttcctcctgactcctgtcacatcctgggtcatgactgcccatcaaaagctacctcagggcaggatctgtgccaatttactattaccaccatcacagccat

SEQ ID NO: 25523 - DNA, 981 bp, Bovine  19866882133081
  misc_feature (1)..(1): n is a, c, g, or t
ntcatcatcctggggtacaagaacaactggggagctgagagagaaaaatactttctcttatggaccaatcgcctagcatacaaaccactaaaatggcttcccttcccccaaatggtatctttcacttattactaacactgaaaatttctttcagagacaaagcctgtctttctgcaattagagaaaacaggcttaaaatagaagtgctgtgggatggtaagcacaagtagaaattaggtcaaacccatgtgtgaatgtctaatgtcagatcattgccagttttgctagcagacagaggttagtacttcagaaatgctgggaccccggagggcccaagcatcatcccactaaaagaaaactggaacatcaaagaatatgtaggcatgtatcaagatattgttcagagtttgttctgttgactttttatggaaaaccaaatagaacccaaacagatattgactcttatctctctcttcgtcacctctgaagagaccgtgtcttgaaatcctactctctgtcttcgtttcctggcatctggccttctgaattcatattctgaatcctacaaatcatgaatacctctaacctagctatttccaggtctctgcctagatccctccatcctccagttctttcctcaagagggtaacttgaccatgtttcagcttactcccagaatggcccttaaatttcctccaaggtgttgccagatcctttgaggacaatgatcatctctcatgcctccccatgcccttgattatctgatcattcgtccctcatattaacgtcatccacaacggctcttattgctcctttcagttatccctctctccaaacaattaggtctccacatgggtagacagtcaagacagagggttttctagggggagaaatgaatctgatgccttttatgtgcctgcagagctccaacttggtttaataatccctgagcaccactttgcgtgcggcaaggtataaata

SEQ ID NO: 25524 - DNA, 708 bp, Bovine  19866882211335
  misc_feature (1)..(1): n is a, c, g, or t
nggtttttaataggatatttaggactccagatctatcaaatggccttctccgatggatattcagggtgtcagatattcagtatgccagaacacaggttggagaactgtgaaggaaatataaagtcaatgaagaaggtagcattcgggggcttcagggagtacaaagataattgtggatcaattgtgccagacaatttgaagcaacttaagactgccgtcagtactttaattgtttctgctgcagagtttgaaagagcatttagttcaatgaatgatgtgttaacacctagttggcgatgttctgtccattagttgcatatcatctttgtctttttattaagctggttggtccactgttccacatgcttaagcctaaagattatgtcaagaagtggcttgtaagtggcggcttgaaagccagaaattgtagaaatgtgacaagagaagctctcagctcttctgtcttacttttattttatttgaagagtctgaactgtttccccctccttaagcctgggctcctgggcattgagcgagtcaaaaactacaattttctcatgtaatgaaataggctaaaacgagatcatgtcagtcctaagttaggtaactttttcactttgggaaaatcaataatacctcccctatgaacacccaacgtatggtggatggaaaactatatgcggccctctaaggagttagtaagggtcc

SEQ ID NO: 25525 - DNA, 2005 bp, Bovine  19866880466733
  misc_feature (1)..(1): n is a, c, g, or t
ntttgctagcccaaattatttcgctcagatagcactcagggtattcaggccaggtccttactttaagccatgcagcccgcgccacacctcccctgcccagcccccacttgctaatggcgggtgcaggcgtctgcgctgcttctccactgggcgagttaccgtaggtattgaaatctgcgggttttaattgtttatttatttttcctccatgttatgttgccctttgtgcttccaaagctcggcacagattcggcagtgagaaggtttcctggtatttggaaacttctctctttttaagactcccttcccgggacagaactctatccgtccctcttttgtctctttttttgtcttttttattttttcctacctcctttcgaagacttgggatgcttttctgggtgcctgatgtcctctgccagccttcagaagttgttttgtggaatttactcaacgtttaaatgctcttttgatgaatttgtggggggaaagtgttctccctgtcctactcctctgccatcttggctcctcctcccatagttgactcttgaacaacaaaggggttagggatactgaccctccaacagtcaataattaacatattacttattattttgcctccaaatactcagttactccaattctgagattctgcatttgcagattcaaccaaccctggatcttgtagaactgtagtatgtactattgaaaaagaaatctgcatataagtgtactcatgcagttcaaagttatgttgttcgagggtcaactctgtgtgtatgtgtgtataatagaatgttatgcagcctttgaataaaggaaatcccgctattcatgataacatggataaatgaggaaggcattatgttatgtgaactaagctagacagaggaagacagatactgcacaataatatgtctgcatgtctacagagaatagaatagtgtttgccaggggctggagaatgggagaaagaggggaaggctgctaaaatggtacaaaatttcagttaataagatgagtaaggtctgagaatctgatgcagaacatggtgactataattgatattatggttcagttcagttcagtcagtcgtgtccgactctttgtgatattatggtattgcataatcaaaatttgcaaagagagtaaaacaagtgctttcattaaagaaaaaagtctatatatgaggtgatgaatgtattaattgatggtagaaattcttttacaatatatacatgtatcaaatcattgtacaatttaaataattacactttgataggtgaattatactgcagtgaagctgaaaaaatacttgtaaacgttgtgaattttatgttgctgagtatctcaatttgttgccttttataaaaataggattgtgctttacctttgtaggaagttaaattgcagaagagtataatcttttcagaacttgtttttcaactctttcttagtgtgactctagagtagtatgttttacaaatattttcaccttactaataaggtgtgaccctgcaggagtctcttctttgtaccctgggtgattaataaggatgctattctggctgattgggtcatgactgcctcccagccccatatgaggtctagtaattgtttggcttatagtttcatagtctttctttgcccatccctgtggaacttcactctacacatgtgcagcttagtattcagcaaagactcaatgagacacccacacagatttgtggatttccttttctgtttcagttcagttcagttgctcagtcatgtccgactctttgtgaccccatggactgtgtagcatgccaggcttccctgttcatcaccaactctcagagcttactcaaactcatgtccatcgagttggtgatgcaatccaaccatctcagcctctatcatccccttctcctcccaccttcaatctttcctagcatcaaggtcttttccaatggagtcagttctttgcatcaggtggccaaagtactagagtttcagcttcagt

SEQ ID NO: 25526 - DNA, 1771 bp, Bovine  19866880468388
  misc_feature (1)..(1): n is a, c, g, or t
ncttgcagggttgctgtgagaattcgagttagtaattgtccaaacacatggctcatagtagagactcagttgatagcaactattacagtaattattcaatcctagactctctgcaacgtgtcacagaaatcagctagaaaaggtgatggggaattgctgcagtagaaatgaatggtgcaattttatcacttaataactctgggattgagaaaaatatataacctctccaaatccaaacctctcatctatattacctgatttatagggctgttggaagcattgaaacagccatcatgaaaatgtttccactttaaatgtaagatctctggatacaatttgactcaaatgtgcgctggtagggatgttccttagtgaagatgagggaatctgaggtgtgccttcatagttctgaaagcagttcctaggctaggaaggaaatggtttttgcagttctttcttagataaatagaaaaactgagacttaaagaagttgtgacatgcccaagactgcgacaaagtcaaatagtaacttggttctctggtctggcagtttctgtcgaacaactttaaaagcaggagatggcccaatgtcattgccagagtgcttcccaccccctgaccccccaagttttcacgaaggaggctagtggagcctgcaataccacttttgcgagaatttgtcaaatggttctcttgtcccagaaggtttacagtatgtaaagtttcaagcaatcccagggatagattgtagtctcaggtactgtaaagaaaatacttttaagcttcttttaaaaataaaattcctctgagatgtttggcctgtggctaatgtgtttgaaacatattttctgtaaaactcaacctcatcaatctacttgcaaatccagaaaggcagcttttatcacacacatcagggcttgtcccaaactctccccattcacagtgggggataaagagaaatgaaccgcaggctcaaggtgtctccatcccgttttcccccagtagttcagccactgaggatgtgggtctactgctacactcagcctcagctctggaagccagtgcttgagcccagactccaatagagagaccattttcttacccttgttttagcatttctcactccctgtgcctagatggagcttggaaggggctgaaagctgtcaccctcttacccattagtagagtccttcctctccaagaaaggctttctccccacttggagtcctggttatgtctatggctcctcaagagtcagcctgtgatggttcgactattcattcatcagaactgtcagacctgtgcatctcctctcccttcttctggctacctcactctgaaacatcatcctccacaaattttgaaatcactgaagaaaggaaacaacgtaaaaactcgattccaactaacactttgtaatttattgctgtatagctggaggagttgccatttaataaatggaggtgactatctcaaaagggagtgaagtaagtcagaaagagaaaaacaaatttcgtatattaacatatgtatatggaatctagaaaacaaatggtactgatgaatgtatttgcagggcaggagtagagatgcagacatagagaacaggctttggacacaacgggagaaggagagggtagaatggattgagagagtagcattgaaacatccacgtaaaagagatagttaatgggaagttgccatgtaacacagggagttcaagctggtgctctgtgacaatctagaggggtgggatggggtgggggggggg

SEQ ID NO: 25527 - DNA, 1099 bp, Bovine  19866880532486
  misc_feature (1)..(1): n is a, c, g, or t
nagctggggttcgccctgcccttaggaaatctgatgtcatcatagagggaaactgaagacatggaatgagcacgatggaaatatagtaagaagcacttgaaagaggaggagagtgggaggaagtgcaagagcagaaaaagtgagcagagagagagagggcaggaaaatgacccaggttaggggtggggggcagtggccaaagtggaaagaggtggggggacccagagggcaaaggagcagtagcaaggagaggggaaccggagggagaaagaaatgagagaaagacacacagactgagagaagactttgaagatggccttggccccagctccagtgagggcaaagaagtactcgcacaaatcataaacagacatgctcttcatcctgtgctgacgagatgtgattcctggatttccctggagaaacagtccaagcaaaggtaaccagagccacttataattagcagctccttccctcaagaacccagatttcactgaattggcttctggtgaccgtacaagataatcctgatgatgtttcaattaacagtctatgagaatacaatttctgctggaaaaattccaaatctgagcccaaacccaatgacagcattgccttggcagcatgacacgatgatttcatttcacaggttagggtaaggccatatcccagggtacaccatgccttgaacacaaaagttcctcatcacagagccgctgtgctgggtgtgccagactgacccctcaaaataaatgtgatcgtgacctcagcattatcagatgcagataaaatgccttggaagagaaattgtgagtggaaaggacaaaaggacaacagcaggggaactggggcttccccttgatgagagatccagctggagtcagttagagcataaactttgtttaatcaaatcctcactaataaactccctaaccaaatcctaacacaggtaaacgatgatgcacttggaattcacattgagcttgcatcactgcttcaccaggtgccatgcataaatctgggatgcaggcttctggggctggagctgcagagatgttgtattgggggtatgctcccaccactagacttgtgccactgc

SEQ ID NO: 25528 - DNA, 3126 bp, Bovine  19866880534963
  misc_feature (1)..(1): n is a, c, g, or t
nccgagaagatagatcctacctgcctcaggacaagtaagcccatgtgtcacaactgctgagcccacatttctccactactgaagtccaaaagctctagaacctgcggtccccagcaagagaagcagccacaaagagaaacctgaacactgcaacaagagcgtagcccttgctcacaactagagaaaagccggtgcaacagagaagatccagcacagcgaataaataaataacattatatatatatgtatcttgccaaacagaacttatcactgcatcagacctgatccattggtccagtttgtgacccctgaactccaaattagtgcctccattttaattaaaaacaccaggaaatttggattaaaatttccgccttcttagaggcacactattcaactaccaagcccctctgtgtgccaggcacagagaggattctaggatgttctcattttctcatgacttctctgaccacagagccttctcctcccttgttccatccattaggatttctatgcatgggaaagtggggaaaatggaaatagaaggggaggaaaacctaggcatggaaggaaagttggacccatgtcccattccacaggtgggggtaaaactataaatggccatctttgtttcctcagcagctggcccacagctcatccatcaaaaggctcagtaacgattacagcatacatcgatggattacctactgtatgcctgcctggcaagggcatcatcatattagtatatattttattcttcataacaggacccctttgtataagatgaagaagccaaagcctaaggaagctaaataactggctgagttcatagagctctcaagcagtgggactaggatatgaatctccacgtgtctgactccagagcactcatttttaacattataaggagtgaatgcatgaatgagtgagtgaatgagtgaattaataagtgagcgaccaaagccctcaccctccagccctaccctgccaagcagtgcctgcactggttctgagacttaaaagacctgaatggcaaatttgcaggtttctcagaggaatcttagggccaccagttctcttaatgtctcagggggctcctacttgtcacaggcctcccaagagccgtcagtgttaaacacacattcagtccccttcctgtcacgctaatacacttggcatcatttgcctcttaaatatggtgaaggggaaagatttcaagaaagcagcaggttttatgcatcaaggagggctattatttaccagcgaactagtttctgttgtttttgtctgttccctagtgtataatcagagctcataaaagtgctactgtgtgggaggtctacatttcctctcgattaagcgtccccagatgctaatagatcttgacacgccgtgcctccctgcctgcttcggttcaccttccagcctcgctctcccgccctgctgcagcccaggagctcaggtcatccagccctgcggttgcgtaatcagtcactcttctccaatactgcaaccttgatgtctgcctaagactgtctcttgcttgatgtggtcaagcgtctactgtctgctttgattcagaaacctctccttcatcagaatctgactcccaaggggggctgggtttccttactggttttggaaagtaccaacagtattcccctagtgccttcacacgagtccctgggtgacacgtgctggcccgatggctggacaggcagtcagcaagcatttctctacattgcagttagcaaacttgcactttcaggagctgttgggatgaaaccaggaaattctgtggtcctccagatagccccaatgattctatttttgcaaagtatcatacccaaaggatacaaagcatgacccaaacaggagcctctttgcttttaccccagattccctccctcccatccaagaaaagctctaggggcttaatggctccaccctgaggatgttggcctttgttatccaggaaaggacactgaaagggtcttagaatgacatgatttggaatctgcagaactgggggtcacattattgctctgccatgtgttagttttggcatctgaagaaaatcactgaatctgggggttcattttcctcccccacaaaaatgagagtattaaggacaaaaattgcctcccaaaattattgtgagaatgaaataaattggcatgtgtgaacgtacttgggacagagtaggttttcaccaaacgttaaatgattttccttaatgaagggacgaaggcgtcccatctcattttcccttctcactactgaagtgaaagaaggatcgtggcctccagggagaagtcctgctccccaacctgagagcacgtctctcgcagcgtgatggtggagtttgggccattctagtcttgatttcttctctccatctggccaaggagtctggtgggggtttttttttaagacttttttttggatgtggaccatttttaaagtctttattgaatgtatcacgatattggcttctgttgttttgttctgtttttttggctagagtcgtgtgggatcttagctccccagccagggattgaacctgcaccccctgcattggaagcaaagtcttaatcactggaccctgagggagatccctggtgtcactttaaaactctactcttttaacttaatttttttattatgaaaaatgttacacttacaaagaagtgaaaagaacactaatcatgaacaatctaccagccagttagcgttttgccatgttatatattatacatagtgtgtttatatgtgtatgtgtatgtatatatatatttatttgttgaactattatagacttaatgactcttcatcccaaaatatgtcaacaggcatatccaaaggaagtcattctttcacataactacactgacattatacattaaccaaattaaccatttcctaatatcatctaacactcacttcatgtcaaattttctgaaattatttccagaatagataatcaaaggtacattgttgtgtttcttaaatgtttaaaaatctaaagcagacttcttcccactcgcttccagtcccagcttacctgccacacatacacacacactttgtctcctttgatgctaaatttattcctgtactaagatg

SEQ ID NO: 25529 - DNA, 1415 bp, Bovine  19866880545430
  misc_feature (1)..(1): n is a, c, g, or t
natactggagtgggtagcctttcccttctccaggggatcttcccaatccagggaccaagccaggtctcccgcactgtgggagctgagctacaagggaagcccaagaatactggagtaggtagcctatcccctctccagcgaatcttcccgacccaggaatcaaaccagggtctcctgcattgcaggcagattctttaccaactgagctatcagggaagcccaggcatcttctgggttattataaatgcaaaatctcaggcctacctcagacccacagaatcagaaatgtcaggggattttttaacaagatccccaggtgattcatatgcatgttgaagtttgagacccattgctctaagtgcaggctcatctttttaaaaagttgcttcattatccacctctgaaagctcctagtgaccaaatctaagatttcacacaggatcctctgaaagcaaagatttgtgtgttaatctgttgcaacacctaccctggttcccttactaatggctgatccaccatctattcctggcccccagccacacagcatcctccctgccatgcttcctaattggtaatctgccacccatgaccttgaccagatggtgtactgccttgggacccctggcctcatcagctgattccgcactcaggcagagccacattataaagcggggttagtgcctggagcatccatagagatggatgagcctccaaagactgtggcatgcaattaaagggaaagaactctattaagtatttttatgagaggccaaggccctttgcagataagggtcaccagccatgttattcatctagtcttgctctgtcgtccaaatagaaaatactttacatatgaagaggtatggggagggcacagggcagctgtggagtgcttcaaattcattcagataagtaggactctcttctgccctctcttttccaaagacgggaaggttcgtctccttcccataggtagtgttatctctccttttggacagagccaacttgggagtagcatatatgtgtactatgtgattaacttttgtccatgcacacaactgtgtaatgaacactgattctggagattgctttgattaatagggtctgaggaatttcacacttaatattcgagttgagataaagcatgtagcatcctttcagttcttcaggaactgacaaccccatcgcagccttttatgaaacgcctcgaaagaaatcctttccagatttctgagtgtttgccagcaggttagttcaacatcttcagatctgactcgtttagtgttttaagctgctccagggtcaagaagacagagctaagcagtgagactgcgtgtgggtagcggtttaggatgtaggctctgcagctacaatgcctggttttaattcccaattttgctatataccagctatgt

SEQ ID NO: 25530 - DNA, 1697 bp, Bovine  19866880613398
  misc_feature (1)..(1): n is a, c, g, or t
ncagattgagcaccagagccagagccatcgtcaatgccagcattactcagatgcccccatggcgcccagtggggatggggccaagccacataattcatggccagtgtgtgtgcttctggtgtgtctgccaaaatgtcagcctgtaggtgacagctattgctcactggtgaaaagccttcttgtgatttgcactctttctgctcacactattttgagaagttagaagacagcaagcccgtctccttcaatggaagtttctgaaggctgtagactggtgggccaaagaaattgccagattttcactccagaacttaaaatgaaaaccattaatctgctgcaacatagcagcctgactcctagtggcaagccatttactcaattcagtataattcaatgtggcaaatcagaaggaaatgcttcttttttgtctaggtgtcctgtctgtttttcatagcatgagattctcattcttcttggaaaagaccatttaattggctaacaatgaaaacaaccaagtcttctttaaaaaaaaaaatcactgatggtgactcaccctcttctttgcctttgattccctcctattatatacatgaagtgctccctgctgagagcatgaagcctggataattgaacccggattgagtaatttacacggttctgggaagtaaagtcaacaatccacaaactgaatccacttctggatgctcatccaccgaggacccttgacatccgatcgctctgactttctgttcagtgtttactgctttcgcccatccctcaaaccaaagtcatagctcggtaatttcttgttttagaaagtgacaaacagaacaggcagagaaaacactgtatattttggaataaaaatgaaatcattagggtaagtttctattcttggtgactggaattttactctggttctgattaagcacaacaaagatattgtatgtgatgttttcctgtaaatgtatgagatagttttctattgcatgtccatgaatggaaatattaacagactccacttggctccatcaggctctggcttggtcttcacacccaaaaagccatccaagagagaatcacatcctagcccagagtgagtagtttcgttcttgttgtggttttttggcttttttcacagtttcacaattaagaggaagtcttatccacaaaatatgacagtacatggaatagacacattcccttgtctataaattgctcagtaagtaacaactgagcatactaaacatctgtcttctatgcctacattactgtcagaataatgggtccatccagactctacttcttggtggttagagtatttaagtgaggagggtatttcagtgtctgtggactccctcaaggtagtaaataaggagagtttcatgacagagaagtggcaaagtcaaggcattccataaatcaggagatccccattcaatttttaagtgattaggtaaactcaagaacagaggatatgcaggatcccacctatacattatccatatcacagaaacagaaacccactgtcagtacaaagcccagaggacaaagctgttgctcctctaaaccatcagattagtgagtgtctggagaagggttatgagcagtgaccacagagcaggagccctgtgctcttgtccttcctgccacccactaagcacttgcacttccccacttcaagggaagtttcctta

SEQ ID NO: 25531 - DNA, 1204 bp, Bovine  19866880616657
  misc_feature (1)..(1): n is a, c, g, or t
nccaaacgagcactgctggttggagttgatgtgaaaatcagaagaaattctactcgtggcaaaggtcttgggcctgctgaatccagtttcaaatctggctgtaatactctgcacgccatggggccacttgtagcttccaaggataccttatcctttttctgatctggccctcaaaacacagctattgaatggatagattgatcggcaggcacactttaatttcaagatgctttctgtaggttgggaagatcccctggcgaagggataggctacctactccagtattcttgggtttcacttgtggctcagctggtaaagaatctgcctgcaatgcagggagacctgggttcagtctctgggttgggaagatgccctggagaagggaaaggctactcactccagtattctggcctggagaatttcatggactatatagtccatggggttgcaaagagtcgaacatgactgagcgacttttactcactatctgagtgtgggggcccttttgctcccacagcagctttgtgacaaggggataacctatacccaatcccctatgcttcctgagtcccatttcccttagtttgagaaagaaaaaacattttgatattgcatttttagcattaacagctaggccttgccatgccaatgatctccaggtgacatgctaccaccaatttcctgacagttccatcacttgtctctgatttcagatccttctttctaagctagaagcatcatcccaagtaacacagaaaggagacagtgacctaaatgccttgtctgagtcaactcatttttaaatggctcaccttttagggactgaatagtggcatggtcatcaatttcagtgaggttttggcagcagatgattttacatatccatctaatgaccatttttcatcgaaaaatatttttctctgcttctgtgcaactttccctccctcctagcttgttgtggacacacacaattatatatgaatttggaatactggttgggacttaattcatggagaaagttaggacttgtgtgctcagttgcccagctgtgtccgactctttacgaccccatggactgtagcctgccaggctcctgtccatgggattctccaggcaagaatactggagtgggttgtcatttccttctccaggggatcttcctgacccagggatggaacttgtctcctgaattggcgggcggatt

SEQ ID NO: 25532 - DNA, 2088 bp, Bovine  19866880629969
  misc_feature (1)..(1): n is a, c, g, or t
ntttagactattttatttagaatctcaattattattttacagaattataagctgttagagctgtaaagagagtgactctggcatgtcccttgatggccaaattaaccaaggccctgaggcctggctgcttatattttagcctcaccacttatccagctgtatgacctttagcaagcgacttaacctctctttgcctcagtgtctcctctcaaaggtcagaattgagttgttgagaggcttaaaagaaataagcatttagcccagggcctggcacctagctggtgctgcataaatgctagctcttcttattaataccattaaagacattcagctataatctggcagtgggttactggcaggctgggtgcagaacagaaagtgatgccccccgtccatcccatgcccttgtccggctgtctctggcagaaagaaatcctgtttacgttacagtcgttgtttatatcccaatctttttggaatggctggccaggcacatgctcagtggccccgtctgagcaagtgcgggaacatggtctgcagctgcaggatgattatctgcaatcatttgctgacaaagacgctgagtaatgaactaagatatttgtttttgaaataatccatcttcttcagccttaccaagtcagaggaaggaagctactccagctatgactaaaacttgccaggccccgtagagttcatagcatctttgccgatggtgattgctgccttacaggaaaagtagatcacaagaagaatatcaacacaaaggtatcttcatagtcaaattcatgctcacttatccagggacttggagaaggcaatggcaccccactccagtactcttgcctggaaaatcccatggacggaggagcctggtgggctgtagtccattgggtcgctaagagttggacacaactgagcgacttcactttcacttttcactttcatgcattggagaaggaaatggcaacccactccagtgttcttgccttgagaatcccagggacgggggagcctgatgggctgccgtctgtggggtcgcacagaatcagacacaactgaagcaacttagcagcagcagcagcggcatccagggactggggacagattttggcatctgctggatcattaacttcttgagatcttaggtgtttttctcttcatggggctgtctcagagtaggcccttgtgtgtgtgtgtgtgtgtgtgtgttagtcgctcagttgtgtctgactctctgtgcttcccgtgggactgtagcctgccaggctcctctgtccatgcgattttccaggcaagaatacttggctgagtagccattcccttctccaggggatcttcccgacccagggatcgaaccccacgtctcctgcactgcaggcagattctttaccatctgagccaccagggaagcccttaaagaatgtttatgcaacagaattgaaaattcttcccacagctggcaccagactattcaaagtaacatcattttttaaaatattatattgattaataacaagaggtcccaatttatattcctggattactgggtgagccccccctgtcatgttgacaatgtggtgttttatttaggaaggagaatgccccgtggctgggctgacaggtgcactgctaaggaaccaactgtcttagctctgagcaaagcctcattccaccttcattaccaacactaaaacacacaggtgtcaggcaaaacaaactccttatttctggcttgcttatttttcttgtccagaatttctttggagaaagctatgctccagtccagccatcggttcccttgtgcaatccactgggatggcaatcacctcattgtttagttacaacccaggaaaagatgaaaagaaagaaaaaagcagagcacacacatacagaatgagggtggaggccgcacaatgataatgaaaaccatttgttagcatttcactcctttctttgtgaatcagctgagttcctggcaccacgcctctgtctgtgaaagggagctgcacctccaaggccttccagggactcatgccaccatgtccgggctagagtgtcaccctttgtccccaggcaggtgcttga

SEQ ID NO: 25533 - DNA, 980 bp, Bovine  19866880654445
  misc_feature (1)..(1): n is a, c, g, or t
naaatagttttgatgatagatcagtatgcaaattgcagcatataattcagaaggggtttaaagagttgattggcatggctataacaactccttccatcctcatctactcatttatctaaacaaaatttctcagcattaatatcaaagcaataaaaaatattaaggggatttacactgggacctgtgttgttctagcaataaggaatattctcattcatggatacatgagctagtagaaaaaaatcccaaccccaccaatctcattaacagatacacctccaggaatattttacttctatgtttaatgattgcttatttaagatgtatttgttattgtagtcaactgtatactaagaataattttaataatactcagtctagaagaaattagttaaaacttgaagctttatggtctcaggaggaaacatttaatctcttttaataaacatataaaaatatttgttcagacaagtataaaagaacattcaagaaaaatctttcaagcataaaaatgcattgctttaggattacatttcattgaaataaaatacaagttcaagaagaaaaaagaaagatgtaaaactttcaaggagcttgttcacatatttttaacaggtgatgaatatataaatgataaatcattatgttttacaccaaaaattaatgttgcatgttaattatacctcaatttaagaaattattttgaattaagctgctcataaatataaatgtttaaaaattgaagagaacatcacctgaaagttttgatcaaaaatttcatgttgtcatttcagatattaaatctgaaaaagaaaacttggatgatggtaggtagcagatcacactagtttctactgaatgcattaaaataagggacatgatcattttctttcaaaatatttaaaatacatcataatgatatcttttgcatacactcaagtttataacacatatcttatgtgtcaatttaatgcatgaga

SEQ ID NO: 25534 - DNA, 2158 bp, Bovine  19866880671022
  misc_feature (1)..(1): n is a, c, g, or t
nccccctgcagtggaagcctggagtattgaccactggattactaggaaagtccccaaatgctccattttttaatatgtggtcagtgttgcaaaaattcaaagctttgccagaaatagaaaactatttagaccacaagtgtatttaaacaacaaatggttacaaacacattatccaaagtaaaaataaaaatgagacctggggttaacctgaaatataaaattccaaaaccggtagtgtattaagtcttttataattattaagaacagtcctataagctagaaatagatgccttttcttagagcagagtcttgttatttttaaaataataaaataggaatgtattttaagcagttaatgaaagtcttacccggtagcccataatgatgtatcacacataaaagtgccacttataaccagtaattattggttataattacttgttaacttgagttaaacatgcaggcagtttgctggcctttttttaaaatcagtattcattatttgaaagtcattaacaagtggtttcttctgtttcagatctttggcatggtattcagcatggtcctttgctgtgcgatacgaaattcacgagatgtgatatgaagctacttctacatgaaaagtgtaatctagagtatacaaatgtcacaggggctgtctcctggctcatttttaatattcaaaggacattaggatctaaaatattttgctgttaactgtacatttgcacatgtatgtgtgtttggctcaagactggtttgcacctttaatgaatgcctatgtatgctgactgagagcatgttcatgtgtgatctgtgtgtttctggtatatgcataatgaaatctggttgctgggaattcctgaatcttggtatgtgagcatatttaactctaagaaaaagatcaaaaagctttgaaaaaagaaacttggttgtttagaagaaaaatgatagtaggtcagtttctcagactctagccataggaagtaagatatagagaattcagggatttctaacttatggaagcaataagccacagagattgagagatcatggtgcagtggtaaaagcgactgtgtttgggttaggtgtacgggtttcctgggatttatttttatatatgtaatctctccagaatttaggattaaatacacctgtaaaactaaatatagcatggaaaatctaatttgaataagtcatactttcctagtattaaaaaaaaaaaaacctcactctggaaagagtgtcacagacaatcacatgctctatgaaactgagtgttttcaggactaaaaggaaaaccttttaacaactttttaaggaaatatttttgttcttatataaagacatttaaatattgctttataactttcctgttctgactcttctctgaaccactgccaccctcacatccgcaaaagggctttgatctcaaacttttctgtgtttcttcagatggaagcatagaaagactaaagcaagagatctggcaggtgcaaattgtgggaaagaaaatttttactggcactgtatctttgaaatacctcataacttgagtttacatattttcctaattttttctatctttcttatttattcacctagagaattcttctttatagattaagaactacaagttttcaccacgtaaaatagattatatcatgagcatccttagctaaaccaaaatagaggaaaacatcctctcctagttttgtgcacacaacagagacaagctaaggaaataaaaatacacacacaacagaaacatgttccttctgtgcaagtctctttataaaattaaaatgtttgtgttctttatggtcttgagtgcttcgttgtaatcccaaatttataatctaaattgacagtgtagtgtacatttttaacaacttgctgcatctagtaaaacatagatttttttaaatttacattttaaaaggccatacaaaaatgaaagtatgggggacttttgaaacccccaaataagtttatactcgtgtgagaacacaagtctttgggtctgcactaaaggaaagtgtacacttcaagaaactttcacaaaacattttgctgaaaaggcctatccgtttgaaataatctcactcccttggagaaccgtgtttctcctgccatacttgctactgctaataaccat

SEQ ID NO: 25535 - DNA, 1461 bp, Bovine  19866880680791
  misc_feature (1)..(1): n is a, c, g, or t
nggagattgcatttggaggggggtcctgagtggaaccctccaaaacagtgcttctcaaacttaggtatgcatcagtatcagcagtagggattaaaattcagatttgctgggtttcactaaacatggctaggcctatggtagagcctaagcatatacatttctaagaaattctgagatattgctagtattatggtagacctcactttgagaaacactgctttaaagtctgagacccagcattatcctggtctagaaggaataccggattacagcagtattccttcatgccctgaagaaggaatagaatgtggtcctgagatgagctggcatttatttccatgcatttataaaagtgaaaaagctctctgattaagtgattactgcatgagaaaagacaaggttttaaaaatagatatgcatttggggctgtttgttcctaatatcattgcattagaaattggtaatatttaaatcagatttaattttagagccccaaccttcactagcatgagactaaaaacaatgacaataatatctatggcaatcacttagtatttcagtattctgggcaggaaattgttgtctccagtagcaaactacctgtacctacactgaacaagagaataccagaggagatgcaagacaggctctcaaagatagcaaccagacatctagatgtggttggcagaggacctggcatgcaaagggggctattgtggttgatctacagcccatcccccaagaaggcagttctgcctaggagttgtggaatgtttgatttagactgaccatccctccccttcaaatcagctagattggaggccaccctggtatatagtggaatatatagaatgttttcagagagagtcactgttacttccctgattgttccctagattaaagtaggggcttttgtgtcacattggaaggtatagtcagcaggtaggccacagcagtgagttctgcaagctcacaagtttctgctattgctgtataagaccaccacatactcttctcaccctccccaacaccccctcctaagccatgtggggcttctggggctctgtgatagctttccttcccttcttccctgatgaactcctattcatccttaagaaccctgctcagatgttacttcctctacgacctggccagataaaacaaattcttccctctgctgtttcccacatcatgtcagaattatctatcatacttagcacattgtgctctaaatgctgctcatgtatttgctttcctcacctctagcttctttgctcttgtatgttgtgcttatgtctcattcttctctgtgtccctagtacctagcacagtggctggtgcagtgcctgcaagtttagagtttaatcaatgaaataaatgaatcccagtgtttgtacagaaaggaaagcattccttagatgcgcagtaggatgcaggctggaaatattagtgcccatagaa

SEQ ID NO: 25536 - DNA, 1476 bp, Bovine  19866880688947
  misc_feature (1)..(1): n is a, c, g, or t
ngaccaagtgcatatgctatttaaaacaccaagaggctcaatagtgatctatcagcactgatggaatcaccggatctgctcgcagtatgtgtgaaacagaaatattgtcccaattgctggaggaagtgatagcttcagttcaaagatttttttttccttcctgctgatcagagtgcataaacactacagaagaggaaacatctcataatgctgagtgagatgacacagttacagaatcacggagatgatcgctccagccacctcgtttatgcaggaggaggacacgtttcggaagaacaagggtgcagaccaagtagaaacaaccaggggcaggaccagaactcaggtctcctgacttctaggcaagtcttctttatatcacactctctggctgaggaaaagacctcaagaccctgggtggagtggggaggctgataaaggagcagagatcattgcagctgggggggctcccctatctcctctggaggactatatctacctcttctttgatgtctcctttcttcctctctggtctcttcactttctcaatctccaaggtctcttcccttttgcttgtgagcactcacttgccttttctcttttaaagaaacaactggcccttctgcagcagaatcactggatttctcaacttccttttactaccaaattcctcagcaaagtcattgacattcaccatttccttggctccccttaactccctgcagtctggttcctatcttcttccctttcccttccccctactgaactgatattgtcttcttcaaggtcacagttgcaataaccaccccgccaccagtatcaagatggcagcatttattgagcgcatccttgtttcaggcctggacccaggcccgatcagtagccatcatccatttgtagataaggaagctgaagacctaggaggtacttttcttgctctgcctaaatcaatggctgagcagagatgtgacccaagcctgtggtgctcttgctgttaaacactgtgcctcttcctccttttggccaggttcagcagactatgccagtccttggcttcttctccaatgacctccagcgtctaacattttcttttccaggctcttgtgactacatcctggcttgccatctagctctttgatttctctgtctgccctcagagtgcaacttgcctcccaaggcttagtccatgactttactttctttcccatgctcattcctgcaggtgtcccctcctcattttatgatcccaccccctggttcaactctgacctctcacgcatgcccctcagtcactgacattgagtgtagctatgtcccaggtgctcctgtgttcttgttttagaccatatatactgacaccggcaagggctctgctgccatccccccatccccctcagcacgtccacccaaagtctttgttcttaactcaagctgcagcaaccctgtggatctcatccttggaaccagagagcctag

SEQ ID NO: 25537 - DNA, 2120 bp, Bovine  19866880701811
  misc_feature (1)..(1): n is a, c, g, or t
ntttgaaatccagtttattgaatttacagtaaaggttttatggggctttcctggaagcttctcattatggaaactcttgtgctggcagtttggtggctggtgtctggtttgctggggagaggttgagtcaggccctgccttgatggaaagttcctctgcctgggtcactggagaggagcaggctgggggcccgagcaggcctgtcaggctcttggaggggacggctgtcctgcagctgggtcccaaatgggcccctacttgtttcctgtgtgtccatcttctgggggttccaaatatcttctcagaggaagctgtgctgaaagccatctcagtcattaaacccattttcattatttttcatgtgtttgaaaagcatgaggtgctggcccactgaccaaaaagaagccaactccataagcatggatttgctgattataaatagcaggaacacacagacacagggccacatctggatccagagcctggcatgaagtgccaccagcttccccgtaccagcttctttgtctggcttttccagcaccctcttggactcccactttacaccttcctcaccactcggctcccgttctgaccctgggacccctgatttcatgtggagaagagcaggggtgtgggctagggatctttgaaggcccagaagcccaggcttggcaggttctttcctgccaaggccctgaatggacactgattcacgagtcagcagccttcctgtggctgctcatgaaactatcagttcctgcggtgctggctcactggtcctttcccgcgtgccttttatttacgcaccgatgtcactggtgttctgttctttaaaatgcagaggcattcagaatgtgctacctggcatttgaatgacaattgtgaaaatcagttaggttgccaaggtttctcagggcactgatatgtgaccagtgtccttttctgtgagggtgttgaggaggattcccccagagtgaatgtggtccctctgcagtgctcgtggacagccccctttctgatgagctctggtctggcacccagtgagctgcccactaccagagttaccagctgtggtttgcatgactgctctgaatgtggttggtctgataatctctcagcttcctaacctgaggttccagggggaagccagttggaataaacagttattagctttagagttcaagtcccagttctcatacatgcttgatttccttctctgcaaaaaaggagataataatatcaaggctgctatgaggcagaaatgaaacaacctggagctgggatgggagctcactattattccctcctcttcatttcaagtcagttctgtgcttagggtacaggcgccacactgtaaacaatcctgcatttaaaagtaaatagctacttagcttcatctgatacatgatatatacacacacgagtgtctgcatcttgttttgatttctccccactgtctgtgtctccaacacgtatgtctgggcgagtgagtgtatctgtccaggatggcagagctccgagcaccacggggcacagttatctgcctcatgatggtgatgatgctaatgacacctgtcttacatttatgattgcatttgactttcacagtaaccctgggaggaaggaaggactaatgggatgaatggtcacagttgattagactgcctaaggacacacagtgaggatagcaccaggaccagacctaggacgcaggccctgctgtggattgaactggagacttcttaggattgccctctctctgcctccctccaactcctccccagatgttcttctttttaaaaaaatatgctcttgactccctttttcctgagcttggcttgagttccagtagtcaaataaacggctagttttccatgtggtctcaaagcagcataaactaaaagacagggaaggcgttccacagaccctccaggtctggggtctggggtagctgagggcttggttgcctgcagcctgaagctcctggggaagcagagcagtggaccctgcagccagaagagttcagggggaacgtggcccttttgtctagggatctgcaggctaactgctttagacagcgatgctcagccgatccatccttttctccctagattaattaa

SEQ ID NO: 25538 - DNA, 1236 bp, Bovine  19866880710990
  misc_feature (1)..(1): n is a, c, g, or t
nccttgctaagccttcaaattctgaaacacagtccaccccaagcttagtctccccagtcacactttccacccagtgccatgctggtctgaaaacccaagaactacaattattgaaagaactgtcgtaagatttaaaaaaaaatttaagatatgagaatcagataaaattaacataaatgaagagcatgaaacattgtaaaaatgcaagacatttttaattgtaaattataaccagttagctcagaggatcagaaaattgcactgctaaggtccatactttgcgatctcattaactccatttattttcatgtcacatcctggacttaaaccctgaacaactgattaaaaccaacacaaatcagctgacgctcatctacaattttttagaatcagccaatagtattagtttcctttacaaagaatagcatgttactttttttttttttttaagggcgccatcgtgccctcagccctcggtcccgagacctacggagcgacagtactcactcccagccgcgcagcgcgcggggattcagcatgttacttttgaaacatgaagaaagaacagaaaggagacactttgaaaggcccaggaaagttcaagtccatgaataagcaagccacctatctagaagtgaaggagatggaggaagaggagaaggaggaagaggaaagagagggtgaggaggaggaggaaggagaggaaggaggaacaggaagaggaggagtcaaacatttctaaatatgcaactgttcactatgatgtagaaatgggagtgctatgagtgacattagggagacttttctctttatttgataacaatatccatgcatgcgttgctcagttgctcagttatgtccgactctttgcaaccccacagactatagccatgagtgagtgagtgaagttgctcagtcatgtccgactctttgcaaccccgtggactgtagcccaccaggttcctccatccatgggattctccaggcaagaatactggagtgggttgccatttccttctccaggggatcttcctgacccagggatcgaacccaggtctccggcgttgcgggcagacgctttaacctctgagccaccagggaagcccacactatagccatgagcaaacactaaaagtgaacctaatggaaaccaaaacaattgttccaaaatgatgaaatctgggaattaagtctaattgtttaatgctagtaaaaacaagttcactttgactaatt

SEQ ID NO: 25539 - DNA, 3381 bp, Bovine  19866880782443
  misc_feature (1)..(1): n is a, c, g, or t
ntatagaactttctacctctgaaggaaaggtgctggttgcgtggggcgatgtccatcctcaccactgctaggcagtgtgtgagtcacgcttgttaacacttgctgtgatgccttcctgctgtgtgctgtatacttgcaagaggtatacactacatacttctagaggtatgtagtgattggtatattaaaacgggaaaatgtacaaattatataggaaagcatcaaaggcaggaggatataaaacttggaaaattgtaactgtggcactcagaaataacaacggcaaccagaataacctggtttaatgacattcagaaatgcagtgcccggcattagtatggccaagcagtaggtctgtatacatctcgttggacctgtgcagagtaggttgtttcagtatagaagactatcacatgccttatactagtctttccagttcaaactccaatatcggaaatcgactcaagtgtcatcattttgaatataagaggaaaaaaaagttaagaacttctggattgtcattttagaggttatataattgactctctgcattattaatctgaaggaaacaatattccgtattttgtcatttgtagcaaatttctcaatatccatacctttatttgatactgcttctgagagaccaaataaaatcattattgtattctccttttaaataagaaatgaatggactgttggggtatgtttaactaatctggaggtaccttcatccagaggcagtactctaggagtctatgtccatttatttaatatttgccgcactaaaagcaacctcactgttttaattttatgctctctggaaaaggaaatcccattactctcctcagagtgcccttttaaatacttgaaagccttttagaaaattcttcctattagctaacctaaatcttttaggttaaaaatgattttttttgtcccatcttgggtggggaaaaaaatgaaagaaaaagagtcaccgtgaagtctagccattttccatatcgtttttgtccctctttaattatttaagaactgtttgtggtattctcatgttgggagagtgaaatgaaaagaccatgttcttttatgacttatgcgtctcaatattacgctccattgttcccatctcagactgtattaccaagttaaggacggtttcttattgtagcttttagatatattttggtcaaacactacttgcataatagctaatccttgccaaatttgtgtttgtgcgttttgtcttccttaatgtacaactctgcaattatgcttgtgaaatgtttttctggttcatttctgaaactttcaaattttgttttataattttattgtttgaaggcttaatgatcacaatgatcttccatcactttggtcatatgtgagaatgttaagccatctagactgtgggtttgtgtaataacataacagttttggataaagtacagatgcttttaaaatccagtattcttgttctaggatattggtacgggatagagcttgagaaaccccatggcaagaatgatgggttcagttggaggtgtgcagtattttagttgttccccaagatatggaatatttgctcccccatccagggttcaaaggtgagaaaaaatgaaatttacattattaacaagaactttttgtaatgcgcagtgagttagagtcattaattctgtatgaaagatatgcactaactacagactatgtcttctttcaacgggttaaccaaccaccttcttcagagggtaggctcatggtagctaaatttgctttgctgaggatttgcagttttaaaaacctcctttattcctcatttgcaaaccctatgagtatgtgtaggctattaggagtggtgtttgctgctcagaacagtgagagcagcaagcttaatctgtcatgcaaacaaaagtgaaaatgctctctgattgcttcagtcacatcctaactacattaaatttcctgccagcaggcaccccattcattctcctacaaacctaatggaagcaaaatggctttttcctgatttctttagttttcaaaaatagataggcagtacatctttggggggaagtgaagcttcaagtatttatatataatatacctcctcggtgtttcttctgaagatagtacacttttgctccagctcactctggcttttaaaaaacaagttgagcagaaacaagtccttatgaaattccaggtacactgtgtgaaatgacttaatgtgctgaaagaagttggctggatatctttaaataggcagtaacacgtatggtacaatcacattcatgagactagacctgccatctcaacctgcaagtcctgtctcatccccttccaactggactgtgtgactgcctcctggcaaatttaacagttttcatatccattttctttctcattttttaaaattgaatagttacatatagtttttgtattcctttccttcttctatgatgtacttgatataacccttttcttgttatttatgattttataacatttaacttgtaatgctttgcagttataagttaactgcaaagaacttgactaagtaccctcagttaaatgttttgtttgattctaatacatatttagtcaggtaaactagaaaagaataactgccgatggtccctgacttacagtggttcagcttacaatttttagactttatgatggtgcaaaagtggtaagaattcagtagaaactgtacttcagattttgaattttcatctttccctgggctagctgtacatagtatgatacagtctcatgaggctgggcagggcagcagctgcagctcccagtcagccctgtgatcatgaaggtgaacaacccaggcacctacgacccttctgtacccacacaaccgttctgtttctcactttaagtacagtattcaataacttaaatgagacattcaatgcttgattgtaaagtaggcttggtgttagatggttttgccagggtgtagactcatgacagtgttctgagcatgtttaaggttgactaggctaggtgatggtgtccagcaggttagatgtatcaaatgcatttcaactcaagatgggttcgtcgggacataaccccatagtaagctgaggaggatctctacaaacatttactgagcatttaatgagtggtgggctctgtaccatgtacttcatcaatttcccccagacctatgagatataaggtattacgattattcctattttgcaggtaaagaaaagtttcacgagatacagtaactgctaaagtcatgtagctggtgtaggggatgaaaaacttgtcccataccatcttatgttcactaactggagggggcggagtctgtaattaaacagacaacagataaacagaagaaaaggcatagca

SEQ ID NO: 25540 - DNA, 5157 bp, Bovine  19866880796013
  misc_feature (1)..(1): n is a, c, g, or t
natacagagaagcagcagtgcactcctggccaggtgttttcaggtagcccagttcttgtatgtcccaggcctgtcctggaagtcgccaaccatttatcctgttcagccacagccaccccaaggacgtcaaacagcacacaggttcctttgtctttgaagggcagccctaaggcaggatacctgttggctggccagtctctgagtaccagtcttttagcccctggggttctctgtggtcacctctgctctctattccgggctctcttcagttaatgagcctttcctgaagctcataaaacattagctacttggcaaagccaaaaggaaaaatctaaagacccaactcctgtctaaaaacagcagtttacacaggcactgtcagcttcttgccttgtttggattgccttcagtcacctcctgtcataaaaggtggacactttggtgaagtcatttttctgctctgccagcatgaccatatgaccacgctctccccagaatggctgttgggttgcaatgtcaggcgacaaagatgttttgcggcctcagcaatcccagtcctttacagagagacccgggcttgtaactgctgcttctccatctgtgtcctctcattaccttccctaaaagctcttttctgactttctagtttcagtgctgtggaaaagaaagccctgaacaggtccaacccacctgcccaaaggagctcctaggacacaaggtaagcgtctctaccagattcctatcctgcctgtggtgttaagatggttcttgctctcaggatggaggttgtgattctaggaggccctctcacagtagcttctagcctcagttttattctatatagaacaggtgaagcaatgctgagtcccaatctcctggtaccctggggaataacagtgtgctgacttgccggtaataatgcaaatagagtggccttaattaagctcaccaaggccaggggtgtgcactcttaagaatgttgccccatgagtgtcttccatggatgtcatggcactgataaatgcttcctttattaaatgctacatgacaggcactatgccaggttctgaaaactctaagataaaaaacagatggtccctgtctcaatggcctcacagtccagtcaagggagttggtgccgtgcagagtacagtatctgcccagcatacagtggagacacagtggagtcaggaaagcttgaccatggatgggattcttgagccaagtttgaacaaggggaggtcatttcaggtcctgaaagtagctggaacagaaaacatgacagtgtgaaattccaggactgcaagagagtagggagcccacagggaatggcaggggacatttttggaaaggctaacataggcttgattttatacctggaacttgagggaagccgttgcttttggtagaggatgaacataatcggtttcacattgtagaaagcactcaggtgactgggggtgtgactggtagaacagaaggctatagattcatggagggaggccatggaggtgacacttgttttcaccctggtaagagaggatgagggcttagagcaagttacaaacagaggggagggagaggacgtgacagactcagagatgtccaggggtagaatccgcagccctaggtgactgactagatgtggatggggagtgaaagggaagaagctgagactttggactcctgctgggtagacagaggctcactcactaagagaggtggacagaaggaaaggagcagttgacagcttcagtttcagtcaagtttgcacactaggtacctgtgacatttgcaggtaatctgagctgaagacacaggtgtcagaatccagcaagctggtgatagctaaagcctaggagtggatggaaatgcccaggggagcatgtagaataaggaataaggtgggcaaaagtactatcatttaaggggtaagctaaggacaagtgggcttccctggtggctcagtggtaaagaatctgcctgaaattcaggagacatgggagatgtgggtttgatcctagggtcaggaagatcccctagagaaagaaatggaacccactccagtattcttgactggaaaattccgtggagagagcagcctggtaggctacagtcctttccatggaatcacaaagagttgaacacaactcaatgactgagcacgcacacacgtgaggacaagtagccagaatgagactgtgtagaaagagtcagaatgagggaaagttcaaagacaatgctcctgtagagtgagggaggtggtggcttatccataaagtcaaatgctgagaagaggacaaggaaataaaggctggaaataatgtgttgggatttgatgcttagaagattcttaatgacatttgccatgcagttttggtgaagcagtttggaatgcgcaagaacaatgtaggaaatgagggaagtatgaggatgtttctagaagcatctgtatcatggtcctcacattatcctatctcctcactttacctcttagtttctttttcatagaaagaaactttctgtgaaagaaaggaggggacatgggcagagctggaggatgcgattagagggggtttttgctttagactgcagatcaagtgcatggtgttacatgatgagtgacagtgtcagtgcagaaggagaggctgaatgtgtaggaaggaagggagatatgtggcagtacaagcttccagaagtgatgagagaataagatccagagtcaggaaaggggttaactttccacagagaagggcagtggcaagaagcagtgtgccttgctcaccttgcatgctccctgcagagagcagtacctggcactggatgaatggggtgtataagtttataggtgcagatgaggaaggttggaagaatttctatggcttgactccaataagtaaagaactcattatctaaagcattggttctcgaacttttaccagaatgcaatgtaattatttttgtgagtctatggccttctctaaactattagctccctgagagtgaaagaaaccatgtcttattttctccaaatccatcatgccattcccagtggcatggcatgtaaggccgatgctgagaaatgttttgttgaatgaattaaccatgaatgaatgaagtgtgataggaaatgtgaggatagtggtaagagtttcatatagcttatgcaagtatcagagagagctgatcattgacaagtgaaaggacctggacagcctaagggcaaatttgggttgcaagaatacctctgtatttaagaggaccaaacagaagttggagaaagtaattacaattattatacaagtgatgtattctgcccctgtccaatattcccccatctgtgaagtttctttggacctgccctgcccagtctctgtgggacacagatggaagaataatgccatccatctcagccacccaagaagaaaacagtcctccagcccccagcacttggctttcctttgttaaatttgaacctgtacagacttcatagcttcttacttacatacctcggagaaggcaatggcaacctgctccagtgttcttgcctggagaatcccagggacaggggagcctggtgggctgccgtctgtggggtcgcacagagtcggacacgactgaggcgacgtagcagcagcagcagcacttacatacctaccactaggtgatacctaccttgcgtagtgaattggaccaagtatttttaaaaagtatgtaaaatcatttaaactgtaaatggcaacccaaaacaagaggctattattctgggtgtattttacttattttttatttgctgaaaggaaagagaagctgcaaatttttaaacgcctcatgttccagaatagcttcctcccgccaggtttcagggctttgaagcagccattggcctaaataggaaaattccaccaaaaggagaggattattctttttctcccaactacatttttggtttatcagaacctaaaggagattttaagtacctaggaggaatggtttaaatatgaccagaagctgacataggtcaattctcacaggaatggattggaactggatgattcacacacaccatcagttgttattcctgatcttttcttttccaaaacagaattgcattgatgaaattgagagcataatcagtgttaagctccagctcatcggaattgtcggtattggaatcgcaggtctcacggtgagaaagttctagaatgtaccttctttgacccctaagaaacctttgaacctttgcatcttctcttcaagtgtgatgtggctgtgtcttcagagagatttctcataaaagacaaagactttttgacaagatatctaagaacaaagctaattagacccatcaatacttaattctctaaaaatgtgatacaaatttccattttaaatgaattatgactttgagtttatcgttgcaatagcttcccattttaagcccatcaagcttacactagacaagtgatttttaattccgagtctcttcttttgttagaaattgaaggtaacataggttaaactctctcacctatgatcttcagaggcagcaccatgtgctgactaacaatgtgatctctggcatcccactccctggattcaactgctagctccactgcttacaagccctggggtcactggaagttttcttaatttctctatgtcttaattccttcatcagcagaatggggatcttaatataccaacctcataaaattgttgtgacgattaagtgggataatagatgtaaagaataattagaaattaattcatataaagtgtctggaatgcagcagtcgataaatgctagatctacatgtaatgagtgttcccaaacccaggacccaggcaaagcatatatagatgtgtgaattgaagaatactgcacccatgcactggcaagtagctcagtacctctaaagccccaaagaagaatgtacaagagtcgatagggtcagaaagctatggtacatgtagcaagagatgacactggaatggtttaggagggtccacataattgagttctttgtgttactttttgataggtcgggctttatcctttaaggtagaggggagccacccaggtttggaagggcatgtagttcaatgtggagataaagttggagggaagtaagatttaggtaggcccctaaagag

SEQ ID NO: 25541 - DNA, 2917 bp, Bovine  19866880833858
  misc_feature (1)..(1): n is a, c, g, or t
ncatgcattcttaaagcagcgaacatgaacacatacgttcctgggcaccatggtgaaatgcttaagatcatcctggaaccagcttgggctcaaaccctacctctcacaattacaagctgtatggccacagacaacctatgtaactcctccaagccccagtttcctcatctgaaaatgaagaaaacatgcctaccttgcaggactgctgtgacgattaagtgatttacatggtaagagtttagaaggtgcctagcatatggcaaggactacgtcactgctaactggtaaggtttccactgctgttgctttgttctgccacttggatttggtcagtcaattgtactagctgctatgctcgaacagtcacagtgtttacctttaaagatttcaaaattgagaaatcattaatgaggatcactaaacatcatttcaagtctcttttctcctgggtttctctccatatatagtcagctagtgactggggacttccctggtggtccagtgattaggactccacgctcccaatacagggggcccaggttctacccctggtcagagaaccagatcccacatgccaaaaccaagagttcgaatgccctaagaaagattctgcatgccacaactaagaatcctgcatgccacaatgaagataaaagattcctcatgccacaattaagacctggcacagccaagtaaatattttacaaattcgtaaaaaaaaaaaaatagtgtttggtgaaatcctggaaaagtgagcaactcactgtgagaatgtggccaggaaaacatgtgaagcatgtgtgtagaattacaatgtgctgaaaccacaggatgccgtggagaatgtggggacggggtgtgaggcacaggaacacgttggttccttgaggcctcaagtatggccctaacctatggcttggggccctcaactataaagggtaacaccaccacagcacctgcccccaccccagtggcagcaaggaggggaaagggagacatctgaaaagccccgttaacccctgcagcactgggcaaaggttacaagtatcttaatctcctttggtatttcactttgcacaacaggaaccttttccgtttctgaaagttttcaaataagcccccaaaagccattccagccaacaagcaaggctcctaaaagtaacttttatgagagctaaggaaacagggattttctttaagacactaaagatgaggcattcttctgttttcaaaaatacctcagctgactctataaaagtgcctgaaaacaaagcaacaaaagaccctgccatcactctgcacctcagcccaacaggtcactgctgggggaggaacttacataacagagggcggaccatcctgattcctgattttgacgacccgctattctgctccccaggacctgctctttgtctatgccaattcccttttccctcctgtctttttctacactttacaaaagagctcagacgttctatttctggcccagtgactcttccagccgctgctgggtttagaccagatttagcccagggctcggcaggtgacaggcgcgctcaggccagcagggagagatggatgccaaatctgtcccaggtctcacagcctgactgtctcatgggcagccaggcccacctgagggctctgtgagtgaagatgcctctccttccctggccatctttccaccccacaaccagggtctccacacaagggacaagggggtccttatgaaagcaggagaggaggaaaacctatggtcctgaggaggagtcagaaggaagatacagggccagcccaggccaccttctgtctcctgggtgagctggggaaggaggcttcagggttagccagtatggacggggcagctgtcggtcatggtgaggacaactctgaggcgtctatgataagccctgggccgcagagaacacccagcctgcctcccgggtgagggcatctctggccagtgcaccctgtggtaaggaaccagcaccactcacgactgtctgaacataccacggcacgcatcctggggctgttttatgtgtcccctccctgctcccaccctggcccagcatgcagagcaagcagtgttggaacatggaagcccctggaggaagtcagccccactgcatggactacttaaagtgagaagtcacccttcccttttccacccctgcaggtgggattcacacagctagggctgagccaaaactcaaaaccatggcagactcactatgggctagtgtcctagctactgacattgacagagttccaaatgtcacttctctctctgtaaccagagctggatttctctccaccctcctgattcgggctaaacctgtccattcctgagacagatgtggggttgggctttattgctgtcactgtctgaagtgccctcctcctcttgggttcccacccattccaaggcctgtgtcagcaaccgtccactggtctgtctccaaggagttttgggacaaagctgggaggcagcgaccctgtgcctctggagctctgcacacagcagacatttaatacaagcctgctggtcattctccaatgtaaaatattggggaaaaaagctgtctgagatgaataagcagcagtgacttacttgccttcagagccccacgggcacccacaaaggactcaatacacctggctttgcagcaccaagcatgggaatcagacactgattcccttcaaggactggtcaaggtggcacagtcctcgactgctaaaccacccagtcctcgggtggtatgagctgagccacagaaatgacagatccatgccaataccgagatggtttggcagtataactgactccaaaccagagttaggccacctcccccagccccagccaaaaacatgacaaagcccattgttctgatccccactaaggtgcccttgccat

SEQ ID NO: 25542 - DNA, 1872 bp, Bovine  19866880908057
  misc_feature (1)..(1): n is a, c, g, or t
ntttctatctaaagaactcaaagcatctcaaaagagcattaattaagattgttttaggctgggcctttaccaagcactaccctattattcaaaacaaagtaatggagagagttccctgtaatatgaaagctttggtgtggcctcaagtacaaggctgcgcccatggcatcatttggccaaatactcacttaaattcactcacatacattactttatcttatttaaactttacaagcatcatttgatctttattctatagatagggtgactaaggtactcagaggataagtaagaccacacagttcacagcacatctagttttagaaagtcagggtgttctgactcgttctacgcgagctgaagggatgggctctgtatctaagtgtggggaggggccttctctcacatctctgaatcacaccacttaggcaatcacgtactgacttgagcgattcgtcctgagcacatccacctcacacaaagaggaaggaagttcactttagtaaggctgataagctacctctaaagcaatacaaactactcaacaaactcaatctaattttactgagcacctactaggggccgagtagtctatttcattttatcatcagaatttccaatgaaccacacgtgaagaacaagcttgaaatattagagagtctgagaatctgggccttaggaagaagccagggcaacacatagtggaggatgaggacaatctacatttccaccatgactcctcataggaaaggcaggaatcaataactgtattaagtgactaattagatttaactccatctgggaaccttaatagtggctcataattttttctttaatcaaaacttacatatttttaaaaaggattcattgtctcagagtataagtgacccccaaaatgttttactatatagacaaataagctcccagccaaggcaataggacttatgaaagaatcgatggtctgtctcttcttctctctcaggttttggttcccagatgtgcaatcctagaaggaaagggaagtggggatggaaagagaagagaaggagggaagaatggacattctctgagatgtgcttttgtaagagcagtaaaaaatagctagattattgagcattcactgcaggctagtcactgagctggtgctatacaaaagttatctcatggaatcctcacacacagcctaaaaggtgggtattatcctcacattgcacagagaaggaagccgaggtccaaggtcactcagctagtaagtggcagagtcactaagttcagagctcgggcccttcatccccaattacactgattcatatgacccatctagatgctggttctctcagctgagctctgaccaaattacatggcctgcgtccattagcccatctaagatcggggccaggcgctggggaagtaatgagagtaaagcacatcacccaccccagcctacaggcccaggggcttagacccaagcaacattcctgccagccttttgtcaagcacattctggtcaggcaccaggcttggcagtctcctctgaccaggattctggaatcctgggctctcaggaaggtcccaaaaggaaaaggagctaccaaccaggtgatgactccaaaagccctgacctcaatgtgaatttgttccatcactcctgaaaggtcagaagccaaagagaccgggtccctcatcctccagttccttaggggcccccaaacgtccccgggagaagggaacaacacagaactgaagcatcttgttttgattgcactgaaaatatccactgtcacagcccagaccccatgaagactaaaaggagcttctccactctgccggcagaacccagagtgccgtgcggagcccgactcactgttctcg

SEQ ID NO: 25543 - DNA, 1518 bp, Bovine  19866880936593
  misc_feature (1)..(1): n is a, c, g, or t
nacagagaatgctgcagggttatggcatgggtgaggctggaagatgtcccctcccacacatgggttcatcacaataacatatgttagaagaataaactaacccttggaacagtaaacacaacacacacacacacacacacacactcctatgcatacacatgtgatcacgggcaaggccactgtcaaatcctggacagctctgtttggttctcaaggctgccttttccacttagaaagctgggcagcagcttcatgggtattctttttgtctccctctcgggcacaggaatgtgagaggacaggagtcagaagtcacgtgtctgggcccttctcagccattcttcgtgtccacttattcctggaagtaattcatcctactctgtcccctgtctattctctctctggagccttcccctgagctgcctccaaggtggcaggtgacaggctggcctggccgagaacaaagacagttatccttggctgccacctgtctccctctgcatgcctgccctgtcttgtcatgctccctccacatgtctagtagacaccgcaaggcctctgggcaggggcttttttttattattttttcctttaaaaaattctctggtttcttctgtggttagatggcttatgtttgatgtttaacttctctacacccccatttttcttcattcttaaaaaatgccaacagaaaaatctttaaaatgaacacattgggttgctgttctatatactggagaaaaaaaaaaaaaggtaaaatgaggcatggaagatgccatggtctgaatgtttgtgtccttcagaaattcatatgtagaaatcctgacacccacccccaagtggtattagaaggtggagcctttgagaggtgattaggtcatgagagtagagccctcttgaatgggattgtgtgagcttaatcacatctaactctttgcgaccctttggactatcacccaccaggctcctctgcccatgggatttttcaggcaagaatactggagtgggttgccatttccttccccagaggatcttcctaaacccatgtttcctgtgtctcctgcattgcaggcagattctttactcactgagccattggggaagcccccatgtgaatgagattggtgtccttataaaagtgattctgcagacctccccagcccctcctaccatgtgtggacacagggagaacacagctatctatgaattagaaagaatggtctccccagacatggaatctgctgatgccttgaccttggacttcctagtctccagaattgtaagaaatacatttctgttgtttataagccaaccagtctatgatatttttttgtagcagcttgaactaagacaggaggattttgatggcccctggcaggtttctgagagcagctggggattgccggggagaggagaggttagtcaaggaggggtctccctggacttactgagagtggagaccagaacacagcccaggcccaggtcaaggtccttggtgtttgttcagaacagaataaa

SEQ ID NO: 25544 - DNA, 1288 bp, Bovine  19866880948061
  misc_feature (1)..(1): n is a, c, g, or t
nacaataccaggcatctggatacatggtacaaacatgctgtcacatacccagatgtttccaaacatctgggtggtttggcaccccacagcaacagcagctggataatggaattaatttttcacttttcagtcatcacttgacatcagatggacagagtcttatcagctgcaatctgagcacagcccattatctgcaagcagttctttttctcccctcacatggggaattatctctgtcaatcattttattgttgaagaaaaggggaaggaatgtgtgtcttcttgagcctgcgatacatcatctctctatgcctcagttcttttctcattgaaagagccagtgggagctgacaattgctttaacctttcccaccccagaggcagggagaagagagaggaagacaagcaaacagtgttttctacacacaagtctggagaaatttgacaagaacttgtttcttattagaaccactctatctggtttgagatctccccccaccaccaccccctttttctctcactctcttcctaccactctatttacaagtgaaagcgaaatgatggcactttattattcctgtcccttgtgttctcagaaaggcccacattatgtttgtatttttctcaggtagcttagaacaacattgctctgttgcctggggccttcaggggagaggtgggtggtctctagaggctaccgcagacagcaaagtgttcatgttatctctacttatatctggcggcctcaaagtaacgtccagaccgttaacgaagcttcaggacatcaccagggtagaatggtagaatcagcattatttctctccaccccctcaccgcctccacccctactgaaggacaaatgcctacagaagtacagtagctgtgcattcccagggctacaatcactgaggtgcatccgtgtctacacgtgcaaattggtgtggcttaattagagagagagagtgtgtgcgcaggccctgcttgtagaccaaagatgaagggagtggatctggtggctgtttctgttttctggagatttggtggaatagagacccagccccccaagtcaatgcagtcagaaaatatatcagtcaatttacggaaaaccgagtccagtgtgagtgtcggccggcgccgtgtagacgcggcctcagcggccgcggggcgcggcgggtcagtgaagagcctggggtcgccagcccacgccgaccccgtccccggggtggcggggtaaccccgcttcacgtcctctgcgtccggggcgctggccgggctcctccggaggcgg

SEQ ID NO: 25545 - DNA, 751 bp, Bovine  19866880979251
  misc_feature (1)..(1): n is a, c, g, or t
natgtcctccgaacctctccatctgagagcaaaagttcaatagcaggtagaggagggatgagttcacagggagacatggtgctcaggcaaagagaaacccttgcacttacactgctcttaggcatgaatgagcctccaaaagcccaggctgagcatagcatgacataccaatgagttggtaccatggggagctgcagaaagaacactagactgagaatctgaaaagtgaattctatattgaccaccactagtttctagtatgaccctaggcaggtcatttaacatctatgggctttagtttcctcatatgtgacagagagggaccaggctggacgatctctaaggcttcttctagctctgacgtgcaatcccatctggctcagggaggagggagttgagggaagcacagaggccctagatgatgaggtattgctgccaaaatcacccttcccccctccctcctcctgttctctcattgacatgcccttcattatcttgttgttgttgatgtagtgtttttcccacagagctctgtgggataggacagcagagaacacacagaacacaggaaagaagagtggcagtaggaaggggggatgaaaaagaagggcttttctagggtttcccaagctcctgtcctccaggcttgcaggctgaggaggcggccttccaggctgggactctcagaaggtgaaggtctctcaacatcccctcccccctaaccttgcaaccttctcaccagtgtccccag

SEQ ID NO: 25546 - DNA, 1262 bp, Bovine  19866881025263
  misc_feature (1)..(1): n is a, c, g, or t
ncttgaacttgatgcaaagtaagtgaaaactgcttttttacaactctctacacaggtggtttactctgcagatttcactagagccaaattgctttcatcccctcttacatgttttccattttttaatctaaacttacaaatgcagtcattgaaaaaaaaaaacaaaactagcctttggggctaatgtatttttttttaataatgattcttttttaatggaacctacatcggcctgacttccttttgtctgaataaaagctctagcacagtataaaagggttgcatgtgctgaaatgttgcccaaggatatgtgttattattccgccccccttgaccagcagggtctcagttctctttccctttcagccttttgtttgaacagatgggattggggaagcaagggaaagaaagccattctgttctcattaactctccccatacacaaacacaaacctgggcttctgggacttagaaacaggacagctcccactccattgccattgagacctggtgtgccgaaatacaaagaaaacctggctgaggacccacatcaccatttcaattgagatggctcaccagcgagattacatttgtatgtttttacaaacacgttcacaaaaatacgtgactacacaacacaggcaaattttacatgtatagaataaatctgtctactgtgtacgctctctaaaatatatcttttcatgaattcctttatcatatataatgacatcctaagaatacaaataacacatttatgatgaaagatacagatattctgtgaactataaaattcttttctcttttattttctttttatatcatagagttaaaatatattgagaatagtggggttcttactattttgtgatcttttgttcagttgtaaaaaatattattaagatttccagtttggaaggtcttgtttattaaagcacttctggccaagaaaaatgtcacaaaaaatttaaaaacatggtccaaatattgaaggctctctctttagaagtctttataaaagtataagacaatatatatgttacatttatacatatacattttacatatatgtatatacaagtatggacttccctcatagctcagttggtaaatcatctgcctacaatgcaggagacccgggttagattcttgggttgggaagatcccctggagaaggaaatggcaacccactccagtattcttgcctggagaatcccaggacagaggagcttggcaggctacagtccacaggatcacaagag

SEQ ID NO: 25547 - DNA, 1463 bp, Bovine  19866881108566
  misc_feature (1)..(1): n is a, c, g, or t
ngcctggtcctacaagtactctagtggatctatgcgtgtgtgtgtgctcagtcacttcaatcgtgtccaactctttgcaactctttggactgtagcccaccacactcctctgtccatggggttctccaggcaaaaagactggagtgggtcccatgccctccgccaggggatcttctcaacccagggatcaaactcacttttgttttgttcctgcattggcaggcaggttctttaccactaacatcacttgggaagacccattgaaactatattgttctataaatagatgtttgggtatgggatgtatttctgtagcctgtgtgggtttcaatcttttgatgtagaacaactttgtccaatagaactttccatggtgacaaaactgttctataaatctgcactgttcaatatagtagccaccaatcacaggtagctactgagcacttagaatataaaacttaattcttaatttttaatcttaattaattttaatttaaacagccacatttgactagtagctacccataatggacagtacagacttgtaaaatgacttcatccatttggatttccatgaatggaaaagaatgatcaaaatgatcactgtatgataatgacacaattctggtttagaagtatgaattaattcttttaattttgacataaatagaatgaataaaagcctgaaagtctcactcccctccaggatttgggtgacatctcagagtgtgtgttttcaatatccaaatgacaaaatgaaaggaaaataatttataaaaaccaggtattttactagatgattacctatgtgttttgaatatcagtagatgcttatattaatagcatcaaactctttcacattctcagtcaacatttttaggcaaataattaattaattaataacttactgttaaataataacatctagataattaattcaaactgatgtttggatcagactcctgaacaactgggtggtatgtctacactggagcaaaatttgcttgaagattatgggttcaatattatagatgaagtgttcttgtatgaagtcaatcatttttgagtggtaatatagatatgaaactaagaacaactaatacaaagcaacacagaatccaaaattttttatttgaagaattttgtgatatccttaaatttaatgtacaggtaatatccaaaaagaaatgccctcaatattttcaacagagatagaagctaccagagactcactgggtctgattctgatgactggaatgtagctctcctaagatgctgcctgcacttccgagcttcttcttctgattgacccatgttgatcagcctggacacacaacagactagaattttgtcacttttaaatctgccactttctatgaatatggttgactcaggctagaatgaaaactacagttgttcggccaaattctaggcaagggtttcagagcacctgcttctctggt

SEQ ID NO: 25548 - DNA, 1485 bp, Bovine  19866881160903
  misc_feature (1)..(1): n is a, c, g, or t
ncccgcagtcacctcagaggcgatggaggtgaagctgctactgaagtgcacatgcttgtgcatctcgctgccgttggccgtcaggagccaggccccgagggcctggtcttcgccagccgactggttgctgtggctctggttgggcaggagctcggccaggtcccagtggtacgacgggtgtggccccgaccagcgcaatgaggatggcttccgtggccacgtagagctgaaagaggaaacacacagagccatctaggctggaaatgcaattagcaagcttacaaaccttcaatgagcagtcttgcttttgtgtctgtgctgctgctgtgctgctgctacatcgcgtcagtcgtgcccgactctgtgcgacaggagctacagaaatgagacacttcagaaacaaaggagaaaatggaaggaagcttcctgatctactacaaacggaaccatcagctatcgcatctgtaaagcaccctgtagttccttcaagggttttttctgtatttgagatacatcagatttgaggacacagcatagaatggttccacactcgcagggagtaggggaggagggatattacctgccctgacttagactaacattctagttattttctcctcaacaccacacattagttcagataagcagttaccagggcacaggagtgtcctggtcttggactcatgatctaaacaagaaaacatgttgtggcatagttaatgtttccaaaaacagtatatgtgtgtgtacatatacataaatcaacaagaccacacagtgactccaggcagattgtatatacatatatatgagagttaactcaggcaggttgataagaagtccaagcctaaggcccctttaaggaggacataaacattagacaagtaggcctcatgggcagcagtatctcttgttcaaggacatgcctttttttgaactttggatgtacgctatgagagaagtgaagtgaagtcgctcagtagtgtccaactctttgcaaccccatggactgtagcctaccaggcttctcagtccatggcattttctaggcaagagtactggagtggggtgccatttccttctccaggggatcttcccaacccagggatcgaacccgggtctcccacgttgtaggcagacgctttaccctctgagccaccagggaagcccacgctatgggagaaggtctgggcaacattttcacagccttgaggtattttcttttctattctcagcagctagcagaaaagaatagaaggctctgcttaaactagcgaggcgggtgctctcctgcccacttccagtgcctctatccctgttactttaataaaatctacacaaagctctgagtgattgagactgcctttggtcccagagttaaatcttctccttgggagaccacgaatccggcagcaccgatcaccataagctgttgtctatgtgtgtgtgtatatacacatacacacacgtcagggaggaaggacg

SEQ ID NO: 25549 - DNA, 751 bp, Bovine  19866881191653
  misc_feature (1)..(1): n is a, c, g, or t
natctcctggaggagggcatggcaacccactccagtagtcttgcctggagaatcacacggacagaggagccttgtgggctaccgtccgtggggtcacaatgagtcagacacgactgaagccatttaacacacatgcagtaaagcccaggcaggacccagtgataatagtgattgagaaatgaagtcaaacttatggtaaaatctgcaaaaattgatagtcattcattttgcagactcgtaagagaggaatcagcaatgattcttatgtttttgaagtcaataactggggaaatggaggtagtagtattaactgaggtagggaaaacagaaggtggagtaggacggaggtgataggtctagaggcctcagacaaatggtggggccaagaggcattgctcgtttaaatggccattgcccctttaagatcctgcccttcccccgcattaacccaccaaggcccctgctggatttccttgccctaatttacagtctgtgccagagcttctgagcatgcgctgaaggaagagctggcctaattaaggctctcctgaggctcaaggtattgcatctgtggctcttagcaaagagttccattttgagagcatattttccccatctgaccattctttactcatttttctttttctcaagttcttttctaccataatttaatatagtacctgtatttccttttataactcagaagtaatgaacatctggggtttttgaataataaaaaattaaaataata

SEQ ID NO: 25550 - DNA, 1276 bp, Bovine  19866881195163
  misc_feature (1)..(1): n is a, c, g, or t
ntttaccattagattgagaagggaaatcttaacataggcataatgtaatctgcaattacaatgagaagctcagcagcgaaaccctgtgcctggcaagagacaggcagctgggtgaaaagtatctccatcatgggttgtgtggatagagcactgtatctttgcctcacgtgtttattgagaggaactgggcttgatttatagctagtgcaatttactgctaattaccaatactttgcagattatcagaggttaggtgagaaaaacagccatgtcaacttaatagcactggtaccaagaattcccaagagatcaggaacttggaagcaaacgggagcagaaatttataggaggaactacagaaagctgttttcctttctttttttaacctaaatgtccattgacagaggaatggataaagaagatgtagtacatattatatacacaatggagtattactcagaaggttgtttttcaacttgactctcaggttaataggaacatcaaagggattatttcagagtctgcttacttggtgtctgtctgtctgtctgtgtctctgtctctctcgcctcactgtaaatgcccctggtattccttaagaaaccaaaaagcctttagaaaattacaaaagtcttagcacagaggacaaaggcttcttagactgggtggaagaaataatacagaatgtattaaacatggggggacatttatgagaagacagaggggaatttcagcaagcttaaagcttgaaggtaaaagagaaagaccagaaacttttcatccttggtgttccctttccctcttccctgaaaaccttcctactcaggatgaatacagatctgaggaaaaagcagcatcttctgcccttaaaaataatcaagagaactcccagacctgaagttgtgagaaatcctgatttgaacatcaggcaaggaaagaactataagatggtcactccttcctgaagctgatggagaaacccagccagatctcacaaagtaaatcaggttttctcatttcttcttccagctgaggttttgtgaatttggaagagacaggaggagaggagaaatgaacagctggctctacagataatatccaaaaagaggatttggttctctaaaccatggcttgtgatactagaatgataggctcctggcaagaagaaggcatctcttaaaaccaggatgaatgtgtttggcaagaagctctgtgatctgataaagaggacttcaaaggaaatttagagaagggagcagggaatgggtcagacaaa

SEQ ID NO: 25551 - DNA, 796 bp, Bovine  19866881222049
  misc_feature (1)..(1): n is a, c, g, or t
ntaaaaataatggagtaaggattcagacctttgcagtgccaccttctcattccacaattaggagagaaagaattccatcaggggactctggaaagtctaataaccttcccaatatcacgagaatcccagggacttctactctgttgctattatcagggtcagttctttaaaacgcacccaaatctatatgctgttggctgtggaatatccagaagatatggtaactacatcagtctactatgaaaacttcctatgtgagtgagaaaactcactcgtgttctgaggaaatccaaaatttattaactttctaccttggactacagtatattgtggccatttttggaaaagcaattatttatatttcttcaaaatatatcatcctcttcatgggattataatctctgggtgagcagagcccatagggtatgcttcatgtctgccttgtccattgagaatataaagcagatatctccataaacacaaccagccccatggatggatgggtggataggttgagtgatggggctgtaggaaagtttaggagagactccagcttatcatttcagatagtccaaaaaaaaacccacaaaactgtaaaataagaaactggagggcacaaaagtacgctaaaaagagtctaagtaagccaggtacagaccattttaacaggctggagaattcaatcccatagtcgaccaagttgggataaagttaatactatgtaaaacaatataaaaaataaacaatgtaaaagaaagaggatctttctccttcaggagtctccaaaattgcagta

SEQ ID NO: 25552 - DNA, 2411 bp, Bovine  19866881275628
  misc_feature (1)..(1): n is a, c, g, or t
ncctggagaattccatggactgtatagtacatagggtcgcaaagagtcagacatgactctgagcaactttcactttcaccaccatcagaactaacctgcctaactcacgtgggctcaacttggccacaagacaacacacataaatgcaagcctctctcaaaacagcttccaaagggggaccatgttcccccaaagggaaaatcaccaaaaaatctgtggcaggacttccctaatggcccatggttaagattccccacttctaatggagagggcctgggttcaatccctggtcatggaattagatcccacaagaggcaaccaagaccaatgggaaagaattctggggggaaaaaaaatcagagatctactaaagattctgaaacaaaggcaggaggatcattaaggacaaactggattcctgtggttttgcctaggaaacaaactcgggcaacatcacatcaagagggtggaccatataagaggcttgagagatgggaagtagagaaagagccaccagacatcgtctcatatcagggcacacatcacataatgctcccccaggccccactctctgagtcatctgtagccttcagagaggtaaggtaaccactaaatacacaagccacctttactcattctgccaatcattatgtagaaacatgtacatctgactctgaccctctcctctactttggagggtgaaggaagaggtaagtgttacctatagatgagagttcgggtgtgcaggacaaaaggaaaataagacaagggatctgctaaaacgcctgtagtcaggaaccacccatggtgggccagaccacttcccttgcccctggagatacatctcttggagttgcattgtgacttccttcccagacaggcaagctttgctcaaaatatgtaaatttaacatgaaatttctcacaggaagaatatttcaaatgtgggttgcagtatcttaaggcaacattgcaaaaggcctaaagataaaaattgcacaagagttggacactgaagtgggacaggaagccttggcttgccttcatgctgttttgctttgttggaacagagctcaaggttcttatgcagtgttgaggcattggcctgacagtttctgaaagactcgttttttcccctctttcacagaagacttcttccactgcattagattaaaagtttctagtggaaaaagagtggcaatgattccaaggaagagctcagagatgaaactgtgatgtataatgtgtcaaatcttcacaatgccactgccaaaaccaagagatgcctcattacagagaggcagtgggagacatcgtggccgcttccgacagcacatgttacttccatgtacagccagaagatgaatttacaagaactggagcagcacaggctccctaaagaggaaactcttactactgattcactataattgtttccttactggtttctccagctcagattgctttttccaatttgatccactgtacatcagctctcagattgatcattcttttgaatccccactctggtgtgcctaccctcctaaatctttctaaataccttagcccaattttcctgaatctttatttccttgatgattttgtcctatctgaataccatctatattattacttcctgaatgttgattaaattgcctcatttattttgcttcactgtaagcaatactataattactgattaaatatttttagtgtgcatgcatataaacacccaactttaaaacgtccatcatgtaccaccaaaagtcatcttgtgaattccctactggcaccatactttggggaacacgattcaagatctgcccatggctccagccaggtgcccttcatgtcccctgcactccagccgagggggatgactcacctttccccacacagcacccacatccatgtttgtcccaccaccatctctgcctttcaaattacacaatcattcaaggcccaaaaccctgacgcccccccctccacctcttgaggccttcgacgactcccccagcctgaagggtatctcactcctctgaacctcactgcccctgaagcactgggcacttctcatttgggactcagtgttggtctcgaaatgggaggtttgggtagatgccatctcccctctcagaacatctgcagccttcttgagaccacatcagtcactgcagagggtctggcacaattaagactagctgaatgaatgtatctccctcactcctcagtcccctctttgtgtaaaatacaaacttgagtcattctcctgctccccacaaaataaagtcccaataacttagcagacacaaagagacaaggtctctcagtttggccccacatgtcattttatcccctctgccatctccctgctctcctcccagccagcaccccaccccaaccacactctag

SEQ ID NO: 25553 - DNA, 1383 bp, Bovine  19866881296209
  misc_feature (1)..(1): n is a, c, g, or t
ntcgtgttccgtgccctcctgttggtcctcatctttctcttcgtggtctcctattggcttttttacggggtccgcattttggactcgcgggaccgaaattaccagggcatcgtgcaatatgccgtctctctcgtggacgcgctcctcttcatccactacctggccgtcgtcctgctagagctcagacagctgcagcccatgttcacgctgcaggtggtccgctccaccgacggcgagtcccgcttctacagcttgggacacctgaggtgagggggctcttcctcctttccgggggcggaaaggaccactgctgttttgctagaagacagttaagtccacagcaagtgagggatgttgccaggtgccaagagcaagaccagggtctgactcttttttttcagattttgggaggagctgtgtgtgtatgtgtgtgtgtggagggggaaattcacgtacgttgactttgctgaattctggatggcatgtcacagggactggctgtcttccaggttggagttttgttgggcctgtttccaaaattgttcacagctcttaagaatgatggagaaaggaagccttagtgatggctgctgaccctgcccccaaaatcagcctgtgaatgatggagtgatcaacagttttgttcataatggtacatctggtttaccgtgttgtcccagtggaattattaatcattcctttctcccccactctcagaggttttctgatttgggcaataaattatatggtcaccctagtgaccttccagtaaagaatcaggtgtagattagagactctaaacttgtaagagttgaaaatgtatacatgagaaaaaactagaaatactttaagatgtcatatttgaaatctatacacaaaatctaattattttgtgattaacaaaaagagtgatcattatttattgtattcagtattttgttctgctttgtttttatttaccttgagataagcacatcatatagattgtcttcataaagctcatctgtatttcagatgaggaaacagggctttaggggttttaagtaattaatacaaaagaacatggctagctttgtgcagaatctagcagaccccatgaagccaggcctgagttaatgtcctcattgtagcatttctcactttgtgtcactggcctattcttctgttttcttgcaccaactgtgggctccagaggacaggtgctgcattttactcctctttgcatcctcagtgcctgacctagagcatggcacacggttggcacccaggtggttacaggtgagagaacaatctgagatgtctgacattgtcttctcacggggctctcctgcctcctcgggcaatatatgtcaatgtgtgtatctgcttggcatatggtatgtg

SEQ ID NO: 25554 - DNA, 1301 bp, Bovine  19866881392208
  misc_feature (1)..(1): n is a, c, g, or t
naatcagctacaacctgatacaaaacaaaaaacttaacgtttaaaaaaaaaaacagaaaacaaatactcttcaggaaatggaaaggtagggaaggatgatggcagtgatactgatcataacagctaaaatttattgagtagttacactgtggaagggtaatgctaagcaatttatgctccccaaaccccatatcattatgcccaccttgcagacattgagacttaggttatctgcttgcccaagaccacacaattaaacatgaagaagaccggactggatctcaaacaccatggcttttgagatttgtgaaaaaatcctgagggctgttatcccttattcactgggactcatcatagatgggaacagattccctttgtttagccagcaccactgcaagctggcttgtagcggcagagcttgctttccattgatgctgctcctggggcttctaagaggcatccagacttttaagacaaagaaaataagaaaaaattttaattatgtttagcaaaggacaaaaatatgcttgagatcagtattgttattggcataataggaacagataatgaaaataaaatgcagcctcttaacatttatgttccttccatttttcctatctaggaaaataacttcaagttagaaaaggtaaggttcccacagatgtcagtgacagacagtggaatcccaaggcaagagagaaggttctaaaggaggcttttgggtctaggggcctggccagaaaatttttattttgggagacttgctgtctccttcaaggggctgaggctttgcagaaaggtgttagaaactcagccttgagaaaatgttcatcctttaaataaagggcagggagtttggatggtcttttatctggtgagctgaatgctgttaccagatgagaggtaaagagtctgcatttctccagacttgccagtttctttctgagagagttgccagacgggttttgcaggtgttgtgcagactgcatttgggttgtagcattgcatttgacagataaggtttctgtccttaaagatggtgtgtacctctgggcaagggctgatggtggccaggttgagtatatgagtaactgattgtatgtaaagtactaattaatggcttgatgttgatctgcagaatggatctttcacgctacagatttctggcctccatcttgcctggttaagtatttttattaatgacttggataaagacattgatggcctgatgataaaatttgtggatgacacaaagctggaagagatagctaatatacctggatggcagagctgcaatgcaa

SEQ ID NO: 25555 - DNA, 1275 bp, Bovine  19866881413084
  misc_feature (1)..(1): n is a, c, g, or t
ntctccccctggagtgagggaaccagggctgagagagaatgacgactcaagagtcagagtacttctgcaggctgcctgcttgaccataactttccatatcacaattaacattatgtctagatcatgcctcgaaacccaagatcaatcagccttgagtcagctggagctaaaggttcttctgaagaccccctgaagttgagcatgtttgtatggccctctctgttgacacttgtctcagcctccctttcactctcataaggtctcaatgatattttggtcagttttgaaatacaaactatattttgtaaagcttccaaggtgaccccaaggaaaagtcagggctgagagtcatggctgcacaggatgaatggaaaacttgacattggctttgatgaactagcaataaagaaaaatgatcaagaaatgaacatatctcacaaaatataaagtacaggtatggtcacaccataggcaacaagaatgtgtgagcatacagctcacagactcttgaggggacgatgtccctgtcttcccttcccacactccatccccagaattatctaggtataattgacatttgtgaattttgaaagttttttttttttaactccttgcatgccacttaaaatggtctttggtgttggagctatgattaacttattatcaagcccaaggactatttgctgacatttttaagaccaaaaattggaggatgcttgacaaaaagacttcttagaccactcatccctcacaggtgctgggacccaacggctagtcctaagaccagcttacatcacatcaaaatgcaagagtagatggcgtgagcttcagccccctccctcctgaattccacctgctggagttctgtgagctgggaaaactcactagggaggttgggcagcaagaacatgttggtgagggtgtaataatgagtgttggtgctgtcactgtggttttcattgctgtaactgttccccttaattcttccctctctctgttagttctcactctgagcctatacacaaagaaaatctgaaatcttttacattgaaagtctctttttataatttttagcctaatcagacattttttagtatggaatatgactgtgaggtttgctgactgggaactctttctttggggaaaaaaattcagttttggccgtttcgagatgatttgacatgttttaactatttagtggttttggcacaaccaataggaaaatagagcatctggcaacaggacttaggaagatattcaggttcagcaaaaccg

SEQ ID NO: 25556 - DNA, 2226 bp, Bovine  19866881595676
  misc_feature (1)..(1): n is a, c, g, or t
nagtgataggacattgctaaaaaataaaaaaagaagaacattgctaactggctatataaacaaacagtggagggattccctggtggtccagtagttaagactcttagctcccaatgcggggagcatgggttcgatccctggttggggaactaagatcccacatgctgtgtgtccaataaataaaataaaacaatatttaaaaaatttaaaaaaacagtggaatatatatatataatatataatgcaatggaatatagatttccttttatattgcacaaacaggactacaaacagcaaacactacacgtaccgtttgctactaagcatttctgtttaacgggctttccaggtggcgtagtggtaaagaatcgcttgcctgtgcaggacatgggttcgatccccgggttgggaagatcccatgtgcacacattcctgataagtgtaagtgacctggggttcactgagcacagtcacttggaaccccctggcatggctgacccttagtgcgctcactcgcacactccttctgtctctggatgcaggctgacagtgtgtggatggatattcccgatgatgatgacctgcccacagctgaggagctggaggactggattgaggatgtgctttctgggaagataaacactgaggatgatgacaacgaatgatgaggaggatgaagacgacgatgacgacgatgataactctgatgaagaggacaatgatgacagtgatgatgacgatgaatagcctccaactccagatgagtttcacaaagacggaacccatagccacccactaccatgcagacagcacaaggcggagcacgcagccccggcccgcgtccagccagttcctttccctttactgacatctctttccccgcttctttctcatcagatgtgcaacttggcaaatgcctttctaaatccagcagtcctgctcgcttagcaaggacagtggggaattattcccatgttggctgtcttgattgttatgaaaaagctttcgttcgttgtcagatcatcagtggccatggcagtgcccgaatctggttgtctagagagagcaatcccctaacacctcgattcaagtttactcgtttgactatgatagtagcagaatggacagcttgctaagtcacaagcacagcgtgaccttacaacagagcccagggaagacacacaatccatttagcccctgtgcttagaatattagttaggatccctcctcaagccaagaagatcccttttagggaaggctcagtcttggaaataaattttgtaaatcagcttctcttggttctattaaacttattattttaggtgtaggtccaaccattatgaactcagatccaaggctttggatggctattgagaggttctgaaaaacatgcttactgattgtcaccatcatttctagtatattaggctattgggatgggaggttgatttgttctctgaacttccctgtagatgaccttcttacatatacacacaggggttgggggagctagaaggattaaatgtttttaattctttctgatgtctttaggtctctgattgggtcagctggtgtcctagcttgagctgggatcctgatatccttccgtcttgtcgctgctattcagccttcccattcagagtccaagttggtttttccagagggcgattccctctccattgatcagtgctcccacaggtgaacaggacaacagtcattaggattcataacgatgctctggggcactgaaaaaatccccacgtgcctttcaaactatctagaagttatattgtgttctgtagttttagcattgggtgtgcattctaatgttctaatttattttctcagtcttttaacacatgggtaagacactgcaaattctttgaaaataggatgatccttttatggaatagcagctaactaactgtcattaaagttttattttgaaagtactgagactatcttgaaaatcctctcttgatttttttgtttttctgctcattctttcctttctgggctcctgttcttcctctctattccttcttagttttcctttctcctctctcttcctttgcctaccctttgaatgtcagtcttccacggtatctctcggctctaacattcttccaaggcagcttatcatccatgcccatcagctaataacttccaagtctgggtctctaaccttgacctctctccttggtttcagactcactcattcagctg

SEQ ID NO: 25557 - DNA, 611 bp, Bovine  19866882066486
  misc_feature (1)..(1): n is a, c, g, or t
nacccttaagaatcacttttctcatctgatgttggggggatcatcatcttgcatatatcacatggtggctttaaggaccaaataggaccacctccataaagcccagagcacacttcctccagactcttagctctttaagagacctgtactattttctttggtgactgggtaggggtttggttggtgcaatgggccccgcggagtttgttagcaagagcagctatatcaggaagtactgtctgggtaggaatgaaattcctagtcctgcagccaggcccctctgccctggttacacatcagtgacctgcagtaatgactgactagttgcagagtcaggaactttcacggaaaaggctttctctttcccagcccggagccggggccagtcccccaccccctccctgaggaaagatgctgtgagcccatcctccctccccaacctccacccccagtgcatttcttccagcttcccagtaacaagccccagcatgggctcctgtggggcaagacaaggcttcaggcccagggatatttgcgcagggaggaggtggaagtagtttcaggagcttgattcattacagcagcaatctcggtcaaacaggttcctgcag

SEQ ID NO: 25558 - DNA, 729 bp, Bovine  19866882186615
  misc_feature (1)..(1): n is a, c, g, or t
ntactagctcattgtgccctcttcagcagtttgttgaacttctctgaccccgctacttcccttatctgtctttatgaatgaatatatgagaggctgaggcaaatgccatacaaatgtatcttacccggaacagtggttcccaaacccccaccagggcatcagcacttggctcagagcttgtttcagtcagtcccaggtggctcggtggcactgttgggttgggaaaccctgcccaggcacctcattgtctggctgcttagccatcctaaaggaagttccctgccttctctggttgcgttttggattgccccaagtcttccaaaacacacttcacaatcaccgcttacccttccctttgggaaactttatttacagagcactgctgtaggaatccagaattttaccacctgcaaaattaatttttcctgcccttcactctccactggtgttaaaaagagtgaaaccgggaaaaacttgaccagcttaacacccatttatagggtcattttgtactttagaaataagctgcttgttttgcccagttctcattatttggtggaatattttctatgaaatttcccaagcatagacaatattttgcagaccaaaggatacacagttgttattttaaggtaggattgtaattcatataggctagatcacaacattggtaaatgaagtttaaatgtgaacagaaatttacctccctcctcctatacacaggggctt

SEQ ID NO: 25559 - DNA, 1791 bp, Bovine  19866880244510
  misc_feature (1)..(1): n is a, c, g, or t
ncagtcctgtggccactgctgagtgttccaaatttgctggcatattgagtgcagcactttcacagcatcatctttcaggatttgaaataactcaactggaattccatcacctccactagctttgttcatagtgatgctttctaaggcccacttgacttcacattgcaggatatctggctctaggtaagtgatcacaccatcgtgattatctgggtcctgaagatcttttttgtacagttcttctgtgtattcttgccacctcttcttaatatcttctgcttctgttaggtccataccatttctgtcctttatcaagcccatctttgcatgaaatgttcccttggtatctctaattttcttgaagagatctctagtctttcccatcctgttgttttcctctatttctttgcattgatcgctgaggaaggctttcttatctcttcttgctattctttggaactctgcattcagatgcttatatctttccttttctcctttacttttcacttctcttcttttcacagctatttgtaatggataaaggcaatattaaaaatttgtgctacttttgattgttttttatatctgcctttcttaaaatctgtataatatccttattctataaaggcaatttttaggagtagggatataagcaaatttcatgatattctagaaacgtgacttcaataaataaagttcagaaagttttgcaaaatgaatgatgggtgtgttcctagaatatcctcatcatcagttggcttggtcaccaagccctctttcatatagggctgtaatgtattttaattaatgtaaactttggcacagatatgctagtcatccactgctttctagagatgttcagacagtagcagaagcttttttagctccattttcctcagaaataatgcaatctttttgaaaatgtcttgatttccatataactaaggactgttacaataaaataaaatccagtgaaaacaggcttacacctgaatggcactttttgtccagatgaagatccaaaggagggcaaggttcagggttgatcaatccagttgcttcatgacttaatgacatcattacttatttctgttattcagtttgtcagctgcatgatcagtttcatccttcgtctggatcatctggggctgtcttattcatatctagcaagacagaggagatccccaaaggttccagaaatctcttttcatgagtctttgatctgaaatgtattagatgctcatctctgaaccaataatggtaccaagggagaggtatttgtggaacagcttagccctgagccccctgtccaagtcctagagccaggggtggattcagcatctggtaacataggtgagatgatcaggagagatgtgatacctcaaataaaataatggtatgaaccaagaaaggatcttaggtaagcagtcacaaagcccagtagagcatccagcacctggaaatttcagctcatgacttgaaaacaaaaatgtggaaagattttttaaaatgagtttctagtctattattattattatagcattaattgaatctattatacttttcattaaaagttcatttttcctttaaatttttacatgcttaacatttaaaaaatatttaaatgtagtgatagcagggaaacaattttgcattctgcttttactagcatttcaatggctgtatcatactccattaagtgtctcagtgatataatttacttaactattgcttctctgtaggacacttaggttgtttgtatttttgatattggaataacccaagtaacaa

SEQ ID NO: 25560 - DNA, 1479 bp, Bovine  19866880414426
  misc_feature (1)..(1): n is a, c, g, or t
ncatcaaacgggtttgtctttaacctccaaacagggaactttaattaaagagacagtgaccccttttatgagtgtggtcgagttgggtttcagggcccttgtcactagcggctcacataacgctaacaaaagcttgcaggccccaagaggagccggtctccctcgtagatattacagcaggggcacagggtggggatagggggcatggagaagggggaggcaccccagtggtagcctaggtgaagcggtcactgggttcgaggttggaggaggggcctgggctgagggcatagactttctgcacagtacccttggggcatgactcctatccctccaaccatccggatccagaatgcgttgggtgggttggtggcaacttccttaatggttaggtgcgtgaaaatgtcaggggttctcatcctgtttgcctgttggcttgtattataaaattggaagtaatttccaggaggaatagattagataaaacttactctaagaacagtcagatttttttactcacatattcaaaggcaaagtgattttatgataaaatgtaattgctaataagtataataacaatactcaacatatggcatgaaacacaaattctgtcctgaatctggaagtgcaaacactacacaatacacactgctcggaagggagctgtccatccactgcaagagctaaatccaggcccctctgtgcttcctgctctccctcccccacctccatctcccttaaaagtcccaaagtggacaactattgggttagtgttaggagtttgaagggcccttatcttacatctaatcacctcttaactgttgatttttaactaagggcttctctaggtcctataagagatgtttgcttgccctttgatctagttctttgatatcctttgtgaattctttaagctggcgagggctgccagatctgccacacttattcattcaacaaacatcaggggctgttgaaagggacctggggagtaattaattatttcctaaacggtgggtttgtcctaagtgaggtacgttcccactaactaggggctaagttgtcaatgatctgcatagggaattagccacctaaatggtaagctaaggttgcctctactggcaactagggttgagcctaaaccagcaaatttgtggaggtggcatttaaggccaaaacagaatgaaggggttcctcagtgccccctcaattctattgccatacatgggctcctgactcttcctggtgacacatgctcttgccatgtggggacacttaggttagatgtagggacacctgtgagaagacccacaccaagggaggcgagctcacagaccaacagagaatcgcgatggtatcctggatctactcactcgcacccgtgggccttcccgggggcacacacctacccatgtgagcagcctgtgtgtgtgtgtgtgtgtgtgtgtgtgtgtgcccctggagtgcacccacccacagaga

SEQ ID NO: 25561 - DNA, 1441 bp, Bovine  19866880500171
  misc_feature (1)..(1): n is a, c, g, or t
ntgggaaagattgaaggtgaaaggagaaggggccaccagaggatgagattgttggatagcatcaccaaactccattggacatgagtttgagtaagctttgggagttagtgatggacagggaagcctggtatgctgcagtccatggggtcgcaaagagttggatacgactgaactgaactgacccatctgtgagcacttttctccagctggggtggggagccacagcctaggcaaaaacagagacactgcctcaagtacttaactgggaggcaggcagcacagccttgcccaagataagcgccttgaccttgaccttagtcctgacctcagatcccagattcacaatatcagccatgtgatctttggcaagttacttttctgagcttgagtttcttcatctgttagtgtctacctcaggattagtgagcgctaagtaagctagtggagtgaaaagtgcttagccaagtgtctagcataaagcaagaacttcaataaatgatagctgttattatttagttttaatctgaggcttttctcagatgataattaaaattgatcttagtattttggggttcactgtcgtctgagcaaaccatatctcttaaaattacagtgtatgtgttctctattctgatacagggagctccagaagctgctctgtcctgctttgtccctgctggcaaaaaattgtgattttccccctccccctaaactcagcatgctaaagctgaggacggggtggtgggtgatgattttccatcctatgtggacatgtcctgataactcccttttccttgctaaccattcgccaggctggaatcaagagagggcaaaccagaaggcccagcttcgggtttgactcccaggacgaccggctggaaggaaaagcaacaggcaaaacaggctcctgaggcactggaatagtgagactacattgttacactggtgacagtgtctgctgaagaagcgccagagctgtatgcacatacaaaataaaggtcacgccacctcaagggagagtgctggcaaactagaggtggagatggcaagacaggaacagaagtgctgccacagggaacaaagaagcaggacaacttgactaggccagagttgtcttagggaacctgtgctcaagtttcaggctttcataccttcacccaggacccctgctacagtgagtaacttggtctgtgcaaatcctggagccaaacactggtgtataggtggctgaggacaaccagcactggcctctgccacttatttacagccgagttggggagaataacctagcaacaacaagacccacatttgtgttctgtgtgaactacactagaatcttttcaagtggggtcctctcatagccaccctatgaagctatgaaggaagctatgaagctgccagggtagtgacttaaagggtaagaatccgcacaaagaatgac

SEQ ID NO: 25562 - DNA, 1082 bp, Bovine  19866880515343
  misc_feature (1)..(1): n is a, c, g, or t
nttgctgcaactgactggctgatctgtttctcctctgtgtccccaccaactgtgatagcccccactgaagagaaaaaggaaaggagttgggaacagggcggatcacatacctggttgtttttccctttttgatgacatttgctttgcatctctggagaggcctcccagcgaatctggagggggtggtaaaggaaataggctgatgcatagaacccaatgcctttgcctctccccattacctgtgggacaaggtgatagggccccagggtgaggaaagtgtcagaaggagcattggatgtaaaggagacctgggccaggaaaggcagtgctgtctgaccagggggttaacagaggactgacagggtttccaggaagttgaggtcctacgatgctgaatgaagctggataccctctgggtggtctaggctccaggggctgacctctttgtgagtcccatctcctatgtcttgcgcattgagagagaacagggcacctcgggctcccaccagcagccttgcagaggcctcctccagcagcagtgttgagtagttctgggcttggcccttgaagtgccgggtcccagagagctctggggagagcgggatctgtgagcccagccctgggactgcctgcctccccacctccagcccccggctcctgctgcctttcgaggttggggctgtcaaaccttcgtaggggatggtcatccgtggggtggcatctagttctctggatggtctccgcagtgagggtccagggactgcagttgctgtgaggaagctcaggaggaagggccagagcctcccccacatcttcctggggaggcccagaccaacaagactcccaaagggagccagggccagaggttgggggatgatgggaagaatagtcacagggtattaaggtccagggaggttgcttagaaggtcagaggtcatggggccagggagggtcctggaatcgggaagacatggaatcacatgattgtgcggccatggaatcccaggtaagaggtcaagaagaggggtggattccagactgcctctcggcatcagttacaaattccatggtggggtcacaca

SEQ ID NO: 25563 - DNA, 2154 bp, Bovine  19866880535020
  misc_feature (1)..(1): n is a, c, g, or t
nctccctctctctcggcaccacttctcttacagtctaggctttctcactgccttgggctgagctgggaaaaagagtgctgtccctgctgttctggcccagctgggtctcaccagaagctactgtgtacctgtttactgtgtgtgattcttcgctcagggtaggctgtagccaggtgttggctggatatatgttgttcttgctgacctgtgttttctccttaggggccaaagcagtatccttacaataatctgtacctggaacgaggcggcgatcccaacaaagaacctgagccagtggttcactatgagatctgaggaggcttcatgagctttgtgttccctaactgactccttcaatcctagaaatttaactttaatgaaatccctaataaaacttagtgctgtggtatctgtgcctcatttcctctgggaatagctactgcttaagcatagctcatttgaaaagaccctgatgctgggaaagattgagggcaggaggagaaggggacaacagaagatgagatggttagatggcatcactgactcaatggacacgagtttaggtagactccgggagtcggtgatggacagggaggcctggcatgctgcagtccatggggttgccaagagtcagacatgacagagtgactaaactgaactgaagcataagaggatgttggtctgttaatttcgctgggaaaggtagttgagggttccagttgtgcagcaggtagttacgggtagctccccatttacagggcggttctgacttttcaaattggaacagatttatttcccataaaaaaacttttaataatagtagttagctaaaaaaagtgtacttttacatgtttcaaaatactataggataaataggtgttctgggacaggcctagggctgtgattgcctctaattttgtgtgtatctcataagaatatgtatttattaaaaacacaccattgtaaataactatacttcattttaaaaaaaagagaatatgtattccaaagcagcttctgaatcctagactgttataagttgacattacctatatttatgaattagaggatagtcactgagttattactgaacctatgcatggctttcattaccttaatgattcatccaagctcctataatagccttaggaagagaaaaaccatgtttttaagggtctatctcaatgcatctgttaaagagaaccaatttatgttcttttcttccctttagggacattttcttaaattacagtgatactgcctaaaaacctgtcccataaaaaagtgtacattcagcatgatctatggaagcaagtgcattcacattagataagtggtcctttggaggtgtgaagacagtgaaagacgtttatgagatcagggagtaggtctgctgaaatgcctctttttttttttcttcttttttgaaatgcctctctgaaggtctccactgctttttatgtcttcattctctgtcctttaaagcatttgataatcatttaacaaacgtctgtctgcctaatatatatgacactgataggccttggggatataaagttgaacaagaaaataattgccttcggtgagttacctagaaaagaaaactagcatttataaaacaaggtgaaaagaatttctaagatgtcccagttgcaggaagagtgtgttttttgttcttttttaaatcatgtcctacttgaaactaaccttatgcctttggttcagatttctttcagaacacacaccttggcctcattccctcctttaaggtgttgcctgaggttcagttttcaatcctgtttcttcaccagtaccctacattcttttctgttctgagttcaaaactcccatatccatgtgaaaaggaaatctagagctgtgtcacaaagacagggcccagtcataatcagctcaccatctttggaggtatatcatactggactacagtagaattcatgcattaaagttctgaatcaaaataacttaggtccaaaatcttcagctgcctacagaatattttacttggaaatgccataattccctcaatcgatatatatgatcatagatatccctgccaactgtttacctatcagtcacaagagcctgttcagctattacaatctgttacaatccgtcaatccaagagttcatcac

SEQ ID NO: 25564 - DNA, 2262 bp, Bovine  19866880541693
  misc_feature (1)..(1): n is a, c, g, or t
naatatagttccctgtgctttataataggaccttgttgtttatccttctatttatactagtttgcatctgctaatcccaaattctcaatccatcccttccccacccccttcctggcaacaagtctgttctatacagacagtatatttgctgtgtccttcatgttctttaaattaactgtccatgcttgtagtaaacatttaattgcttcctatagaaaatgcccttcacaccaataaaggataagctttcaacttgagattcctggactctaccttaaaagatcacttgctgaaatacggtggtaagtacagttctccaaatggcaactctaaagactagctggcttcttcattctcattcctcatctagtcctacatagtttcttctcactcagactgacccaagatacaggcaaaagctgtgctctggtacttattccaggccagtagctaatagctaaggccctctataggcctcaccaggaagccaagcttggtatcgggtagatctctactccagagactgcattccctcaggaaagtgtgcctgagggagcactcatcagatactcaccacaggctggtaggcggggtaagtttcccctacccaaaacatgaacagcatgaaggcgacgaagccgaagaggtgcttacacatgaggttccaattaacaggagtcggggacgtgtccacacggttcctgatatacatgtccaggtcccagtgcatctgagacagaaaggcagatcaccgtcacatactgctcttcctgcaaaaggcaggcagtccagagtgattagagcctcaaacaagacttgaaaggcattctcttgccctgggcaatattctgagagccacatctgagatactctggcccacaggactggatgctggcttatgtctgggtttggttgatcagacacagtcccaatcatgaacattcacaactcaagagcttcaattattctcagaagtcctttacacacacacacacacacagggaacctcagatctcagagcgcttgaccctgcttccttgggcagaaaaaccttagtgttgttgatgtttagtcgctaagtcatgtccgactctttgtgacccatgggctgtccatggggttctcccagcaagaatgctggagtgggatgccgtgtccttcttcaggggattttcctggatcagggatcaaacctatgtctcctgcagtggcaagcagattcttcaccactgagccacaggaaagcccacttgggcagaaaagtgccatctgatctacagaagacatacggaaaaggaagaaagggcaaatgggacatggttctctcaccggttcaccccagttcaaccgcaggtctgggtggtcccagtcataccatggatccctctcctgctgtgagcggtcaggcagtttcggatagtcaccatacctgagagacagcaagaacttctggacacggctttgagagcctccgacaatgcacagccttctcatctctgagatgagaaaccaagtgacaagataatggcctccccctaaggacagaggaactaaccttccaatcaagatctcagtgttttcctgtggtgcacatattgagaaatgttgggttaaagggctgctggtaaatatcccaaatatccccccaaaaagactgtggcaatttacattcctacaaatggtacaaaagagattaattttcctgaatgctttccagtatcaaaattattgttaataaaatatttgctattttgttttattaaatctcaatttttactcactaagcacagcactaactgcagaagtccaaattgttattaaaaattcatgtcaaactccgaaacattatttaacatatgtaagcttttcttatcttctttcaacaaaaagaaaaaaagtcacaccatgttataatgttagcaatggaagggaatttgacaatcaatcactctgttttcctcagtagacagaaaaagaaactgaagtttagagtctgaacctaaggttgcccagttaactggaataaaaacaaaaaggtacagatgagagaagcactgttcctagcaactgtgtttctcaaccacaaaattgacacacatctcgaagcctcaaacaccgtatgggtgtgataggctggatttttcaccaacaagtccaggttcaacttatacagactgctacggaggctgctcttgtccacaacacaataaaagtcataggaaatgatgacaactagacatgtgtcacagaaagtgattggaa

SEQ ID NO: 25565 - DNA, 1215 bp, Bovine  19866880547555
  misc_feature (1)..(1): n is a, c, g, or t
ncgtgtccctacaggggcaggaccctcctgtgaataggtgtacagtcttcctagggacatgtctgggtgtataaccctctttgttaatccctgagactgggtgccttgctaattgaatgggcatgtgaatacaactttacatgtaaatatgtatagacaggtggcaggccctttaggtaaacatatgtgtgcagacctcactgtgaatgtgtgtggctgactcttcatgtgtatgtgtgctcatagccctcctatgaatatgtatgtgtgtgtatctatgtgcatgcacatctccctcctctggacacacgtgactcatttaaacctctgtcagtgtgccaggcaccacgctctgagtggttcctctgacctggggtgtattcctcttgcccaatcctagaggctgatccctcctagccttagggctccccccgcccctgccccacttctgcactaagcaaataggaggccccaaaggtaaataggtgtgcctccacagtgagagatggggcctgggcagtttgcctggggcctcttgctgccccagcccccagaccaggatccgatgcccctcctgtggtccagggagcctcttcagtctactcatacgccattctccatttttgggctctgctccagaacagtagtgacctttacctcttgaaaaaaccctccaaattccggttttccccctggccaattcccagtccctgccctctcttcaaggccacctagttaatatttgacctggaaggaaagggagaggccagtggcgcttctggctttgtctcatgagattgggtgagtcaggttttctccacacctagcccaaccaaggaacttcagagatcagacctgaagttcaggggtcagatcagacctaccacctatcccaatcccatccccatctggttgccatgagggagggtccaggtgtggtaacagtctccaagatgtaccgagggaggtggccaaggtctcagggaccctatcgttcaccttttccttgttgctcatgcctcagttaagtgaccttgcacgctcgagcttcctgttcaggtatgacaactgcactgctgagagttggggagggaagagggggcagatacccaccttggtgcctgtgagttcctgtttgcaggtaggggcatgtgtggatgcttagccagaggatacagtacagactcgcatgggcagggcagagatgtgcacccc

SEQ ID NO: 25566 - DNA, 1383 bp, Bovine  19866880549439
  misc_feature (1)..(1): n is a, c, g, or t
natgaaatcatggatctagtcaatgatagtaaagtgaaagtgaagtcgctcagtcgtgtctgactcttagcgaccccatggactacagcccaccaggccctccgtccatgggattttccaggcaagagtactggagtggggtgccattgccaagtgactgttaaaatcattaagtgaaaaactgatagaggggggaaaaaagctgaaggggaactttataatggatagatctggctgacagctccggaacccactgattaatcttaatgtcataaaaagaaaaacgataagaaagtatgcggtcctgatatgatgtgagaggaagttcacaccacatgtaaaatagtcttgccaaaaaaccagacctgaaatcaggcagctgtagaatctaccaatttaagggacagagaaacaggttaaatgataccacaggggtgttatcagcaaaattcagagtggagcaaatttcataggataaatggcccacaatttcttcaattaataaatttctggggtggggggaaggaaagaaagtgcaacttttggaatacaagaaacttaagagccatattaaccacacacattgcatggactgtgattaaaacccgattcaggtgaatttgaacattgcatgtgtatttgatgggagtaaggattatagttaatttttattgaggtgagataatggtattgtagctatattaaaatagcccttaaatgcattccatttatgcattttagaaatgcatattgaaatatttatgggtgaactgatttgatgtctgtggtttgctttcaaataaccctggaggaaagggaaatgtgtagggaagaaataagaccagctacgtgctggtagttgttgaaactaggtgctaagttcatggatttttaaaatatgtatatatacttgaaatcctccaaaataaagttttaacaaataagaaaacccaagccacttcaatattttcctaatatattctcctgaaggagggtctttgatgtgagaaagaatgagcgtcccctcacagtcagggcacaggtgaggtcagagagagcttagaggagagggtgaaacccagggtcatcaggagaacctgagtcctctttggagtggagtgctgcttactgcagaagcctctgccttgtgtctttaagcccgactgttccctgttgggtgggagaagaaaataatatatttggccagcttccctagtcaacccaggttaaggaatagggtttgaaaaggctagtgggttggacccagtgcagaggaaggaggtggaattaggtatctctttttgtgaggctttgttgaggttcaggttcaagatcagagaacagggatggggctagagggatgggtgcttcactaagctgggt

SEQ ID NO: 25567 - DNA, 2008 bp, Bovine  19866880559589
  misc_feature (1)..(1): n is a, c, g, or t
nacccgtgtctcctgcacctcctgcactggcaggcagattctttaccactggaccactggggattagcacaaacatagaggcttcaaatagcatgaatgcattatccccagcttctattggtcaggggtctggacgtggttgaactggattctctgctcccatctctcaagactatacccaagtatgggcctgagctcattcagattgttggcatgacccatttcctcgtggtatatgactgtgtccccattttcttgctagctgttagcctataccactctcaatccctacgggctgcctcttttcatgtgcaattcacaacccagctgtctgttttcttcctcccaggcctgggagagaaactcccggatagtaaaaggctggtctgaaaaggtcaggtccacccaagataatctcccctttgattaactcagaactggctggttttgaatcctgattacatttgcaaattcctcttgccatatctgtcctaaatcctcttgccatacctgtcctaagtcacttcagtcatatccaactctttgcgatcccatggactgtagcacaccaggctcctctgtccatgggattctccaggcacgaatactagagtaggttgccatttccttctccagaggatcatcctgattcaggaatcgaacctgggccatatagtggaacataagtcatgaagtgatatcttggtcacaaggcccatcccacctgtaaggggagggttttgacaagggctgagatcatggggactcattttagaattctgcctatcatggtttacaataataatttttaaaaccgatgttcaatggcttccctggtggtccagtggttaagaatctgccttgcagtgcaggagacaccagttcaatccctcgtctgggaagatcccacatgccacaagccaactaagcgcatgctacaaccacggagcctgcactctggagccttgagctgcaactactgagtccatgtgcagcaactcttgaagcccacatgccctagagcctgtgctcagcaacaggagaagccactgcaatgagtagcccctgctctctgcaacaggagaaagcccattcactcaacaaatatgcttgctgtatttatatataccgggcaggctaaaaggaaagacgagggagtcacagcttaccagagcaggatcttcttggggcaccagtaccggctccaacagtcattaggtatcatcctgccctaaaattggaaattctcctcctagtcacatgaggaggatcactgtgtcaagagtcttcaatttggaaggaaaagtgctaggaggaataaggaacactaaagacttccagcacatgagatttttaaacaagaaagaaagaacagacttgactcagccccttaggacctgcctcacttccaaactcgcctttgcacctctaagtccttgatacccctgtaagcctcactggatgacaatcaaccaagctgatgagttacaatcctccaaggagagtccagggcagaagctgccttctcctccctactgatctatgagagtatcacctttaacttcaggtgaggttgatattatctccattttttttttccaggtgagtaaccataatcagagacgataagttactcgttcaaggtcatgcagcaaataaggagcagagctaggattaaacccaggtctgtcagagttcaaaatccatgcccttaattacagtattctttccttgggaaacattatctatctaggctggcattttgtgaggaagatttaaaataagatcctagatatcaaatagaaaggatactctccagaagtgctggactcaaagatggaggatgtttcttcatgtcctctgaattctgcctctctcccccattagctctgatttcacatccttcttccacatatgagaaaattttatacagtcatggccagaccctgtattttccatataatattctgtctgtattatcacctccagcttgagtgaattttactca

SEQ ID NO: 25568 - DNA, 1436 bp, Bovine  19866880569305
  misc_feature (1)..(1): n is a, c, g, or t
ngtgtacatacaaagcagttagaaattagggattctctctcaggagaatggtggtattgcaattttttcccctttctgttgagttataccacacatacaatagagctctaggcttagagctcagtgagcttttacatatgcaaatacatgtgctgccaccgtcagatcaagatttctagtccctgtgagttcccttgcgctcctattcagtcactgtctccccataggcagccactcttctgacgctgatcactgtagagtcattctgtgtgctcttgagcttcatattaacagaatcatacagtatatcgcaccaccaaataatttactgggtgcctgctgggtgccaggcactgtgccaagccctggggatgcaacagtgacgagacagacaaaatcccaaccttcgtggaacttaaattctgctcagaagggagagatcaatactgtgggaggcaacaggatgaccaagggggagagtgacgagaaagaagaaagaggatgaagacgaaacaatgagaaatatttaaaatggggtggtgggagggtggaatggtcagaggattgagagaatcctgagcaggcagccacacagaagcctgagaacaaggagggaatgatccactgtgtcacatgctgctgagaggttaatcaacacatatttatggagcacctgcttcgtacaaggctaggcatggagtggaatggagggtggccataaaactccctgtaataatgatctctaacatgtctatagagagaagggaaggccctggcgggggaaaacaccataaaattccaatatgatcatgtcactgccctgcttaaaatcttcctttggcttctcactgccattgagattaagatcaaaacctcaccatggcctcctgggctctggtgatctgactcagtggacccctccagcctcagctctctcttccagttgctctgactcttctggcttcctggccttgttttttcctcttgttctgctccctcctgccccagggcctttgtacacaccattctgcagcctaaaacacttttctccttcgctccacgcctagaaagatctggttaattctactcaccattattcacatctctgctcgatggttgcctcttcagagaagccttccctggttttccagtttagaacagttccctgggttttgcatttccacaactcactttatggaactttctttcctggcacttatcatggtgagtgatgatatatctgtgtggttattgtataaatgtttgtttttctccaaatcggagccccctgtgagagcagagaccttacctgcttatgactgtcagtgattcccagcacctgcctcaatgctaggcccatcatgagggcccgataagcatttactgaatgaatgagcttatgaatttgaagtcaaaagactgtctttaagccctag

SEQ ID NO: 25569 - DNA, 2040 bp, Bovine  19866880644773
  misc_feature (1)..(1): n is a, c, g, or t
ncagggtcttaacccactggtccaccagggaagccctaacgctcttgtttttggagatagtgtcatctgtctcttaccacctaggtgtgtcatctgtctcttaccacctaggtttgattgctttcctccatctgtctaaacctctgtagaaggtatgggcagatggacaacaatgtccagggggatcctttagaaatgggagggaagctgagggtctcattcataaggattccttttagagagatggaagatgcaaaatgtattccagaaggactctgaaatcagggaggtaaaaggaaaggatgaaaaggctaacgtgggtccttttaatgaagaggggggtcacgtccagcctctctgtgaggtgtctgatgaaataagacagaggctattttcttgctgtctgggctgggacagctgctacgggacttcatatacctggaccttccaactgaactgacttgttcacgttaatgtattatggagaagctggggctcgtggaggccccctggtgtagtgctgtggtgtttgttacatggaaaaggcaggggaggagtccctttggcttagctcactcagcttgctttgcttgatccaccatgtatgtttgttgttgaaaccttgggctactcaaatgtcagtatttttaccaggcagatgactgtggtggtgtatcagtgaaggttaagctcttataccagacttctttcttatagataagtgatttccagcgtcttccattgagaatcattgccatagtgagccactgttacttataaaaggtttcttactgtttatgtctattggggtgaaaaaggttgagtcactatgtcgagtacagaaggtggtttgcagcttgcttctccctgtagaaactggactgtggatcaccctagaattcctttttctaaagtatggaaagtgttctatctcagaggaacttccaaaggaaaacttgtaaggagatggaccacaagattccatcttgtagactttgatgcctctgaactctttgtcaaggcctatcagatcccggaagccctggagaagctggctgggatggggaggctgtgaaaaggggtgcgctggtggcaggcatgggtaaccctcttcctgctgactgcatgaggagaacgtgtgaccaaaacttttgtctcactgaagcaacgggaccaagtctccaagtggctaagaggcttcatgacgaagaggtacttttggttggaatgagtaacaaggcttgtcatgtggttataaaactcttctaagaggtgctttcatttaaagactacttgtataatacttttgaggtgaaatgctagcattccattctgttggtgtcagctgaagtggaatgggtgtggacacagagagttcttggaccccacttgtccttcagggggcaatgacaacagagttctggctgaaggtgtctatcttaaccacgaactgctgtgtctgaactgcactagggtggatgtaatgccaggattattaaattcgttgtgtgctttatagtgcacagattataaagacttctatttcagttctaaaataatccttaagtttagcaggacaggcctcattatcaacactttgcagataggtaaacagagcctcagagggactcttattgttgcccagaaccatctgatcagtgtgtttttcagccaagagttaaacccgggagttttggtttcaaggtcaagccccttgggttttgctgagccgataagaggcagtctgagccacaggactcccctgaaatcagttgtttttttttaacagagcaaagtcaagtgccagtaggagctggagggcatggagaactgctggtcatgaaatcatcaggagatcccactttattaccacatttgcaacttcttgagtaagatttaacatcctaagaatgcagaatggcttttgagaaaatttctcaagctctgttgcataatctgtgcccactgtgggccttatagattatactccatgggggagtgctcaggactgagcagggaaacacgttggccagggtaggt

SEQ ID NO: 25570 - DNA, 1159 bp, Bovine  19866880694945
  misc_feature (1)..(1): n is a, c, g, or t
ntgctgaacactagggagctttatgcaagtaaagttctccccaccctctaagtcccagggggtgacagatgaataagatcaatgtccagaaacaaggcaagctaaactcaccaaaacacagctggataaataacaatgagaattgctaatatacaaccaaacctcaccctctggtatcagaaacagagggagattcaaacccagagcaaagtgtgagaggccacagtggaggcagaccctaactgggggaggctggggttgtaacataccagacagaaaacatgatcttgggccccagagaagcaacaactggaactgagtattcccctgaataaagtcaggaacaaagcaggacaacactgtctatgaaagggaaaccgcaaagtcatccccagggcccacggaaacaagtgagggcaaagtgatgtctctctgagaagtggagaccccaagcctaaccctgagtccaaatttacaccatggggatgtggcaggaactcccagctaagaacttacatccaaatttatccaggatagtaacctgctcagaaaccccagcaggacaagggcaaatcttctttgcagagacatcgtacaatccagaggacatgggactcccacagaaacaagtccaccactaaagatgagctcagtacaacaaatgacagacctcatataaatacagactattatgagggagagttagtagaagtaataagcagaacaattagtaccccccaagaattagagataataacaatccaaaactatccagaacaatccaaaagcaactatatagtaagcgtgtttaaaattctaaaaggtatttctaaaagtatgggtgggtgtgcttactcactcagttgcgtccaactcttgcgaccccatggactacagcccgccaggctcctctgtccatggggattctccaggcaagaatactggagtgggttgccatttattcctccatctaaaagtatgttttgtgttaatcacagatctggatcccacatccccttccttagcactgctcagcaactagtcaggtaatagtgaccttaaaaaggcaaagaagacacctagattgtgttctctggggacttggaggcatggaaagagaggacccccaggcagccctgaaagtagagcctgtcgcctt

SEQ ID NO: 25571 - DNA, 731 bp, Bovine  19866880712611
  misc_feature (1)..(1): n is a, c, g, or t
ntcgcccgcggcccccgtgcgggattaattatcagtggaggagagggcagcccggcccagcccagccgtctgtcactaaccaaggctagagtcacccaggacttggccaccctaagtcctcttccaagtctccaggccgcctgccccctcaacttccaaggtgtccccagatcccaaccctaagcccaacctcatatcctggaccctcagacacacttagtcaaggccttgccatcagctgtctaaaccaggaaggcttctctggccccttgactgggttaggccccatatgtgcccccatcattaccctcaaccatcttgagtgactctctgtgcagagtccaaggcatgactgtcccaaccattgatcctaatctgagagaatggcaccatcttccactcaactgcttatgtcagatccctaccagttctccttgactcctccctctccctcatccactcagccaatcagaatccaagtcctgtcagttcagcctcctggaaacagcaaatctgggccacctgcttctagctccccatcaccacgttcagcaactctgcctgttctgtcttgcttgtagctaatgttatctttaaaaatgcaaataatattctggtgtactcccccgccagcacacacatacacagtttaacactttttggtttaacactctttggtggaccaccatggggcctgcaggggggtgaaagtccaaactcttgactcgcaa

SEQ ID NO: 25572 - DNA, 1406 bp, Bovine  19866880715934
  misc_feature (1)..(1): n is a, c, g, or t
ncatatgtacacataggggtccagttctcacggcaggcttggaggctatcagtatccactgagggtgagatgtagagcagaaccctgcctcccttccccaaagtcctaattctaagcccagaatccaagtttgtgtttgtgagtgtgtgtgtgtaaagaggagggaagtttctgatctcagatgctcaaataggatgcgtgcatgggtcaaggccagtcttgcaagggatggaggggctacataacccaggcaggaggaggccccttgatgtagcaaagtaaagatgcaatggaacaggtaacttaacccacctctactgcagttctagatatggaatttgggctgggagcgctcagcctgcatttaacctgttgggcaggagggtggggctaaatggggcggggggacgggcggagctgccatccccttcccccagtgaccacaaggcttcaaggtctccagtccacatcccgcacactatctcaggttccaaagcttgcgatcctcccccagggccggccccctgaactctgaccaccttcccgctattagatcttggggtggagggaaccgaggagggtagccaacaggatcaatgtaggataggcaggctgtcaaccttcatcccagatgtccacccgcctagtgtaggcggtatccctctctgcccagtaggatgatggtctctccgggcctgagagcccctcccccgctaccctcgccttccttcatcctggacagtttgcggttctctcctctcctcagatctaacctcagtctctcctgctgcagctcgaggacgagctctccttcgatcccgccagacgccaggagacgtgacccagatcccggggagcactgttcaccacgcgggcccccgccccactccagatcccgactctgcggtggcaggtctgcgaccagcgccgcccgaggcctggcccgcgcccctctagagcttttatgcgggactaggggacttggcggtgagaaaggcctggccgagcctggaaggtttaacagacgtagggaaggcctggcctggcccctgccccccggcgcaggccctgccgctgcccgcactccacgcctgtctcacctttgctcgcagatccccggccatgcagacggcgatgcgcggctccgcggccccacagcaccagctgcgggaggaaggggccgcggccggaggcggggctggtggaggcggagccgggggtggagcaggggcctggaaggcggggccagggaggcggggccagcagggaagggtgcggggaaaggcgctctctgctttcgcatccccaccctatactataggtcaaggctcacacagtgccctcgggcgtctggcgtgtcccgccctctagggccgcgccccctggtggtggtttcatcaccctgt

SEQ ID NO: 25573 - DNA, 1229 bp, Bovine  19866880738255
  misc_feature (1)..(1): n is a, c, g, or t
nacaaagctgggacagagactggcagggaaacagagacagggactggaaaaggaactggccataatcctccctgccctccagtcccgcagccaacagctgcgccccctcccccttgaaactccattaacactcaattagagggcctgatgggctcaagccagggagccccaccccccacctcctacacacagtccccattccagggttcctctgatgggcccctggggagaaggcttcactcaaatttatgactaactccagcggctgccttgccagcctctcctgcctcctctctcttctttctcccagggtggagcccagagggttgggtgaggctggagcgggccagagcccacgatggaggccccaagatgaaagggagcaggccctggagcagaggaagtgggaggggagaagtgaggaagcgccgtgagagtgtatgagagagaaaaatgacaggccctgaatattgggcgccctcactttaaatcaagataaaagactgaagtggaaaatgagagtccagagaaaccccggacggctcggggcgctaatggaaacacatggctgccggctgcgggcttgtcagcttcccccggcgctgccattcccgtctgataatccggcctgccataaaattagactagcaaatacctcctgacaaagatgcatgtttctctctattgtgccatcataaaaaaaactccgctggtgactcggggagccgcaaacttcaatttaaatttacagtgctgcggaaggaaagtgatatgcactcaaaaattttaataacctattaagttacgacttcaatttcattttatgaatattttccttggggagcacggctatcacagagaaagatagaaatttaaaaaagataaatagtgccattaatctccaacatttctcttccattatccttgaaaattaggagttatttttgttcagatcttcatgtaattagctccctccacttgattcactagccagaaaatgaccatgttcagaaaattaaaaatttgtcattaagtggaatttaacataatatcatttatctttatctattccccagctgacagcaggaagccttggctgccgtaccggctggtgtgtcagagcggggagggactgctcagagagagatactgggggagacagagatagaggcggatggagcgggagaaggccatcccagaggtggccagagctagagtgaggagggacg

SEQ ID NO: 25574 - DNA, 541 bp, Bovine  19866880825701
  misc_feature (1)..(1): n is a, c, g, or t
ncgcctcctgctcccccacccggctgtccatcatgaccccaggcaggctgacagcccacccctcagacccagtacttcccacagatgcagaacaacccagaacaccccagcacaacacacaaaacacatctcctaactcctgacacttaaccgtgtgcatgtgttcacagacgatccaccacccacctgctccctccccaccccttcccccacagcccatcagccagttggtgtgccctcccccagaccaccaactcagcacccctccatggcggccttcacgcagaagataggatagccccccgcccaccgccacacgtgcatgctcctacacgggagcacacacacattctccccacactacagcccgggccaggcccacagtgagcacagcacggcctgccatgtttgcacactcagcacacacccacacgcaatgcacaagcacagccatgcagactctgcacagcacagttctacttgggactccaacagctctcagccattcgcctttctccccgcccgtccttttatcccataa

SEQ ID NO: 25575 - DNA, 1451 bp, Bovine  19866880884018
  misc_feature (1)..(1): n is a, c, g, or t
nccacccccccggagagagcacttaaacttgttttcattcccttattctttatttttttaatgtccactctctccggagtcagtaatgttcttcctctctttcctctcccattttctgttaattctgcgccatctgccttagcatctgttaaaaataaaatttccctcacacaatgagaagcttccctgctcctccctcccctctgcagccccccaggtttggtgctggggccgtcagatgccacttcctctcctgggatgtttccccctccccccagtccctagtctggttttcagaggagagatgcagcactgggtgagcaggcggcaggaaggagggggctgcccagggggcctagagctggagggggcagctgcagagggaaccagaacggggtgggggaggtggggggcatgcagaggatggaaccaggctccacccacttgccttcgggaccttgcccaggctggagctctgagctgctgagactgaacacctggcacaggtaggtgacaacaggtgggggagagacttgaggagtgagtcctttttccccagggaaggaggtcacggattaatccatttaccctttccctaaagctgatgctgggggcctgaggctgggatggtggtaggatgaatttaggagatgggagaactgcccccaagacccagagattgtcccctgcttggaatggatatggcgttggacaatgtatcctcaagactggctgtccagaaacaccctccccttatgtgctggaggactttgtccctgctgtcctgggctcagctgggagaagggagagaaagggaatcaactgacccccaagccctgaagactttaggaggcaggaaagtcttggcttgaagccagctggccagaggatttgggaagacactcagtgtgtgtgtatgtttgtgagcaagcgtgtgtatgtgcctgtgagattagtgtcattactgatctgtgtaggtatgtttgaggagtatgtctatatgaactgggttatgattggttttctttctgtgtcatactatgtctggctacgcctctcaggtatgagtgtactgtgtatgttatagtgggtgtatagctatagctatacagctctatagatggtgtgactgtgtggtagtggatatattgtaaccatgtatttttgtgtatattagtataaatggggtcttgcaaaaaactatcttcctgtgtaggtgatgatgtatgtaattgttcatgtctttctattttggttgatttgtatgtgaaaatctacatactttgtttattttgtacattactttatctctcctgtgatgctggatgtaactctttctctaggcagtagttccttttctcttgtgatggggtactctgtatgtgatcagtgccaggtaggtacctctgtgagtattgcttcacttctgagtgaagtgactatgggagtat

SEQ ID NO: 25576 - DNA, 1942 bp, Bovine  19866880909644
  misc_feature (1)..(1): n is a, c, g, or t
nctcttctttatatcttctgcttctgttaagtccataccatttctgtcctttattgagcccatctttgcatgaaatattcccttggtatatctaattttcttaaagaggtctctagtcttaaacttaggtgagaatattccatattggcttgtaaatcctctgtattaaaaagactaatatgcaaccttcccagattttaggttgggaaagagatacagcagatactaaagatatccacacccacagactccttgttgtcaactcagctacactgatgacttggacatatcagtggaagcttagtttgaagccaaaatctatgaacaggtttaccttacaaagaattggaatgggaaatgataatctttcatgaaggaagataagaggtaagtacttgcctatcatagtgagaatctttagcttttccttcatgaaggaaattccctttgcatctagccttctgcagattccaagaaaaaaaaaaaagattcttttcatgaagacatttgcaaaatcaagtgtaatgtttttatcttctttgaacatttcacagaaaaagctattgttgcagtgagttagttgccacaaaaatcaggaggaaacacacaggaattcactcatctcacttggtgatggaggaccagcacacaagacctacagtaatgtgtccaaacttcaaggtgggtgaatgtaatacttcctgcagttactagacttgtatgaagaaagtggaactcttcacaacatatattcaatcagggactttataagaatggtgcgtgggataaggagaatggtgagtctctccagtcaggcataggggctaacattcagtggtgccagaatgcagaagccagagggcataatgatggcttcaggcaggaatcaacaggagttgtctctgcttcttctgtcggtagttctctccattttctgagacatgcacttttctgtcactgtcccatatattcattccactctaccctctgtttgggaagaaaaagacaacagacccttcacagccctgttcctggtctactactgaagggcttaccttcaattatccttagcttggacatccatactcctttccccttcagtctggcaacttagcgagtgattcagtaaaaggaaaagatgttggtcaacctttttcggatgccagtaaaagggataccttcctaccttttggattcatccaacaaagctaataaaattttctaatcctataggacatgagtctcagtgaactctgggagttggtgatggacagggaggcctggcgtgctgtgattcatggggttgcaaagaatcagacacgactgagcaactgatctgatttgatctgatctgatatttcttagtctgtgagttcaactgacttaatcccagattaagataaagtatcaaattcaatctcagacagataaggcaagccaaaattttgacactaacattgaaaagagaagtagttctcctgttcagctgagcatgcctactctcaaacaatttaaaattctaggattttggagctggtagagacctttgtccttgtgactaccccttagtcttggtactcatgaatcttgcctccaaaaatgtccactttatgtgaagtgggactctggtgcagccagaattttttctgttacctctttgtaatcagacaaaatgcaagtggctgagatcgttgtcagtatgtgggtgtggctggggaaaaaataccctctgtgaccaatagttctttcatcactgtactctgctttcatactgttgctcatgaataaaacatattcacaggacattgtgtacttttctttccttattcagtttatgcagatagccacttcctttgggcagtaggacagaaacctcagttctgtgtggctagagatgaaggaaaagaggcatgaagaaactacagcatttgttaagagcaca

SEQ ID NO: 25577 - DNA, 875 bp, Bovine  19866880913975
  misc_feature (1)..(1): n is a, c, g, or t
ntaaaagtgctatttatacctgcagattattcacattagggatatcttcacgtttttcatccaaaagctttgaaataatcactaggctgaggcactgtctcagttgcctgaaattagaatttttaggatgcatttaatcaatattgtttaagaagcaaatgaatgagccaaaagaagttcttctaatttgcaacacagctaatgtttcaagagaaggctatataagaatatataaactttattagaatagtaacatttccatgtaaaatatttgtacacaaagttaaagttgtctgaagtgcaggaaaaccattgagagcctttatttttgaccctgacgatttactgttagaaaatctattttattgctggaattcctttttattaaagcaaaaaaaaaaaaaaaaaaaaaaagcgaattgattcatttttgtggtatatgccatctatattaagttatcagataagctaaagctaaaattaacaatcaagactattacaaagtgatgtgagctgaaaatcagaatcaggctgtcaatgccttttcttataatatcaaataaaagactctgatctaacattcaagaaatgatgaaaggaaataaaggacctaaaagcatttcattaatgtaaacatatatcattctaatgtttcattctcacttttcaataccttccacgtgatgtccaattagggaccagctgtaccaaccagagaaggttgtggggatgagtggagagttcgtttatggccagagagagttcaggcacctgaaaacaaaccgtgagcacaatttttcacctaagttagtggaatcaagtatctaacagatcatcaatgtcccttcttgacttaagattacaaaaagagcaca

SEQ ID NO: 25578 - DNA, 824 bp, Bovine  19866880918932
  misc_feature (1)..(1): n is a, c, g, or t
ntagataaaattagagatgaattcaagtacagcacagattagaagttgagagcttgaaaagtagggaagagactgggcaagtttgaaacgtcacaaaaactagaaggtactgccttaggggtgctgtttagtctagactagaagccttcagtagcttcaaggcacatcacaatataaaaactgccaattatggcagcaaccctctgacataaaggctagaaaatgtaattttctagagtaaccttttaaaacaaacacaatcacattggttactgtacttttttttttttttttttttactgttttagtgcttatgaggttttgatgaactttagtcatctggaatattaactctgtagatgtgttcagtcctctgtgccaaggagatcaaggatgataatgctttagtttgttgctgttacctatcttgtctttctgttgggctttctcagggtagatgaaaaataaatgactctttcgttcagtcttaactttgaaggcaccacactaaaagtatacttcggattgtttttctaaagctctggtaccttcatttgcctggcccgttctctgctctcttcccttcaaagtatgtctgagtggcagagcagtcttgtgtgtttgggttttgacagaaatacttttagttgctgtttagctgtccacagccattgctgggaaccgtagttttctttggatgtacctgagtttgaagtttcttcttcttccttctccattaggttatgtttgctttcattttgtaaaggtcagtcagcagcttaaggctgtagggacattggtgatgatgatgataatcatatcat

SEQ ID NO: 25579 - DNA, 1013 bp, Bovine  19866880937987
  misc_feature (1)..(1): n is a, c, g, or t
ncctgagtattgaagtcatcacaaaatatatatgcacatagtttatacataaatgtgtgttaggtaaattgtggagtgcctataaatcttgctctcaggggaatgagggtggggtttactgtgggaagtcataaaccacagagaggctaacctaaaaatcctggctcttttccaccctccaccatgcagaacaaacatcctctgagcagtcagcatgagagtgcttggaaaagagtcataataatcacccaaatattttctggatagttccttgatatgctattctatatttttttcccttatttttttccactctaaagttgttctctgaggagtggatgtctgattccaataatgatccatacttatctgctctgatatgaggccatccactcagcacaaatgaatgttgtagaatccaatcctattcagagaagccgcatcaagaagactgctagccatcaataactgagtaagactgtatttctatgaacaaatattaggcagaatggccctctctgagagcagagtacagtaaagataagaaaataattggcctaacttcatctcctctatactccaggaaattggaagaccaagttaataaaagaccaagaaattcctgaaaaaaaaaatcttgctgtcagtgtagggatttgttccagaagttggagtttctagttggtggtgcttgcagtttctggctaaatataatgctactgtaaaattgcttgcttggattccttatgtttattagaattccaagagtgataaagaattgaccatgtaacaaaaaatatttgaagttataaagcttaatatgaacacagcctaaaccaaaaatcatggatgggcaagaatgcaaaagcaaaactgtgcttcaatctcagggatacaaagctgttatatctagcaaattgataattaagaaattcttcagaaagcaaactaaatcccatgtaagtaaaattcaaaattttatacattttagaaaatctaaaattaggcatcta

SEQ ID NO: 25580 - DNA, 733 bp, Bovine  19866880952541
  misc_feature (1)..(1): n is a, c, g, or t
nccccccaacaaatattagacttcacgagagagtagtttcctctgtacctgctggtttaaaaataggagcatgcaacatggctgacctctatacaggcccaaacgcccacctttccttcttgtgtctgccctcatgctgctagttaggataggtgttaagcaatagggcagagacgcttcctctgcaacaagcagaatttttgcctgaacagccctagcctagctatgtgaagggaagggcctcaatcttttcatcagggaaaatgcaggcagcagaacatgaattacagttctcagtgaacttccagacctagatcttcaatgctccacgtgcacaagcacgctgggagaagtgaccggacctattcaaggacatgcacgtaatcaatgggatccagaactgtttccctgtaactcatttcagaactcttttaactccatagtatggcttcctggcattttccccaagaagtgtttgctggagcccagaagagcttttaccctgagctgtattcttttgggctaagcctgtctgtactagatactgcccagtgggtgagatctgagcaaggcctgtagtttagaggaagtacagtaggagaatcaacagttttctagagaagcacagcaggggctttgtagccaaatagtactaggttggaatcctgattgccaccaatcacttactcttgagctgtaaaatgaaaatacctaccttgcaggacagtgagga

SEQ ID NO: 25581 - DNA, 631 bp, Bovine  19866880959658
  misc_feature (1)..(1): n is a, c, g, or t
ntggcccgggagtaccaaaattgtggctttgggcttcagggcatggcatctggttctgtggtaatagataagctcaattagttcagcccttctccagcttctcagagacatcactgagaccaaggcttgatttcaaggccagacagggtcccatccctcgatgcagggggtggggcacctaatccaggtggatccagagcagcagaggcagctagaggggaagaaggccgaggtgcggcgcagtggagggcccagctgatgacactcctggcctctgagctgcgggctggcactgcagaaaagggtttccgggccaggaaagtgcccaagtgggagagacacacatcgaggtgttattaaaattcacctaattattctggagacaataaagccaatgtgccgtttgttccttgggagagagaatgactgagaagggtctcggtggggattgggagatgctgaggcattacttgccgagcaaggcgagcggaggtggcctggggacctggcagcccagctgtaagcagccagcagcagagacagggagcgggcttggccccactggaggacaggttccgacttggagctgttctgaacgcggctcaggtctgagacaggctgcaagcagcca

SEQ ID NO: 25582 - DNA, 1541 bp, Bovine  19866881029466
  misc_feature (1)..(1): n is a, c, g, or t
ncggcaggggcggagccccggggggcggcactataataataaggggaacctggaagttaacacaggagaagaatgggctgggtgagaggacaaacaggagaacaaaaaaggaaagaaaagcaaagcagagacctcgtgctggggtctagcaggatccgtgcagggaggccttggctgagttgcggggccggttgccctcaggagaactgcattcaccgggtgggagagggacccgatcggtgaccgccgccgcccgactgcggacctcgaagggggcccagggtggggcggcgcagagccttgcagccgccgggaacagagcggagcggagggaggggcgggaggcacgggcttcctctagggatcccggggcctcagagctgcgctaacgagcctgcccggctgggcgcccaaaagtccggtgggggggttgtcgaacccgcacggccgagctggcgggctggcggaccgacacgctgagccgccggccagccaggtggcggtactcacttagtaaggcggggttgctgaatctccaagcctcgttgtaggccgtgtactgggggtggctgtacgggttgccggagaactcgctccctgcggggggggcgggggagtggggatcagacactcgcaaggccagggcgggcccgacgtgcccggccaggggcctcccccgggtccgaagtgcagatgcttcgccaggcggacgggcggagagagaacaatccacctggtccgcagggggagaccccgtgctaatggtggtggtagtggtggtggggtgtgtgtgtctgcagaagcaccgacgcgcctcccacagcgccgcggaggtagtttcggggcgctccctcggaagcgctccgagtcacccaggaagggcttattctgagtccaggggcacctacgccctgcgatggggaccaaagcctttttagtggagactctggttctaggagccacagccccacagggtggaagcggggggaggatggcgaagacaggctctagggacactttgtcccagaaagtccggggaatggcatctcagcactgtgccaatgcgaggggtgggggctctgctgggaaacactcccctctcatctttccctctagagatttgaaacgtgggccacgcagcaggggaaggaggcggcgggaggaggcaggtggactgcccgcgggttcacaaacggtgaacggagggccccgtgggctgggagccgtcggaagctgcttccctccctccgcgcgagaaaggccaggcccccgggtttccccctcgccctttctcctgtgtgatgaccccagactgtttacagtgatccctaaccgcgggttaagtagaggagaaggggcccctctcggagagggagctggggtgggggtgggggatgcagccactggaaagcctgtttattgacgaggagggaaagcatgcgtgcagcaggataatgagcttctgagctcaactgtgaccaagaggaactgagctatctccttccccatcgctaatgaaacaagtgtaatttcctcatcag

SEQ ID NO: 25583 - DNA, 1202 bp, Bovine  19866881043217
  misc_feature (1)..(1): n is a, c, g, or t
ngcctaggggcccggaccttagttccgggttgatggaaccaggatgggggcaatgggactagcaagactcctttccactccccactcagcacatttgttccatgcttggaatgaactccttgctagacaaatctatgaagtatctacccacccctaggcaaagggaactgatatgtccccccccacattacccctaccctaatagccccagactgatacagctttctgagccttgtaaaatagtctaactatatcaataaatattagtagtttgtcaaagcacccaggccagtgcacaggaatagacactcaaaaaattgctaaatgagtttgtctcaggcccattctctcctttaaccagttctgggggcgcttcgggtaggagcctcccctgaacccattccccatttaacatggtacgtttataccctgctgtcattagatgttatcctgcccagctggctactggacttggtcctgtttcctttggaaagctgtgagctccccgggggcagcttcggagccttggctgcattctccatcacctccccgctgcccaccaccactcctgcacaaaagagaactaagagtccacggagcactgtgaaggctcagtcaacacgcaatcctcaggtggatacactggctcagagggagtggctgcggggaggaggcaccaagggaagcctgacttgggacacagacagctgccgtctggcccgtgcagccctgctgtacccggctcaactgctgtgtcagtgcaaagcggggtgacatcagctgtggaagaggttactatcaggcaaagggaagggcaggggagagcaggccaaccgcctgtggaggccagaggctggatcagctggggagagggtgcctcatgggggctgggttcgggtaggggcctgcagggaacaacaaggagggagggagagatgcaaaagagaggtgctgagggcatggaatggttaaggcctctaaccttccacctgtaggacagagggaacattgatttggaattctggaagacaatgagactccccttagccactatacgaagcaagcggggcacacctctctctgaccacaaaagcaaggctggggcatgccctctcttctccattcagctcagaacagagtcagggcaagaaaggctttccttccagctccggtatttgttatttggaggccctgggcctgtc

SEQ ID NO: 25584 - DNA, 3108 bp, Bovine  19866881049861
  misc_feature (1)..(1): n is a, c, g, or t
ntgttgatcccatgttggcatgatgacgactgggggtacaatggcagtgactgagttggttcccactcgtttccttgcactgtcctggctcacatctccctttgacctcaggactctcagcagacactactttaccttctaccatctttgaagaacatctccttactgggaatggaggataaacaccttccaggaggtagatatgggttaccgcatttctttaagaaagaattttctaatcatcagagctgcctgaaaccaaaaagcttatctcaggaagaagcaagtctcctaccctgaaggagttcaagcagaaagatcctcaaaatgagactactatgggagcagtgaaatccttggcctctagtatcatttgtaggcccaaggccctaagaagtttctccccagaggaggatgatttcaggcactttcaagagggttattttgactgaggaagttaaaaaatgattgaggacggactctgatctcttattatgggaaggggcattgaggacagagacttccctcctcaaaaggtgtctccacagctgttccagccttatccaaggatctcctttcccctactgccaagcccatggactctccaggggatacacatcttctcactgtcttctcaaagatgaacatggatccagcaaggagctggcaaagggaggaagatgacagtttgtagatatagaacatttgatgatattcaagctatatcaagttatagcacatttgacgatatattgtcagccccaacacctttgatgtggaggtttaatcctgggcggtccctaaggggattggcacctcactcattgctatgccccctgtgttgagtgcagagactggtgaacagaaggcacataggaagcttctttttcttctttcacctttccttcttacacaggaaatacagagaagaaagacaaaaataatgcccatataagttagacaaccccagttgctatttgaatgaccattcaccagacaactctttctgcctgtaaataaacatagacacaggtgcataatatgacacaaacaggatcaaattctatgttctgttctgtaatcttctcttacataaaaatatatgatagatgccattctgtttcaatgaatatagagctatgtgattgttggcataactgaagtatattccattgtatgatgtattgagtcagtcttctgttgatccacatttaggatatttctagttttgcactgttttaaacacacttgagatgaatatatttgtggacagatcttttcacatttgtacgattatccccttagggcaagttcttagaaacaaaagtattggatcgaaaaaatacacattttacatttgggtatatattgtcaaactaccttctcaaaaggttgtaccactctatattcttaccataagagggtatcatcagtcctttaccatttgcttaaataaaagggctctttcttcaaaggcaaaacaacaacaaaacccctaattcttcagaccactttgtatgcgtgtgtgtgtgtgtgtgtgtgtgtgtgtgtgtgtgtgattaagaaggtttaagtaaaccttctatacaaatgtggttgtgtatctgtatgtgttctatatacaatcactacctcataagctgaagtcctacatgaaaagttctctaccaaatctttctctgcctcctcagtgcagggatgaggtctgttgcagctttcctggccccaagaatgtgcattcattgtcagtcttgctgctgttcttgcagtcccctggccaaggttgttaggaagagagtaggagggaggctcggctgggtttgctcatggtgggacttccagtgttaattcaccacagctgtgaagcataaaactgggtctccagctctgtgtgggggaaacagtgaacagattatcccaaatcaatacatctgagtcagctgtagatcattccagggggctccataggttagggaaaggggaggatgatgcggttcagggtcttcctacttgtggtgcctactttacagatctctccaccatccctctctccatatcagcccatggtcagtctccgtctcatatatatcacccctacactcgcatattcacatatagtccacaacccatatacttcccttaaaattgtactcacattctcacaaaatttgactataataattttcatacattacacccacatcctcgcatacaatacattcatagaacttgacgcttacacacacccacttacataaacacacccagtcacccaatattcactcccccacagcctcacactgtcatgctttgtcctaaggaaacctagtcacatgtccctcctagttattgtcatttatattattgcaaccacaactccataccctatatctccacccaacactcccctttcacactctctcagagtcccacaaaattcacagtcatactcttagatcttactcaaagtctcttgaacacatccagttaccagtcttagaatgtcttagctcttccagtctacccatcttattttacagaagggttaactgaaactctgagaagaaaaacttgactaaggtcacacaattagttaatggaaaatctggggtgtcaattccaatctcatgactcccacactagtgctctttctccaatgcttgcccttccccgattgtctcccttccaatcccctatgtcagtccccaacactgactctcagttcagttcagttgctcattcgtctccaactctttgcgaccccatggactgcagcatgccaggcctccctgtccatcaccaactcctggagtttactcaaaattatgtctattgagtcagtgatgccatccaaccatctcatcctctgttgtccccttctcctcctgccttcaatctttcccagcatcagggtcttttcaaatgagtcagttcttcacatcaggtggccaaagtattggagtttcagctccaccatcagtccttccaatgagtattcaggactgatttcctttagaatggactggttggatctccttgcagttcaagggactctcaagcgtcttcaccaaaaccacagttcaaaagtgtcaattcttaggcactcag

SEQ ID NO: 25585 - DNA, 791 bp, Bovine  19866881069721
  misc_feature (1)..(1): n is a, c, g, or t
ngaatgagccaggaaggctgcagacatgctgaggagaatgaaaagaatgtgctgtatttcaaaatgtgaatgtgatcaatttatccttcctctgtcctgttttctttgctgcgttcctttttcccaaaagagatggagggatggagaccactgcggtcacattttccagcattggctatatttaaaagaactacactttagaaggtaccgtgtttgaacacccacactgcatcagagaaccccagcatggggtactaaaaataaacaccccaccccagaatacacacaggtgcgctcatgcacacacacgcgcatcctctcagtccatcagtgcgctgttaactataaactgagctctgggggtgagagccacagctcagacattggaagtaaacctttggcaaaaaaaaaaaaaaggaaaaaaatgaacccagagacttccaagtcctttttccttccagagagaaggcgcgtggagatgggagtggaggcgacaggacgcagggctcccacactgccgattccaagggccccactttcaccacacgagccctttgagttgtgcagtgcccagtgacccagctgtgagctgcagccctgagagtggttcccacaagtaactatgaacagaaaagaaattccactccatgctccaccagttgccctgacttctgaaaggtgtttgtggaacattacagtggggtctggcagaggtgctggcttcaagaggcaaggctacatttctgcccttgccatgaggtggatgacaggtggtgagttagctgcctcag

SEQ ID NO: 25586 - DNA, 732 bp, Bovine  19866881075859
  misc_feature (1)..(1): n is a, c, g, or t
natcttccaatttagcctgtaaacaagaacaccttatttttaacacaaatgacagtgaaactataatagcactagcacaaaatacctgctaatttctctatttttttttttaaggtaaattaaaagccagtcatacgaacagtacgttaaatttagcaagacagtcatgatgctaacctacctgtgtgtgtcttccatctccttcactagacgctctaaagtatttgtataagtcccactatgagcatgttcctaaaataaaaagaaaatttaggaatacttcataacatatcttagcagaaaaattgggatgttttaagttactcagaaactaaaaaacaatttctttttcaataacctgggccaggaggatatatatttttttaaaataattttcaccatcatgctttaaattgagaattttgtagtgcagtcaatttgattttaccatctattaggaaagggcactacttataaaaaccctgctagtcttaggaactgactgccaacacccaagggctccatggctaccctgtctttatttttaaattctattttactggaattaaactactaatttttaggtgttactatgaaacagtaacaccttccccaccaaattttacacacatatgaaaatttaattccgcttattcccaagatagcatgaagcacttcataaataaaattgcacaccacaattaacaacatttctacactctaccttcattt

SEQ ID NO: 25587 - DNA, 1029 bp, Bovine  19866881149992
  misc_feature (1)..(1): n is a, c, g, or t
nattttaaaagatataactcttcctctccctctccccactgcagaagccaagtacaagaagctggagaagcgatgaaaaacaactgtggggacaaagtcttttttaatgtggaaagaatgttttactaagacctgaatcttcaggttgatgaattgtgaaaactcctcaaaaggcaactacgctggtcgtcccagaaacatcgcaacattggagtaaactggagaactgtggctatccttggaggaacttcttttgaggcagaatcctcagaaactcaacacttataactccttaccttttacttgaatgcttcatcatccattcaggacaaagagtttctcaaagttcagataaacctgggcctgccagtagaatcaaatgagaggacctcttttccctggtagcagttgattactgtattattttcttaaatggttggtttttgagttactgtgtaaaaggtggtttttgtctatcaaggatgtaatgtattgctaacaagattctaaattaaaaaaggaaaacaaagcagtcttgttcttgtcagtttattaccttgtgaatgtcagtaatttacttttccatacattgcaaataacagaaaatcttaaaactgtctcaggccaagtcttctagactgaacagaaacagtggaaggagtgtcattgcgatagcttggtgtatgtgatgggcccctcctgtctcctctttatgagtcagatggctagagacggatgacacttggcatgtgtgctcacttttggaaatataacaggatgtgtgtatgttaggtggggaggtggggctgccacccaggctactcaataagtaaagcattttataaaatatcttcctacttgtgtctgcagcgtcaggggagcttccgcgaacctggctgtattcttttcagactacagacatcagagggtacttactaaccagtctggaagacagtcagtcatatccagagtggggtatcagcagttacgaaggtgcctgaggtccccaattccatttccaaaagagtt

SEQ ID NO: 25588 - DNA, 725 bp, Bovine  19866881150435
  misc_feature (1)..(1): n is a, c, g, or t
nccaactgaaacctgaggggcatgcaagcgggtgtgggcaaacaactctaaactctgcaccaaatgtagagcctgagcctaggaaaagagagttcatgtgaaggacttccaggctacccacggggagggctgggtggctaccgtctgcttttggtgcctgtggggaggaggggatgaatttcagttcttcagttcctgggatgtacagagtggagaatgtcagtttcttagagttctcaggagtagggagacgtaggaactgttctggggaagggcaaaattttcctgaataatctatgagatctcagttgaggttctgccatgaaaagtctccagctgtttttgtagctcaaatttgcctcagggcagagccagggactcctgcccgctgaaggcagctctcaaaggcctgagttaaatcaattacctgcattcgttgtgcaaaatagcctttgctgaagcaaatattttgtgctcttgaatgatccagcctgtaatacccgggcagctcaaagtcactggtagaggcccctcccaccatcattttcttaacaatcagtggggccagctagtctgaaacattctttaccttggagttcctttgatttactcagtcaggaaagactttccccataccagaggtgaaacattttctgcaaacctctagaagtaggcaactgaaactggtttatatatgtacacaacacatgtatgttaatacttga

SEQ ID NO: 25589 - DNA, 824 bp, Bovine  19866881157745
  misc_feature (1)..(1): n is a, c, g, or t
ntatgtttagatgatggagagaagttgaagagaacatttggggggaagaaaacagaatggaggaagaggacaatgagttagctggagtggaataggtttataaatagctctcagacaaccagctgcacctggggaactgctaaaaagtcagattccttagctcttggagagcctaattcagtaactccacagtggggttctacaatcaatatttaacaagttcccaggtaattttgatgtgctgggaaatcaggtgtggaaactgctgtgttagaaatattgtgaagtgcatttgatcagtttggttgggcaccttttattgcgtggctgagggatgtggacttgatggtatagtaatgcattagttgaataaatgtttatgaagctcctgtcatgtaccaggtacagaaggtgctaagggttgggaatacattgatgacttggcctgcctctaggaagcagggagccatgttgggattttgaacagaagaatgctgtaatgatgcctaggtttttaaaagattaacctgggaatagtctacagggtggactgtgagaaaggtactaaaagcgggaggctgctgtgtctccagttggctgcacagtgctgcctctgctgagataggcaatgtcctaacggtagcgcgcatgtctgtgcatggacacaagccttcctaccgagccccaggggccccaggctggagagtgcacatagggctggtgtgagcactaacttcacttcaggagagcgagaaatgcagtgtggctcttccatttttcaattctgtaagcacatcacccttttctcctccccttgagctgtt

SEQ ID NO: 25590 - DNA, 598 bp, Bovine  19866881166334
  misc_feature (1)..(1): n is a, c, g, or t
nctaataagtagtcgttaagttgtcttgcaaaaatgttaaatgataaattgggtaatgttattgttgaaatgaaatatgtaaaataaatgagttatttatttctaataaatattttgtttacgatgtatttgtaggggtgttaattattttccccctcaatcggggcaacgtataaattctaataaagtgcataccgtggtgaaggcagcggtggtggtggcggctcctccaggccggccagctttaggacctcggtccgtgatggatgcttgagtcacaagcgattgttctcgctgctatcgcaggctccccagtgtagccagttttctttcttaaaaaaaaaaaaaaaagaagagagagagttgaggaggaaaacaaataggccagggtctccatgatgagatgattaagcacccccagaccagggcttgctccttcgctagctacaaggccctgggcacgcacgtccctggtggagccagctttgagaaggagaaataaatacgtaagcaaaccaagggcgaagaaatgatatccccctgagcactcaccccgggcgaggcgtcctcaaccatccctactatccccctcctagat

SEQ ID NO: 25591 - DNA, 926 bp, Bovine  19866881201698
  misc_feature (1)..(1): n is a, c, g, or t
ncttttacacatatttgcatcataaacagcctccaaatctctgggtgccacccctgccctgtcccactccagcacctgaccctccttttctctccttccttccctcccttctgcccgccccctgctccaaatatctgcttgagggtggagaaaggagaatgaagtgtgcttagaaagccctcagatcctgcctggcctttgttgaatgacactaatgtgccaatatgagagatgggtttccctggacccagatccctccctcagactggcaaagcatggcactgggctttcgtgccctccagttctccccaagacccctgtggctgctggttctttgtgtgttcccggatggtttcatatacacagagatatgcctgcccacaccagacacatatagccacttggggattgtggagggaatctctgtcgaggatttttctttttctgtttctaaactgaggcattggttgccaccaaccccaaattcctttaagtttggtccctttaagactctgatcccttttagtctttatttgctaaatcagaggttctctatttgatgaatgaatgtttgttgagagaatgaatgaaagagttttagtggaaattgtatgagtatgaagataagacacacttgattcaaatccttgctctgtaactgactggccatgtggccctggctcctgctttgacctctctgagcctcagtttattcatctgcaaaatgaggataataatgtctactttacaggtagatgtttgtgaggatgaatggagacggctaaaaatgtaaagtacgtgcattttataggtacttgacctatggtggctataataattagtactggtgaataattatattaataatttataagtaattataataataatcccaggaagaggtactcatgggtcattctctgcaa

SEQ ID NO: 25592 - DNA, 1791 bp, Bovine  19866881235885
  misc_feature (1)..(1): n is a, c, g, or t
nattatgatttgaaaatattaaaaatgatttgagaaattagaggtttaacaattatcttacttacattttataaaacatatagggtcaaatatgtgcatggactctacggttatagaaccttagtcactttgctggactagttgaaaaatagaaacttggggatcaccagcatatatattgaatttgagctttggtattatataaggtcatgggaagaggtagtgaataggttctaggacattatcttagggaatatttgcatttaatgggggtaaagtaagggccagtcagtgaaagagattttaaaaggagtaactgataaagaaaaagctgaatgggtcagtaactcaagagaccagaagagggaagaagtggccagcaaggaagataaaatcaggctgctatgactgttgttgttgttcagttgctaagtcatgtctgactctctgcgaccccatggactgcagcacgccagattcctctgtcctccactgtttcctggagtttgctcaaattcatgtccattgagtcatttttatatttaacaattaataaattagaggatatttgtcaagaacacagtataaataaaatgacaggacaggaaaaacatggttttaggccagaattgaaatggacataagaattagagataatgattatggattaattttttagtgttttggtaatggtaatcggctcctcaggaagaaagttttatgtgaggagggaatttcttaggatgcacacttagttgaaggcttatgagagggagcccaaatctgttgagatcatgagaaagatagtataattaatagaacctgaatcatatagaagagggtgccagttagaaatacaggtggagaagtttgtcttagaaagcattccttcattcactcattcattcaacacttattgaatgcgaagacatgaggggatgagatattgagatggaagctgggagtgtttaacaaggtcatgctggccatctgccttttcagtgaaacaggatgtacttaaaaatgagtaaattgattgcttgcagatgcatttgcttaaggtattaccattccattgtgagtctttttaaatccacatcagacagtgttataatttgtgtttcaactgtcaaacataattgagaaaatttaagaggggaaaggaaagtctgtttatccatatttgtattctttctgttcttccttcttgatgttccaaaattctttcctacttagagaatctgtagccactcttttagaatagatataaattgtcttagctgtctttcatctgagaatttcttaattttgcctgcatttctgaaggaaatttttgttggacacagaattctgaggtgggtagttcttctctttcagcacttgaaaaatgggccacttccttctggccttcatgttttatgatgaaaatcaactgtcattcagtttttcctttaaatgaagttgcttctctcttgcttttaagatttttctttgtctttagttttcaaaagtttgattatactatgtcttggcatggattttggggagtttatctggtttggggtttgcttgacttcttgactgtaggtttacagttcttgccacatatggggaattttcaggtgtcagttcttcatatactttttccagctccaccctctttctgatctctttccaggacccagtgacaggaatgctggatcttttactatagtctctcagattcctgaggctctgctcattttctttttctgattggtttctctttgatattcaaattgggtaaggtat

SEQ ID NO: 25593 - DNA, 921 bp, Bovine  19866881242913
  misc_feature (1)..(1): n is a, c, g, or t
ncagaagggagaaaggatttgttaacacatctacccataatcccacaggaatcaagcctgcggaaaagagtggagagatggtgttggcctcagggggcacttctggtagagctacatttgagggtacactagcaccccgtccagctggtgcaggagagagtcattcacattcatataatggacacttctgtgttctgcggcttttaggtgactttagagaaggacgccaggatgaagttcctgaagctattaggatacagtaaagatgaacttcagaagaaggtaagctgccttcacgtcagaaatacatgtttgttgtagaaaaagagaatcctgccagtggaaaccatctcagaatacctcttcctgggcttcaataatgcatatatgaggattttacctcctggagttattctgattcccaggaaaatagtacaaagatctcagtaagtccagttggtggagtatgaaggtgggaagaaaagcttaatattcatttgatctcgtgttgggaagagtggtattcatatgtttctccctgcaggtggccacatggttgagaagtgatttgaggctgggtgagatccctcagtccaagggagatgacctcaacagtaacagacaacaggccttctccatacaggtatggaaggagcccagccagccccatctagggtagcatagaaaacctgcccttaaggaatcttccccttcctagcccttcactttgctctcaataagtgctcaacttctgtggaagttttcaaactcctcactcatttagaaccagggagagacacagaacccacaaggtttggagctaggagtggagctcttttaaccatgaagtatagcacttcccaaactttacctggttattcttttagctttacccattaagagccaactcttctttttttt

SEQ ID NO: 25594 - DNA, 1247 bp, Bovine  19866881284114
  misc_feature (1)..(1): n is a, c, g, or t
ntttctctttgaaggtccactcagctgttttaaaccactgagaagccttcttcagcttctccaaacaaagccagccccttgcctgtgaagtcccacaacgcttagtataagcttctgttatggcagcataaattattgacatctggttttcctccaagagactgtcaacttcctgaaggactaggtcttatttatcctgggagctttagcatttagcatagtgcccataacacagaagtgctcagctagtgttaagatgactgaaagaaatggtttgctctctccacatgctcccacttacctgagcacagtcactgggtaggtagctcatggcagtggccaggctgccctgggctgccaggaggttggcatactgagtgattctgtaggttgtggcagggcctgggctcaccccatcaggaccccgcagtagctccaagctcctgttaagaaccatcactttctccatcaggtcctggagggacaaagaaaagggcagtcagtcctcatcaactcacaccctgctctcttagctcaggcagctcaaccaaggacttccctgctacggataccaggtgatgatacatgatatgtaagagacataacagccagagaagggccacttggcttcacttcccaagctgtttgggtcttacactcttgtacatttctgcctcttcattttggattctttatcttttatgctaatacatctcaatttcagattctgctatccttttatttcatgtgtgactttgtctccccgtgactgtgatcaccatcttctctgggcacccacagagtatctggtacaacttagattcataggacttttcatagatgctaataaaaggcccaaactcagtattattcaaatatagagtaaacttatatacccaaacctgaagtgggaaaaaattacaaagttaatatccaagcagctgctactcaatctcccttgactgagaaggagggaagatgacagcttatccatggaaaaggttccagactttgagggcccttccctcttctctaaaactcctgattctatcctggatacctagaagacccgcctctgatgtccctgcaacctccactgctagcctctcctgaaggcctggtatggagggaccagggccctgaagtgaaggggtacctgtaaagccatgggggatgaagccggctggcattttgcccagcactccaccagccgctccacactcccgagcacacataacagagtctgg

SEQ ID NO: 25595 - DNA, 979 bp, Bovine  19866881300061
  misc_feature (1)..(1): n is a, c, g, or t
ncggtcctgactctgcacagtatgcacaatgatcttcaccatctccgtgctgtcgctgtaggagtgatctataaaagaactcagtcagtaggtataacctctcttctgcatgaaacaaaccagccctaaacagaaaattcctgaaaatctgaaactagttttaaataattaacatctccatttaatttcaaaactaaattagtataaaaagttttaagattatatatctataataatcatataactaaaaacaaagtctgtctgtgtgtgtatataatgcatacatgaaagtcaaagtgttagttgctcagtcctgtctgactctgcaaccccatggaccgtagtctgccaggctcctctgtccatggattttccaggcaagaaaactggattgggtagccattcccttccccaggggatcttaccaatcaagggatcaaacccagatgtcctgcattacaggcagattctttaccatctgagtcatcagggaagccccaggtggcaagaatacacagaatgctatacaaaaaaggtcttcatgacccagaaaaccatgatatgtggtcactcacctagaacatcctggagtgtgaagtcaaatggccttaggaagcattaccaacaaggctagtggaggtgatggaattccagctgagctatttaaaatcctaaaagatgctgctgctaaagtgctgcatcaatatgctagcaaatttggaaagctcagcagtggctgcagaactggaataggtcagttttcattccaatcccaaagaaaggcaatgcttcaaactaatgtataattgtgctcatttcacatgttggcaaggtaatactcaaaatccttcaagctaggctttaatagtacatgaactgagaacttccagatgtaaaagttgaatttagaaatggcagagagaaccagagatcaaatggcaacatccactcattcacagaaaaagcaattcccaaaaaa

SEQ ID NO: 25596 - DNA, 1929 bp, Bovine  19866881397218
  misc_feature (1)..(1): n is a, c, g, or t
ntaaatgtttttacatattaatttgctgatttactttaatactcattttctgtgtataatatatttattgaatcttcttaataaccctatgaggcaggcattattattagcccctctttacagcagaggaaaccaagtcacagagacataagcagcttttctagggctccacacctaggaaatggcaagcatcgccattcaaagccaggcaacctggctctggtccaccacgctatggacctcctctttacagagaccctagcacaagtgctggcggggcttctgtgacctggagaggaagactctgaatatttagaagagataagacatccttgggcttcagtgtagtcccctcaagtctatcttttgttcactaccaccctggccacctctgcccttaacttcctttgcagccaacgttctgtggctggggaggccaaaggaaccgtaggcagcttggactgtgggtccctctgacaccagccctgtttcagaagccttctgctggatcctggaagccagggctcggggtgtagggccgagcacccaccgcccagttgctcacagagactttctgcctcccacgcagctgcctgtcctgacatctctgagagggcctttgattaaagagacaagtgactttgcccattctattgatcagaataaattactaggaactaatttatgggcctccccacagccgatgacatggtggattgtgcgctattggtcagtaaattggattgtcaggctagattattggttcgtatacagttatctctcatagcaatatcaggcagcccaggtagaggagagaaatcctttctcggctgccagttgccaggatgtcacgaggccttctggaaggctggtggggaggggtggggagggaagaggaggagaggggaggagaggcgaggcgaggcctctgtgcaggatgcttattaattagtgcagcatcacagcattaaaagaacattagtgtggaactgtctgcagagtgatggggaaatgacattgtgggcctcctcctgattctccagctatggctctgctgggtagaggcagggagggggttgatgagcagaccgggggatgggaaagataaagagggggtggggatcagggccaagaggaggagaagggaaagagaggccccatttgctgggagttgcaagcagagcaggtctgctaagtgccagtgctgctaagccccacgcgggggaaatggagccgccgttctgctccgtacatcacagccaacgatgaaaagttctagagctgggatttctcaggcaatttggccagtgatgcatggggcagtagatcctcgcgcactcttccgtgcttctgccaagccagcaataacaaaaacttattttttgccagggaaacggatatgagtcaggcagcccatcaggagtaaggggggctttaccacgccggggcgatttgtaccgctcggctgtttccccgagctctaaagacctgccaggaggtgacaaaggcgagacaatttcgagttcacagtcctgtgtcctcgaagcataacagcacaccatagatggggactttcaggggcggtgggttgcaaagtcagcggtctcttcccccaagcccgctgaggagagggacatgcagtgagcaggaggagagtggccaagagcaggctctggagaagtcggaggccctttcggggctgtgaattcctgggagaggcaccctcctcccctccttcctcaccccgggcaggaagggagtgtgggagcgccaaactggccgagggcacaaaagcacacacctccacaacgaaggccttcctgccctcctgctgaagtctaccaggctcctcgctaagcagaccccagggtcacccagctccccaagaaatgtgtagggacacccattcggtcttgtttctccctttca

SEQ ID NO: 25597 - DNA, 778 bp, Bovine  19866881423168
  misc_feature (1)..(1): n is a, c, g, or t
ncgaacttctgaaaagcagggcatagctgtatggagtgtattttgtcatgcttgtatcattttgatgtgcagttgtatacagtaagggcagcagctgtcatataaggaagtctattctgctgattgatggtgaacccttagccagtgatgtttgctactagacctatcacctattaaaagtgtaacacctaattgaatgagagttgtgattatagtctccctgattttgatttggacccttttgctgagggggcagactaggtttctctgtaacactgaagcctgtgttccatcctgtgcagtagagctactgtcttgaataagaatgtcttttttcctacaggaaatgtgacacctgctcactatgatgagcaacagaacttctttgctcagataaaaggccacaagcgatgcattttgttccctccggatcagtttgagtgcctctacccgtatcctgttcaccatccctgtgacagacagagccaggtgagcttgcgtgatccgaggagggtatagaactccttagagatccaagatgggcatgggtcccccttctctgtggcagtatgccaggtttggataaactcagaggacagtttcacaatgtagcttacgtattcctggcccctgtggtggtccccagatggtccgggcaaagccctcactgatgctggtgggctctagttattctatttgattggattataaattcatgaaacaaaatgtgtatgtctccattagattttatgattgtttacttttgtcacagatgcta

SEQ ID NO: 25598 - DNA, 1342 bp, Bovine  19866881470000
  misc_feature (1)..(1): n is a, c, g, or t
ntgtgcatgggtgtgccgtgggatggagtgcttgaattgtgtatgttacatgtattgctgacacattctggcagttggcttaaggtttgttacttgatgttttgtggtattgtattaaggtgactgcactttgtgtaacactgagttggaggaatttgattattgtttggtggcaatgtctgtatttctgctttgaattattgcattcgttgatcatatcagcatctttctctttcataatgtatgtctcagagcttaggttaatgggtgtctcctcagtgatgtgggttgagtaacaatgttggatctgggtggtggtgtatgatacggtaattactttcttggtggagctgtgggtgagaagacctatcctttagcttttttagttcactctggcttggtcatttgccctgctcctttccaggaggaggattctagagatgcaggacaagtctcttcttgatgaccatctctacagttctattattcttggaaacatgctttctctgctcaatgaaacagatctgatcttaccacagtgacacaggttctggttccatcttccctttatctgtctaatttggagagttaaaccccagggccaaaccctatgcctgtctaaaatctagatccctggtagaactagaggaggatggatgggactaaactcccccaatcccgacgggaataacaacacgaactctagttcagagaatccccagttcgctccactctgtgactctggccatcagcatcttcttccttcccagcatttcccagatgatgtggctcagctgtggcttacatttacagggacacacacacacaccagggaagaatacagaaactcatactaggcatgactttctattaggtgcagagcctttgttctgagcttgtaagtagaagtataaatacatccctgggcatgagactgcaaaatatacagagctgcccaaggaatgcctgtacttcctttgatccaaagctgatacgaagtatggggtagtggaaaagcacaaaggttttagagccagtattgtaggagttcaaatcctagttgtggtacttagcatgtgacctgaattagttactcagcttctctggattccagttacattatctatagacaatcctataaagccctatggggttgtttgaaagtgaaaatgttagttgctcagctgtgtccaattatttgcaacttcatgaactgtagcccactaggctcctctgtccatgggattctccaggcaagaatactgcagtgggctgcccttcccttctccagggggtcttcccaacccagggattaacccaggtctccgcctgcaggcagatt

SEQ ID NO: 25599 - DNA, 763 bp, Bovine  19866881668296
  misc_feature (1)..(1): n is a, c, g, or t
nccccgtgtttttattgtgattttttttggggggggcagggagtttttctttcctttatgttttttatctttaggtatttggggagccatattttcccccctgcctagtgtttaaagttcaaagaaagccaactgaaggaaggaaggggctaggctgtagaggcaggggcccagagtctgctgcgctctgagacagggaggcagtggagagccgtgaggtgcccgctagcaaccacagaatgcagactgcttgggttcattctcctgcagcgctgcgccaggctggggacccatcgcctcgcccaggactcatggtacaggtcacctaggtgggctcaaggttcacagggcaccctgtgcagccagcctcagccagctcgcgttcctctgaccttttagacctccgctgccgctcaggaaagggaacaacaagggcgtttgctctcctgggcaagaggagggtgctgggtctccaacctgactcctactgcaggcgcccaacctcggagccaaggggggtcgccagatgccaggcctgaaggcgctgcctggcgccccattctccctgactcacagcagtcaagaaatcctgcacccagagccatcaacacgcagtcgcagttactgagcaatccaagcacagagttctagcggcagagtccgacctgaccggaccaacaacctgcagccctgtcctgctggcctctggcgactttcggagaaagcggggacacctgcacccggctcgctgctctctcgtccc

SEQ ID NO: 25600 - DNA, 886 bp, Bovine  19866881781856
  misc_feature (1)..(1): n is a, c, g, or t
nccagggcatcgacgaactgcttggatattgcctctccgaagcccacgttgtcgttgcagcctccccacagccagccttggccccctggaaaacatagtgggcagaaaggccgttaagcaggccgcagagagcctcctgggctgctggttctaagtgggttagggggattgaggaaggattcaggtggggctagtgccctcgctctagattagtttcaccccagatttatttttgacacctttgtactcctaacttcagcccatcccctgctcaggactccatgatgtaagtagctaccaggggaggcaggtgtctgcttcccgggctgtgtttctggcctttgggcagagtgtacacatgttctgccagaggttgacgtccagaaggcacaaaatagtgtggaaaaggcgaggaaggtgcagacactgagggggagagaggccagttgaggtaatatggaacagcagttggcagctgaggtggagggcagaggcctgcagaggacactggaggtaaacaggggaaatgagatagggaagggtgtaaggtaagggagttagagaaggtgaggtttgagaaaaaaaaaaaaaaagactggcactttacaggaactgatcacctttaatgaggcgagaatgggcagcagtcagattagtgggctgttgcgctaagtcaaggagagtaggtatatataggaaaacatatatatgcggagatacattattttgagggggtctgtttttcctcatgattatttttgactagttagctttcaacaactggggcaaggaattcctgagaccagccagagactgggattggctgggagctgaacgtaatcttaatgtccattcctttcttccgggaagaaagtgctttattctg

SEQ ID NO: 25601 - DNA, 1341 bp, Bovine  19866880535587
  misc_feature (1)..(1): n is a, c, g, or t
ntgtgacgtcaggaaagttctagatgtgctcttggcctccgcttcctcattggcaaaatgcagcgtccacagaaacagacttcgcctggctgccctaggaatgaagtgagagggttgactgcaccccctgtgggagtgccagttattgtgaggtcttgcctggccctcaccgccttccctcctctaggctgaagtcctgagactggaggcggagtccaaccccccttcgttctcttctctccacagcagcccacccctgtgcccgcgacaatggaggctgttctcacatctgtgtcgccaagggcgatgggacgccgcgctgctcatgtccggtccacctcgtgctcctgcagaacctgctgacttgtggtggtaggtgtgagcttggcactttcttttgggacactgaacagggacctgggttctctgcctgccaggttgttgcctggcattttttaaaaatccatagtccctgtggcatctagtgttcaaagcagaatgtcttgttatttgttctcatctctaacatatgcatttcaagcctttgaatttccctctaagcactgctttagctgcatcccacaaattttgatgttggatggcatcaccaactcaatggacatgggtttgagcaagctccgggaattggtgatgggcagggaagcccggcttgctgcagtccgtggagtcacaaagagtgggacatgactgagtgactgaagaactgaacaaattttgataaattgtattttcattttcagttagttcaaatatttttaaattgttctcaataattctttggccctggtgttatttagaagtgtgttgtgtaatttccaaatagttggaaattttctagctatttttctattcctgatttctagtttaatgccactgtggtctaagcgtacacatatgatttctagccttttaactttgttcagatatgttttcttccccagcatgtggcctgtccttggtgaatattccttacgagcttgagaagctatgtcatctgctgtcgggtggagtgttgctctacatgtcgttagatgcagttgagggacagtgctgttcaggttgtctgtccttccttcctgcttctgctgtcagttactgatggaggcgctgaaatccccgataatggatttgtctaatcttttagtagttctgtcttttcccctgcttctacccttgaccgtcttctttccaaaggctgcacggggagtggttaagaatgtcagctttagggtcagccagacctgggttccaataccagctttgccacttcccagctgagtgaccctgggctgctcacttacctctcttatcctccacttc

SEQ ID NO: 25602 - DNA, 963 bp, Bovine  19866880546730
  misc_feature (1)..(1): n is a, c, g, or t
ncctcctcctgccttcagtctttcccagcatcagggtctttcccagtgagtcggctctttgcatcagctggctaaagtatattctcttgaagcctcctctgtgtgcccctcttgccaacattagctcctcaccatcgttgaagttgtgtatcccttcattcacttgtattcattaattcattcattaaacatttgctattttgtgtgaaacaccatattagtaaagtcattcgaactacatagaactaacattttctgttaacacagaaatcctccaaacaacatttagcttaagtaaaagaagtttgtttctctctgtagtaaaacaaggctggaggagtcagcagcccaggctgcttcagtcccagttcatccaaagtcattaccttctagtccaaaatggctgctcagttccaaccctcacattcacattccaggcagcaggaaggaggaaaggaaaaggacggaaaaagggctacccatgggattcctttcacctggaatgtgctgggtcccacctggccaatcctgctcacctgtccggtgaggccctccgaatatccttctcatgataatgaagcagttatttgtacaacggtttccgtgcatttgggttcccactagattgaaacctccccgagggctgggacatctgctgcagtcccagtgtgctgctgggggaagcagcatctctcccgggctggaggagggagagatgaggcccagtgctggaccacagcctgggttttctctggattcttcttcctcttcttgctcatcagacccaggctggttttggtggtgaacagggattctaagggaagatgggccagctcacaatgcaggggtgaaattatgctttctgcttgatttccattactctaatggtgacccattttgtctgcctcacaccaggctgtcttcaagatgacaagctgagtgtcccactgggtcactgctgag

SEQ ID NO: 25603 - DNA, 787 bp, Bovine  19866880629637
  misc_feature (1)..(1): n is a, c, g, or t
nccccctgttcctccccagggggcagtgccccttaggactcagggagcttcactcccaggccaggtaaggacccttgtgccaggaggacagtcctctctggggacttcccaggctgaattcgtgacaagttcaggggtaacccctgcaggagggatccccggtcagggaggggcccctcaggatcctgcaatacccctgccacccaccagtgtctccccaggtgggtccctgatttgctgtgtggccttagatcagtgactgcccctctctgggcctggttccaggctgaccactgccaggctcagctccagccctgccccgcctgccgctggctctgcctctgcctggctcagctccaggcagcagggcagggctgtcacatgccgagccacgtgacaggcagcggctgggggctccatcccacgcagaggacgggggctccagcagccccttaccccatcccagtggctgaagcctctggggggctaccagatcctgcaggagggcccggaggcctctcctgccctcccaggtaggcaggggccgcggggagggtgggggccgtgaggagcatctcccgggggcccagttggcccagaggccctgggccacgatcctgggcaagacccagggcaccaaggtggaggggcagcagtgagcccggggcgacaagcctggagcggtggtacggaggatacacctgtccccacacctgtaacctaatcagccgcctgtctgacaccagcacctgtggggggggatcttcctcctttgtgctggctctga

SEQ ID NO: 25604 - DNA, 1347 bp, Bovine  19866880665429
  misc_feature (1)..(1): n is a, c, g, or t
ngtgtgggcggaggcgggtggggtctgagtccgagttagatccggtagtacttgctggccttccgcggctggcgctgtagtcactgtcgcacacgtccgtgctgcagggcgtggtcgggggcgccacgccgcggatgatgtagggcctggaggggatacagggaaagggagcctgcattcacagcggctgtccctgggcccccatgagcctccacagcgccacctccaaggtgggtgcccctgcacttaccttgcaggctgccaagtccgggccctggcaaggcctgcagccccgggccaaggtcacctttatggagaacaaggcgcccagagcccactcgggactaaacttaacctgtctgagcttccgtttctccttgacaagacgggaaggatgaaacggtgtccgtttcaaaagtggcttgtgaggattaaagtgagattctgcatggaacgtgctagaaacagtgcctgacaccagacagtgcgccacggctatccccccttgtatcactgctgtaagtggtggagaccagccagtcccgtcttgatcccggggatgtctcctgatgacccccgtgacattgccctgtggcctgggcccgaggtaggcctcacagtgggcaggaaggggagccggctccaaagggcccgccgctgaggaaggtgcagcaggaggacaccccacgtggggccctgggagcaagcaggaccccaacaggcagtgccggaggggaaaggtactggaggcaggaccagaaggaggacaggcgagcggagcagactggaggctgagggggctggcctgctggagtggacgcgacagccctggtgacaggctgtgacgctgaggcgctggggagcccctgcaggttcttgaccagggtcgtgaccaccgggtcaagagctgcgcctcccggattcggccggctccccttccaaggccccgggagtcccccaaacggccaccagagggcgggcggcgccgctctccgcggctccgcggctccaggaccacgagacgcctcccgcagcaccccagacccggctctctacgcgggaggcgggggcaagcctagcggggcccagcctccacgtgctccatcaggtagcccgcccgagcggggtgggccctgtgggctgaggccgccgggtggttgaagctcagcaggttcagctcgcccagcctggctcggagccggaccgacgtcccctgaatcaagcctgcgccgcgaggaaggagaaaggatcgccccggcgagggccggcctcgcccgctccttcccgggggaggcaccgcggggtggcggcccccgccgcggtccccagccggattcaagcaccgtc

SEQ ID NO: 25605 - DNA, 1142 bp, Bovine  19866880705304
  misc_feature (1)..(1): n is a, c, g, or t
ntcacggggggccggagcctcattgtcgcttgtcccgcagccccgctaccttctgcaaccccgccctggacgcctcccagcaggaagcagtcctgttcgcgctgtcccagaaggaactcgccatcatccacgggcccccgggcactgggaagaccaccaccgtggtggagatcatccttcaagctgtgaaacggggctcaaaggtgggcgtgggcaccgcgtccccacagacacctgtcactcgggtctgccgcgctcgcaggcccctgaagggccccagccaggttccaggactcgggtaggaacgttcccaggcgtttactgactgaccgctaggctgtgcccctgttggtgtctgacagcgctgggggtgtgggcttgtcctcggggctgtgggtctggactggggaggcctggggcactgtccgctgggccacagtccaggagccacccgctcagcacccgtgctgtgtgctcaggcccctgctgggcatgcaggtgacccggcccgtctgtgcccttcaggagaaggccctgcggccagtcatgggagacagaccttttttggttaattcaagagtcccgttagttgtgcagatggccggttcccggttcctgagatgtgggatgcgatggtgtgtgttaccatgcacttaggttgttaacggttgagagaggctcttttaccctcaacacgagttatcatggattctgagcacgtgaagcgcttgctaccttgctgggtcataaatattggataaggataagaactggagcagtaacagtcaagatctgtaggtcgatgttccctgggtccttcttatgaaccaggcacccgtctaagcctttgcagcgtttgctccttcagtcctcagagagacgggtgtcctagccctgactgaccatcccaggacactttgaggcctttccttctggttgccggtcagcttctctggtcttcggtagccccgtaggttctttcgacctcaggtctagaacccagatgtcgtgtccgtgtgtggtggcgtgtccgtcaggtcatctgcaccagtcctcacagccggatgtttgccccgtaacgtcaccagctgtacacgctccacccttctctctttaaccttaggacttcccacttgttgtaa

SEQ ID NO: 25606 - DNA, 1106 bp, Bovine  19866880804310
  misc_feature (1)..(1): n is a, c, g, or t
ncacgcagtgtgggctctgacggctgctgggaacgtggggcctggcctcgggctcgctcgggcctggggttcccctgggttccggggtgacctggggtgcattgctggtaaacgacagcccaaggcaccacctgaccaggctcccatgcggccagagcacacggtgagctgtgcggggtccccggaagccgggtctgggcagatcctgcccacctggttacatggtgtagctcacacgtggtgcacgttttgttactcgggtctcgtatccaaagcaggctccatgtgtccaccacatcacagtcccgagaaaggaggattcgaggaaaggactcacgtccacgtggtaccagggaccctcagaggcaaaggctcatcccgcccaggctcagacagggtcaggcctaagagcgaagcccaggagagcagcagatgcggcccacgtccagggcctcgcagaactttcaacgtcgacaacattgcatcccatcacacaatcttgaacaggctccccggggcgtgacgggagcaggggcggggggcaggatgcagcccacacaaacagagggacgcagtctgagtggaaaggggtcattgctttaattaggtcaggacccaccccggggggcccacccaccccatcctgaggcagaaccactggccctgtgtcaacatgattgttacaaaaataaatatgaaaaaagcagccgctctttagtgatcatggaattaatcttgacagcaattaaatgtgtttagcatctggcatgtctcctaaattgcaccaaaagaatctggaagcacttggtttggcctcagaggcaacccggaagggagggcacaggggccctggcccaggcccggctaagcgcagtgcccgcctggcccgcaggtcacatctcggagtcggcatacatgccgttgatgagatagtccacctgcgtgtagtccttcttcctgtagctctcgtaggcctgcagggcgaacaggatcaggacggtgatgaagagggtgacccccagcaagagtaccgccaggaggaaacttctgttcactgaggacagggccaggggctcgctggagaccaccaggtactggccctgggt

SEQ ID NO: 25607 - DNA, 1553 bp, Bovine  19866880823677
  misc_feature (1)..(1): n is a, c, g, or t
ncttgccttattttttgctctgccttagaggaaagcacacacacgtccctatacatgtatgtgcattcatggtatttcctgcattggtcgtataaatgcagttctcacatccttcaaggtgggttagaataagctccttccttgaagcgtgacaaatcacgacagcatgtgatgatcagcttatgtaatactttctcagtgtttagctgtttggctgaataacatgagagcctggttgagtttcacacatcccttctttccctttctcctcctcgttttcagctctgggactttttacctctgtgagaatcgaatattcaatagtactttttaaatttgcatttacaatcattcacaagtaacttggtttaaaataataagatgcttcttgactgtctcattcttcatcttggtattgcgatgtctgaccttgtttccatagcagccctgagatgctctctggtgcagctcaccacaggctaaacaatagacggccaaggtgaagcctcccggcaggtttaaagccgacagttctgtccccacacagctgtctctgccagcccccatttctccacgagatgaatcagaagcagacttcccagctgaaccctggaggttctattcagaattcgggttaattttaggggcacatgagaagtcctgcattggacaagaggaaaatgggcccttttgagaatgaaataagatcagacacacagcttgaaaaactgccacaccacacaatattgtttgtaggagattattaaacataaaaatattggtctgaccttcaaacagtgtacgtcagtagaatttagtgtctatttcccacgggccagctctaactttaatgagaaggaggttatcctccttagctggatagatgacggaaattgaaattaaccataaaatcgactgtaactaaagcaggtagaacagctgagtagaagccttgagaagtcctggttcagtctttgccattgtgggaagaggtattattgctagaagagagcttgaactgatgacgtcagctgccaatgtaacgtgattttttttcctttctggtttctgggaaggaacatgcgctctgcaccgcccagcagcagccttttcccagaagcgagtttggctgattacaaataacctgtttgcttatttatcatgaattgtggaagacacaaatgtcagtacgtattgttccttcaatgtgacctgtgccagtgggcggaagtctcaggaggctttgtccccgcctctgtcagaacagtgactgtgtggagccggtcccttctccgcatgaatggagagattctgcctggcctttccaacggcctcataggcctgaatgtctgtaacacaccctagatctctcgagtgttgtctggggaacttttgttttgttctctgagtaatagaaggctaatattagtgcttgttggagtactaaccataataaaatgaaaggcatcaaggcacaatgcagatatgtctcggggactcgaagagcactgtctggggcacagtctttttgaattcagaaaaccaaaagtcac

SEQ ID NO: 25608 - DNA, 2737 bp, Bovine  19866880831849
  misc_feature (1)..(1): n is a, c, g, or t
ngtatcaggaggcttagaggggcagcagggtcccagaagtttccgggttaaggacatgcagatatccattttgtcttgatttggggtttggaaatttagattgtgttctgtagcagataagcctaagttcaaagagcatagtttgaaaaggaatagatggttcactgtgtgaagaaaccttgatgaaagctctcagccattgttagtttgggctgatttttattcttcttggctttgggcgaaagggagaatctagaggtgaacagcaccttggagagcccctcaggccacctgctaaagactaaatgcaggagagaggttaaccgccacccctccacacccccggtgacgaaagaccaccggagaagggagcacagcccacctgcccaggccatgtctcggcgccctctcacttaccagaggaaacttggacttgaggctctcatactgtgccatggttagtctggttttttctaaaataatttaatttgcctcgatttatagataaatcaattgaaaatcagttttgataccggcagatccacaggacagaaaaaaatagtgattcatctgaagttcaacacagttgtattttctttaggcataaagaacactatctgcaattaaaagtataaaaagttttatttaaaaatcatggaaagctggtagcagtgtaaattggtgcaagcacttcggaaaattgtttggcagtagttactaaagttaaacctctgtttgtgctgtgcccggcagtttcattcctgaaaatacaacccctagaaatgagtgtacatgtccaccaggggcttgtacaaatatgttcacagcagctgtgttcataatagccccaaactggaaacaagccgggtgcctctctgtgctggactggataggtctgcagtatatgatgggttacacaggtcagtgggaaaggaagacctccatctctgccacagcccagacagcctcacagacactgcactggtgaaagaagtcagatgacaaagagtacatgctgaagggttccacttagctgaagttgcagaacagcaaaattaaagcagcgcaagtcagaagatgggttcccactggggtgtgttgatgggcagaagacatgagggacctcgggtggggagctggactgtcctctgacctggcctgggtgggggccacatgggggtcacacgggggtcacaaatgccccaattcatcatattccaccatcccttctgcttcactaaaaagtagaacacacaccaaagggtcctcactgcaaaggccctttctgcagagccaggctctggtgtcaagacggatccccacactcatggtgaggggagaaggagcatggggctgccgctgtgatgtccatattgccccaacccagcttaataaagagaacagggccatcttgttagagaggtgattgagacctggggctgaccgtgaactcagagaccagatgccatccctgggccacaatcttctgactcctcggcgcctcagtttcttcatccatcgggcgccaagaggaggggtggtgtttgctccacaaggttgtgtgaggcttcagtgagagaatgcatacatcgcacagaaagatgcctggaacacagtgcacgtttaataaatgtgagctggtagcagagtgccgtgatcccaactattaacatctcaggaaacagtgtacacaggcgccgggaaggagctgtgttcaaatggacacagtgattttctttgcatctttaccgtccactattccacctttaagtattcaagagaatggagcaggaccggggtagaggcccgctgctcgtcgtggccgctcctgaagttacagctagacccagttatggcaagccagatacgtggcactaagcattgttttaagtaataaaatatatcttgatggagttttgcattttctgtcttaggcatgtcttgatagaaatccagaagctttccaaccaaaaattgggaaaggaaaactgggtgatgtgaagcctcgacataacaaaggatgtaattgcaagaggtcgggctgccttaagaactactgtgagtgctatgaggtcagtcaacaattgccaagcattatttttaaaagccaggtaaatggtctaagtaactttgtggttaaaaatttaattaagaatttaattttcttccttccagggcttctaaagagcactcatcaatctaccttaatgtctcaaacataaatttcactttatgaagcaagggctcctttgggagcatgtcgtccccactgagctcgccccgagtgtcccgggagggtgcccagtgccacagccctgcccgctctacggctgctgatctgatgctggagccaccctcaggggccggcagtctgttggctccccgaggtgggcttctgcccagctgagcagagcagagatgctctgggagggcagtgaggacagccttgtccccagacgagccttcccctgggtgctttgagggggcagcttccaagtggacagagaccagaatgcacagctgcccttgctgctggggagatgctgaccagttctcagacagagctttgtttccttcctcaaaagatttaaaggcagtagaaggactggttttctcctttaggttcatccctcactcacctcctttttctgtctctctctgtctctctttgtgttgaagggaaaggaagaaagagggaggaagggaaccctcaggccttgtcagtgaagcagccgag

SEQ ID NO: 25609 - DNA, 975 bp, Bovine  19866880845482
  misc_feature (1)..(1): n is a, c, g, or t
nttttctcattgtattaggtcattgtgacctaatttaccctacttttaaaaactcccccatctatgttgagcatgatgcaattatatctattgtaaagcagtcaaaaccttcctcccggaagtgaagcatctttctagtattgcgcgttcccatttggtctcacctagcatttcttccatgaatcccctccaaaggcagttgccaaattaccccctaccgtggtaccaccttccatacctgctttggtgccttcttttgataacgaaataaactacaggctgctgtgtctaattttgacatatgcaaagtgtcttttgtcttgctggtcttaaatgtttggggtttatagcatgaagccaggacaggtgtctggccctggaacgctggtgtgactgcagcccgccctcgggaaggaacgtcttcgtgtcgggtggcatgaggggtgtggggtaatgtacgactttagctgtgcatgtgttctctgctgcaggcttgtccatgcgatcgtgcctggagcactctggtttccaggtgacagacacgattcacggtatagtatgagtcctctgaagttggagcattctctacagctttaatttctgtcttttagttcttggtttcaagaaatgttttttaaaacaacaaagttgtaatgcttttgttaagtagcaccagctacagtttgtgcttgcttaaaaagctacagtaattaagatttcagaatgttatgtattgaatatatcactttggggtggttgtttttatttcaagtcccaggcaaatcagacccctttcttctgtttcctcagtagaaaatgacaaacatttagtaattatagacgtttatgggcctcagcttgaaaattcatgtccagtattcagctgctgcttctctcatgccatttcagccttcaggaaatgccacatacatatgatattgggtggagtggaaactcccttctctgcccttctca

SEQ ID NO: 25610 - DNA, 863 bp, Bovine  19866880849737
  misc_feature (1)..(1): n is a, c, g, or t
ntcctgggttgggggggtgccccgagccggctgggcttcctcctgcccccactcaccggtggatacagtgtagccttggtgctggacgagctgctggacgaggccccggtgacgtggttccggtcgtagaggggcacccccggggccggccgcccatcaggctcacggagctcatcatggacttgccacacgaaatgcctgtgggaggggggccggcgggcatgaggcctggtcaggggccagggcgccccacggacacggagtgctttctccagcccctctgcccaggagacccaaccaggctcagaaaaagaagccccacgtgacgactgtccccagtgggcaactcagatgagctcaggtcaagtccaaagagcgtttctgaccccctcgccccgcagcccgccctgaccgcccttctccacctcctccagggccctcatggggctcaggctcctcacctgtgaagggaccgtgctgggagccgccgggggcgatgaagttgaggggcacgtggggggtcccgctgacgtactcgtgcgggaagggcccattggcaccggcgtagcgctggcacaccacacgctggcacacgaagtagaccccgcccatgatgaagagcgacaggatgatgccaatgaccggcccgatggcgctgctgtgggctgggccgtcgtccgagggcagcttggtgatttctgccggaggccgggcagggagagacggcggacgtcaacccaaacggagcgggtctcctgagggggggcaggcgctgtgtgccctggagggctcgtacccgccccggcccagcacccactggtggagctgctagggggctgggcagcacccctaagggcttgccc

SEQ ID NO: 25611 - DNA, 1093 bp, Bovine  19866880878324
  misc_feature (1)..(1): n is a, c, g, or t
ntacaaatctcagtgtcctcccggtggtgcagtccgcaaggccttccacagcttccctgcccctcggcctccccacttggccttcaccctgggtgggtgggggtccctcctactcacctctgccctcctggacacccagcaggcacctcacatccctcccggggtatctccctgatcacccgcccctccacgtccccaggaggaagctgggtttcccgcctcccctgccagcctgagtctgtgtccgcagccgcctgcgtggaccacactcaagggaggctcaagacacacgtctccagtggggacgtgggggtggcaggctactcttcagatcacatggtggcctcagaccctgccatgggccctgggaccccgagggggccaggtagagccccggcagctctcttaccagcctcaccgctgcttccccgccaggtggtcaagcgggtcctggcccagaccagcagcgggggcttctgcgggaacgacggcttcatgcacttgaccctggccagcctgcctttcggaggagtgggtaggtgccggctctcacctccccccactcccctccacagagcctggagtggaaccttccacgccggtcctggcacttccctccgcaggcagacccgcagacacacagcttacgttgttttcagcatcaccgtgaggtccgtccgcggtgcttgctgcagcttttctccccggccagcctggtggcacacacagggcagcccaggtgtgctctctatgccacatgcggctacacgcggctccttcaagccctcccgcaccccctcgggtccatgatggagacagggggctgctgtcagctccccactccaccaggccctagcagcccccaggccggctgcaaggtcctggcctctgaggctggccccagcaagcccgacggctgtatgatgtggggccaccacggcccctctctgagagacctcctcctcaggggaggagagggcccactgggcaccggagtaaatgaccagcagggcctggcaggctgccctggtcgtcccaggccctcccaggcctcccaggccctcccagggctggcacaggccggcccccttct

SEQ ID NO: 25612 - DNA, 1522 bp, Bovine  19866880912851
  misc_feature (1)..(1): n is a, c, g, or t
ngggagagtgtagtctgggcgggcctgggaagttcccatgatcgctctgagagcagttgaaaagtcatttgcggttaaagaagtgagtggagaaaaggaatctgctgccgcctgttcagagagcgagcgagccccggcgctcaggcagacgtggcacaggggtgcggtgttgtcagggctgggggcctgtggaggggcgctgtggtacacagcctgaggtctgaggtgggctggccccgggagaatgggaggctgctgtggagagttcggtttctatacacactttgttttcccacccggggaattcaggctgtgtcctgttctctgctcgagtatattgaagtgtttattctcttaacatgtaacgtggactgaacacctgacacgcccagcgttctaataccacagacaacccttctgaggatacaggcagcctgtccaggaacctaaaagtgtctcgagtgcacagtgccacgtgcagcgcagtttcccggaagccagcgtcccccaagcggtcttgcgagctgcgctgcttcccgcaccggggtgggcggctgagggttgcggcccacggcttcgtcttgtcccctctgaggggtccccgccctcgcctcatgagccccagctgtgctctggttttgttggggagactgtattggtttttagacacagaagaaaattcactctggtttaaattggcagaatggcttgaaattattttctcattcccagaagatttttaaaacaattttcacaaaattttaggaagcctttctgatctgtgttctgatttgtgtaagtaaactgttgatacagatgatgacgtgagtatcctgttcttctaggtatccaaatatatcttgtgagttgctcacttctgatgtctcccaaatgaacgatagactgggagaagatgaatccttgctaatgaaattgtatagcttcctcctaaacgattcccccttgaacccactacttgccagtttcttcagcaaggtgctaagtattcttatcagcagaaaaccagaacaggtaaatactgttttctaagaaggtaagtattagggctgagcatcccctgaggtgatcctcagtgattttgtcgcttcagtgttctgagtgtgccttatgtcccacgttctgtaaaagaacagattttacaccttaaatatctgcagtgcttgctgacttaccactgacttaactccttaacaaatacattctaatttgacctccttttttctgagcgcctcatatctcagttttccagtgtacttggcttccttttctgataggtggttggaagcaagagcacgctggggtcagtctgtgagggtcgcgtgaggaggggcacacagtggcagggggtgtgggtggcgtcctggcgactttgtggcagggtcacagtgtgctcatttatccttctccctgacaaagagcacaggcgacgcttaaggcagaaagctttcccataaagattgagattagtttatacaacggtcattttttttttttttttttt

SEQ ID NO: 25613 - DNA, 1989 bp, Bovine  19866880946666
  misc_feature (1)..(1): n is a, c, g, or t
nctgaactttgagcttgctggaaactcagatgaaggaaataatgagcacaaatactcaaaacaaacaaacaaaaaccaaaacaaagctaatcccgggatcagaagggtggtgtctaacctgatcagcctccgcgccctgagtgggcccttgtcctgtccttcgtcaaccccttcctaatatgatgtgacattttccaagagccagtgaggctgatgttctaggagccagtgaagaggaaacttcccaactgaccacgctggactgaaagggcaaagtgcagaggggatggggcgccagggctctctccgtggtcctcagtttcctccacccagtttcctgggacaagttcctcggacattcgcttgggtcctgcatgtgggtggaggaggggcctcggtagtcagcccagaacacagatgagggcttcttgtgtccaagggccactgtctcctgataccctctccctgctttatctcctccatccctgcagtggccatgagaagcttgcagctggggtacggcgcacattacatctgtgtggttacagtggctcacctgaggccaccagcaagtccgtatctctgagactctagttcaggtccctcgattccaaggccaggggtctctccccacctcagccagcctcaggagctgagacccagagttgtggccctgtggttttgggctgaggccctctgggtagcctgtggtgccagcatccttcctcccacttgcaggttctttggcaccaagtggatgatgttcctggctgtgggcatctacgccctcttcgtctccaccaactactgggagcgctactacacgcttgtgccctcagctgtggccctgggcatggccattgtgcctctttgggcctccatgggcaactacatcaccaggtgagtctggtggacagcagggtagaagaccggggacccaacagagttgtattgtccacctcagctgggggaccttaggccagccttatttgccctctgggcctcagtttccccattggtgggacacaggccgggtagcacatatgcctgggtgctacccggctggctgacgtagggcgggggagagccttctctcctttgtggtccaggatggcccagaaatactacgagtactcccactacaaggagcaggatgagcagggcccccagcagcgcccaccacggggctcccatgcaccctacctcctggtcttccaagccatcttctacagcttcttccacgtgagtgccatgcatggggaccctggaggcaggctattacaggcccagaatcacatattgcagcccatcccagtctttccagccctctagtccacagccctttcttaggccaacccttgcttgcttacctccagtgacagagacctcatcacctcactgtccatggtgctgacgaggaggaagtcctcctgcatcgggcacccccaccattggactgccccccagagatgggagggcccctgtcctcccaagactgtgcccagacccctcccagacggtgcctgtcctctccacctggttccatgccccgcacctgacccacaccactctcctgcccacagctgagcttcgcctgcgcccagctgcccatgatctacttcctgaaccactacctttatgacctgaaccacacgctgttcaacgtgcagaactgtggttagtgctcaggggggtgggttccctaaggtctgcttgcctcccctgctgagtcacccggcagacactgggccctcaagggcagaaaggatgcccttgctcacaggaaccagagctgagagcctgccatcacagctctggtgattgggaaaagcaaagggccttgttcttaggacatctgactcaacctggggtcagggtagggtgcatccgggaaggctgcctagaggaggtccatctgggctgaggctgcctgtggaatctcaggatcaagtataccctcaatgcagggagatgtatggaggtgggagg

SEQ ID NO: 25614 - DNA, 3969 bp, Bovine  19866881048099
  misc_feature (1)..(1): n is a, c, g, or t
nccttttgaggaaacacattactggttttacaatgactacaccattttatattcccaccagaaatacagagtaccacttttgtgttttctgattaccattttttcctcgcttccctttttgcctgatttatgttttaaaaactaatggcaaagtggaggaagctgaaggtgaggagacatcacaacagcacagacaaaagtgatggtgacctggactcgggcggagacggcagggtgaggagagccacagattaggagacgctgcaaactgtgtgtaaagagacatacacatttttcactcatttattcattccacaaatattttttatgcctgtgatttcagggatagagaaaacagaaattaacaagaaaagttatggtccctgccgtctcaacactcacagtccagctggggagacagacatgaatataacagtcacatacacagagatcgtggtggatgtgtggcaaaggaacagcgatgggcagagggtaatgggggaactgaccaagtatgacagccaggaagattttcctgaggaagggaatggttttggatgaggaggagttaatcaggagttaatgaggcagacgtggattcaaagtgggtcgataagagcattctaggcagaggaaatagcaggtacaaaggccatatggcaagagagagagggcaccgggttctgggaacagaaaggaggccagtgccatctgtgtaatattgttcattataccaaaatgtacaaaataatctgaatgttcatcactctatactgatgttactacagagtgggatacagtgcagtcattacagtgacataaatctatttacatgtaatattaactctcatattgataataaaagcaagctgtcatattgattactaactttgatacatagtaaaatcacattgaaactgtatagaatatgatcttgtttttatttatgtattatatgtaatcaaacagcatatagttattgataacatgcatagttttacagaaaaactctgaaatatattcaccaaatggtcatctctagggagcaggattctgaattatttaaattttttctttttatttatattctaaaaaactacaacaaatgttattttcttgtatcaagaagacaattagcaaagacatttctgagccagaatcagaagacttggtaacctcttggatatgaaaaaagagagaaaggcagtcatcagaaatgacttggggtcatgtcactgggtaggtgatgacaccacaaatgcagagagactacagcaagagcagggtgaaggctgaaggagaaggtcagaacttaaggtgtggacaccctaagttgaaggtggaaatgtctgataggcagtagggaaatggttttggagcctaatcgtgtcacacgctgctgtgaggtaaatgcagtgcagaggtccttgcactttctggttagggaggctgttgaccacctttgagagttagaaggaggcaggaagatggtccgagagcagtagattaaagaatgaatggggatgaggaaggatgagcagcaagtgaggaaacccttacctgatgtttgtgaaagaagaaaatgagactttggtgacacagatttacaaatcttctacataaagtttttttaaaaagaaagtgaaagttgctcagtcatgtccaactctttgcaggcctattctccaggccagtagtaggtagctgttcccttctccaggggatcttcccaagccagggattgaacccaggtctcctgcattgcaggtggttctttaccagctgagccaccagggaagcccaagcatactggagtgggtagcctatcccttctccagtggatcttcctgtaccaggaatcgaactggggtctcctgcatagcaggcagattctttaccaactgagctaccagggaagcccaaagttttaaaaagtagtcaataaataaaatcacccagcaaagtgtgtagagtgagaaaagaagtgtgcctagcttggatctcggtgactaaacatatcttgaactaggtataaaattctagattgtcagtttttcctctccatgctataaaaatattgttctactgttttccattatttctaacacaaagtctttggtcagtctaggtaatgtcttttctctctggtgtttttacaattttctttttatctttgatttttctttttatttgcttttttgaggttcattagttttctgaaatctgaggacccacaactggaaagcacaggtatcctccaagtataactctcttctgcttctcttttctgtcctgtaatgcttatcagtcatgcgtgaccccctaactagggaccatttctcttcatctctcccatgtttctaacttctttgtcattttatgctgaatctggatctaactctttatctttgtttatcctttctgacttttaattattgcttttatccaggtcatatgtacatagtttaaagagctaaataggggattccctgactgtccagtggttaggacgctgcatttgcactgccgagggcctgggtttgagcccggtcagtccatggggtcgctaagagtcacacaagactgagtgacttcactttcacttttcactttcatgcattggagaaggaaatggcaacccactccagtgttcttgcttggagaatcccagggacgggggagcctggtgggctgccctctatggggtcacacagagtcagacacaactgaagtgactcagcagcagcagcagcagcagcagcagggaactaagtcctgaaagctatgtggctcagtcaaaaaaaaaaaaaaaaaagtctaataattatacaaggtttatgaccaaaaaatgtagttcctggtaattgttccttattttctgatctccagacgcttttggcccttaaccaaatcttttagtatttgcctccataaatctaaataacatgcctgcatcgctgcttcttggcttttcagtttcagcatgatctcttgtttttgtgccatgaaagatgtggatttagccttttcctcttcctactcacacctaaccccctcccaacatgcatgtggcctgttcccagacatcagatgtactttgttagatcagtagtgtttttatgactgtgaaaacacatctgaggtttgattactgttcttcctcaacttctttctcttctccctcacgttaatacttagtttttaaatgtatcgagcactaacttaacccttaactcttctctgcttgtgtaagtgctttctcaacacatgcaaacacgctaggtgctcagtggcctggtctggaggaagcctttcctgccgccgtcaaggtcctgctcctaaggggctggttctcagccctaggtgcggttctccttaccctccttccagcattggtcccagggtttcctttgcttcttccgcatatctgaccccctggctcctggatagcattatcttcctcattcttgattcactgcattgttttcaggcagcatgtcgtccagcagcttcccaagcaagagtgatggagagaatgttttcagactgtgcgtgtctgaaagtgtcatgtctgtcctcacactaagatggtcactttggatggatggtagggttttcaacttcaactaattaagttttcctttaggatttggaaggctttgctgcattttcttctagtttctggtgttgttatgaaattttttctcaccctttgtatgaaacctgtattattctttctagaaccttctgggatcttctttctggtccctgtgctctgaaatctccacgaagtagatttgtgggaaggttacctttgaaggactcacactttataagggtttttgatgcagctcctaccttctgtagctcagacgctgtctcctgtagcagcggccaatctgaactcaagctttgggccactagggaccagcagagggcccagacagcactggcagctgcagacccacc

SEQ ID NO: 25615 - DNA, 1120 bp, Bovine  19866881097276
  misc_feature (1)..(1): n is a, c, g, or t
ncgacccccagtttctccaggtacagctgtttgtggaacctggcactgcatcaccctctgaagctgcttgccttggagccaagcccggccaccctggtctcatctccctggccctggtcatagaaccactgcaggaagcggtcctgaccacactgccacgtgtctttgccctgcaggggcggggccactaccgttgtcctcgttgtctcccgctgcctgcttcactgtagagcctcccctgcccccgtgtgcccgtcagattccttcacgttgccaggcctggctcagatcctgtttccgagagtcagggctgtgctcccgttctccctgtgctggcccgttgttagtgttgccttaacatctgccagtgtgcctcacttagagtcatgtgtgcatagtccccacccgcatcggctgggtgccaggctgcccgagggcaggagtgggaaacacttctggtgagcagctgccttgagcgccgcacctcacggggccagctgcgcaggcagaagggccgagctggtggtggagctggatacggtcccatcgtaaactgctggagacccggcgtgttgagcccggggaagaggcccccttcagcatggggtggggtgaccggaaggcaagcccaggggtgctacgattgtacgcgggaaggactttgtctccagaaagtggacctttgcaggtggctgcccctccctgagcagtgctgtctgtgggcacagtgccctttcaggaggaattgttctctggacaagactgtgatgcccccaaagacactctagatctagggtcatgtgacctcacatgtcaagtttacctggataaatgccatcttttcacccctcttttatctcagagccggcgattagacactgaagaattaagtttgccagatatttctgcagaaatagctgagaaaatggccagatttcatggtatgaaaatgccattcaataaggaaccaaaatggctctttggaacaatggaaaagtaagtgctcagctgcttggctctcgcgcggctctccccggggctcctagagtctccggagcggttctcaggaaggccctgagggtcagaggcctttctcagtccacggcgcacacactgtctg

SEQ ID NO: 25616 - DNA, 1380 bp, Bovine  19866881116861
  misc_feature (1)..(1): n is a, c, g, or t
ntgtgatttttacaaattctactgcaaatgaaaaaccttgtggacaaagtcaccactttgatcttctcagatacagtgaacaccggccaaactgttttaatttccgaatttattaaaatgattaacctcaatactgcaagtgcatgtacaaaatatttgtaaaaaatgtttttttaatgaaacgttaaagaacttacctcaaatgctgaaaaagtccttttttttttcattctttcagtacaaggaatacattttatctcaaaagtattacaactcagcaaaacaatttaaaacagtaatttgaaaaatgattgaaaattgaatactttacatatatttctatgatcgtttcctaattcttacaatgccacaatctttaccaatcattgcataagctcaggctagaagttttattgattgcaacctcttccaagtggtcggcattgtgtggacctggccgttccacacagagtcctacagcacaggcaggccaactccgaggcccctcactgtaaaaacggaagtcaggtttccctggaaggcgtcggccacggctgccgagcgcttgtgcataccacctcccgaggcagtgaccgccgggcatcactgctccggacccacgggaaggttggcccccaaagacggggcctcagtaaagttaaatgtcataaataagttactaaagttaagcttaaaaaatggagaaaagtgggaaatgtagtattactttttcctttaagactgaaaattcctgaagtggctatcgttggtattccaaaagaatggttcaagatgtggtctctgaacctcttccagactacaaactaggtggggttcccaccaatcaaggtgacccgctgtgctccggtgcttcccggacgcagggtctaagcgtgaccttggcgcgtgagcccccctgccaccccccacggccacccagagactcgggagtgctgggtgagtctgtaaagtgctctgagtgctcggggacagacctgcagggccgcccgacttcgagaggtgaagattctagatggagtgagccaagggggtgtgagtgggcgaggaggtgggccacctgaccccacgttaatacctgaggggtgtaactgcaccgtacaaacagggacaagacaagaggagaccacggaagtaattccttcaaggacagaaggaggggaacattttaaattcagagaacctttacgaatattaccagtttctatttggaatctaccagcaatagttttaaggaacttaacttaaattatgtccccaagaacccagaagctggcaggaatcatgaagtcctaacagtaagcattgaagttttcccattggactgctcattacctgcagaggcctttcagtatcttaaga

SEQ ID NO: 25617 - DNA, 1417 bp, Bovine  19866881226029
  misc_feature (1)..(1): n is a, c, g, or t
ncagagctggagaggcagagcactgtggggattcactgggtggcagcccagggacccggggcagccccttctctccctgtgaaaccagacaaccaagccccacctgccccctgttcaggggactttagagacagccagagactggcccagaagtcacttgggaaacaagcatgcttctccccatccaggtggctgggaagaaggagccgctggttgccaccggtgaccttgcctacagtggccacccccgggaggcagggtcggcacacccatttcacagatgagcccaaggctccctccagtcagcccaaggtcacagggctggggcctgcagaacccggatctgaacgtggttctaacaacacccagcatggcccgcagggtacaacggcccatcccagggccttgggggaagtgggggtggggagagggcttgctgagccagagccatcatggaggactccctggaggagggtgagccccagcaaaggcagggcacctgtggcactgggaatgggcagtgtgttatgaggaggagcccctgcctggcagcgtgggggggcgggagggccccgctcaccgagctgtcctgcagggcctgctgcagggtgggcaggtcacgtgtggcacaccaggcctcggcgatgaggcacttgtgcgtggagctcacgctgcactggttgagggccaggtacacggccttcatcttgcggatctgcacttgccagggcggcagcagcctctgcacgcggcccagcacctggctcaggaagcgctccgtctcccccaggacctgtggccggagcaggtgatcagggcggcagtgggccgcgggggtggcggccggaggtccaccctggctgcgggcacccacctcctgcagctcctggctctgctgttgcagctgctgcagggctgcatgccgggctgcctcctcctccgcaaacgggaagacatggcagtggaagctggcagggagcggggcggtgagcaggtgcctggggtccaggccacgtgcgcgggagtgtggaggacggcgcaggcttggtgtgaggtagaggggacacccagggccctgggggggctcaccagtcagtgatcttgcggatcttctgccctatctgcccgccccagtaggagatgaggaaggtcatccacgtggcaggctcaccctgcggaggggcgcccaggtcaccctgtagtccccgcgcccggagggccacactcccacccaagccgcccccggcccgcacccgcgcaccgtcactgggtcctccagctgctgctccgtctcccggaagctggcgatgaggaagccgcggcaggccctccagagcaggcgctccagggccgcggccttgtggggttccaccgcaccggccacgaagctgcgggaccaggcggggctgggcagggg

SEQ ID NO: 25618 - DNA, 1325 bp, Bovine  19866881355792
  misc_feature (1)..(1): n is a, c, g, or t
ncaaggaagaatgcataactgaattgaaattttctgttaaatcagggatgtgccccccacccaaatcccttcgaaagaaaatagtacaaatactccatcctgggaaggggggacttttgtacttaccgtctcaggacaggagaacttggaggatatatggaaattgatgaggtcctcaccgacgagaatgtacgacaccccatagccgtcatcagcaacctatagaaaagcacattcaaactgaacttggggggaattccttggcggcccagtgcttagggctccgcacctccactgcgggggacatgggttcaatccctggtcggggaactaagatcccacataccatgtggcatggtgagagaatgaatcaacagaaccgtggaaatgaggccacgggaaaaggggatttcgaacctttaatgagaatgccattcatactggcacgaatagccagtaggagcaccttcagggcggggtgcttagagctgagacaggcccgtcctgccccggcgcttgctgctctgtgaactcagacgcccggccacttaccggcccgaagccccctccgcacgacacgtagtctggattcctatccaaattgaacagttccacctgctgtggaggggtctggctgggggataatctccaaggctcagctaagacctggggagttaaacaaggtgacgttctaatgacacttcccagctccatcctcttctgtccccaaggagcccaggagatgaggaaaggcttgcttggtgtttggactgtttcagacaccagaaggctatgtccctgggggccttgctggctctgggggcaggggttcttcggagagggatggagcaggtgaggatacccagactagagaggcaaacactggctgacggggtcttgggcagaaaaggtggcggatacacggagtaagatttggaagggagcagctgtgtgctgagcagactggtatcagctctcctaagctgagggtcaaacttccaggaattttccaaggtgcctgttaaacacagccaccgttaaaaagttacattttataaacataaaagtaaaacaactatattaaaaatgaaagaagtaaatactcaagagctcaagacttccctggctatgcagtccctgggctcccactgcaggaagcacaggtttcaattcctggtcagagcactagatcccacatgctctgcagggtggtcaaaaaaaaaaaaaacacaaccacctcagagctcctcagttcagttgatcagtcgtgtccgactctgcaactccatgaatagcagcatgccagaccttcctgtctaccagct

SEQ ID NO: 25619 - DNA, 687 bp, Bovine  19866881488689
  misc_feature (1)..(1): n is a, c, g, or t
ngggccctgcccggggaggccgggctggtgggcagtggctcagaggccggggtgacaggaccccccctccctgtggcccagctctgcagcaagatggggaaggaagagctcgcctcctacaggtgccgcggcccaccccccactccgcggccacggtgcaggaggaacagggagtgggggtggcaagcagtgaggggcagcccagcccgcgtgctggcatcagcctgggccagcaggctgggtaggggccctggcattccccggggcccctgcctgtttacctgaagctcacaagaggagtgctctgacgcactcggtcctcggcctggtgccaaggacctgtggggaccctttcctccttctcttctgactcccttccctcgggtctctgcttggctgatgcctccttcaggcagcccaccatgattactcccttatacgttctcacagtgggcccgcgactgtgctccccaccacactgcatgtgtgtgagttgctcagtcatgtccgactctttgtgattctcatggactgtagcccaccagactcctctttccatggactgttgcaggcaagaaactgaagtgggtggccatttccttctccaggggatcttcccgaccctgggatcaaagccggatctcctgcattgcgggcagattctccaccgtctagccaccagggaag

SEQ ID NO: 25620 - DNA, 2156 bp, Bovine  19866881606425
  misc_feature (1)..(1): n is a, c, g, or t
ntgtcgcccgacgggcctggcctgcgactgggtcggcaagaagctgtactggacggactcggagaccaaccgcattgaggtggccaacctcaatgggacgtcccggaaggtcctcttctggcaagatcttgaccagccgcgggccatcgccttggaccccggcacacgggtaaatccagcacctcacctccctgggcgggggcggggcaacggtggtggttgtccagtcgctcagtcatgtctggctctttgtgaccccgtggacggcagcacgccaggcctccctgaccatcaccatctcccagagcttgctcaggctcatgtccatcgagtcggtgatgccatccaaccatctcatcctctgctgcccccttctcctcctgccctcagtctttcccagcatcagtttcttttcctgatggtggggtgggtggggccatgatttccctcttgaatttacttgagaccaagtacctttttcagaggaaacccgcagtcttaaaatgggtccaccctgcagaatttgttgaaacaccctggaatgtgtttcttttctaaactcgctgcaactgatgtgattggccgtggatctgagttgttaaacatctcggtgtgtgtgtgagtgggtgcgcgtgtgattgggtgtgtgggtgtgtgtgtgtgagcgggtgcacgtgtgagtgttggaagagggtctgggcactctgccaggcagagcccacacctttcaccctctctgtgactgcatcagctgaacacggtggaaaaagtgaaactccccgtccggatgtggaacttgcggaattgttgctctggtgtcttctggaagccctctgctcccgccagcttcgtggtctggctgagctcacgtgatccgcagaagctcagggcccagccccagttccaggtggggtgttgtgagtggcgggaaaactaaggacgtacgcagagttgaaggctgggatggaggggagatggcaagctgccctccaggccatgctcgtggccggctttcctagcgggagctcttggctcagtcacccgcgcgcggccctcttccctgtcttcccaccgcctgggaaggacacacccttagctgggcggcatcaagcctggtgcccgcccactggccacgcccagcgcacggctgtgtccgcccgctcctctgctgtgcgctcatcagaaacggctgtcgggcatcttttgaacagaaacgcagtaggaccctggtttctggtcctgatgccctccgctgccctaggggtggtgctcgctgccctgcctgcagccagggtgggagggacctctcagcccacctgggacgggtggaatgagggctgagggcgggtgcctgggtagctccgggagcacgctgggtgagggggggcacttgagtggccgagtaaagttccttccatgggcttctccgcatgttgactgagaaggcacattcggctgtctcttgataccaggaacgcgtggtgcctctggagctgctgggttgtgtaaaagctgagtgtgtgtgtgtgtgtgtgcatgcactgctggaaagtgtgggctggagggtgtgagcatgtgtgtttgtgcctatttgggtgcacctctgagtgcacctgtgagcacacgtgtgtctgtgtcagtgtgtacacacattggggtggctgcgtcagatttattgtcctggtagctgactggccgaggtcagggggacaagcccggtgtccctgctcccgaggctgccccagcatcctgggtggggggcatgccaggcggtgacttatctttaggcccctcaccctccgaggagggctgagccgctccagccaccagggggccaggctcatcttccaggagggtctctgcgttgcctgggaaacagcccttgcctcaggcctctcccatcctgcagtgtggccgcaggggtcacagagggtcattgactgtcttctgggtcatcgtggctggggtggctgagtcccgctggctaagagggggctccgtcagcagcgggagaggctgaggggagcagcctcgaggccctcacagtgccctggggggatgccgagagggtggtatgccactggggagggggcggcaaggcgcaggcacagggaggggaggtggggccttcccgctgtcggtcaggagccgggggg

SEQ ID NO: 25621 - DNA, 937 bp, Bovine  19866881742068
  misc_feature (1)..(1): n is a, c, g, or t
ncattcctgtttcatctactctttaggacggtaaccaagagcctatttgaagggactgtcctttttcatctcttagatatcttggtttgctagttgaaaaatcccgttcctgggttgagttttcagtgaatacgctcattcaccttcatgtcgcttagcatgttttccagcctctgtacttgggtttcacatactaatcgcttggttaccaaggtgtcctgtagcaggttgatgcctttcttgttcttgtactgtggattgtggaagtttcggtttttacgtcaagttaagctcggtgtgtagctgggggtgagccggctaagcacggcgttggcggtcggagccctgccatcttttgtaccgttgctctgcctctgcgctgacattgtcacaggcagagtttgttttctgggctgtacttcggatgctaatttactaatttatgatttggctccattttagtagcaacttgggttggattgactttatgcacaatggcagtgatttgagtgtccattagggtgcatagccagacgatgatgtaatccgatccggggccaacgttttacttagagtactttacattcatgattttgcttttgaaaggtggtagtatggatttaccttgggtgtttatactttaaaaagtagtctttttgtattcttggtacagatatttttgattactggtttcaaagcctgtatttttgccacagcttgtattaaattggtatttctgaaattagttgatagttaacatatatgtgtgtgtgcatatatgtataatacatatacacagttattatatatataatatatactatatatagatagatagatagatagatgcctctgaagttatcaaaggatgttacttatttaaggttgtttctctcaattacgagtgtttgtatgctcatttttgatgatttttgtg

SEQ ID NO: 25622 - DNA, 1412 bp, Bovine  19866880458573
  misc_feature (1)..(1): n is a, c, g, or t
ncccccttccccacagccttaaactgcctgaggctggtgtgcgccgaacctaacagacagtttctaccaccctcaatttaccggtgaggaaacaggtgctcagaagtcttattttagatctaatttgctgactcccagtcttgggctcagagaagaagactgtctgggaggaaattggaacagtaagtgtttatagttaagactggggttgggagcaaaacaagcaagcctggagaaaagagaaatctgcagtggaggtgtgacatccctccactcaaggatccaaaaggctgtcccccgccacgagcaggcagctgggcaggagatggacagagctcattcccttctccctaggcccagcataccccagcactgcgggctcctctctaagaggcagaagggagaaggatgagggatcccacatccctgagaagcccggaagcttctgggcccagtgtcagggtcaccctgtctgtctcctgtgctcctgggttaccccgagtctctggcactagtcagggttgctggcattggcctcagtctctgtgcagatggtcagcctggacctgtctctctgtggtcctcagtcccacttctttgtgggtcattgtctccatctctggctcagatcagcctgttgttgtgtctgtcctgtgaatgcagggtcaacctatttatgtgtctgttcttccattactgtcaatcaatctacttgtctgtcagtcagtgtcaccctgggaccttggggtcagtccttggactacagggtcacctagtctttcagataccatgtccatctacagtcagcctatctgtctttctgtcccttggatgtcaggatagtctgtctgtccccttggataccaggtctgctcttctgtctgtctttctggctgtttcgtggctactgcctgtttgtctgtctgtctttcggtctcgccatggcttggtccatctgctggtctgttgctcagctcgtggctcgcgtgactgccagttttccggccgccctcccctgcctgctccccctctcccgactccagggctctctctgtctgtctgcgtctctcacatcctcagcgcctccatctgtcgatctcggcgtttccgagtgtgtgttctcgtccctctccacgccccctcacagctctgggccaaaaaacacagcagcttccagcggctcccccgctcctgctccatccaggaacagccctgcaccacagccagctctctggtcttcagtgtgggtccggcttgcaggctctggagggcgaccaggcaaggctgatgggaaggaacaggaacgctggaccaactgagctcactgccgctctggcagtctgtatggggatagtgtgcaggcattagtaacaataatagctcacacttattgagcaccaactgtagacagg

SEQ ID NO: 25623 - DNA, 1450 bp, Bovine  19866880535675
  misc_feature (1)..(1): n is a, c, g, or t
nttctaaataaggaatcccttattaaacaaaaaggacaatttatcagttggttaataggacgaggggaatttgttatcagccagtaacctatctttgcttggaaaaaatcaataccaaagaatttaaacaagaatatttctttactaaagtcaaatgtcttttgtgtgcactcccaggatgaaattatctgaggaagcaacatataggaacagtacaaaatctctctggcctaagtgacttcaattttggttctggtctcttgacaagcagaatgtgagctgaccttctggaagaagaaagggccagtttttcacagatctacttccagcgttctataccagaagccagcaagttctgacccactttccgggtacagcttatccacatacccttatccacacaaacacttcatcctaaagagctgtgtggccctgtaggggcatgtgaaggggagggggccaggcggcactggcatagtgcttttcacaattgaccacctccatcataatcactagagtgcttataaaagtgtagattgctaggcatctcctaggccaacagaattagaatctttggaaactgcatttttgacaagcttccccacacaccacaagtctttcgcacaggaaagtctgacaaccagtgggataaaagatccctaggagagaggcagggaactggaattgagagaagacgagatacgattagagaaggatatgggaattgacagtgggggctgggggtgggggataggggtaaaggcatgcttccgggtatcggcagtcaagacaggtgcgcagtggggacaagtgaggtgaggacagggctctagaaaggatatgacacagggttcgggctggaagaggtgaggatgcatccgcggactggtcaagatagtggggaggcggggaggcggagaaagcagggtacagacgtgagagggaggagcaaaactgggagtaacgggggctctttgaaggggtgaggactgcaaagtgaaaattgggaaatgggggtcacaggaggcaaacaccaagaatggaataggaaccacctagggtagtagctgagatctttcctctgacccagagcctcccccaaaacttcgggccttgacaagcctgagtgcggggcaaaggctggagacggggagtttgggggagacaagcccaataagggatgtccctcaggcctaagctaggggtccctgaagtggatcgagccaagcatgggacgccaggaagtcctgggattccccagagcggcccgctccatctccggctcccggagtctccttcactcaccatcgccgccgccatcttggatccacgtgtcgccgtaatgacgtcagcggaagtagggtttccttggttacggagtttaccaccgcgaggtgctgccctgtttcagtcgctcttgtggtcgcggtgagtggaggtgcaaagaaga

SEQ ID NO: 25624 - DNA, 1435 bp, Bovine  19866880680514
  misc_feature (1)..(1): n is a, c, g, or t
nagtttctaatggggcagcagaggccattatctgattctggtaacagatcagtctggctattttgtcaagaaaacatcagacatgcaaggaactgtctggggtgatggaaggcactatgcaagcaagcagcaatggtggctgcattccagggtgtggggagggtggaaacaagtacacgattcaggagcaccaaggaggtgaaatctagggggcttggtgctgattgatacaaaggatgagtgaggacaggtgcatatcagaaagactctgaggcttctacaaccaagttctagctcaagtccccgggctccttcctctaccacatgccctaccgcccacttgtcttcagtgaagtcaacaggggactcacttgaggaaaggaagaacatacagagagaggaacagggctgcagatcaagtaagacaggtatcacttctcgatatttagaaattagatttaaaccaagaaggaggacacagtggtctagaacagctcatttctaatagagaagtattccttttaacttataaagctgggagcagtcagcaagccacactaaatgaaccgcaggctaagtggccgctcaaagagagaatgacactgtcctctagcacatccgctacagatgtcccctcacaaaccccccaccatatgaatctttatcagtgcaccaatctgagaatcaggagcacagccctcagacagcccaaatgaacctttctggaaaaggcagtctggacaacagaaaagtgaaagtcaaagtgttacttgctcagtcttgtccaactctttgtgaccccatggactgtagcccacaagtctcctctgtccctggaattctccaagcaagaatactggaatgagttgccatgccctcctccaggggaacttcccaacccagggatagaacccaggtctcctacattgcaggcggattctttaccaggtgagccgccaacagaaataactgttttagagttaaaaaacttgggttaatggaccttccgggtggtccagtggctaagaccctgtgctccccatgcagggggcccaagggctatccctgctcagggaattagatcccagatgctgcaattcaagatcctgcatgctgcaagtaagacctggcacagccaaataagtaaaaataaatactaaaaaaagaaacaaaacaagcctgggttaaaatctacacctcctgaccatgagcaactttttcacatctctgaagctgctgtgccctctactctggcatggaggccagcggtacctggctgtgcagtcacagggggaaccgagtgagacagtacagactgtgctgcttgaggctctggaccctgcaaccacagttcttgggctctgccaccaactcggtgagtaacctgaggcaagtgacttcacctcctgtggctcacttcccttgtccatgacaa

SEQ ID NO: 25625 - DNA, 1234 bp, Bovine  19866880701685
  misc_feature (1)..(1): n is a, c, g, or t
natattaatgctattccatggggccccttcagagcactggcccctcttggtcaagaccctgcaggacagggttccatctttgcatccaatcatgcctggcagcaggctgagcccatgactggctgctgatccaggcttgttgactgactaaccaaccaaccatcctgtagaagggcagggagcagagacgcacatctcacctcctatcaagtagggattttcgatgtaacgctgagctacatagttctccacgggaatttcatctttctggtcatcagaacttcttgtgtcctagttgtaacaataattgttattaacattttggggggggagcatttcctgtgtaagaggcactgggttaggcactctactttgggtatatgatctgatcctcagatcaaccctgtcaggaaagtactaatgttatcaccattttatagatgagaaactgaagcacagagagggggagtgacttgcccaaggtcacacagctgatgggtggtacagctgggaagtcgtctcacacaggctgggcccagagcctgggcatttaacatccaaatctatgctgtccaataaggcagctaccagtcacatgtggctatgtacatttatattttaaattgattaaaaggaaatgatattacatgtgacagtaaggatgaaattcagaggcatcatgctaagtgaaataagccagacctaaacggacaaatcttgtctgattccacttccacgaggtgagagtagtgaaattctgagacagaaggtaggaaggcggctgtcaggggttgggggcagcggggcaggagttagtgtttaatgggtacaaggttcagctggggaagatgaaaaagttccagaaatggaacacagtttgcacaaaactatgaatgtacttaatgccattgaattgcacacttgaataaggctaaactgaaaatttttatgtatattttatcatagtcaaagaggaaataaattaaaagtccagcctttcaagttgccctagcctcatttccattgtctggatattaacatgtcactaatggtcaggacattagagagcacgagcgtgtgccattccccccactggagaaagtcccattgatggtgctgctggagtatcacccgggcctccaaggacattcctctcccttctcttcctgcggattctttgcagccagcccaattcaggccttttcacctcaccatctgcaaagccctttcccac

SEQ ID NO: 25626 - DNA, 2231 bp, Bovine  19866880710807
  misc_feature (1)..(1): n is a, c, g, or t
ntcctttcttacatgcattgtctcgtttagtcctcacagcagcctggtaactgagtactgttatgaatcccattttccagaagaggaaagtagaggcacagaaaaagtcaaataacttacccaagcctgctgaccccgcgtctactgctcttcagccactccttgttcatctgtttttcaggtgggcagcacctcccccgatgtcttgtcaaaggcctttctttcccttttgtacctgggtgactaacttcaaatgctgatgaaggaaaagggacttcatagaatgactgaagaaatcagggggaaaacccttggtgtttgaatataattctggatgtcaattacttgactggcaggcatcagacagataacctgattggtgagataggctacctgtccctcttcttagctttaactcaggcctgaaacatgaagcaggtaggcactgtgagcttgtattctgaatcattcaggcctgaactgcttctagattctggtgataacatctgtaccaatgaggagaagctggctaaagtcctatgccaccagctgactaattgcaaaagattccctttgttgagcctcagctctccctgtctgctgggtgggattttcttttctatatccccttatctccgcaatcttagaaagagttcttgatcaaagcctgtaccatcacaggaaattctgatgtgaaaaggcagcgggatctgggtggagacatgaattataagcacaattctgccatttgctgtgttacccaaggcaagtaactcagcatctctggccctcagtatctgtataggcaaaatggacatgggggtggtcttccaaggctcttccagcgctgcctgaaagacagctttgagttgggtaatcttttccttttccttggtgacttgatgcagtgctttctcccaggccttccagggtggggctttgagagctctgtcttggcagtcagagatccttactgtcagctcatcttatcagcacagacatctgcattgctgcttggggatgttcttgtttaaggctcagttagtccttggtgacacactgtgtctcctcactttgttacactgatagcagacggagagcgcttcacacacaggcacgtctatctttagcatgctggtttatttaaatcatagtttgcattagagagcatcagtgataattgtggtaggtgtggttttatttttataatttttggcaagatatttgcagcagttgcattttgtcatattcgaacatagtgtagaaatggaagtgggtccaagtgaaatagaagtcgtaatagattcttgggagctgagactggacatgctgttacccaccctggggtccttcatccccttcagcactggtttctggaaggacttgctttgaggctttcatgtgtgatataaattaaacagaggctaaagctcatagtactgtctccagcagcataggggactgcagtaatcattacttgagaacacatttaataacctaagcaaaaaagtctagctagtaaatcataaaagattccatccagataagctaaaacgtcagcttgagttacttaagataaccgcaagaagatagttcttggtggaaatagttacgggttttgcaagatctgcaatagcaggttagattctagcccaagaaatacatggtgtttttccctccttatttcttcaattgtcagcattttttttttaatatttttccccctgactataaaaataatgtccactgaggaaaaatgaggaaaatcctaaaaagattaactaagattcacccagaaataactacctgttaaatcatcttactgtccaaaggaaaatgcattcctaaatgtgttttatctcatggatatgcagttctcacctgtttccctaatcattgtcgtttaggctggtttcaaaacttaatgctatgagtaatgctacagtgaacgtcttaaagattatctttgcataagtttgtatttacgtttctgatgatgtttttaaaattaaaacaatattttggttgcagtgggttttctttgctgttgacaagctttctctagttgctgagagtggaggctcctctctagtcgtggtgctcaggcttctcatggtggtggcgtctcttgttgcagagcacaggctctaggcaacgggcttccatagttgctccatgtcacatggaatcttcctggagcagggatcgaacccatgtcctctgcattggca

SEQ ID NO: 25627 - DNA, 1128 bp, Bovine  19866880721435
  misc_feature (1)..(1): n is a, c, g, or t
nacaaaggacagagggagaaaaactagatttcctaaagagttcctaaggtaactctaaagccaaagccccagtacgtgcagatcagggcaagcacatggctgctgcctgccttctttgcttctatcaatgcaacctcgtgagctcttcttagccaccaccagcctctttcctagaagcccattactcactctttcagtagcagcatactacactgctgtgtcttgtttgtgcttgttcaggagaacagatgaggtggatgtgtgggaggtggggggacgtactgttctctttctgagtttgtgcggaatttccagggctaggcttccctctcacgtcggccaagtgatgcgacttgcttccttccctctggctgccattcccagctttccagaggtggaggtgcgtgatttcacgtggggggtgggggggcagaatttgactttgaaggtgggggaagttccttccaaactagattttcaaattcatgctcgctctctacccaattccaagctgcctagtaatcactgatattataaacaggtaattccaccctttggaagaagggaggacttaaacaataaaagccagacatcagaggcctttgaggtttattgtgaagtaggcaaatacgccatgattcgaaggctcaagtgggactagtttttagtgttagcacgtgagtcatgcaaaatgtagccacctttgtgcagatctttctaggcacatctccactcgtgatggggaaattgtttatcatattacattgcagtgtttcttcaataagaggaatggttcctgaacaggacatagctcatgttaatgatgagcaaagctctctcgggcatgaacccgctgatcccatcatctcgttcacggccagcctgttggttgaatggtcactgtaagcagcaggtgctaatgagctgagcaagcattctttggcccacagctagtttgtgcagttggagccctccccagattctcgtggacaatccccacatagccgctttgctcccttcacatggaaaagcctcatgaccaaattttggcatgagctcttcaaaggaaattcccctgttgtagcaagttacattgaggttggtaacctgtttgtgtgatgagcttgt

SEQ ID NO: 25628 - DNA, 1881 bp, Bovine  19866880812016
  misc_feature (1)..(1): n is a, c, g, or t
natttcttctctgccctcattttccatttggagccagagctagtgagccccgaattctttaagcctcaagtttccaccactgtaaaatggggataacattctgtaccacacagatagatagatatatatatgagaagatatatatgagcccaggacaggataaagaccacaaatggtcacaggtattgtggctgctcatcatgagggagccaagtcacagactttggggctggagggtcagccacccagtgccgcccagccccaaccctgctgggcatctctcctgattacatccctcctctctctctctcccactccctgctcccctttcctctgccttcctgggaaaccccctgagaaagtccccagcagtagagagcctcatgtgggacatttatttcccggggtcccctgcccctgccattcaaccccacaaccacacccactctacatggaaccaggcgtcctggtattcagctgccaaccatccagcagactgaccctcatcatcacactggctttattggccctgagagccacagagtaaatccccagggggccctgcttcccctcacccccaagtctgtccagaggccctagggctggctgagtgttcaccgctgcaatcttggcttcctgtcccagctgtcgtgagcttgccaggcccgcatcctttgagagctccccagatcccagagtcaggctcaaccctggagggcgtagttggcaggggctatgcagggacggcctgaggccggctggccttcactcaaagaagaacattcctggcgtccggtacaggcagggggtcagccccagtgggtagctggagcttccctggacagggaagctgcctgcaacccagggttccttggggtcagctggcaggggcagcggggcccggagggaggctggaggggtggatggtgcaggggagggggctgctgaggccaagaggtgctccagtcctgggtcagtccccatgcagaaattcagcgcctgcagccggcactggtagctgctcccgatggtggcctcgggggtcaagatgggtgcaggggccttgctaaacccctcagcctcagagaagctggtgggaaagccaaaagcagggcacgaggaagacgaggtggccacagggagctcccctgggcctgcagccttgggagtgggcatctccttggcctctgagggtgtctgaggcctggcatcggtggtggccgggcacatgctggctggcaaggcccccaccagacccccatagcttaggcccttgggttccagtggctccggcgggaatgggcactgtctgctagctgcgacgtcaggggctcctgggtcctggctggtggctcggaggggtccacggcgcgctttggtggggcccttggtgccctcagcacctgcccgtcgggtgaagcgccggcggcggcgcagaaagctgccatgctcaaacatgtcatggcagtcggggtccagcgtccagtagctgcccttgcccggcttgcggtcatcgcggggcaccttgacaaagcattcgttgagtgacaggttgtggcggatactgttctgccatcccggccggttgtggcggtagaaggcgaagcggcccatgatgtagcggtagatgccgctgagtgtggcccgctgccctggagagttctggatggccatggcgatcagggcgatgtagctgtaaggaggcttggttggctcggccgcaggggccaggggcccgggtgggggtggctgctgcatgctggccgggctggccgggctggccgggctgccggaaccgctgaggccaggcacggtgtccagggctggtgtccggcacagcctgcccaggcggttaaaaggcccacggcccagcctcccagc

SEQ ID NO: 25629 - DNA, 2676 bp, Bovine  19866880817318
  misc_feature (1)..(1): n is a, c, g, or t
nagaaagggagacatccgtgctcgaaagtttaagcaacttgaaatgggaatgtcagaatctgaacacaagtctcttgcgttgacacaagagcttggctgacacaagagctctttccataatgctatactgttactaataattaatagttattaatattttaattatatacgactcttgaatctgcctgcaatgcaggagactggggtttggttcctgggtcagaaagatgccctggagaaggaaatggcctgtccatggaattttccaggcaagaataatggagtgggttgccatttcctgctccaggggatcttcctgtcacagggttcaaacccacatctcttgcatttcctacattggccggtagattctttatccctgcgttgcctgggaagcccagctccaaaacttctctgttccagtttgccacatttcctgcttatctggtagaataaatactgtctacaccttgagaaatcttttgccctgaagtctttgctcctccacaggtccttacatctctatcttgtagctctttggttagatcatcatgcctaaatggggcttcactggtggctcagatggtaaagaatatgcctgcaattcaggagaccctttgatccccaggtcaggaagatcccctggagaagggaatagctacccactccagtattcttgcctggagaatcccatggacagaggaacctagtgggttacagggatcacaaagactgggacacgatttagcaactaacactttcacacttggtgcttaaatagagattatgcatttgaccataatgcaggtgtttacttttacaatgaagtatttaaacaagaatgttgagaagtctgaatttatctgctaatctgatcactgagttcagaagccttgggctctcccctggcggacgaaaaccaaggcgccaggcttcaacacggtgtagcacagagtgccgtgggcctttccttccacgctgctgcccacacctctcccagggttttcatcgcaaaagcctgagcatcgggactggcccaaagtggcattcagttaatgccagctgaagggagggataaagaacactctgccatgagagacatttcaaccaggcaactcgaaaggggccttggaggctgagcgaaatttaattgagcagagatgagggtaggcttggatgaaggcaacatgcttgcagtcacctggagaaccacctctatacagcgctgtccacggtttcaaagtgctttcctataataatgacaacggcttccgtggacagaaggcttgcctcatgcccggcgccaggtgcgttacatctctgctttcttattcatgtatttttaatgtattatgattactattgtctgtatgattaatatttacttgctgtctctctctactagctccacacaaggtctagggaagcatgcttttttcccctgttgtgttcaaaacagtgcttagtactgaacaggttactgaatcctccacagagacccacgaggtaagatctttcgcccccattttacagatgggcaacctgaggctcagaggggacaagtgacttttccaaaagtagagatccatcccacatgaggacaagactaaaaataaatctatggtctctctccattaccactgcaactgcctggactcagaaatgtccagttggcctcaatgttgggagctgccacctgcctgctcctcacttaataatgataacagcctcgcaacactgacccctccctgagcgcttgctgctacacaccaggcgctcttcccagtgcttcgcgtggtttgactccgagcaacttaggaagtacttgctatgatgcctttatggcagttgaggaatctgaagccccagggaggttaaaaacctttgcaataatcatacaacctgtcagtgggtgggttcagaattcagaatccagcagtctgggcccagcgcccatgcttttcacccctggccacgatgcctcagcaagatggcgagcagtgggggagagctgggacttccagagcacttatgaaggccaaggccactctgcctggtaactattaggcatgctgtcctgtttctcttcatgctgtcttttcaacctcacaatcaccctgtgaagttacagaggaggaaactggagctctgagcaccggacagatgagacagagtcaattagtggttgcctacggcttgtgtggtggggaggaaacggggagtggcagttaatgggtattttgggggtgatgaaaatgttttaaaattgataggggttgatgattacacaactgtgaatatactaaaaaccaatgaattatatgcactttaatgggtaaaatgcacggtagggggattatatcttaatatcgccttttattttaaagtgggggagcatggaaggaagtggcaggggtggaatttccaccggcttcagatcaaaaactttggaaaactttggaaccgctgttgcctcttctttgtctctcacttctcacatacaattatcagcaatcagcatgtatcctaaggcgtgttcccacttctccccactggctcccactgcctggtccaagccaccccctcttctccaaaccaccgcaccccttctacgcagtctctttcctctccccttgctctcgctcctctgttctccacagagcagccagagggatc

SEQ ID NO: 25630 - DNA, 1491 bp, Bovine  19866880873271
  misc_feature (1)..(1): n is a, c, g, or t
ncaggctgttcgatctccgggcaccagctctccacgtgcacacgcactgcaagccagcagctcctcacacataaatacagacacgcttaacaaaaatagtatatcatcttcacaaggaataaaaactagtttcaaatatgtacagcagagagcccggggtggccaggactaggcctggacccccccaaggatgagacaggccgtgggtggagcagaggagagagagggaggtcagaagagctcctggccaggccatcctgaccttggcagcccggctgctcaggctgaatgggggtggggtaccaattgttcaggccaggcagggctggcccctccggccaatcccagctccaccccacgcacaaggctctccttcctgcccttcctgcctgaggtaggaagaccctagggctcccacagctgctccctgtagctccccctcacctctggaccatggcccctgaaccccatgggcagcagcccaaggcaaagacgccacaggctcatcttcttgcaggaagtgaggcagctgaggccatgaacggctctgcggcacctatctcaagcccagttggtccctcagtcatggtcatggagccagggaaggggaagaactggggtggtgctaaactgcaaggccaccccagctttggcatggggtgcttcctacagctacagtccctccatctcgggtgaggccggcctctagccagagacctccagaggacactgggattggggggagggactttggccaggtcagagagggggaagggggtcctggtccttatttctttatcccaagcatcctgaatccctaattagtcagaagtgggtcctaagtggctcttggagggtggggatgaatggacggggggcccagggccgggaggagggaggagacaggaaatgatcaattctgaggccacagacatcaaaatgaaggcaatctattgtctctctttctggggaaaagggtcagaaaactttccagctccctggcaagaaagcatgctcagggaccctaaatgcggaaggggacccaccaatcgggtggggcactccggcccccagtcacaacccccgacacctgttagcttccaccggggcaggttctagggaattttgtgggttttgatgccacgacaattgaggaaggtggctctcacagaaacatgtaaattctagaaaactaattgcgggggatcaggtctaggcccaaccctgtgatgtgtgggtggctgtgggctccatggagtggttctcctggtggcaatggtggctggacggagagatgtggtggaggcaggacgggggtgtgtgggtgagttggtggtcagtgtctggtcatttccgactgaagagcgagcccagcagaaccacaccagccacagtcatgcccgtcaggaaccagcggttgaagcgctcctggcccttccggctactcggctgctgcattgttcccgtagagttccacaaaagtgtcctgcc

SEQ ID NO: 25631 - DNA, 1762 bp, Bovine  19866880967701
  misc_feature (1)..(1): n is a, c, g, or t
ntattgctaacctgggtaagagagtttttaaaaaaataactagattttaaaacattttgaaaaagtaaaacatacacagtaaataatgcaaacagtaaaaatgggtacaacgatgaaaaacaaatcttcctccttcttcagctccctgaagacaactgctagcaccaggtccttgaaaatccctctggagatactctatgcacgtacaaagggaagcattcagaagcatgggcctgccttgatacaacaacaacaacaaacagacttttattctttctttctgtgacagaaagcctactgactgtggctacttaccagcatccaacctcctctccatcaagtggaggacttcctccacttgaacagtcatcaggagattccggctctctctctttgctaggtctcacggggcagtccttagattgggcgtgcttttgtgtgagagaaataaatcctgtcctttcttttcctctaattcctctctgaacctgaattccagttaataaaatgcaagaaagacaaatcctgtactactggcatataaactgtcatccaaaagtcaattaaaaataataagctaactctatattttcaaaaatgatgcagaaaacaggtaatccagataccatcaacaaaccacagaacaatttatcttagaggaaggatcaacaggtgaaacatggcaaaggatgatttccataatatgcaagattcttagtatttgtgcaaccaaaagcaattcagaaatttggtttagaattaatgaccataccaagatgatactgtcagttttagctattaaaatgccactgctttgatattctcatatggctggagggattataaactgaaacattttttggggggtaatctgatactctgtaacaaaagccccccagaattgcacactctttgaccctgctcggacaggaaactcgaacaaacttcttggacaacccagtacttctaggtatgttcagaaaaatgtgccaaaatgccaaatgtacataaaagaatgttcaccacgggattatttaaactagtgaaatagttcataacttacaacagtaaaatatccaatattagtggaatgggtcaaattatggggtatccttttatgtagtcattaaataggatgatgtattttttcagtaggaatatctgagctttagatttaagtagaaaaattagggaatagaaccctgctcagcaagatctgctcctcttttttaagttatgtttgagaaaatgaggcaatgttttccttttttgtatatctgtaattgggcttccctgatggctcagatggtaaagtttgcctgcaacgcggaacgcctaagtttgatccctgggttgggaagaagatgccctgcaggagggcatggcaacccattccagtatttttgacaggagaatccccatggacagaggagcctggcaagctacagtccatggggtagcaaatagttggacacaactgagcaactaagcacaacagatctgtattttccagtttttcttaggggcttatacaaatttataccaattaagaaaaataatgaaataaattaggcaaaagaaaacatcactgttccgaacgcctgggttagagccaattctagcttggtatggaaggaactccacctgctggctccaagatgtttttccatcagcaactcccactgtttctttctaagccttcaggaagaccctaagggtgtccctgtgagcagacttgcccaagtgaggctgccttcaaggg

SEQ ID NO: 25632 - DNA, 814 bp, Bovine  19866881011640
  misc_feature (1)..(1): n is a, c, g, or t
ntttacttatcccctatattaggactgtcccgatactttcactttaaagatactaataaaagaatatccatgaagctaagtttctgtatatatatacttaattcttccctgaagacaaattcttaaagacagaatcactggctattgacacatactgtgaaaacgttcctcaggagagtaatattcccttgcgttacagagaggtgtgccagttctcttccaggtactaatagccctcagtattcattttctctatattataccactatacttatgctctgagataaattatgagattaggtccacccaacaatggcaccccactccagtactcttgcctgggaaatcccatggacggagaagcctggtaggctgcagtccatggggtcgctaggagttgggcacgactgagcaacttcactttcacttttcactttcatgcaaggaaatggcaacccactccagtgttcttgcctggagaatcccagggacaggggagcctggcgggctgccttccatggggtcacacagagtcggacacgactgaaatgacttagcagtagcagcaacctcattgttgctcggtggtttggccagtggacttgggtaatttctctcagtggacttgggtaattcagaaggaatttgttctatttggtttacatggtgaaatcaatctacgcaccaaagaacatcatcttcccatggtctcccctatgaactcaatgaagctatacctccacaggtatctttataacaatgctccaattgaagtacttagtgtagaaatatcacatttggagtgggaggagtt

SEQ ID NO: 25633 - DNA, 725 bp, Bovine  19866881035056
  misc_feature (1)..(1): n is a, c, g, or t
ngatgttaaactcacaactcgaggtacaagataaggcaggaagcagggagatgagacagctctggagacgtctacttgctgggaacatgttgggagagaggctggaggctggcacggctgtttcttctttaacctgctgtcacaggtgtgtccagtggagccctgtggccccaggagagtgtgatcctgggttactgctgacagatggtatgcctggggctgggagtggaaggaaggcccacctgggggctgcccagggcactcacgctagaatccagaagcacttaacactggtggtagtgattcatcacacacgcagcgagctgccagtgaaggctggagaagagatgaggagcaagacacgtttgcccaccaacgagtggccagggtgccagtggctctgcagctgcagcagtgacctggctgcagcactggctgactggtgaccaaacactgggataactggcaggtcgttaggtcaatcgctccacccctcacgttgggcagcacagcacgcagtggctgacatgggtggagagaagtcaattacaccactttaatgcaacaatgctgaagacgtgaaataagggagagtcgttcgtgttctctgtacaatacatccatttacagaatcagccagtactgtgtacaacatataaatatatggtaaaacatcagaggtgcatacagcatacttacagaagccaaaagttcactttatacat

SEQ ID NO: 25634 - DNA, 4056 bp, Bovine  19866881045556
  misc_feature (1)..(1): n is a, c, g, or t
ncatgtgccgcaatgaagacccagttcagcctaaactaaagacttgaaaaaaaaaaactcaaaactttctaaaaaaataaaaaaccataaaactctcctcctcctttcctccccaacaattccaaaagaattagggaaaggctaaagaaaaaatacacataggaaatatgggagaactctgaccctctcctggtgcctaagaaataaaggacccttccactaatcttgtcacctattgaaacttaattgcagctacaggataaggtaactttattaaggtcagaatgcacagacttaagcataaggctggccaaaataactgttttatttaaatgacttgaaggtttaaacaaatttatcaacctaattcaatatactcagtttttcatacctgaaattttgtagtcaatttaagataacaccttcttgcctttccaattcaacagatattgaattggtggtttccatgcaccaagactgccctggttcctaactgaactctatcaagagcagtttgtgtccctcctgctccccaaagctacctttgcctgttttaagcctcaacaatctcccttacctctaaactgccaggtgcttacaatacaaaaactagaatatgcagatgctatcttgtcttgttctaattgtcacttgtcaacttgaatcagacttttgtcctcaagcataccagaaaccctttgactgtacacacacagtatcttacaccaatctgagcacagagtataacctcaaagatcaattagctaagtgagctaggagtcacaataatttttatcccaagactgacaacctaatactgaattgacacgcccacagtacaaaaccaaaacaaccaaccaaagggactcaagtctgatttaggggtggcttgacagggggggtgtgatacactgaggctgcaacacaaaaatatccttagtattgcagcaaatagttcgaattttgacatctcatgagacaatttcaaagacaggccatagattatcaagacaaggtaaggctgaatcagggcaaactccaagtgatgatcttaaagcaaaatctgtagagcactcagatgctatcttgtcctaagcaggactgattggaagttcttggtacctaagtactagaaaattgtgagaaaaagaaaccactaatgaagaaaaccggggaaggaaatggcaacccactccagtattcttgcctggagaatcccgtggacaaaggagcctggtgggctgccgtctacggggtctcacagagccggacacgacgaagcgacttagcagcagcagcagcagcaatgaagaaaacagggagaaaaacgatcctacaatattataatctggttcactttttctttccactccaatctgttaagtgttttaggacaggaaatcagaaaggcaataataccccgtgatgcacacaaagggggagaactgataaaaccgaatgaattttaaatcccccaacaggaagttaactccaagtctaattacacgccttcaattatgttctcacttcctttacctttctattttacaaaatagttatgagatgcagttgtttcgtggccacaccttgttttcctccaccaaacgccacacgtcttgagggcgggctactgtatcacccatttctagaaatttatctagattacgggcctcatttcccctcctataaaagagtgctaagactagcaccgacttcactggcttgggaagaaaattaaatgaaaaaaacacacagtgctgagtccagtaaactctaattgcctgtgtgctgggtaataacataattgtcattacccttagcccacagcctcgccctaattcctccatttcccacgctggcctccgcctctacctgctaacacagcctgctagacccgctccgccgaacttcacggagaaatcctgtcgcgaagggaaaggaggccggaagctccgctcctgcaccgcgggtcagggcggctgcaccgcgggtcagggcggcacccccgcagtacacgtcccaggagctgcgccctccacgcggagacctccagtcgcttgaaattagggtgaagaccgccgggcgccccaactgctcctcttccctcctcactgctcacctcagcccagcgctgtcaaccgaccgccgcgaaaacccgccgcgggactcattcagtaccgttgaaaaatttgaacgcagactctgcacaaacgcaccaatcagcgtgccggggaaccggcaatcccagccttccgattggccccttagatcctggcgacgccggaagtcagggtgagggacaagcaaacaaccggccccgaaggcttctgggaaatgtagtgtaactgcgagagccggttgcaacaactcgacgaacgaagttactacaaagcccagaatgctccgctacaaactatttgggataggaggttaaaaatccccctgcagatgcgggagacagaaaagacacgggttcgatctctgggttggaaagatcctcttgaagaggcttccctggtggctcaaacggtaaaacgtctgcccgcaatgcgggaaacccgggtttgattcctgggtcgggaacatcccccggataaggaaatggcaatccactccagcactcttgcttggaaaaatcccatagatggaggagcctgataggctacagtaagagtcggacacgtcctttcctttctttttttttttttcttcctttttttttttttttttcctttcctttcttgaagagagcttgacaacccactccagtagtcttgctggagaatcccatggacagaggagcctggagggctaacgtccataggtcgcaaagagtaggacacgactgaagcgacttagcacgctccctgcaatgcggcatagactggcccttagattctttgccaactgtggagtctctcaaacttttcatccaagtccacgcccggatgttagtgcctgaagccacggtttttagaggattgttcttttctcctttaattccaacatccttggttgtattaccctcgtattgtagaagagaaaacaaaggcttagagaagttgagtaaacttgtttgaaatcacatttttttttaagtggagaagatgggatttgcattaagaacatctagtcctatttatcatcaataatcacttaggaggtaatagcagcaacaagaacaaaaagatgaaccttcaccccacacacacccccctcggaattttgttttagtctgtggcactttcaagtgcccaggcaattctcatatgcagccgggattgagaagcattactccaaaccagtagttctcaaagaactagatgatcagtatagttggaaacttgttagaaatgtaaattttaggtcccacgtgagacttattgaatcagaaactctgagagtgggcacagcaatctgtgttttctatcagcccctcaggtgatactgatgcccactgagttttgagacccctgctctaaaccaagtgacactaacaaaatctcaggcctcgggacctatttgtgttgacaagaagggtttgagccggatggtcttggctctagattctcccaggaccctattccacccagcattctgtgaggctgagatgcctgctgcagattctggcgccacgttacccgagtggcccaggaatcctaggtgcagagggatggtccactctgttgcagcgtgttacttctccttcaagtcgtctgcgccctcctgaatattctccgtctgcaacaacagcccggtgcgttttccaggagcccctcgcccacctagaacgaccacacaccaaaggacaatatcactgcaacaccttccgacttcacactgcgcctcacactgagcacagaggctctgggggcgccaagaacaccttttctcatggcaaatattattagaattcagatgtccctctctaagaaaaaagggaggagatggtcactaaagcataaaatctggatatattttaacggcttttagggctggacttttggagcaaaaagatttactcatggcagaccatagcctctgtcacaaccatga

SEQ ID NO: 25635 - DNA, 1486 bp, Bovine  19866881155654
  misc_feature (1)..(1): n is a, c, g, or t
ncgccagctgaaaaggttcctgaactagagaaccagaacaggccctctgagtacagaaacagagaaaatattggtgcacaagcataacttgcggaaccctagccccacagacccagcaagtgtacagagatgcgtggcaacagaaaggcggagctcaaaggaggcccaagggggagaaaggtgaagcatgccacatacaaaaagtcctcaagttttcagggttgtaaggacccctataaatcatctacttagaagaaaagcaagacccatacagatagtggcttgctcaaaactacatagtgaccgtgagacagatttaggagaagaatcccactttactagaaacgcagctcagttcttaaaggaatcaaatgtcttctatctaagactagctttaaggtgaagtccagaaagaagtcctggctcttccctccttacttgctactctttgagctgggaagtaaaattgttgaaatgccagctgcctccacccagacgctgttctgctaaggaagaaacgctagatctctacacgcaaatgcttctggttgacacagcactgtactgacacaactcagttctagaagtctcacaattcttccccaatccctcaagaacacataaaatactaccgataacggattttttctctcgcttaggaacaaagggctcctgggagatgacagtgtttggacgagccttgaagcaagctgcttctttctgctgttttagttcttcgtccagctgtaagaaagaaaatctgtcagccaagcaaccaccaactctccataactaccacctcaattactcaagttcgaatgtttctgaactgtttcatctataaagacagcagatgattattaatcaataccatgggaacacaatgacctaaatccagattgtaaaacctagataggacaaacaatcccatttattcaacatacaaaatgcacatagagcagcctataggtgaaaagggatttagagatttatcaaaccaatataaaatatggaccttttcttgatcctgatttgaacaattcaactgttttaaaaatgagagataggggatatatgaatgctatttgtcactattaagaaattactattaatctttttaagtgtgataacaacactggaattatgcaattcttttaatccttgcattttaaagttacacattgaagtatttttgaataaaatgagatagcacctaggatttgcttcaaaataatcttgtgtaggcaggaatatccagtatagagatgagtaggtagaaagttagatgaagtaagattttccatgttttgagcactagaaaacacggtgccaggttcatggaagttcattatactattcttccttttatataagtctgaaaaacttaaaaaaatctttttattttggaaaataccccccacattctatgtcatgactgctttcaaagcaacagtcctacattctcctagagaacagtgccaacaag

SEQ ID NO: 25636 - DNA, 1089 bp, Bovine  19866881183719
  misc_feature (1)..(1): n is a, c, g, or t
ntggagaaggaaatggcaacccactcccgtgttcttgcctggagaatcccagggatgagggagcctggtgggctgccgcctatggggtcgcacagagtcggacatgactgaagtgacttagtagtagtagtagtagagagggtgggctcagaattgagtgggggtggggagaaaaagagaaaatcatataaacgtttaagagagggtctttgaagactaactcatgaccatgtgctaagagctgagcggtgagattaagtcaaccatctgtgctttagtgtgtgaaaagtaaatgtaaaattttaatttagaaaactagataaacaaatgaactctggtgcttatacactgtagaatactctgcagctgtcagggaataggagagatctaaatatacccatcaaagatgtccaagagcacacgggctgcagagtgatgatttgcgtgcgacgccctccttcccatcttcctaccctgccacgcatgtgatagtcttacatatgttctctgggttcctaactatgtctttaaatgaacatcatcacacacccaaactgggacttcagagggaactgaggtgtcggggccaggggatgtcaaaaccgaacttcagttttctctttcgtgttttcattttcaataaaaagaatctattcatggaattttaaatgaatggatttcgtattaaaggtagtagtaaagaccagctcagggaggcctggaatgttctgggcttgtattctctttgaggtcatttaagatttttcaagtcaagccttgggaccatctgttgcctgatgaaatcagggcgtgtggatttaggacgcaggtccccacctggcgtccccatctggctgcatgaccttgggagggtcccatgcccttttcaggcctcagtgtccttaactgcccaatgggagtcagatttcttcattccctggggacatgggaggatggagagagggcaggaggagaatcacatgaatataagggattattctctgggtcagaggagagggagtggcggcctcccctccacctgccaagcccacaaggcacaaaggaagggagggaggagttggggaccac

SEQ ID NO: 25637 - DNA, 1201 bp, Bovine  19866881209069
  misc_feature (1)..(1): n is a, c, g, or t
ntgcctggcacagagtgggggctctctaaatgacagtgactggatgataatggtgccagaccccatccccaacatgcagttgcaaaggattgctgggagtctccagggccccaggtgggagggacttcagtggcagtggcatttggagacagttggagtgccaggcaatgggatgagtgcctggcactcatccacggggcaggagtgtcctcaggggatccagctggtcggggagttccatccttacaccacccctacatgtctttgggaatcagctgtccctgcccaggggggtttcctgtcttgcagtgccaggaactgaacccatgatgggaagtgaccctggcagggtttctgaaggctacaggaggaagtgtggccagagtccccatgctcagagcctgggtcaccacagccttcagaaaccaaagggttacgtggctttagtaagaggatagttccggggtggctagggacttcctcagggtatgaggggaagttgctccatcctcagagctgtggggtaagagctgtctcagtgcctctcagcagtcctgactctgtgccaggctaagactgtggccaatttccaagcctgatccttttgcaaagccctcaggcctttaagagggacccctatctctttggtctctgccccttgtcaatggacttcccccctcgtggctgcctcattcaggaacttaccaggacacctcatggcctcaggtctaaatacctcagcctctgatcaatgcatcccaaaagtaggtagacaggatagcagagccagtatgagcctgggctctggggtgagccggatatgggtccagatcccagctcgctgtggatcttgggggtcattcacttcaccactttgagctccagttccctcatccataaaatgaagacaaataaatttgaaaatataaaaattaaaaatttgttcagaggaagataccacagaccagtggttcgcagtatggtccttgaaccattaccatcatccgagtacttgttaaaaacagaagttcttgaacttccctggtggtacagtggataagaatccgcctgccaatgcaggagacatgggtttgattcctggtctgagaagattccacattccacagaacaactaagcccttgcaccttgactactgagccccagctctggagcctatgagccacaactctgagcctgtgt

SEQ ID NO: 25638 - DNA, 1845 bp, Bovine  19866881375450
  misc_feature (1)..(1): n is a, c, g, or t
ntgtcaaaaagtagccaagtgctacagacaaagaagcttcgtacatggctatggctgcatttctcacacctgtccccttgcagggtagatcctgtccttgcaggtttcaaggctggagagttctgggtcctccatgacccaggggaggatactggtcttaggtcccccacctgggttcttaggtttcatcctttcaagatgaccttgagagctttaagctcatcctggttgaggggagtcaggttaaagcccttcagctccggtttgcctaggggaagaattcatcagtgagtcagggctcccgttgtccaacctactggccctggagtctagcctggcaatgcagcttacactgcattcatgctgccaaaaacttggccttgaaatctgacagagaagggcctcaaattctgcaaagcacagaacgaggaacatcaacacctgttcctgagttaccaagaacctgcagagtcatgacggctgtgcagaaccctcctaatttgtgccagactgaccaatttggagtggttaggtttacctagaaattcagctctaacctggaccacctgactgaggctttctgacccttagtcagaggtatcttggcccccacagtcacaccctggcataaaatgtgagacactccatgccattcttgtgcctgaaaagaacttgtaacaggaataagatcccaccaacttcctgtccattccatctctggtcagctcaagacaaccctgcccacttcccactcaccagctgcccaccccagcctgccaagtctgagctcatactgtctcccctcctggtttccagccccacgcttagtccccaggccaataccttgggcctcaaagaggcgattgaccttcactttaagttgtttccggagtctttctatttctttatccagatgttcctgatctggaaaaatgagacaagcaaacaagatgaggttacactacagacacccaaggataccagcctctgcccagccccactgaaggcaggggtctgagcatgcgggggtgaaaatgggacttgggagaccagttgaggaagaaactaaaggctaaagaagggacatggcctaccccgaccactgagtgagcccagaacagggctgagcacactagtttcccaacttgcagtttatcagcctgttttcattatgcaaagtaccctgggcagtggatggggaaggcaataccaggactttaggtcaccctctcacaatgaaattatggaaaattcagatttaagaataaaaagacacagcctattcgaagatggatggaaaataggtggttgacgaagtttacaaacccacatccatccaggtgaggagttttcacaacagcaggattgtgacctgaacagtcaacattctgtctcatgctcacacttaaccaattcatggcagggaagagaaggctgtcttacagaatggactgtgcccaaaggcagatgcatcgtgagaagtgcaaccaactgatgacacccaaccaactccatctgctgttttcacccactcatgagtgacatttttgcctttcctacagaccttcattctttctgatggtgataagccctgaccagctaagcattctgacctgggcagtcgcttcgggttctcgttgtaaatgagtaaccaccatcttgcatgatctttgtttagcctgtgtccatccctgagaaagagatgctgccctggaacccttctaggtcagtgacaagaccacactcatgggccaagagagctggggacctgaccctcaacccaggcaggcaaggccctctggaagcttactctaagcagccctccagtccctctgcaagtacaat

SEQ ID NO: 25639 - DNA, 1340 bp, Bovine  19866881659135
  misc_feature (1)..(1): n is a, c, g, or t
ntacaataaatctgatttttattacacatcttagtttagagtcacttttacattcctagacaaagagatgatacaaataaatattgactataaaactcagagccccaagtattggcatattctttgtctcaaggtagccaaagagaaggtcaagatcaacagtaactccaaggagccataaagcccactgcctcctgcctgcccaaggatcactcctttcataaacaacctcagaagcatttcattcaggaagtgagggcagggaggagcgggggcagatttccaaacagtgcaagacaacaaccttgcacgacagacagtagccaggcccgctgtttatccaggtccttcgagcattctgattatggcttttagagtgtattagcagccccattttcgtccactgatggtgctgagatggcccaaggtggtgttcacaccaagcctcaacctccagtgggaaatgtgaggctggactgatatcccaagttgacaaagaatggacacttctcacaaacttggcaacgattctacattcagtgaaggggcacttacaagagtcacacaggagaagtagagcgtggcccacgccggagctgagcaactctcttgacgcctgtggtcgtggagatgcgggtggtgccattcaagcagcatgcaggcattcgatggggagccatccaacgttagggtggagtcttaagaaagtgcttcatgcctatgatttgtggccttgagttctgaatccaggggcctgagagacacgggatttgaaatctgaaaccagatgcattcctgcgggcggttgcacgtttgtctcaaactccttctctcagatgagcttattagatcctggggccttgctgccagatatcattagttgctgctgacatgaaggtgctcagagggcttggaacattctagcatgactacagacaataaaaacctggtccctcagtcatcttggtaggtctacacctttagctcaattcagagcccaaggcagcagcttcctggtggcaggaggacactctcctctattcgaatatttatcagatccattttgagagaagaaaagcaccagagactcaacctccagccaggtgttcttcttcttcatttcacagaccaccagatgaacacagctgagtacaaggcaggcctgttttcatgaccctgcctgtcaacttggcttacttcttttgccttcttagaaaagttccatggtcattcaaccacccatggtcagaacagtcaccttgagacatccgtattcagctacagggttatctgcaatttttaattctcagacttcctagaggaaagttcagcctacagat

SEQ ID NO: 25640 - DNA, 922 bp, Bovine  19866881665946
  misc_feature (1)..(1): n is a, c, g, or t
naatgaggcaaagggggaggcaaggggtccgagtgagtgtcagtggccatgcacactgccccctacctcctccccaagcaacccctccctgcccactaccccttgtctccattcacttcctttctttgcagtttctgctaacattttctcacatgttgcacttacttgctaggactgttttaacaaactaaggaactgaaacaacagacatgtattgtctcacggttctggaagatgaaagtccaggaactaggtgccggcaatgacatgtgccctctgaaggcactagagttctaggcctctctcctagcttctgagagtttcttgggttgtaaaaacatagctccagtatttacgtggctcttttttttcttgtgggtcgctctgtgtcttaatttattctttgcataaggacacactcatactggattagtgtccactctgatgacctcatctgcaaaaactcagtttccaaattaggtctcattcacaggtcctgggggttagtacttcagcataacatctggcaacacaagtcaattcataaaacgtgtcagtctcagctctactcttttttttcagtttgttattcagtgtttattaaatagattcagtcttatatatgctacacagattcaaaagcaagaggattccacatgcttatgaaatcagtgcatttagcaaagtaataccatggagataacagcttgagtaacagctcattggtcttttgttaagtgagggaagaggaagttggtctgtgtgagtcatttcacacacacacacacaaaaaaacaattgagttgcaactcatagaagacatacattctaaaaattaaaatattaagccacacttattggaaaacctcactatataaaacacaaataatttttatagagcatgaggaactcctcaccagct

SEQ ID NO: 25641 - DNA, 1162 bp, Bovine  19866881809082
  misc_feature (1)..(1): n is a, c, g, or t
nctggcatgctccctgtcccaggcctgtgtccccattcatgctctggcccacgcaccctggacatgctcaggaatggggctgggggcagggaagtgatgccaggctgggagcagggaagaactcatgaggtctaagggggacgagggtggaggagcggctccagtgcaaagggctcagaacactggacgctgggcaggcctgcacctgctgggagcctcagcgtctgcctcagcacaaggcctacccccgcctctaagggttttttgggtcttgaggttctgggctgaggtctgtttagaggtgttgcttctagctgggaagctgggaacacttccctgcacaacctcctcctcagaggagaggtctctagagactggagtctacctcagaaacttcactggtgagcactgcccgctctgtcccaaggccacggcactctgcctgtcccagacctgtgctaagacataggctggtctggagctggtgagacccgaggcaggagaagtcacttccatcagtggagtcagagaaagcttcggggagggagggacatctgcctgggacagagctttctccacctactcctgtcccccctgggcttaggggctccccctctcctaaaccctagtcccttcctccctggaagcttcctcagcagttcacaccacatcgacttctgaatatttggtaagtaaggtctgaatcctctttaagtatgtaggctgatgagggcaggggtcatgaacttgaccccacagtgccacgctcagccaagtgtgcacatagtcaacagtcaatgtggtggatgatgaagtgggcatggagcggagatagagtgttatttactttgatgataaaagatcttcatacgctgggaatccagcccctagtgatggtcactgagagctgtggggagcatctccctgggtcatgtttcatttaactttataaatacagatacactatttaaaacaaaaaatggaagtctattctgcatgctatcctgaagcctgtgttttgcattttaatattttgtggacttccttgcacgtcagcacgtagaaatccatttagtggctgcagagtattcaagtatgaatataccattatttatccagtccccttttttttgggttgttcccatttttaactattttctga

SEQ ID NO: 25642 - DNA, 1084 bp, Bovine  19866882180069
  misc_feature (1)..(1): n is a, c, g, or t
ntgacttccacttccgcacagatgagcgggtcaaacagcatcctaaaaaccaggaggagtataaggaagtgaactttacatcggaactgcgaaagcatcctccatctcctgtaagttgactgtctaagttaatattcttgttagttattcagcgaagattctggtgtagtatttatggtcactgttgataatgtaattgagagaagcatgtgtctttcagttaaaatatatctaaatcctcactttgccccctgttagctgtgtgatcttgaataaatcactttctctgggaagcatcttatcaaattactgtgaaaactgaattgagaatgtacataaaacacatagaattacatgtggcaaattgtaggtacaggcttgttatggcttgtgctattaaacatttgtttaaaaaaatcttgtgtctgcaaagttttgtgcaaactataatgggtttatggggaaagtcaggttggggcagaccactcaaatcctatacagttttgttaccagagcgctaacaaaagcagtaataatcctaaattaaaaatctatcactaagaatttctacttgcatttgcagtcaccagcatcattttttttaagtaggttaatctctttttaaaaaattagtttttggttgcactgggcctttatcattgtgtgtggctttatctagttgtggcgagcaggggttactctttgttgtggtgcatgagctgctcgttgcagtggcttctcttgttgcagagcacaggctctaggcatacaggcttcagtagctgcagtacatgaactcagtagctggggctcttgggccctagtgtgcacgggtttcagtagttgtggttgctccacaacgtgtgaaatcttcccgggccagggatcaaacccaggttccctgcattggcaggaagactcttacccactgtaccaccagggaaatcaccagcattacttgtttaagtcagtcctttgcagacttaaatcctggagttgtgattcttcctttgagatgtaggtccttgagttttacttccagtcagaaactaattttataaaaattagtgacccaaggagtggg

SEQ ID NO: 25643 - DNA, 2181 bp, Bovine  19866880417865
  misc_feature (1)..(1): n is a, c, g, or t
natggctcactcaaaaaagaattatccagcgcttttgacactagtgctgcgattgagacaacctggagcagtggggagtgtagagagtgagaagagggctgaggatggagccctagagaactcccgacattgaaaggatgggcagggaagcaggccctggaggagactgaagaggagccaccagagagaagccactgaccaggggaacttccccagttacatgagattttggcaaatcaatgtcaagtatggggtaatggattgagtgctaaaagccaggcaagaagagggaggctggttgtcacactctccagatgaattcctcaatgctgccaccctctcctaggaacactaaagccaaactaccaacagacctaatcgggtaagcaaggagctttatggagaagggttctcagcttttcccctccctttcttaatggacattccatctgagaacatcaaggaaatacctgaaatgtcatgacttggtacttgcagagctaaactaatgcagcaggttcaaactagctgtagaagtttgagtcctccccaagtttgccctcctcagctgattcctaggaaaaggcagggagcccagttcattctcaaaactgtatcttcttccctggtaggaacttgggctgaaactcatttttactaaaccagagtttagacctactagaatctaatactgaaaacagcttgagatctcatctgggctatcctgtttgctttctatttcactagcctgcagtggcatttgaagcttggttttctacagaaaaaaagatacctctctagatgggccctgctgtatttggttaccctgggcttcccataaataaaactggactccttgggtgaatcctgaaatgtgtttgtctcatttaccttttcaactaaccatgtttgattcatgtacccagaaaaaaaaaataaggtaatgcatttacacatcaagtgcattgtacatgctcagtaaacatcacctgtgcttttcctttattgggctattttaatcttcagtcccaatcagaatcaaaactaaactaattctgttatctaagctttggagagaaaatcaatgtctgccttaagttcagatttccaactaaaccatgaagactaccattcagataacatgctttcatattctaatgccctaagaaaatatcatataccagaaatcttactgcttgcaaatcagtgtatacttggaacaataaagcctcccttttctggggatagctaagccagcagtggattctactacctgtccgaataaaaaaataagataaaagaaaaaacaaaacatacatcattgatctccatggtacacagcttcttacttcattaaataacagtttccaagtaaatcaagatgttagctgcattggaaatcacttggcataaaggaggaaaaaaatctttcagattgtgatatcaaagtcgtcttggctttctgctttcgttcaagttgaaaagaggaacaaggagtaggagaaagagggagaaatgttagacggaagacatttctcaaactggaagatgctgtgacaccttcggtcagttcttttcctggagcaggtacagctcaaaggccattctggaaaaaaaagcctgagcccaaagtaatgtctactagccacgacagtaatcacaaaaacaaattccatacaactcagggccgggagggggcggtttgcttatataatgtgtccatcctgttccaattgcactctcctggtcccacacgtctcaccgctcggcgcttctcatgccccctactggagaaagcaagtacgtttaagaggtaaagagcagcagaagttcccatttccctccaacttcacagttggggaacccaaaaggcagagggcgcaaagttcagctttgattcgaaagacggtccttccctctcttgaaatcgtatcttgcaccttcttggatccggtatccaaaacgactgccagaggctctttttcttggtttgaagaaaaaggactggccagactaaaaaggagggactttgggggaatgcaggattcaagccctgggttgcggcccggaggagaatgatgtcaccacttctgcaagagagggctggggggtggggcggccgacggggagcccgcgccgagcctgcagctgccaagggagcgttccgagcccacgtcaggg

SEQ ID NO: 25644 - DNA, 1612 bp, Bovine  19866880453238
  misc_feature (1)..(1): n is a, c, g, or t
ncagcagcaaacaaccaaccaaattgtcgtttttgcataggagtaatgcttctgatttttgagtgctgactaatgagaattactaaaaattagcatttatggaactgcttctatatgccatacattacacttttttttgagctataatttatattcagtaaaatttcccctttcaagtgtactgtaaccataaaagtcctccaaggaacagatgccgagatgggaataaacatgtattatactggcaagtgttggcttgtttgtttgattgactttagctattgtaataggaatttagttgtttgccactgatatcttttacacaatcctataccgcaggtataatttgtagaacaaatttactttaaatagcttgcccatggcaactcagagctggtctgatctttaaaacggtgcttgtagccacatgtgacctattgttgccaagatcctgagtcttccttaagtgacagtgggttgtgcatgtggttactcagaagcagtggagcatggagtatatttcctggctagttcctcagttcaaggatgtgatcaatatcacaaaaactttcaaaaccttttactgacttatctttgcatagtaggactatgcaaagaaaatatggaagagtagaaaatagagaaaaaagtcacccacactctatttagtaagcacataaatttaagttgcagttatggcagttgaggggaaaattattgaaagataacatcaataataagctgggtgaggctactataaaatgagttgtttatttatgtaaattttctctgtgtttcatgtgtagtgatgacattactaaaaatcaatttttggtttttaggaccacagcataaaattcagaagaaataagaacatgtagacaaatattcaatcttctacctttatgattcagatttttgtaaaattagtggaatgattcgactgaaaactagcattattaatcataatatgacttctaaggaattcacctgatggaaggtggtagggaagagaagttaaacaaaatctttgtgatgttgtctttaatgttgttttggtcttttattttcagcagggattagagtggcattaaggaagtaagaaatgtagagaaattaaattgtgtgatttatgggtaaataacttagtaatacgaccccagtgagaccaaggggttgggatttgagggtgggtttgagagaatatgatttgaaagctatcattttttttcctgtattttttgctttttaaatctagggttacatttattcctgcagaaggttatcagtaaaatacaaaaacacagaaacaagaacacagaaactagtctttattccagaccccttgtgtatatgtatgtgtaaactagcaagctataagctctagagagcttagaaaaggcatcctagcctctatctaaccagaacatcaatgtttatctacctatcccataattaaaatcacatgtctgaccataagctctgagtgagggtttgcttaccttaatgcttgtaaactacttggccgcttaagtgtcattggctctgtgaattgaatcagaagggagaaaagtgtcaatgtcagaatctactttaggcctttaagctgatt

SEQ ID NO: 25645 - DNA, 1124 bp, Bovine  19866880492655
  misc_feature (1)..(1): n is a, c, g, or t
nagaccttgtgaggcatcactgatataggttgattgggaccaagtgggaattatataattctaatttccgaatccttctttacataggaaaagttttggtaggcagcaacagaaagatgtccttcttgtaggaggaacctctcccctaggcagcctgtagctgcgtctgcttagttaagctgtggagtagtgtgggcatcagtaaaggtggggagaggctgaaacagacctcaggaatgaagtgggaagagcagagacccttgggttggaacttcagtgtgtcacttacatttcagagctacagtttcttcatttctaaggggagttaataacattccttttgctgggctagccataagttctgagtgaggccagagcgggtaccactgaggagcagacacattcatttcatttgtatgtcaggttaacctgtatcatgggagcatcacaccacttcgccgtcagctctatggacacagagctggaggcattttctgagcaaatttatttttcaaaaccttctcttgaggcattgtccatatgttctacgcttgaattttttcttcatttgtgaaaacgtaaacacacgttcaggcactttgaccatattacaattaccatactgtttatcttttttgcttgaacacaagctgcgtgtttccatgctcatctggtctccttggctaagaggatgacttctatgccacttaggaatggttgacatttaaatcttagcagtgactgttggaacacttccagattaattttggaaaattgattgaaatccaatttttttcctctgtaaagactcataagaaactattaacagtgattactttttggatgagaagtttgtgaggggcaaatgagctgtgatggacatcctctgagacaagctacctcctgggattcaaacccttgtgttattcccctcctatctctttttaagtccttattgaaatttttttaaacaatattgcttctgttttatgtttggttttttggccaagaggcatgtgggatcttagctccaaccaggaatcgaatacgtacctcctacactggaaagtgaagtcttagccactggaccaccggggaagtctcctgttatcccctcctcttga

SEQ ID NO: 25646 - DNA, 1711 bp, Bovine  19866880497926
  misc_feature (1)..(1): n is a, c, g, or t
ntggtctctgggcctcaggtcaatcccagatacttacccatcctttcccagcagtgaaacttttttttccgtcccctcccaccgctgccctaaggccctgtggtgaaaccatgagagaagtgaggtgatatcctggctgacagaacttctggacaaataggacagttaggatcaggatgtcacacttgtaatctgattcacagcactgccctcacccaggttactttacttagtttttacttgatttacccagaaaagcaagaaatattcatagttgttattgtgccatctaggacccacatgactgagagaaatcaccaacccgctttttcacttcatgactagcagacctggctgtgtcatgtgccaagtccccaagccaatggattcagcagatgatttaccgtaactgtagtttttgcttagatacgttgccagggttggcttcacctttttgcacttgcaccggtctaaagaagacaaaacaaaggcaatgttgaaaaaaggttcagaagtcactctggagagaagaaagagatggagccttgaggctaatgaacttacccgggcttaggcgtttacagtcaatgtcaagaggcctttcctgtaccatcatgtctggagtgatgtctatccacttaacgtctgaaaaacacacagggacacatgggtgtggtcagtgattccagctggagtaaggaatcatctggagacactgactaacacgacagcacacacaaacacacacaaatcctaaacagcaaaaattatatgtgattgtcaactacttcttccatatagactctttgggcttaggaaagaagacttatggctgagactgtttatccagaacaaactaaagtgaaggcacatccatttaaacaggttgatacatacagccaacctggatttatccaacatttatccaacctggataaattatgtcattccctcctaaatctattttaaaatgttgattttccaagttgacagtttacactaatcaaaataaccagaatagtcctcaattcccacctcacattttgcagaaacaatccagagctaccccctaaagaagcataaccctgtatcagttctataattaaagaaatacatttttttttaaactgaattagagaggagcttaaatttcccccccttcacttcacttctccacctccacgttttgggcaaggctctgagatataacttcagaaacgacactaaagcaacaccataatttctttaaatgtgtagcaacttgagtcagggataaaaggaggcaaaaatattcttaggttttatttcaagaagtggatttaaacctgcctcttcttcctagaaaagcaacaaaaagactaaagagaaaagaaggaagtggtggttgagttcgagttaactaagatgccacagacgctggcattgggtcaaagaccatgaaacagacatcacagttttccagggcaactaaatttataaactgtactcctggtgggaagtgactagtactgctttttcagaaagagctttcaagaactaacgttaagtggagaatcctggtaggagtgttttatttattaaatgatattaaaaaagtgctgaaagtgggttcagacccaactgtcactgctattactattttattactacaaagaaaaaattctctagtgtcacctatctaagaaaaatcgcccatccctctttatgggga

SEQ ID NO: 25647 - DNA, 1440 bp, Bovine  19866880536277
  misc_feature (1)..(1): n is a, c, g, or t
naatatactgtctataagaaaaggaacttgaaccaataacttttaccaacataatgatatagtactacttaaaggtgtaagaaatacttgaaacctaaatgaaacaataaagcactacactggtcctcaaaatggtttactactctaattttagtctacttgtgtgtgtgtgtattttaaaaggagaattttagtctacatccaagcagaaaatatattagttgcaaagtaatttagtttccctacacaatgaccagtagctgaagaattgctattcttatgttgaggccaagaatgtgacagtcagataaaaggaatattaattttaaaaaatctgtcagtcttttataacccaggtaaaagtagaaaaaaagttactgacaagggggagctactatgagctcaatcacttttccaaatattttattccttcctggactgtcacactgattaaagctcctacaaaaatcttagccttctcctaagcttcaggccatgacagcagtttgtcctggcaatttggtcttgtggattgttttgggaagtccttgaacataggttagggttagggttacagcatttggtgttttacaagttttcctcacctaaatggacacaaatgtttgttttccttggaggagaaatcattgaaaatactgataatagatgaaggaattaaaaagagaaaaagaagagtatggcaccaactggttagccacctactcttctacatttccaggaaaaggattcaaagaattaaacctttttttttttttttttaaatttccagatgttcaactctgttgaaactgctccagaaaatgcatcagataaagtctcttctgttctcacaatgaccagggccagtctgttagcaatttgggaatgtatttctgaaaagaggaatctcttcagtaactgaaaatgcaaatataccatcacaagtgtctttgtgaaatgtgagcaaagttctccatttatcgggcaacaagattctttatcatgccaacacaagatgagaaaacaagtcctgggataacttatttttcctaggataaagaaagaaatttgtagaattctttctcctttgaaataataaattctttatttaaactaaaacttgaaagtaatatccatttctctgatatgttgaaagtagtctcttggagcctgtagtgtaatcttaaaccattcatcctcaatcatgggaaaaagaagttgccagaagcagctgagtgctccattgagcacagatgagctgaccatctgccaggccccagagaggacaggccctgactattcccatgtcctcgctagatccacctgctcccatctttagtccaggaggcagtcattgcttctgccctgaggatgaaagtaagaagaggacacggtgggcaactgctcattcacagcagcccacatcgctcaacgtcatag

SEQ ID NO: 25648 - DNA, 1736 bp, Bovine  19866880603045
  misc_feature (1)..(1): n is a, c, g, or t
nctagtggaattaaatatacagtaaattaccaagtacacactgttcattttgaagaattgacagaacatttaaagtaataaaataatagtttagtggaaatccttactacagcaaaatgcagaagttcatcttcattcagctcatttttcaattttctgaataaggtttgcattgctttgcaaggtccacaccaggcttggtaaacatcgatcactagaagatgataatattcgtgaaagaacaaaggcaaagagtcttgaatagcagcttctcccaattctcagggcagagaaaagacagagcaggtttttactctgggaagtggggagcggtgctcagtgttggggtgccacaagataccctgagcctaactccagacggtaaacacctgggaagccagtacctgttaggcctttgttctgcatcatctcatcccacaggctttgattattgatgaccgcctgcaaaaaagaaggagtgtcaaaagtcttcaagggccaatgctctaagtaaagaattgttgatgtgtctgcctacctgtaactggatttctcgctttttgcctgccatttatccactgtcacacaaaagagggaagaaaaatagaaaacatgtaaaaggaaatttaaataatgttgtttattcattcaaatagcatcttaagtactgcagaaattttccctcagcagtattggattatgtactttcgcctcttctggagagagaagagtcgtggtctctgaagagctcttcaggctgggatctgtgctaaatgcttgcagcagccatactatcttaccctcccaataattctgaagcaaagtaagtcataaaagaagcagactcacagatatagagatcaaactactagttaccagtggggagagagagatggaggaacaacatatggatagtgagtaagaagtacaaactattgggtataaggtaggttcaaggacatattgtacaacacaggaaatacagccaatattttgtaatcattgtaaatagaaagtaacctttaaaaattgtataaaattttgaactttttttttaaaggtgctctataaggtgggcagccagttgtatgttttgcaaaactatggccagctcaataatgaactctctgtccttcattctatatttcctggcactgaattcccataaagcagtagcttctaagaaaaagaagtcagaactgttaggagacacaggtacttaaacagagtttgtttttcctggaggattatagagtgtctgtgtgccacatgttaattgtccatgaacatgaacatggatcttccttgggttcctttccagggagatttaatttttagagcaaggccaccagtgtgttctgaggcacagcataaactttgtgcagatgttaaatcagtgaggtctaaacaccttgctccctggtgtcaaggttgtttacacatggctccaactgcgtgtgtcactggacactagtgtgaacaaaggagtgaccagaaacaagactacatccggcaaagggaattctctcacgagcgttgcacaaaacagacccttgtctagctgctagattctgaaggatcaagaacaggaactcaaaatccccgagggcatcaatcccttaccaaggcctgtgttttcgcggggataaattcagccaagctcaagtccctggggtgcgcagcaggcctgggcggtggccggactcccgtggcgccgatgctggtgctggtgctgg

SEQ ID NO: 25649 - DNA, 1690 bp, Bovine  19866880671270
  misc_feature (1)..(1): n is a, c, g, or t
nctgacagtctatgattttcgatccatcgatggatacccgcatacccatgcatttataaaaacacagtgctcttacacagggcactgccacctccatgtattagtgtttggaacctcctggagacaggtaattttctcatttgatgctatttggtctagatatacatgtagtccctaccctggctgctatactaagtgagcattaagtatattgtcttagaacatggcctaaaagaagacaggaaagggacagaactattgtgtccaaactgaacgaaatgtaataagaatatcacaatgacatttgggtgatttaggaaggaagtacatggggaaaggtggctcccttatacagagatgaagggacaatggatgcatgtatatgtaaggctgagctgcatcgcagttcacctgaaactaccacagcgttatctgctgtgaaagtgaaagtcgctcaattgtgtctgactctttgtgactccatgaactattcagtccatggaattctccaggccagaatactggagtgggaacctttcccttctccaggggatcttcccaaaccagggaacgaacccaggtctcccgcattgcaggcagattttttaccaactgagccacaagggaagcccattatctgctataccccaatacaaaataaaaagtttaaggttttgaggggggaaaaaggtatctggaaatttcgttgctgctgaatcagatacaatgaagagaaaatggggccacaactgcttaacaaatgttcttcatttttttcaacattcctctgcagaacgaggtggtgagtgagctcagaggggcctccattaggcatagattggtggccgtgcttcccaggggagaccatgattggcaaggttccaatcatgtgtgtgtccgtgtcctgtccacgggacccattcccttggcctgttgaatctgtagaccctcctgctgtgtacgtgctcatttatttgggggtacagacttgttccttcaatctgtagagtttagaaattcttagagagtaggatgtgtccccagtggtggattaaccattgcatttgggctgatcacgagcatctggcctggggccaggagcatgatgggttgtcagtaaacattacacactctcatccgtcacataattcgtttgcacatgtctgaattgagttattgtgctgtaaggtgtagaaagcgagacaatgaattaatttctaaatattatcagaaagcacgcctaccaaatcttaatgaacattgtcctggggatgccttttaatagccaatttatcacttggtggggcagggtaggttttgctatagattatgccatagcaagtttctcttataaatcaaaagtgaaattagttcaattaattcagcttatgtttggaagattcttgcagagctatttggctcagtggaaagaataggagttcaaattagtaaggcctgaatttggatccacgaaattttccagtgacattagggattttttatcctctctgtgccccactttacttaagtgtaaagtggagacaataatgcactgggtcttgtgatcggtggaggtaacataggaatgggatcttgcagacagggacaatgaatggcaccagttattgcatcaccgttactaataaacaggatgaacaggaagagggaatagataaccaatagtgcctgt

SEQ ID NO: 25650 - DNA, 1621 bp, Bovine  19866880764446
  misc_feature (1)..(1): n is a, c, g, or t
ngaaggtgtggtcacactgatttcaggaacaaagttgtcctcgaagaaactgatgatgttctcctgctgtagctccttcgttggggtgactttaggaagaggtgggacaggaggccctttccttgtctaagaaacatcacacacaaacaaacagggtttaattcagtggaagatggcatgggagacatgcagaaatgtcttgggaacagagccaggggatgagattgatccctgattcaaattctggtctgcactgagaaatcagcccacctgattcaggcaaagaatgcctgcttgtagctatggtgtgacaagtaatggtccaatgaggaaaattcaggccacaagactccatccatcttaacacaagtgctatatcacagcactgcggggccacgtacctgtgcctctcaagttaaaataaggccatgcgtgcgtgcgtgcgggttaagtcgctccagtcgtgttcgactgtgtgaccctatggactgtagccagccagcctcctctgtctatggggattcttcaggcaagaatactgaagtgggttgccatgccctcctccaggggatcttcccaaccgagggatttaacccacgtctcttacatctcctatattggcaggcaggttcttaaccactagtaccacctaggaagcccaaactaatgccatacgttctccaaagtcaacagcaaatgatttctcacttcagcagcacattagaattctagaactaaaatctagcaagatttcactagtcagtgagaccactgtgggcagcatacacctcactctgcactccagtattttggaaaggcagctcagcagtaaagaatctgcctgccaataaagtcaagtaaagattcagtctccagtgcaggagactcaggtttgatccctgggtcgggaagatcccccagagaagggaatggcaacccattctagtattctcgtctgggaaatcccacggacagtggaggctggctggctacagtccatggggtcgcacaagaatcagacatgactttgcgaataaacaacaaatacgcactttagagctctatccattattcacatcttttcgcaacgatctttagtttcaaccatacacaagaaagcttgagctggattagacagtttaagtttccccataggaatttcattttctccaaaaggagggataatgagggtggctgtttttctctacatttgcctttgcttggccctttctgtttctttcaatcacttgttccatcacttgctgagtgcatgcacaatatgccacgggtgatacaaaaaaaaaaaaaagtgaactgacataaacatcatggccgttcttgctccaggtgttacctaaagactaacaggagggaggccacgtggagaaggcaggattcaacagagccttaaaagtgcaagatgctgagaagacgagatcatgcgagcctcaggaagttgagatcatggaaagagatgtctcaacccactgaagcagagggtatgtgaggaaacataaaaatctgagtaaaaacaagggaagtttattccttagtgatgatcccaatggccaaggctcacactgaaaactcttgtcaatgactgcgccccatgggcttatcc

SEQ ID NO: 25651 - DNA, 1783 bp, Bovine  19866880775046
  misc_feature (1)..(1): n is a, c, g, or t
ntcttatactgtgtcatctctaaggataaagtaaagtaggagactcttgccgtagtcttatctccaacttaaagatcaatagcttccctatttaaagaacccctggccagtctgacatgtgaagagcttggaagtcatcactcctattctcacagaaagaaaataccttgaacaaactgaaaatcaataagtgttagatatatcagggaactgagtttacaggaaaaactgcaaccccaaaaacgcaagaactgcaaccctggagagacaggaaaatacagagaattatagtttactagctggagccttgtgctccagtgttcttgcctggaaaatcccagggacggtggagcctgatgggctgccatctatggggtcacacagaatcggacacgactgaagcaacttagcagcagcagctggagccttgtagaaagggccactgactaattagtatcctcactggatactgggcctgggttagtttaggagataaatgtgcctggaggggcccctaaatttttgagttttatgtctagaagcctcaccaggttcttagggtgaatatgggagaaaaatcccttcatacatccagaagaagggggaaagtaaccattttaaaagagtgctttgttctctttaacaaaagcctgcttttaaggaaagctattttaccagagcttaaccaactctgttttaccggagcctaactgacctgggagaagggcaagacccaatgccaactcctcttcctgtctcagttaaggaggagggggaagaagactgagaaatacttgtgaaggtcatagctcagagatgcaggccaaaacaatgaagacctgattatagattgacatgcttatcctcccccaatagttttcaccatagcaaagaggctcctgtatggtacaataacatagatttacagctaaaagaacttcagggctcagagcctaaagaaagagtctctagggaaatccaatgacaacaaaggagacaaaaacaaagacactcaggaaattttagggtcagctgaaactccagtacgttggccacctcatgcgaaaagttgactcattggaaaagactctggtgctgggagggattggggtcaggaggagaaggggacgacagaggatgagatggctggatggcatcaccgacttgatggacgtgagtttgagtgaactctgggagttggtgatggacagggaggtttggtgtgctgtgattcatggggtcacaaagagtcggacacaactgagcgactgaactgaactgaacatctcagctatagcaaactgccaagtataggctaaatcctagcccaataaacattaaatctcacagtaaaggatcatttacctcagttcttttacccaatgattcatgtgtgggttttaacaaaaacaccataaaagcaaagctttttgcttttatgctaaaaagcaaaaaaacacagcttgaagagacagaataagcatcagaactagactcagatatgccagagattttagaattatcaaattgggaattggaaggaatgatgctaaagctgaaactccagtactttggccacctcatgcgaagagttgactcattggaaaagactctgatgctgggagggattgggggcaggaggaaaaggggacgacagaggatgagctggctggatggcatcgctgacttgatggacgtgagtctcagtgaactccgggagttggtgatggacaggaaggcctggcgtgctgcgattcatggggtcgcaaagagtcggacacga

SEQ ID NO: 25652 - DNA, 1820 bp, Bovine  19866880787574
  misc_feature (1)..(1): n is a, c, g, or t
ngtgatctaacagaggactgtggaaggggaggatcaagtcaaccctctttcaaactcattatagtcccctaaagtattaatgaagcttcccaggtggtgctagtgataaagaacccacctgccaatgcaggagacataagaaagcaggttctatcccggggtcaggaagactacctggaggagggcatggcaactcactccagtattcttgcctacagaattcccatggacagaggagcctggtgggctacagttcatggggtcgcagagagttggacaagactgaagcaacttagcacacacacatgcacaaagcattaatgacctttttgcttaatactgatactgggaaaattttagttcattgacctaacaaataattacagttctttggcaagattttgttcatggaaactggcagtgtttccaaacactttaatgatgtttattgtcttaaccagcacctgtcctttaccctgtctgcatacttccaaaaaagttaactaaaagagagaatgattcatttcataccctgaggtttccttatgaccacagctgtggccacttctgtgtccagcaaagtatttctttggcaagtgaccttgggaggggtggaaagtggagtggaagaggcctctggaagtctttaacacaggggcgtattctctcctatttgactccaagaaattcccactcatggaatcttgcctatcataaacaacctttcttttttgtacttgattcaacttaataaatcatgtcaaccaactgtggtgaatgatgactgttctttacccaacagaacaatacccttcctagttggaaggacagaaatctatcagttccaatttcctcctgctgggcagagtcttctatctcaactgtctaattcttctttataactcctccactacaataagttcttttctctgatccctaggacaccccggcatgtgttcttctcactgactttgctggtcttaattctgaaatgatatctcttttagatatagaaagatgagaatcgtcatctaagaggcaaattctcaataaggatttctttttaaaacatttatgttaaaaaatcatgcccaaaccagccagatttagaaaattcagaagctcttctactttgtttttaaatgtagacatcaaaagatacatctgtcccactaaataaatggtaactggtacattaaatggtatgggaatggaaaatattccttttattggtaccaacaatagttagtacgcctatcctcccaattgtattacaaatggtcaaattttcatgtaatatctgatatttgacataactgaacctttcctaaataattatgctgcttccaaagctcacaactttttttctaaaccaagcttcttttggaatctgtctccacacggagatgttcttccctattttattctaataacatttttgtgcttatttttatagctgctagacacacctaccatcatctccaatatcaccacagagtcagacacgaccgtagtgacttagcagcagcagcagcagcaactaaactgtggtaactgcaatctgtatattattgtaaccatgtaaagcaaggatgacccgactgtaactaggataactttctggcttttctttttatccatagtgtcgctaatccatctgacattccttggtctaaatttccctctaggattgatattgccttattcatcatttaaccacttgctgctgctgctaagtcgcttcagttgtgtccgactctgtgcgaccctatagatggcagcctaccaggctcccccgtccctgggattctccaggcaag

SEQ ID NO: 25653 - DNA, 3123 bp, Bovine  19866880798836
  misc_feature (1)..(1): n is a, c, g, or t
ntgaaaactgagattgttgacaggaaagaaagctttcaagaatcataactgggtcattcactttggcagcaaatactccaatacagtattaagaatatgaaaatatcaccatggtataacaatgcacagtaataagtttattattttaggactagcagttgtgccctaggagggtggggactgtatttttcatttcattgtatttttactgcctgacctatggttgtggtctaatttttatactctaacataaagtagggacatatgtgttataatgaaaagcaatgtctattcaaatagactctttttcattttttttcttagacattttcatatttaaagagtaaattctttttctatcatggaatcttgactgtctagaatggcatttctcatcagctctgggtagctaacacatgagtggatttctaaatgtgggtggggcttccatcttcttttagatgtaagagagttaggtgaacctataagtgtggtaagaaatcccagcttcctagtaagggctgtatccatttctgcttttagccttggcaaagcctttttgaatgattggctgtataggaaagttgcattacagggcctatgggaaaaattgcatacattagggccttcacaggaggagaaggggatgacagaggatgagatggttggatggtaacaccaactcaatgggcatgagtttgagcaaactccagaaaatagtgaaggacagagaaacctggcatgctgtagtccatggagtcacagagttggacatgactgagcaactgaacaacagcaaagggccttaggctgtggagtcaggctggtaaatttgaaccccagctctgactttgttggctctgaaaataacatcagtatgcttgtttcccggtcatgacaatggtgtctacctagaagggctgttgtttcaatgaaataaatgtatgtcaagacattaccatatatatccagtgctttccaaagcacctgttacaggatacatgtcatcatcacggggtagagtagctatggtaatcatgagtctcatgatgagtatattacagtgaaaatacgcattattttggatattagtttaatagcatgaagaggtgagacatatttgatggtcacatgtacacgttgcctcccagcagtgggaagagaggctgcaggaacagcagaggacagcccaggacaagaagcgaacagcagggcgcaccagtcgcagtaacgccccgaagcccaaggggaagccacctgctcccaaaccagccagccccaagaagaacatcaaagctaggagtgctccaaagagcacaaacccaaaacaagcgtgagctaactgctttctgaaatggggacttcctctcagagtgaggccaggcatcacccagacagcctgttagaaggccgcacacccctcgccttaacaaccacagtcctcttcatagacacatcttgcagcatttttcttaatgatatgcttcaatttttctttttaagtcactacaaaccatagtggtaggtatgccctttggtatgcaaggtataagaaagctggtcaaataagcttatcgtattgacagtaaactgtgtgcagactctgtgagagctccacaagggcaaagatgcttttgttcttacaatttgacctgatatgtgcattgaaaaataaatgccatattacaaacaaaacacccaatttttttttttttacaatatgttttattttatttggtggttaggatgtgagcagtttttcaaaatgtgattgaaaatataatgcttctaaagaggaaagcaagaggagtgaatgtttcaaagatctttactgtttgcagaagaatttttgtgatcaaaggggatttttgaacaatctagaaaagtaggatgtggaaaatcagaatcagtctggttttatggtttttgtttttacaaagaagcctttctgctctgttttcagctagaaaccctaaaactaaaacaatagtattgctaaatgaataaaagggaaaggcagacagacaaagtctggacccttgttttctggttaccatgccacagtggagatgctctgatttcatatgcatgtttcttacagcccctttaagcagcactggaaacactttgtatcttctctatgatttgggtaccaattagtcatccccaagcatcttacacctgtgggtgtgatgctcacctcacttcccaggacatcccaggtatcttgacgcccagcctctctgctgattgctggtgcccccaagggtgccttgggcctgaggtaggagggtcaggatccagagcccctggtcttcagcctgctgtggcacccttgccacacaccagctccgtacttggaaaagacagtggcagtcacttgtccatccactactcaaggatatagaagaacaaactgcaagcttaagagtaaaatctcctttagatgtaccattgttgctgcttctcagagtaggggtaagttacatgttgcattcacacacaatgattaaacagataatttaatttcatctctgtaggctttgggacacagaggtgaggtgtgtgggtaagccagggcagagtgaagaaatagcgttaatgagagtgctggcatgggcacccatctcctcctgaaagtgtaacttcatctgtatcctgttaccccacggcaatagagctgaaggaatccaatataaacacccacacagaggtatcaataaaatactccatgtgtgtttctgtctaaaaaacaaaccactctggcccttaaggaaaaccagacaggtatttaggatagcatctaaagaaatctaggaaagtccatgaaaagccattgataccctagattacctccttagcatagtaggaatttggagggtggggaggggagttagaactctcaacggaaatgaaaaaactccctgcaaaacttttttttaagtgcaaaatgacgtaacgagagtttggaaatggcttgacaactttaaacactgtttcctttgaatatttaactgaaatcatatactgcatatcacaacttaataaggtgcattaattactttaattgataatcactgtttgttataaaaaagttgaaaatgaacatcagcccacactgag

SEQ ID NO: 25654 - DNA, 1110 bp, Bovine  19866880815195
  misc_feature (1)..(1): n is a, c, g, or t
nggttctgtgtagtatgactcttaaatgaatctttagaaggaggctcctaaaaatccttatattgtctaaagagccatctcattagatccaaccaatcctatctcttcttttccaagaagaggctgctgagcctagcagatctctcagattaagacaacttcaaatttctagtggaggaaccatcagaattccatagtataccttattaccaatagccagttagtgtcatggagcacttagtatgtgccaggcttctagactgtctctgcactggcatctcatttaaccttcacaacaaccctgcaaccttactactattactatttccattactaagttcacaagaagtggggtcaaattttatattgacatacttattttttttctttttttcttttattttttaacattatgctattccagtgaccagaagttccatatttttaaaatttgcaatgttctcaactgatgaattttaccagtaagtcaatttcttacctgggtgaatccattaaatgaacctccagaagcctaaacagaaatggaaatcagagtatgttatttttttcattacttctgtaggattgataaatgtctattagacaattgggaaactgaagaccaccacaaattttaaaataatacaaaaggtcgctgtgcattcaaatgcttaggaaatggaaaaggccatactgtattattttaaataggttgacaaaaaagggaaagattagttttataattattgctggtatgtggctaaccaaagcctactttcctgataatgagaacatgattccatacaagagccatgagggtttaaatagttctttttttagccattgatagactccagaagcacatccagtacttttctctaaatacatcactttaatgaacagctattatgagattttatagtttcaatggaccttggtagaaacatttcatgtgcttttattggggtgtaaccactttgggaacagtaaattagtctgttttttctatatatcttaatgcttgaacaataaaactgaaagtagaaagaataaacacaataaatgggatggtaaaatagactctcatcaattcccaacacaatcattctg

SEQ ID NO: 25655 - DNA, 1419 bp, Bovine  19866880818968
  misc_feature (1)..(1): n is a, c, g, or t
ncttaatgactaaataacaataatcaacaggaataaaatttcagttagacaagacaaataaattctaccgatctgctgtataacactgtacctgtggtcaacaatactggattatatactttaaaatttgctaagaagggagatctcacattgtgtttttaccataataaagtattttttttaatgtttaaatgaggtaagcttctcttttctgaccccaggatcatatctgttctgtaaaactaggatagtatgatgaagcccaatgtatagctctgattgctaaatgtcctgtccccactctggaaatatgtcctaaatgtccagtctccatacatcataggaattcttcttcagactgctgtattcttctgggtgtaataactctgcaactgctacttgtagcacctcaattatacccactagtcatgtcacaggttgtctcacctaaatttgaccacttttatcagctcaccttgtttatgggtgtattaaatatatttcctatggggttggaacagaggtttcttattccttatttcataaatgtcaattataacagttagtcattaaaattttaattatactgataagagagccaaatcacaggaagagatgagcctaggttactgtaaatgtaacagatgccaaagaaggtcagtctacacaacttaagacagtaagctaagccagcgtcttgggtctgaggacgcactctggtttctcacttcccttctaggtcttaagttctagtccaagtccagtgaaagccctagtaaggttcttgttgttttgtaccattgtcacagcgaaaatatcacaaggagggcttcagaacttgaacagagggcaaggtggattaaaccttacccatgggatcaagttcctccttaacatctgaatggtttcctcaaaggacctcacaggcactgaaatgtaggcagctttgagagaagagagagagagagagagaatgtctttctatcttggtctcaacaaaagttgttggtgctctgcacggataagaaccaggattttccaaagttttcctgggtctgtttccccatggctaaggatgcaggccacacactctgcctgtgaagtagccgagggtagacagacgatggcaaatggtttatctccctccacctgcggttctggcccacctccttcccacctccttagcacacttgcatgtgaccaaaggaaatatgtgttatgcaccaggttttctcagtttaaacaaggcactttccaatttggcccaaatagatgtgtatagtatatacttagatcctctttttgccttctcgcctaaaggagaattagaaaccatataaatagagcactaatttgtcaccttaagaaagacattaaaatccaaagaaaataaaaaagctaccatttctattctattgt

SEQ ID NO: 25656 - DNA, 794 bp, Bovine  19866880941478
  misc_feature (1)..(1): n is a, c, g, or t
ntatgaggatgaaatccaaaaagcacacagacatggagaatgaatttctcatcatcaagaaggatgtggatgaagcttacatgaacaaggtagagctagagtcccgcctggaagggctgactgatgagatcaacttctaccaggcaactgtatgaagaggagatccatgagatgcagtctcatatttctgacacgtctgtggtcctgtccatggacaacaacagcaaacctggacctagatggcatcatcgctgaggtcaaggcccagtatgaggagatcgccaaccgcagccgggctgaggccgagaccatgtaccaaatcaagtatgaggagctgcagacactggctgggaagcacggggatgaccttcatcgcacgaagacggagattcctgagatgaaccggaacatcaaccgtctccaggctgagatcgagggtctcaaaggccagagggcttccctggaggctgccatcgctgacgctgagcagcgtggtgagatggctgttaaggatgctcaggccaagctggccgagctggaggccgctctgaggaatgccaagcaggacatggcgcagcagctgcgcgagtaccaggagctcatgaatgacaagctggctctggacgtggagattgccacctacaggaagctgctggaaggcgaggagagccggctggagtctgggatgcagaacatgagtatccacaccaagaccaccagtggctacgcaggtggactgacttcgtcctacgggacccctggcttcaaatacagcctgagccccggctccttca

SEQ ID NO: 25657 - DNA, 1996 bp, Bovine  19866881035542
  misc_feature (1)..(1): n is a, c, g, or t
ncacacctagtaatttaccctgctctggtttgtggcttccttggcctctacttcctctgcttgatctcgcctaattccccagagtcctgcagaagtacttgggggccagagtcccagctaaatggttcacttggctctgtcttctgggcatgcgcctctatggatccttgacaagagaaggaagtaaaatctggatattcatggattttgcccaaagtaacaacacatgattttaatctcaaaattgtccccaatgttctccagatatctgccagattccatagttttctctcctgcatgcaaacagcgccaaatccttggtcctagattccctaactaaattccacataaaccaacctccttctgctaaaccactttgtcttcagacaaaatgagaacatgctagtgttctttcatatcagcccagtttccacagcatgttaatgaaatagcattccaatggcaatcttgctttaataggacttcatgatttctccggtttttcagccctgaatatgcagaccttctttttccatggcttaaatctaaataactcttttatccattcattatgtatttattggtcctatgtttccaatcaccttatttctgagtttggaagcaattaagtttagcctatttgtatctgacttcattaagtaaatttgctactaacattcttctagagatatatgctatgctatgctatgctatgctatgctaagtcgcttcagtcgtgtccgactctgtgcgaccccatagacggcagcccaccaggctccgtcgtccctagagatatagggatctatctaaatagaaaaattattagtttatttttgaacaaactggtcataccaaatggttatatagggcaagaacctagggaaatttttatctgcattctaggagcacccgctgcaaatactttttttttaaatctatcattcttatattattggaactaactgaatcacctaaagacttgtttccccatcttcctaacctttaatccaggaaatgcaaagttctcatgacagaactagaaagataaggggtttagaaagagtaaaatagactcatgagttttagaattgtatgataatccatttttaaataagaactatctacatattaatataatttccacacaatgttaaactaagaagtgtcctccaaagtttaattgctacacacttgaatacaccaaaatactgaactttagttgtcctgacaaaataaaagtcattttgaattttttgaactgaaaaagcagagacagtactccccaaattagtagactctctcattcaggctgttttcctttatcattaaatgacaacatctactatgaggtcgacagatccacagacatggaaataattctgaatttctgacagaagagaccagtggttagtggcttaggaaagaacattcagtttggaaatgctgtattttaggatgacttaatagagagacatttgaaatgaaaatctctaaggtgctgctccagtatggcttgaactgttctcatgtttatttatctatggggataccagaccacctgacctgcctcttgagaaacctatatgcaggtcaggaagcaacagttagaactggacatggaacaacagactggttccaaataggaaaaggagtccgtcaaggctgtatattgtcaccctgcttatttaacttctatgcagagtacatcatgagaaactctgtgcttggaagaagcacaaactggaatcaagattgccgggagaaatatcaataacctcagatatgcagatgacaccacccttatggcaggaaagtgaagaggaactcaaaagcctcttgatgaaagtgaaagtggagagtgaaaaaagttggcttaaagctcaacattcagaaaacgaagatcatggtatctggtcccattacttcatgggaaatagatggggaaacagtggaaacatttgtcagacttttctttttttaggctccaaaatca

SEQ ID NO: 25658 - DNA, 859 bp, Bovine  19866881043112
  misc_feature (1)..(1): n is a, c, g, or t
naattctggaatttctctggtctttgactgcaaattctgctttcagatcttaatggttgtcctaattattatcagaagggaggtatttacctaatggtagtcacacaaatctctagtgataaggaatctgcctgccaatgcagaagatgcaagagactcggtttctatccctggttgaggaagatgccctggagtaggaaatggcaacccactccagtattcttgcctggaaaattccatggacagaggagcctggcagactacagtccatgacgtcacaaataaatggacatgactgaatgtgcacacaacacacacacacacacattcacacaaaggattgaagacagtagtttgatttctagcagtcatttgtctacagaaattcaggttcacttcgatctccagctaccctggacaaggaaagtgttttggcagtcaagaagagaatctgtgaccgtgtctctctcttagcgcttatgcttccctgttggcagaatcgtatcgccaagcgcagccggaagctggtggactacgacagtgcccgccatcatctggaagctttgcagagttccaagaggaaggatgagagtcgcatctctaaggtaggggccaattccactgttgtcaccagtctctgtactctatgacctgtagcaactttgcttttgaaatgaaatctctcttttctcatggagattggaatcaggacggaatttaaaaattgaaatatgggtcttgctggatgctgtctataattttgtaagttacactaagggttttcaggtccttggtagaattcacttgggtggcactgactcacacattttcatcataataaatgtttacccctagcagt

SEQ ID NO: 25659 - DNA, 914 bp, Bovine  19866881089773
  misc_feature (1)..(1): n is a, c, g, or t
ntgtttgaaataaaaagaaagagaaaagttcacctaaactttgtcagccttggtttcatcatccaaaatattaaggtcataatatagtattttggggttgttatatggtttaaatcaaacaacatatatggaagtacctaacaatttaggacactataaacacacaaaaagagattccactgttgaagatcttagtttattaggaagtaagaataattgtatgtcttttatgagtgttctattcatcaaacaaagccatctaacttcaatcttgctttactcaaactgtagtccagaaacgagtcttaacatcaaattgatgttcttatgcacgagccagattgcagatcaacagaaatcagagtaacttggctactgtacatttattatggtccatggtgttaggtttttaagatttggatttttttatatatcacttggagtagaattttgtgattaaagatggggtgaggctagagcacacagacttacttgcattctacataatgaatgtatttcttgccattggaaaatgcctctcaccaactttcattgcagcctagcacgttacgtgccaggcctgaagggagtgtgtacccatgccccttgcattggcaggcagattcctatccactgctccaccagggacgtcctccccttagttagagaactataaatgtgatttggcctatttttcagtcctcaaaagaattgcactgaaatgctgagctcctgtaataaaatcatcattgctaaaaatatttaagaaaggaagctatttttggtgtggaattctgttttctgtctatagattaatttttctgcatttctatggattatttctacaaagtacttttctcagctttgtctcatttaatctccctcaacaatccttagagttctggctctgccat

SEQ ID NO: 25660 - DNA, 1252 bp, Bovine  19866881114919
  misc_feature (1)..(1): n is a, c, g, or t
ngggccatgcccatgcagatcctagcccaggggtgtctgctctgacggcactgctggtccccaccaccagtgtgtgcatgtgtactcggtcacttcagttgtgtccatctctttgtgaccctatggactgtagcccagcagggtcctctgtccacgggattccacaggcaagaatactagaatgggttaccatgccctcctccaggagatcttcccgacccaaggatagaatccgagtctcctgcatctcctgcactgcaggtgtattctttactactgagccacgggggaagccccaccccccacatacacaaccagagaacgacctaaaaaatttcaaggaaggtgctcagaagtgcagggaccccttgagaggcagggctaggggagcagggttccttcttgcttattttcctgtcaattggcagtgaggaagaaaagatggcttgtttgaggatttttttcacagcagataccccaactatttggcctaaatctattctcagcgtattttctctctttgatatagctttcccatttacaaatccagaaggattatcttctgaacattctagcttattcctccaagccctcctgtcaccctgctgtgctaaaaagcaagacatcagcacaggctttaagttgtgtgactgttgggatcaagtcagtgctatgtatttatttatttacgtaaggctgcatcttacattttaagttcatgaaatcttcctatcttgcctagtaaatcaaatcaaaataaaattttcagcttgcaaaatacattcacaagatggctctttttcacctgtctgatggggccagcctgaaattatttacatgtgcgccactcacttcctgggtatctgtaacctgcttttaaataccacgctggctattcagttcaatatagcaaatttctggaccagctgcttcttctttcagtggctatttatttcaaagtaaacacattaacattctttgaggacaaggaatgaataagatgaaaattggaggaaaaaatcggtgcctttcaacaccagagtcagtcagtatgggttgaagtttatttctttacatatggcggtacagtagttgaagaatctagctttattctacttaattgcctttgtacctttgtggaaaatgagttgtccatctgtgtatggttctgtctctgggctctgtggttttcctttgatccttttacctacctttgtgctaggaccgcactatcttgatgactgcctcttta

SEQ ID NO: 25661 - DNA, 961 bp, Bovine  19866881124026
  misc_feature (1)..(1): n is a, c, g, or t
nggaaaaaaatcaatcctcattacctttttgtgaaaaaatcttttggtgatgattaagaactttcgaaattgtggaagcagctactcaattgaaactattttattacaatagtgagaaactgatcaacaaagcaagtaacacaggcgtatttaatggataacaccacctacgaaacacagcatatccaggcaacaggctgtagttaaagcaacaaaaatttcgttataacgaactaactcagaatcttctgtctctgagtaatgttgaatgaagtgtatccggaaggcatgatggggtataaaacaaaccactattatgaggaggaagaagaagctcttgatttgagctctgtactcttgatgggtccacatgtctggccaaagagcctttaccagttgaacaatgacccacatctgtatcagaaagagggtcacaactgttgtcatcataatgacaatcatagagtagttcaagataataaactccttgcgtttgaggtctttgtagaactcaaaacactgttgttctgagtaacttggattggtgccatattgtaaaaaaaatattggcaaaaaaattgcactgcccaccagccaaataataatgcttaaaaccaccacatggtacttttggaactgagtttggagtttcttaaaatacacgagcaatcgacttatgatgatggccacatagaaaacaaaggtgaaatacatatgaccatatattatgccgctaaccaatcggcaggtgaaggatccaaactcccagacaactaagacataatagctgaggcggaagggaaggctgaacaggaggatggagtgtagcacgatgatattgagaacaatcgtggcgacgattgattggctgttccttttgagcatcatataagacatcgcaatggcccctgcagcgcctcccagcaaaaccacactgtacagtatatagaatcactctgca

SEQ ID NO: 25662 - DNA, 1158 bp, Bovine  19866881388902
  misc_feature (1)..(1): n is a, c, g, or t
ntgtgtgcttatatacacatatatgtttacacacacacacatatatatgtatatacatgattgtgttattttggtcttgatcctcctgttaaaatcatatttttttttgccacaatttggtttcaagggacataataccttttcaatcttccttttaaaaatgtttaccaaatatccacttccttagagtatctggttgggggagaatgagagattacttgagaaactctgatttaaagaaagtaaatagggattttgtcacggaagttctcagagcctgaacatttttgctttttcactgtgaaaaagcaaaaggagatgcagccctccaagcctccaatgaccaaggggatctcaggggactagatggaaaatgccgttttcaaagaataatgcaggtgtgcgcagactcacacacacacacacaaaggatgtcttttttaacttaagtcactaggagttaaaaatagggagaggtgggtatgtcctgtggcaggtccatttctgtaaacacagaaccaaaaaaaccaaaatcagccttgtggtctagacaagcaggcaagtccctgtacacaaatatggctatttccagggaagattttaggaaatatacatatttccagaatccacatgctacagttaaggtttaggccattagagggctctgtagacctgatggatttctgtttccaaccccaggacacactcaagagagaattatcactctgatgaagcagggtgtatgaaatacatccattagagacaagggatgtttcattcattacatcttgaacttctgggtgggattcatacaaatgcttttcctccccattaagcaaatgataaaaatagcaaactgaggacgcaaacctatttgttaaatctaaaatgacttattaaacatttaaaaatattaaaataaaacatatatataaatatatatagtatatatatgaaggaatatatatactatatatatatatatattaaatatatgtatataaaggaaatggtaacccactcaagtagtcttgcctgggaaatcccatggatggaggagcctggtaggctaaggtccttgggatcgcatacagttggacacaactaagcgactaacacacacacacacacacacacacaatgaatcactttgctgta

SEQ ID NO: 25663 - DNA, 1110 bp, Bovine  19866881913193
  misc_feature (1)..(1): n is a, c, g, or t
ntctaattctgatgccccaccatggatattctagattcctcctgttcattttttgtaactcccttttcagaccatgagaaaactggctccctttattcaattgcagtaggtatcaggcataactatgctacccgctccctacttgaatgtcttcctgttgggctctgcactccaggccaggccatgcagagacctaccttgcttgaccctgcttaatggctctagactaaactatttaatgaggggaagggaaggtcaggttacattttttcgtatgtttttctttgggatttcttggggctaacatcgttgtaaattctcagaatgtgtctgtgtgctgggggaagtaaattagtatgaaatattcaacaaatttatttgatcctgaaccctgttttgcacgggttgggctttcatttgaggaactcatttcagaatttcaggagaattactcttttgcccttactccctcttccttgatctctgaaggctggagccagtattttcttttattagctcaggaagtctaactgcttgtggcattttgatcctcgaaaaataaaccatgctggatctgtaatactgagtttttctttatgaaagcgattttcttggaagcacgtaaagtttgctttaagaatcttaattctgtgggtctgttgaccctgaatttcagaggattgatgctgggatgtggaaaaaatgggatgcagggatgaggaaaaataaattccaaggaagataagcccaggagattaaaggcactggtggaataggaggctaatttataaatagaagccagaggtggtcgccatactgctttggaaatatctttatttctctccattaaccttgaactgtttcttcctgattctgacctcaaagatggtggtcaagggcaaagtgcccaaagatctgaaaatattccaccaattagtggtttgtttttcctggaataaatgtgataggcttatatttccccaattccagtaaaaagtcttctattttccccctttagtaatttattttattttacccagctttcaagaaaaaacatcttctcttgatcttcttactaactgaaactgcattctctccatctatttaaag

SEQ ID NO: 25664 - DNA, 1329 bp, Bovine  19866880536874
  misc_feature (1)..(1): n is a, c, g, or t
naagagatgggggtctttatcttgacagttggttttctttgccaggctcacccagtaacaatctgggaacaggcactaagcacactgtttcactggcagggttgttatgtccactgaagatccgaagggctgcacccctgcacaagaactttcttgcatggggttgtgtgtgtgtttagggtgtgggaacaccaacactatatgttgtgggaattgccaggaatatctcatatagtccaacctagcaaatatccaatagatttttttttttccattggttctcctgtttgttgtgacgctcatgttcatgaagtctaaagtcaggtttatattttaagttgttaaaaatttttgtcaattgatttgtgttaactcccttttacctctcacctgtccctgcacttagggagtaacaagaacagtgccaggcttattgctgtgtgttaaagaatttactgatttgttttactacaagatctatgatatgcgtccttccgtcacaaacaatagaaacccgcagctccactgagggatgaaagtattcagaagtttctctgtaaagaaacacaatcagctttccagcaaggatagtttccttttcatctagaaatttacatatttatacaaaacctgcagacatttttatctttgcagacattatctctcttttgactccatccaggtttccggtgagatagtccctaataaagtagggaaattagacttttatatgcacttcttgctgtaagtgtgaaaatgcattaaaaggagtggtttgttgtcctcagtaatctcatttggctccagcataattctttgagataatacccttgctagctggttgtattccatgtgtgtatagaccatattatgtttccctaatctaaattatgcaaagaaccagacccttactttccaccatattgtatagacacttatttttactaaattgacatcaacatttcatcatctttgaagtcttgattctgttttcagcttaaaatttttccctcaggttttaaagtctacttcttcctaaaacattttttgaacttgatcatatttacatattatatggctaattctggagaaggaaatggcaacccactccagtattcttgcctggaaaatcccatggatggaggagcctggtaggctacagtccatgggatcgcaaagagtcatacatgactgaatgactttctttctttcttttatggctaattttgctgcacattattttattcttccttctccaacattctctcatcattgttacactttattttttttaacttgattctcacagtagttcagggggttcagaca

SEQ ID NO: 25665 - DNA, 3170 bp, Bovine  19866880544870
  misc_feature (1)..(1): n is a, c, g, or t
nggatgatccataatggaaaagaatgttttaaaaagagaatgtaggctatttcgtggacgtcaggtgtgcgggcgcatctgggaacgcgggcgggaggggaccgggaagacctagcctaagttctgtggatttgaacctccgcatttctaacctaagatctcaaaacgcatcgtgattcctgtcgattggactgtaaattttatgtagataatcttggaaacaatggtaacaagactgaattggaacgagcttttggctattatggaccactccgaagtgtgtgggttgctagaaaccgtcctggctttgcttttgttgaatctgaagacccccccagatgcagctgatgctgtcccagagctagacgggagagaacactgtgtggctgccgagaagggtggaactatccaacggtgaaaagggaagtcgaaatcgtggcgcacctccttcttggggtcgtggcccttgagatgattatcggaggaggagtcctccacctccacgcagatctccaagactgagaagcttctcccgcaggcggagcaggtccctttctagagataggagaagagaaagaacactgtcccgggagagaagtcacaagccatgctgatctttctctaggtctcacagcagatctaggtcaaatgaaaggaaatagaagatcagtttgcaagaggagtggtgtacaggaaataacttcatttgacaggagtatgtacagaaaattcaagttttgtttgagactgcataagcttggtgcattttaaaaatgttttagccgttcacatttgtttgtctgttggaacagtgacacacaaggtgtagttctctatggtttgaaatgggtcatatgaggcatgtaatatcacaaattgttactttaaaatgttcccttaaacaaaatttaatttgctttgaattttagtcttgcataggctgataataaacctctaactcctgcccaggtaaagtcgatgtttaacattatggaaacaaaaactggcaaaaattggaagatttttttcaacatagctgggatatggtatgcagctgtagttaagcggtttttaaaagctgctgtgaactcaaaagctggagaaattaaagctgcacccttaaactggattagaggtttaaaaattccactagtcttcacactggacaaaaggttgtccagttggtgtagaatctaagaagtttcaaggaagttagtttacctttgctttaggttgtaagttccttctgtgattgctgtataagaatacatagctctttgtagcattctttatttggacatttgagactactcaaaataccatatgtcctgccagtttaagggtgcattgtagagctgaactgagttacagtgcaagattcttttttcatgctgtcatttgtaataagttttgtgagaatccttgggattaaagttttggttacaaaaaaaaaaaagaaagagagagaatgtatatatgtgtaaaactgagtcactctactgagttttgctcaatgctgcaaatcaactatgtgtcaacaaaaaagggaaaaaaaataaggtggttccactgtgaacctgtaagattaacagagaagaaaagtctggcaataccaagaatgtcaagcacataggaaaacaaactctcaagtacagctggtgggagtataactttgtataatcattttggagagcatctggcaatgtttagtataattaaagaggcacatacactgcttcccaggaatttcacttctagatatatactctgaagaaattatcaccaatgtgtacaaggaaacatgttcaggatgtatacaagattattttctgtaatagcaaaaaaaattgtactaaatgtagaagaaatgaatgaataatatatgtgtatatatgtgtgtataataaaatatatatcatctttaaacacaaataaaacactaaaaaataaatcaagggatttccctaatgatccagtgattaagaatctgccttccaatgcaggagacacaggtttgatccctggtccgagagttaagagcccacatacttcgaggcaactaagtctgactgctggaaatagaagcctgcaccccaaagaaaggtcctacatgccacaactaagacctgatgcagataaataaataaatgttaaaaataaagtaaaagctagaaatgattaagtgtagtatggaaggaacgtagaaagccaagacaggccaaaagtgaagcctcttgcattgaccacttagccacgctgtgaatgcaaaggaaaagttcttgaaggaaattagtcatgtgtgtgtgtgtgtgtgttttccttcactcttttagagaggtgtctgggcatgcctctgtgatacgttacttcagtcgtgtctgactctttacaacccctacagaccatagcccgccaggctcttctgtccatcggattctccaggcaagaatgctggagtgagttactatgtcctcctccagggaatcttcctgatccaagaatgaaacctgcgtcttatctgtctcctgcattggcaggtgggttctttaccactagcaccagctgggaagcccgatgtggtgtattacattgattaattattaattgattttcgtacgttgaactatccttacattctaggaataaatcccacttggtcatcgtgtttaatctttatcgtatgctgctgaattctatttgcttgtatcttattgaggatttttgcatcaatactcatcaaggacattgatctgtagtttcctttcatgctggtctttggctttggtaattctgacctcctatattgagtcagaaagtgttccatcctcttcactttcttggaagattttgagaaggagtggtattagttcatctttaaatgtttggtagtgaagccatggtccagggcttgctttgtcagatttttgattactgattcaatctcatcactagttagttctcaagtttcaaccttggttttgtgttttgtgttttgtgtttctaaataaatagagtttatccatttcagctaagtaatctaatttgttgatctataattgttcatagcactctcataatctttttattcctatataattggtaataatgatcccatttttatttatattgggttatgtattctctgtctctttttttcctttgtcaaccta

SEQ ID NO: 25666 - DNA, 2593 bp, Bovine  19866880560678
  misc_feature (1)..(1): n is a, c, g, or t
ngctccaaaatcactgtggacagtgggcgcagccgtgacaataaaagacttgcttcttggaagaaaaactatgacaacctagatagcatattaaaaagcagagacatcactttgccaaaaattgtccatataatcaaagctatggtttttccagtagtcatgtacagatgtaagatgtgaacactaaaaaaggctgagcactgaagttttgatgccctggaactgtggtgctggagaagactcttgagagtcccttggacagcaaggatatcaagccagtcaattctaaaagaaatcaaccccgtatgttcattggaaaggctgattctgaagctccaatgctttggccacctgatgtgaaaagccaactcattggaaaagaccctgatgctgggaaagattgaagacaggaggagaagggggcgacagaagatgagatggttggatggcatcactgactcaatggatatgagttcgagcaaactctgggaaatagtgaagggcagggaagtctggtgtgctgcagtctatagggtcacaaagagtaggacaccactgcataactgaacaacaaccctctactgcccccccaaggaaaacatttagcagcaaacataaataccaaaatcctgagtcagttgaacctgactctgagggaccccatgaaacacagccctccaagctcctctgttcatgggattctctaggcaagaatgatggagtaggttgccctcctccatgggatcttcccaacccaggggtcaaaccagtgtctcttatgtctcttgcattggcagacaggttctttaccactatgggccacctgggaagccaaaatgtcttattacatactattattttttaacctgtgtcttacgaggtaatagataatgaaattacagtatatctactcccagtcaacataactccttggaaagactgtttatgcgccctgtgtaaaagttagtccattgtttcaatgttttaagaaactatagtcacagaaagagtattgcctggtaaatgtttatttaaaatatgcccccaaactgggctggaactctgaaatgttagatttccttcagaaatgtttacccagattcacaaatctttcagactgtggctgtacagaattgctgagtcaattcatttcttcagacgggcttctctgatacctttttattctgttccaacaaaaatgttttcaatagcaaggaaatttttccctgagagaccatttctacacactgaaaagtttatttcaataattctgcctttttggaactaaataaactttgaaactgaagaagaaaaagagtaacttaaacacttgtgtagctttaactgcatatcatcaatttcctttctaaacagttacctttgtggggtctcccacactatcaactctcaccactataaaaggctgataacagcacagtaattaaaatacagctgagaaaagaagatatttaaactaatttgcatctctgctggagttgtgtgatttccagtgtacacttactgctttgagatgttgggaggaatatagtacaggttttcaaatcaaacaggcagattcaaatcctagctctgacggtcattagccatgtgcccttgggatgttcatttccagtagtcttgagcaaactggaggggggaatggcaacccacttcagtattcttgcctggagaatcccatggacagaggagcctggtgggctacagtccatggggtcacaaggagtcggacatgactgaacaactaacagtgtgcaaataagggtaaggaatacctatatactagctagtattgttgtgaaagttaaattagatctttaaaatatctaatatcctttattagacataaagcttatgtcacatggggacacttaatactgacatttcgtctttccttttgggatgaataactgtggggggtgtgatgaaaggaatcaaaatcactttcaaaatattcatcatatgattttggattcacattcttttttggaaaacaatgttgggtagttcatacagatggttccagggaaggcagggtaccatctatgtctttattttttggtagaaatcatatgactaagaaataaacagcactttcagagagagatttgaaattaaatgaaggatgggtgaatgtcatcacattgcagtatttaattttttaaaaatttcaagagcatgttcgcacacaatgccgctcacatcattatgtgcctgcagtgacatggttatttaaggtggggccagattcactgcagggtgtggcatatagatatcaatacatggcaaacatggcttgagtaattttagcctccaggtttctcagtcatctgacaggctttctgatagaacgctgtgggtgcagggtgttaacaccaaaagctaagaaaaaaaagacaaacataggggtattgcactgttggtctcttaccagtgcatggagcctccacaagtttgagattcattcaacaaatactggttaagtactaatttggtgccagtctctgtatggttactaactagaatacagcagtcaacacaactgatactgttctgacctcatggagcgtgcagt

SEQ ID NO: 25667 - DNA, 1773 bp, Bovine  19866880563067
  misc_feature (1)..(1): n is a, c, g, or t
naatttgtgttcttggttccattattaccaaggtcctcttattagattctagtatccctatgcaacttatattttaactggatcacctacaccttaaagcttagttaatggacttgaaccctaattccactatttgtgcccaattcaaaaaacttcccaagatttccgttaatgactagggattgggaggtggaggtgaaatgtgaaagtggcttaggttttcttggtcatctctgacttctgctgagttaattctgttcattttttcagtttcaaacacggcacttgtgttcatgacaagttctactgacaatttgaagaattcagaatagaatttgcaattttaaaatgggaacaaatttttagtattaaacttctgatcactccacttcaggaattttttccactggccctgttcttcctgtcaatgattcctttctttttctacctcatgtcccccttctcaacttctcctatccagaaaaactcaaattatcaccagaacactgctttgaaattcaacccaaagcccatttttgcatattctgatcatataaggattcaatagaaataaattaatttatagtgtccactttccttaggcagcagctgtagatagcaatttccccccataattcctataattaattaacctttttatttgtgctaggctaatcttaagggttccaaatgcataatgcactggtaaagatcagtaaaatatgcagattagtaaaataccttatttatatgacattctaagtgaaactttactttcaacacattttgttcccctgaaagggaaggccaatctggattagtaaaattactgttttatataatatttttattaaatatctttaccttcaaatatataggccatttccagccaggttaatatatgattggcaaccagaggtctttggggacatgctttcattaacaagcataataaatgttgaagtagatagaagtgacataattaaattgtgtgcttctagaaggctttaaaagagttaggctttttgcagtattattcactaactactcatttagtggataaatctttttttcatagtgaatataaaagtaaaattagtcttaaattatcatattacctaaacaatattggtggagacaagaaaacatatatcctaggtatctaatcattagtgtttctccatgtggattcctcaaacaagtaatatgtttctaatttgaatatttccaaaatctctcttatcttcttttttttaaatactcaaattgcctgattaatatctcctatgtaaaatatcttagcaggattcaatccttttcacagaaatcagaaattaaatatataaaaaggcaaacagcaagcacatacttgaaatcaataagataatgacttaatcagtacaaatgagtgcatttccccttgaggccctttttcttgctatgtgtgtctacctttccctcatagagttgaagaacatctccagcaagggcaacctttgaagtttccaattcctgaatgtattgttacaatcagaaacagatttaaaaactcaaaacaaagaaacagatattttatgagagctctagcagacatgaggactgtggcctgcagatccttcttcaaaagagactcactgctcagctgtgaggagagtagttagctgataacctccagctgttagctccttcaaggtctgccttagcttttagtccaaggtcagacttttacattggctcccagccaaaggctgattaaacctaagtaaaggacta

SEQ ID NO: 25668 - DNA, 2111 bp, Bovine  19866880659302
  misc_feature (1)..(1): n is a, c, g, or t
natctactcagaagcagctgtattaatgcatttataaaatgtagaatattatagaaagacattttgaatctaaaatggtttagtgtttctcaaacttttgaccataagccacagtgagaaatgtattttaaagctggaccagtacacaccagaccctatgcatttgcatgtctctgtaaatggataccaacttatatatttactacatacaagctgtgcaatccggtgtttcctattctgtttttttttaaatgggttgaaatttgcagttagaaaaacattggtatgatatgcagcgtttgttttaatgctgtgactttttgtttacttttcctatttagttttctgtaaaatgcaaagcaatcaaaagttgtttctatacctgcactgtaatacatcatggggcccacacatcaaaaactgtgttgggtctacacagtcaggatcccttggaaggcaaacaaagggattaccatcttcaaaaggcaggtattaaccctcttttaggcacttggagaacaaaggcctaaggttgtggggacttgcctgattagaataggatccactgatgaaagtggagtttaggattcctgaattgagcctcaggtggtgtgagttgtattgattttagtcataaatatacatgaggtctttgcgcattccctaggcttccacagggcctcaagaaatggatttaatccaaaaacaatatgaagagactatttcttttaaatacagagttcaagatccgcagggacagtctatggaaatgactgcttttttttctttaaacaggtatcaaaagtaacactatattacagctgaattgtaacaggaatgcttcgctgtcaaaccaaaagtaagtttcccctgcagatttaactcataacaaacagtacacattctcatcgtgtgtgtgctaagtcacctcagtcgtgtccaactctttgccaccccatggactgtagcccgcaaggctcctctctccatcggattctccagacaagaatactggagtgggtcaccctgccctcaggggatcttccagacccagcaatccaaccctcatctcttatgtctcctgcattggcaggtgggttctttaccactagcgccccctgggaagcattagtctgtgcaactgttatgctgtgaatataattttttaaaaagcaatagaggtaattcaaatgctagtattaagctgaaatcgaatgaatgaaatctaaaaaaaatacaaagcctattttgcttttagtttggtgaaagattagaaatatcattgatttgattttgtatcaagtttgatattattaatacagttcacaaagatatggtaaaatcctgtatttgtgaacttttaaacaggctttagaggactgatgattttaatgacagagttacagaaacataacatgacttactttttttcctcatgctgctgctagggaattgtcaattatgcttccaaatttataaactgaaataaagatttatcatagaataaaaatgcttagctagtttgtaaatagggccttgtatagccaataagttgtgtaccctgtaacattggcaggtgacatttaggaccctggttcacagaattacaagaggggtagggggtcaatgaatctgtcacatgcttgtttgtgccaggcccactgttaggtctgttgtattcaacagcctatacagtatttgtaataaccctatgatgtagcacaaggcatttgatagaagggaacccaggaactgaggtgttgagtacaaaaaagaaacccaacccatggtcacgttgccaataaaaagtgataaattgacatttactccattgtcacactgccccccacaccagcgtgtttagtgtcatccttggggacagcgaaggaaagggaagagtaaggagactggaatattgtaagtcaaagtggatttctttgtgtagtaacattttatcctattgagaattctgacggggagttaccaaaatcagatgggaatgggttgttgtataaagtgacatttatggatgcctttaaaggatgttaaaaacttttttgctccacaaatcccccagaaaggggtctaggtttccatattggaagttggat

SEQ ID NO: 25669 - DNA, 2538 bp, Bovine  19866880738029
  misc_feature (1)..(1): n is a, c, g, or t
nttcactttttagtcatgttgtcaatatgcaaagtataattagtaatacacattccatttactctgcagagatcatatcaccttttgttactgtaatatatcttgtgccctgattaattatttttatttgctcatcctacaatacggttgggactttgaaagcagtcagtctttgtcaaaagaattttgaaaaaagtcaagtatcatactaactgaattggttgcttacaatttaaaaaatatctaggaggactactaagtgtcagaatttgggccaggagttttcacttattttgactaattttaccatcataatacctttcagataattgatgttaattcctgtgaagaaatccaaactcaaaaaggtaattttattaccataataaatgacattatctggatttattggcaaatctttaagtcttgtgtacttgccatgattttataacaattcacaatagattgaaaatataaaatactgcagttataattcaaaatagattgaaaatataaactaattactgcgagctttatatctttagaggagataggtatttaagtttctgagggaaagaacaaaactttttacttgaatgtccttgaaagagaataatagggaaaaaacttgttctataatctaatgaatattttatagatgaaaacctttacattttgcagaatatgaatcaagccaacaggaccacatgagacttccgagagcaggagtcaagagaatgcagtaaagtatgacaaggtaaaatggcaaaccttcatatgaccatgagggtgagagagtcatcatcagggtaggtgagtggttgaattgtcatagctggctgaattacaaaataagcatcatttgtaaagccatgatgatttccctgacatagctaggccagggtgtcctcactcatgagagataattagtagttgcagatgacagacttggatcttgttttccccaagatgcttcagaatggtgtgtggagctcccagtgaattcagagaaaatgtgattctcaattaaatacctttgcaatattttcctgtaatttatcacaatggcttacagaaataattaattgcaaatataactacatacctgtctatggcaatataagaaagtaaggattttccaaaactactgaatgatgtataaattatacatatcaagtttcttcagatatcctggttcaagggcccttgctgttactttgtaggcatcaaccaccatctcttcagcaggaacctacttgaactctccctgctgaaatatatttgcagctctaatggatattttcttcagttcacttctggaaagaaactgaaaagctgatgaaaagtatatcattttcaatttttaaaatggcttttagttccatgctaataaattataagtccatagttcataagttttggtttaagcacataattcttaattttgtttactgtctcaagagtcttagcataaaatgctactttcatcattctagactcttaagaaaaattacctgtcagcttaaattaaagatagtttttaaaaatatgtattttaagaaaagcctctcattccaaagtgctaaacaaaccaccaccctttgtgttgctgcagctgctaagttgcttcagtcgtgtccgactctgtgcgaccccatagacggtagcccaccaggcttccccgtccctgggattctccaggtaagaacactggagtgggtttccatttccttctccaatgcatgaaagtgaaaagtaaaagtgaagtcgctcagtcgtgtccgactcttcgcgaccccgtgaactgcagcctaccaggctcctccgtccatgggattttctaggcaaaagtactggagtggggtgccattgcaaaaaaaacaagtaattaagagtatatatctctatttagtgattacatattgctacatgaaaaattttgttataagcagtgttatcattaaaaatcatggaaaacacttataagagggcatggtggtatagtgaaatgtgcagaatctaggccatggatcattctagaataatttttgttaatatctggttatgggcttcaatgtgtcatttaatctgtatctttttttgggggggatgtatccattattccccaaaaccctcctcctatccagcctggcacataacattgagcagaatttcatgtgctatacaataggtctttgttttttacccattttaaatatagcgatgtgtacatgaccttcctatagttcctaactatcccttcccccaccagccccatctccagcaactataaattcattttctaagtcagggaaaatactctttctgttaagtataagttcatttgtatcatttcttttcaaattccatatataagggatatcatatgatatttctcctgttctgtctgactgatttcacttagtgtgacactctctaggtccatacatgttgcttcaaatggcattgtttcattcttttcaatgcctgagtaaaattccatagtatatatgtaccacatcttctttatccattcct

SEQ ID NO: 25670 - DNA, 887 bp, Bovine  19866880782278
  misc_feature (1)..(1): n is a, c, g, or t
ncaaaacctgattaaggtgctttgggttgagccaagcatttttagtgatctttgtaaacaaataagcacaagattaaccaaggctgggaagtagggaacatgtgcagtgtatgactctaactgataacaatagcaccaaggctgtggccatggactcctgagccaggctgctcgagctcaagccctgggccccagtacttgctgtatgacccaagatattgatttaatttttttgcacatcagtctgttcatctataaaatgaggatagtaaatacaccttttgtagggttgttctgaggatacattagttaagacatgtaaagttcttagcactacacctggtacatagcaagcatgagagagggaaagggaggagaaaagggaggaagaaaaaccattgacttaggagaaaaattaaacactcccttcgagtgagcagatatttgggcctaaggcgtcatttctttttccaagtaatacctgaattatgactgttacgatgacagaatccaggcttcccgtagatggtgcagccagccagcagaagccaattaatctccaccaccgcaggcaaaaagctcgggctgctcactgagacctgcttccatctcctgaagcatctgccctgcttgtgtttgcagggggtcaggatttcagtgagcctatgtcttccccagtgatgttgctattttgggaattttatagattggcactaaaaagaaaagaactgtgcaggcccacagtggttggtgtgtttgtttttgtcttgttttagagctggaagaaaccttgaagccccaggagccaaatgcctctcatttaacactaggagatcctggggtgagagggctttggtgtcccgacctcagcagtaaggagactcaga

SEQ ID NO: 25671 - DNA, 1684 bp, Bovine  19866880938518
  misc_feature (1)..(1): n is a, c, g, or t
ntttgcttttgctccatcttttcattctttctggagttatttcttcactgatctccagtagcatattgggcacctactgacctggggagttcatctttcagcgttctatcttttttccttttcatactgttcatggggttctcaaggcaagaatactgaagtggtttgccattcccttctccagtagaccatgtcttgtcagaactcttcaccatgacccgtccatcttaggtggccctacatggatggctcatagtttcactgagttagacaacactgtggtccatgtgatcagtttggttagttttctgtgattgtggttttcattctgtctgcccactgatgggtaagcttaagaggcttatggaagcttcctgatgggagagattgattgagggggaaaaatgggtcttgttctgatgggcagggccatgcttagtaaatctttaatctagttttctgttgattggagctgtgttccctccctgttgtttgacctgaggccaaactatggtggaggtaatgaagatgatggcgacctccttcaaaacgtcctgtgcacacactgctgtactcagtgccccaaccatgcagcaggccactgccgacccatccctctgccggagactctggacactcacgggcaagtgtgggtcagtctcctgtagggtcactgctcctttctcctggatcctggtacacacaaggttttgtttgtgtcctccaagagtctatttcccagtcctgtgtaagttctggcggctctatggtggggttaatggcgacctcctccaagagggcttaagccatacccaggtctgctgcacccagagcccctgcccctgcaacaggccactgctgacccatacctccacaggagacactcaaacacagttatgggtcagtctctgtggggtctctgggtcctggtgcgcacaaggtttgtttgagccctccgagcatctctggtgggtatggggtttgattctaaacatgatttcgcccctcctaccatcttgctggggcttcttctttgcccttggacatggggtatctcttcacagtcgctccagcaccacacagtcgccactccagcaccaggcagctgccgctctgtggcagctgtgattctatggtaaataagtttcacagtgttcaaatagatgctgtgtgatgaccttaacaatggattccctagttgctgcactcagttctaatttcctcccaaggatcaaggttgaataagtgaaagccatccgggattttcactttatagagaacagacagtttagataccaacctctcacactttgtagtaaagattttacggctgtatatacagagagttccaggcaatcctaaaggtttctctggcccatgcctctgtgcagaggtaagtttttacctccagcagggttttcattatatctggtgttggcttaggtttcctcaatggctcattggtaaagaatgcacctgcagtgcagaagatacaggatatatggattcaccccctgggtcaggaagatcccctggagtaggaaatggcaaccccctccagtatgcttgcctgggaaatcccatggacagaagagcctggtgggccacagtccatagggtcacatggagttggacatgactgaacacgcacacaggctgggtaatgttactcagacccaatcat

SEQ ID NO: 25672 - DNA, 1515 bp, Bovine  19866880995111
  misc_feature (1)..(1): n is a, c, g, or t
ncttgtcttatttatgcctgcagggaaacccagatacaaacttttcccactgatgtgctaggactcagcactgcccacactacacaactccagggaactctatctggtgttcccagtggctccgctgggaaagaagccgatgcagaagactcaagagacacgggtttgatccctgggcaggaagatccccaaaaggaaatggcaaccggctccagtattcttgcctaggaaattctatggacagagaagccgggcaggcgatagtctgtgtgatcgcaaagagtcagtgactaagcgcacgctcacgcacacacacacgcacacacacacacacgtaaatggaagccctatactctacagaagctgtgaaggccaaataagattttaaaacactggtcgtaatttaaaatgcaggagagttgttattagaagacgtgtttgacctgaagcaagtgattaatcttcagtaaatctctttttgacactatcaagtgggaatgaacatttcaacacttacttcagagagttgttatgaggattaaatgagattaacatgcacaagtgcctcaaatactaaaagagacaggcaatgagtattatgaccttgagttagcttccagtcctcgggttcaagtatcctttcagctgggcatctgcagcctcaccattaagaaataacaccagcccttggttgagtcagatcatggtggaacttctgtgctatgtgcacacatatttctgagctcttattgaggaaatacctgcaaggctaaggcatggaaggagtttttctatccctcattcccacctttttttaataagtgaaaatttcccctgtcagaacacatcaagataccatggtgacaattgctagaagaatgctagatttagaaagaaataaggtgatctcaattctgttgcctgctacccaggctcaacaccctaagccgaactcatgctggctagatgcctgaaagtaaccacttgccccaaatatcttgaccattctctgctctagaagatagaattcccactttccaaggtctttcaaggtatgagcatagaattaggtcacagccttatctgggacaaagataaattgggacaacattaacagagcttaaaatttaaaaaaaacaaaaattgaactactcacttgactctagatcacaggtcattaaatcaaatgattgcaagggctaagggctatgtaaggtatctgaataaggatgtccacgtgtgcaacccagtagagaaggacagggatttgaacacgtccaactgtaaaagggaaaagattccttgaattgagtcaagaaacacaaacctagtgatatcagagcttctaatttttcaagacaaggaagaaattaaatgtttatatgaaatttcccaattttaaaaatgtatctgcaagtcagatctagccatggctgtcagtgtcctgaatgatgaatgccctgaatccaggaatcatctccctttgaccttaaagtatggaaaaatggaagcgtg

SEQ ID NO: 25673 - DNA, 846 bp, Bovine  19866881032883
  misc_feature (1)..(1): n is a, c, g, or t
ncaggaatatatacatacacacacacatatatatgtgtgtctatatttacatgtgaaacttcacacacacatatatatatgtgtgtgtatgtattcatatatgaagagggaaagagagaaagcagctttaacatccaaaacaaaattgtcttctctagagtgctaaaattctccctgaattgctattcataccactattgtgtttatagatttcttctttcaaacaacactcttgggaagtactatcaaaccattaacaccttgtctggaatgagcttctaagatcactgaagaagaaccctctggagaggctaaatagagctcgatatttaaccctgacaatcaggaagtaccaattctcctggcttcaggctacccctccaatctcaaggcatagttttagctctgcaagtgtggttagattacactcagtactaatgaagagacttaagaattgcaaagtgccacataaccaatttctagtttctaaaaggagttttaacagcatgtggtcattatgtttttataattcttaaattaattgaaaagtgaacaaacaagatcatgaccatgttttatgtctgcatgtcaatcagttaactgatggattctgaaacagaactaaccattttcttgatttcctcttaatcaagacatttactttctcactgcatcttgttgtatctaatctaatcaacctgctttgcctgtctgtatctaagcctcttaacactttctatgaatcagtgttttaatatattacatatgtcccctcaaatatgcctctgaaattttaaaaggtattatataaggaagcatttgcactgttgcattaaatatacagaa

SEQ ID NO: 25674 - DNA, 1201 bp, Bovine  19866881072157
  misc_feature (1)..(1): n is a, c, g, or t
nctttgtattgggcatccctggtggctcagatggtaaagaatctgcttgcaatgcaggagatccaggttctaccgctgggttgggaagatcccctggagaagggaatggcaacccactccaatactcttgcctggagaatcccgtggacagaggagcctgttgggctacagtccatgagatctcaaagagtcagacacgactgagcaactaacattgtaataatctgcacaaaagatgatgttggcttgggtagggcagtagcgtggagtggggagaagtgataggactgtggatctatttgaaggggtaattggtggtattttcttaaaattggacatagttgtgaaacaaagagaagttgaggttgactgaggattttgtcctaagttactgaggagcccttgtagattaattagaaaatgatgaacagctcggtggaaaaatgcatcatgatgtaattgaacatagaaagtgattttccttaaagtattttttaaagtaaatctttatccaagaaaagtgcacaaattgtaagcatacagctgggtgaatattcacaaagtgtacaaaagacacccatctaaccagcacccagattcagaaacaaaacattacctgcattcattatcattcattcccccttcctaaagtaattctttttcaatttaactctgcatttatgctaaacattttctgcacagcaaatgatgtggatgtagagcgatgggccactgaggaggcgatatctttagaaatcaggagagggaaacttaagaaactcacctgcaaccatgtgacaggaattagtcatctgcttgatctcatgaaattcatactgaaaagttctttcctaataatacaatgtgagaccgacagatagtaaaaatagacatattttctacatagggttcaaaattagaaagttcataggagttgctaaaaaaatttaaaaagaaccctgagttgacaaaaaaagaaacttacataaaaagtaaaattgaatgtactaatgtctaatgatctgtactttcaaagtaaacttttattatctagaaagcttggtaaaggtgaggataaaaataagatttagatgctgaaactaaacattggatttggaatacagaaactatagttttagtttttctcagaagttacatatgaaaaaaatccatgagctaaagtgggtgtgagggacttggg

SEQ ID NO: 25675 - DNA, 809 bp, Bovine  19866881123471
  misc_feature (1)..(1): n is a, c, g, or t
ntggttcccctgcctaggaagatgaaaggccctcttcacttcagccgactcctgcttcttctttccactaatggaaaataacttaaagatgggaaaggaactcaaggctgaccttgagctggcagaatgctcttcctcacaagggcttttctagctctcatgtggcatttattctcatttggaaaagccaccaaatactcaaatgtctttaattaaaatacattttacttgttcatatctagccagtcattatagaatatagaaccaacttatttcatgtcatattcactttataatcaggagtcagatgtctcttcacttgaacttaggcgaagttcaaatcctagctctctcccttgttagctgtgcaatcttgagcaacgtacgctattattcttctgtattttctttttaatcatatagagacagatatatagttagggctcttgataacatgtaatacctccaggattaaaaaccacataaaagttctgtgctatctactagcttgtcaatattggccactgctatggcctgaatatttgtgctcctcccaagttcatatgttgaaatcctaatccccaaagttgatagcattaggaggtgggggcctttgagaggtgatcacattacaaggtcagagtgcttattaatagaattagtgtcctataatagatccctagccccttgtgccatgggacaacacagtgaaagggcagcagtctgcagcctggaagagagccctcaccagaccttgttggcgtgccagtcttggactgctagcctccagaactgtaagaaataaattt

SEQ ID NO: 25676 - DNA, 781 bp, Bovine  19866881305800
  misc_feature (1)..(1): n is a, c, g, or t
nattgaagaatccttgcatccctgggataaagccctcttggtcattaggtatgatctttttaatatgttgttggattctatttgctattttattgaggatttttgcatgtatgttcatccgtgatattggctcatagttttcattttttgtggcatctttgtctggtttgtattagggtgatagtggcctcatagacttgagtttgggaatttaccttcctttgcaattttctggaagagtttgagtcttgagtgttaacttttttctaaaatttctaaaattttggtggaactcacctgtgaagccatctggtcctaggcttttgtttgttggaagattttttattacagtttcaatttctgtgcttatagttggtcattcagatttatgcaaaacaaaaacaaaaaacttctaaaatttataaatacatattttattaagattgtaaattatttaatattagataatagattatattttaaataaatattttaagtaaatatcttctttaggtgttcatttctgaaattgttaaattaataacatttgaagaaaatgatatataattttaatagtcatgtatataattttctaagctttaaagtttttataaaggttatggtaattaaaatggttccctgaatttcatataattataaaacaactcatgcctaattctaaactgcagtaattcagccctagagtgagatttattctgtagctatgaaaggcaatggcatttacatctagagtaaattaaagcaaatgaagaggaaaatt

SEQ ID NO: 25677 - DNA, 1768 bp, Bovine  19866881359588
  misc_feature (1)..(1): n is a, c, g, or t
ncacagtattatacagcagatatctagaatgtacttatcttatacaactaaaaatttatacctggttacatttggttttattcaacttattgaagattttctttctgcacactgtagaaaacctgacttccaaaagttacctggaagaaaatgtaaactttctgggtcccaaatctctagggaaagtatgattctttttgaccagatcatttcatttgcatcagccaactgtcaagtcaaagtgttagtcagtcgtgtccgactctttgtgaccccatggactgtagctttcccaggctcctctgtccatgggatttcccaggcaagaatcctggaatgggttgtcattccattctctaggcgatcttcctgacccagggatcgaacctgggtctcctacattgcaggcagattctttaccacctgagccaccagggaagccaactatggtattgtataatttataatgtatacccgtacaaggattttgctttgagagcaccaggatttcgggatatattatacctatgtttccatagtcatccacttattcttctgatatatgaattagaatgcattcctcaaaatgtaacaggtgttttaatctactggttacaatatattataaacttccttttccaatcataagtcatgtcaacattgaaaaataacatctaccaagagaatttaaggacatggcagcaaattattaatagaacaattgagagtaggggaaggatgcacttgttatagtcatgaatagatgattgatggtggagccaattttttttcatgaaaaatttatgttacactccccaaagactatatggaaagtcttctctgaatgtttacctgtgtattttaagtttaataacagttctagacagctgttacttagtcacatttgtgaaatgatgttgaagacagacatttaagcatgaactcctcaaggacagtccagctttagagactaagaacttcatttattcagagaagcaggcttgaaaatgtgatatatattgactttcagctattatcttttacatttaacagaatatagaatggcactagaggtaaagaaccctccggtcaatgcaggagacataagagacacagccttgatccctgaataggaaagatatcctggagaagggcatggcaacccacttcagtattcttgcctggggaatcccatagaggaggctggaaggccacagtccatagggttgcacagagtcagatacaactgaagtgacttagcatgcacacacgcatagtatgtgtaaatatgtgtttatgaatatatgtgtgaaagtatatacatatataaatgtatttaataggtgatattttgaccttcatcaccaacactatgctcatatgctatgcaaacaataatgttagactggatgttctttttaaactatggttccatggaggaggggcaggcagggaaaccacttccttttatttgaattgttctggagttcattaatttctttctttattcttacagttttgttgtaacatgctgaggtaatgaattaaccctaaaatttcaatgacttagcaatgttttttccttaatcattacatatatccaatgccaattagtaactggggctgggtgaggctttgaattcagagtcactcagggattctggctggcagaggccccattatcttatatcttaatccatgcaatagacaaaacaggttttagaaggccttccagtttccagggctttgcttggtaaagacctgtgta

SEQ ID NO: 25678 - DNA, 758 bp, Bovine  19866881627477
  misc_feature (1)..(1): n is a, c, g, or t
ncccttctcctcctgcccccaatccctcccagcatcagagtcttttccaatgagtcaactcttcccatgaggtggccaaagcactggagtttcagctttagcatcattccttccaaagaacacccaaggctgatctcctttagaatggcccatactcaatcctaaagattattacagtttttcctattttcttcttgcctgctttcatggctcttacttcttcttgtacttaccaaaagtgaaatggtttttgtgcctcctcattccttggagggatgcactttagaattcagtccatctggttgacttgtgatctcatatctctgatgggctcaaggaaagttatgatcttatggattaccctcttgttagcacaggggtgatttctcttgtggctttctaaatcctaattgaaaatagtactcttctctctgtgtattaacatgaaagaaaataatagcatattagtttgatttttgtacttaattttatcccaaatcatattgtctggtataagtagctattgaaataaaatccactaaataatagctattaattattacccaaaacacaacaaatcagtgccaacggttaaaactttaaacctacaaatggaaagtgcaataaattaacagacaagatatcagacaccaattattaatagcttagtgactctattaatcatgttatttcttagtttcagttttcaaatgtcaatataaaaatacgaaccaagaatgtaagtttctcacccctct

SEQ ID NO: 25679 - DNA, 1565 bp, Bovine  19866881644671
  misc_feature (1)..(1): n is a, c, g, or t
ntgaaaatatacagccatgacatactccttttcctatttagaaccagtctgttatccatgtccagttctaactgttgcttcctgacctgcatacagatttctcaagaggcaggtcaggtggtctggtattcccatctctttcagagttttccacggtttcttgtgatccacacagtcaaaggctttggcatagccaataaagcaaaagtagatgtttttcaggaactctcttgcttttgtaatgatccaacagatattggccatttgatgtctggttcctctgcgttttctaaatccagcttgatcatctggaagttcatggttcacgtattgttgaagcctggcttagagaattttgaccattactttactagcatgtgagataactccaattgtgtggtagtttgaacattctttggcattgcgtttctttgggattggaatgaaaactgaccttttccagtcctgtggccactgctgagttttccaaatttgctgatatattgagtgcagcactttcacataatcatctctcaggatttgaaatagctcaactggaattccatcacctccactagctttgtgggtagtgatgcttcctaagtcccacttgacttcacaatcgaggatgtctggctctagttgagtgatcacaccatcatgattatctgggttgtgaaggtcttttttgtatagttcttctgtgtattcttgccacttcttcttaatatcttctgcttctgttaggtccataccatttctatcctttatcgtgcccatctttgcatgatatgttcccttggtatctctaattttcttgaagagatctctagtctttcccattctattgttttcctctatttctttgcattgatcactgttctacagtccatgggttcacaaagagtcggacatgactgagtgactttcattttcaaaataaaggtactatctgtcaaaatggaaaagcccaggggtagagtagattttagaaaatcaaaaaatgtgacatctcccccattttacggtaacattgaaacttaaaaagattgggttcttgttcataggtacactcgccgggcaagagctgcattttcacagcatctgcgcaacgcaccttgcccttaacaaacttctgtgtttgctttgatgttataataccttcagcctctacctatggtcctccagaacattgacatttttccatttggccaaagtaagatttcatattgtgctgttccattagatacgtaagtccccatgaaagttacaaggacactgtagcccaaataaaagcctttgaatcaggacttgcataggaagagaaagctaaactctcaattcacagtgtgggtactgagcctgtggcttgagggatggatagcagtgcttgaattgacaactgtgctgctgagtgcaaatgggctctttatggacccactgggctgcttctgcccaacctttaatctttcctaagctccagaccaggaatcaaaactggtctgcccaggacttgaggcattttgctatgaatttgcagagcactctaaaggtttgaattccaa

SEQ ID NO: 25680 - DNA, 822 bp, Bovine  19866881726802
  misc_feature (1)..(1): n is a, c, g, or t
ncttacacttttaaaatttatttctcagacctttcactttgttcttccttattatgtatgagaaaaaaactaaggcttgaaacaagtgcatttccttccaacaaccgaagaccttccaggattgggtaattgcagtgtattagaatgaaaggctaataaaacccccaatgtaaatattttagtagtttgctaaagaaagaaccctcaaatattatgtagaagacagtttagaatgaggtttaaaaagctccatataaaaacctgtttgacctgttaaaacaggtgcagacaatcacaattccctattaaaagatataatgagaaaaacctgtaaattcaagacaaatgcattggccatgagaactccaaatcaatagatggtgaattattagctacttctagtgttcagagccaaacagaccccagtcactttctgtcagttgacaggaaactggggaatcagtatctatgtaccttcccagggaagggagacttcttggcagaagtttaggatttatccttaatccatcatagttggaccactcatttgccttttgagatatcacttccattaattgtaaaatgatgtagtgcattaagaaatgtagctaaaattttttaagtaaatatgctaatactgacctttaatttcatgtagcaaaatgagttaatgtagcaataatgctaaataattaccttggatcaaaagttaagacacagttcatcaaagtacaaaattgatacagaaagtacagattaaccttccactagtactcccttgttggagaaggcaatggcaccccactccagtactcttgcctg

SEQ ID NO: 25681 - DNA, 866 bp, Bovine  19866881957738
  misc_feature (1)..(1): n is a, c, g, or t
ntctgtgattttgagtattttttttctgagagcttttgaaaattttctggtgggtagttaaatttgtatactataatcagtaaccaatgtcaggagtattctcagttgcctataatgtaaataatgaaaattttttagaagtatcattagtatatcttattttgtgtagcagtttgtcaatgacaatcaaaatttgaatatgtaaaacttttgaaatgatacaacttgctgatgggattttacctattactgttctcaaattcataaagaataaaatatgttagagattgtaacataacttgaatgtctgaaatatatatcattaaaataagaattgtaatgataaaaaaaatcttaaccatgtcttctaaaactttagactatttttatgaccctgatttcctgtaaattttattgtgacttggcaatacttgcagattttataaagtattctgtcttcctttcaaagtttctctcccaccacattgtgttcctatagttcattctctgaagtcacatcaaagacgctaaaatgtgtcacttgcaatttagttaatgttttctttaaaaaccctgtttgttcagtaataaggaaactttgataatgaagacagttaatctaagtgcattttattaggggcatgttaaggttagacattcaatgggtaagtgtttaaactcatgggcatgtcaaagctcctggcaagatccactctgaagggaggcagacaaggaaagaaaatttggaataaaaagatttccaaatatgttggaaacagtgttctctaagaaggcctttgcatctaacgttcttaagtcccataactgtagttaggcaccattcagatcttggacataacctcaag

SEQ ID NO: 25682 - DNA, 1823 bp, Bovine  19866880346178
  misc_feature (1)..(1): n is a, c, g, or t
ntttcttggttcttcttccctccattatgatcacatgtctcatcactcaccgaatgatatgtaacccagagtcacagacttggtctccaaggatgttgtaaacctaaaaaggatagaaacttcatttttcaaatatgcagctagaagctcagaaaatagctttccatgtcctagagggacactgtggtgggtcaggccactccagggcacagtactggagaccgtcagtcattcttcgtctctctgactgctctgaaaatgagtctactggacagcgacactcatatttccaaaattatactgtggttggattttctctttttcctgtcttcaggtgtctttgacaattagtgaatagatctctaaaacttagaaatcttatttgggctgatcaaaggtacagtattcgtgttatattaaaaaggaatctattgcccttaaattatggatgattaaacaaactgtggtacctctatacatggagatactaatcagcaatagaaaaaaggacagatacgtgcacccacatggattattctcaaatggattacatgaaagaagtcaggctccaaaggctacacactggatgattcagctcacatgacattctgggaaaagcaaaatgatagggacagaaaacaaatctttggttgccaagggctggatagagaggttgactgcaaagaggtctgagggaaaactttttcttatgatggaactcttctaaatcttgattgtgatgtgggttatactatctaggcatttatcaaaactcatagaactgtacactaaaaaggatgaattttattccatgtaacttgtaccttaaaaagtatctgtgctttgctgtgcttagttgctcagtcatgtccaactctttgtgaccccgtggactgtagcccgccaggcttctctgtccagggggattctctaggcaagagaaggttgccatgccctcctctaggtaaaaagtatttaatctcattaaatttatggatttatttctgtatagttatagagcattttaaaaagtctaatgtgtaggtcctcttgccaccaactttcattataaatcaattatttgattcaaagaattaagaaatgcagggctgtttcatatagtaagatagatttccttctggtcccttaccaactcatgctatagacaaactctccagccaactgctgggacccttcacagtcttgccatatttgctagaaaccttctcccataactttacacctaatccctcatattaggcagggctgtgtcccctcagcctctctaacaccagagcttatccctccaaccaggcctttttccatgtagttgcctgaccaggaatgctttccttttcccctctcttcttcctcctcttccccttccttcaccatgagtgaacacccaggaaatgagtactattctagggacaagggaaacaaaggatacacttgataagaatcttatccccaaagagctcgcaggtccaggaaataggatttatgcaatgtggttaaaatgttttgacagaatgatttgtgaattttatttttttttagctcttcagggttatctaactttttgacattgaatactttcacaaataatttttggtaataaggaaaagcagaaattaagggcttaattagtggtttggaccagaggtggtgagacaacttgacatcaggatgtcaaaaattagaaactgtcagtatcaagaagggaactgatgggagggagatgtcctgtggaaacctgttacaaatggcagacacatccatcttaatctatgctgatgctctcattcacattaagaatcaag

SEQ ID NO: 25683 - DNA, 1367 bp, Bovine  19866880405726
  misc_feature (1)..(1): n is a, c, g, or t
ntaaaagctatcacgcacacccaacccttcacgcacatacacagacccacgtaccttagaaatgtcactgtttatcaagctaggaatccatttgcaattagagttcttgagagagaatgggaaattaagtcaaggtcagaatgtcttgagatcagagaaataccctaaatgtgcacaagcaagttacaaatttgctagaagaaataatttgttagttgtttcacttgatttccacacttctggccaaatctaattataagaagggtcagtgggggagggggatgatttgggagaatggcattaaaacatgtataatatcatataagaaatgaatcaccagtccaggttcgatgcaggatacagaaagcttggggatggtgcactgggatggacccagagggatggtctggggagggaggtgggagggggcttcaggatggggaacacgtgtacccctgtggccattttgatgtatggcaaaaccaatacaatattgtaaagtaaaaaaataaaataaaataaaataaataaataaaaaagaagggtcaccagagaaaaagcagaatgactcacggtaccttccatctaaatcctcgatatcttttatgaacaggcctccttggtgcttgcacatattcttgcatgctcgcaggaggctcttactcttatacaagatgtaatctttgccagtgctcttatttcgaacaaaattgattccttccttgagattggcgacttcagcaggggagagacacaagaggagctcagctgtttgttcgatgctgtgaaaaggcaaacattttgagaggaaacagagaccattgttaggttttaagagagaacaatttggcaatggcagtcaaaacctcttttttttcttaagatactatgtaaggccagccttccaagtacctgggctgagcggcagctgacggtgaactttcttccctcctttaaatgcccatcctacttgttgagggttgaccccaccttcccagcaaagtaatgcctccctcacttgcctgcccatagtctgtcgttgcctctccctgggtatttcagaagaatggcagctgtcacttcagcttctgtggctcattcactccccccaaggcagaagtctgcgtggagaaagaggatgtacactcagctcagtatttccgttggtgatgtctcctcctgaaataagtttctttcagaagccctctatgtttagcttcaataactgctcctcaccttcaagctttcacatcaggacctcctctctttgcccaccgagagtcactctttaggttcaaaagtaactcaatcactgctccttggttaacccttccaagccccccacccacccccaggtcaaatctaac

SEQ ID NO: 25684 - DNA, 878 bp, Bovine  19866880413977
  misc_feature (1)..(1): n is a, c, g, or t
ntaaaggaaatcagtcctgaatattatttggaaggactgatgctgaagctgaagctccaatactttggccacctgatgcgaagaactgactcattggaaaagaccctgatgctgggaaagactgaaggcaggaggagaaggggatgacagaggatgagatggttggatggcatcaccaactcgatggacatgagtttgagcaagctctgggagttggtaatggatagggaggcctggtgtgctgcagtccacgtggttgcagagagtcagacatgactgagtgactgaagtgaactgaatactatcaaagaagtaagagccaagggcttggcagtgaaggtggtgcagatttgatactgttaaacaaaaggaacttgcgatagcctctagaaaaggttgatttctggaggtaactttatgattgttcaaatgaccaacttccttaaatttgtctgctactggtagtaccaatgtattttgtaatggcataattgagtccaaaacatttggaaaacatcagactttcatcaagaaaataatttttaaaattatgaccttagtgaggtataaaaaaactcaataaataaattctgaaattagaaggtgaaattagtcttgacagcaaaacactccttgacaaatatgggtgcttggcagttggccaatgtctgattagaattgggagagaattgtgttatcagctcagcttcaagctactgagacagaatgaaggctttcctcccctacctcttgagcccattccacgtgaggcctgggataataagcacagtaatggcagggaattacaaaaatataggaggaaagaatcagggctcttccaacccaaactacacacaaattttcatgctattctcaat

SEQ ID NO: 25685 - DNA, 1209 bp, Bovine  19866880434062
  misc_feature (1)..(1): n is a, c, g, or t
ntctcctgcattggcaggcaggttctttaccactagtgcaatggtgtttaaattttctgctatttggggataataccttgggtttatatagaaacttcctattgaacaacagtggtctgggaggccagagctgggggaggacactggcttccctggtagctcagatagtaaagcgtctgcctacaacccaggtttgatccctgggtcaggaagatcccatggagaagaaatggcaacccactccagtattcaggcctggaaaatgccatggaccaaggacctggtaggctacagtccacagagtcataaagggtcagacacaactgagcaccttcactttcactttctaaaaaattacagaaaacaaaaagaaagctcattgtattcccttcatttccaccctagaaatacttgtgccttaaaaagagggaaatgtaaaaggtctttggaatttaaactgaatttatgaagacaaagaaattatccttttactcttttcagaatataattgattgaaataaaacttagttgctggaattaagaagaccacacgtttgtctaaaggaaatgcacacagggtttaaaaagatatactccctatgatatgatgaatacgaatatttcaacatggctttggaaactcagattttggactttaaggagccatcactcccccgacacaggccctccagtggtcacttttgttcaagaagagtaagaagcagattttactagaagtcaagaatcagagccatgggagactgaaacttgggcttgaatgggaagactgggatgtactgatgagcttctttctgactctaagtgatgttttctttgtcctttatctcaaggtattttgaagccaaattctaagcatattcatgaacgaaagaaactgaagaaattgcctgggattaagagttacaaagacttggtttttctgagtcacgggtgagccatttttgaaaggactgtgttcagaaagacagttttataaatgaatgctatgtataggtaaaattaaaggtaaacaaaagtataaaatgctacataagaggtttttaaaatttcctagtgctgtatggttaatcaagggctattgtgtgttggaagagagggaagttgcttccattgcttgtatttggctgttagtgcatttttattagatatttatttgggtgtgcattaaaccacaagttgaatggagag

SEQ ID NO: 25686 - DNA, 1670 bp, Bovine  19866880505635
  misc_feature (1)..(1): n is a, c, g, or t
ngaattgtgtcctatctgtggatccgggacggccgagtccagcagctggagtgagtacttgaagagaattgcccctggaccagtaatcattacgtctatgttagtttgctagggctgcatagcaaaataccacaggaggggcagcttcaacaacaaatatttatattctcccagttttggagactggaaggtccaagatcaaggtggtagatgactggttccaactgccttcttgttgtgtcttcacatgggagcagggctggagaaggagaggaaggaggggagagagaggagagagacagggctctcgggtgtctcttcttacaaggacactaatcctatggatcaggaccccacctttatgacctcagttcagtgcagtcactcagttgtgtccgactcttcacaaccccatggactgcagcacaccaagcttccctgtccatcaccaactcctggagcttgctcaaactcatgtccatcgagtcagtgatgctatccaaccatctcatcccttgtcttccccatttcctccttatgacctcatttaaccttaattacctcataatagaccttatctcaaatagagtcacattggttaggacttcaacctttgaggggacacagttaactccatttctgtgtctcttatgatctcatctccctttccatgcccccctaagatgtttatgattctaggtttcctctgacggctgagtgcaggaagctgctattcaatttaaataaatttgaagtcctttctgactttttccccacccagactttgatagagttagaaaccgtagcctggaatcttctcacgggactcattctgctcctcagctttcctattattcctgttttgatccatgtggattctttccttttcctcagtattgtaccagataggtcactagacccaggattgccattcccattgcataagtacagaaaatcagatgcagagatggaaagtgacttggccaaagttgattaactcatctttaaccaaccagataggcttaggtttttcattcctagcaggcatttctccacattaccctgcctttttggctataaatgtaggtacatcttctattcctgctgttgctaagaagttgaaagatgaaaatttactcttggagatgtaccaagggagtggtcccggggaaagaactgaaagtgctttataatttccaaagtaactctggaatgaatactgttcagccagatggtggattggcttctaagtgtaattataacagctccctgatcagagcacttgttaccgttggttacaccctcttctgctagcaagttcaggacaggggtctaggagatccttctcagacgttttcagcagagatgtctctactgaggctcttgggtcattagagaaggtgaacatgatgcaccacgaggaatcctacgcactgcaaagctgtctttgaaaataagacccagaaaactcttcagagagagtgcttcaaactccaggtctttgccctaatttcaggagtttctgcctttgctgggtagaatttggtcattcctagagcccttgggaggagaaggcaatggcaccccactccaatactcttgcctggaaaatcccatggacagaggagcctggtaggctgcagtccatggggtgctaagagtcgggcaca

SEQ ID NO: 25687 - DNA, 4521 bp, Bovine  19866880537724
  misc_feature (1)..(1): n is a, c, g, or t
natgctggcagattcgcactggtttaggcccttcctggttctaggtagtgtgtcctcttgtgttttcaaatggaaaaagggatgagggtctccctggggtctcttttataaggatactgatcctgttcatgacctaagcacctcccaaaggccccaccttctaaaaccacctcattgaggagttaggatttcagcgtaggattttcaggggatacagacattcagttcacgtaccggcttagcaaatcatcctggtaggagcaccacattgtgtaagggctgggatcccagagttcactaaccacgaagaaaatatcaactttaagagaagtaggtgaagaactgagctctattatggtatatctttcaattggttaaaaaaaaaaaaaaaaaacattaatagagattttcttttttaaatcccccttggaggaccttccctcgtggtgtagtggtcaagacttcatcttcccatgcaggaggtgtgggtttgatccctggtcagagagctaagatcccacatgcctcatggccaaaaaaacaaaacacagaacagaagcaatattgtaacaaattcaataaaaactttaagatgggggaaaatcccccttggaattttttaagtcctgcatcacattcaccagaagctaagttggtccagcatgctttcttcatcctcccttatcagaagctgtgttttttgactttctgttcacggttaaggatttttttcattgattaagatgagacatagatttcttatgcttctttcaaatggaaaattagaagctggttatttgcacatatttttcaaatgcacaggtaggaaaatgagagcacaaaatatgattgttgtataaattctatgacaaactatgcagcttggtgatcctgtgacactttacagatgaatgaggagttttgtctaatgggttgatttataatctggtccacaaacactgtgagctaatacctgctttgattgaggtggaactggtgaacagaaccatgtgaaggagcagctgcaggagtaggcactccaggttctattagcaccaccaagttgggaaataaacagggacgttgtcttggtgcaaagctgtcagcaagggctaaagatggaagagttcccaaatgaacaccgtgatgtaggttgtaatggagtggacgacagcactgtgtgtgtgtgtgtgtgtgtgtgtgtaggctgtttgaatgtattggggaattagcttatttctggagtataacagatttgaatggtaattataccaatccagaggaggaaattaaaatgtgagaatactaaagcaccttatgaaaggaaccagaaaacatttgtcttcttttaagacagaagattcacacacacacacaatgccaaacagaaagtgggtgtagcttctctccagaaacagcctatgcaaactttaaaaaaccttcacttaatttttggcctccactgggtagggcaccggagaaggcaatggcaccccactccagtactcttgcctggaaaatcccatggatggaggaacctggtaggctgtagtccatggggtcacgaagagtcagacatgactgagcaacttcactttcacttttcactttcatgcattggagaaggaaatggcaacccactccagtgttcttgcctggagaatcccagggacgggggagcctggtgggcttccatctatggggtcgcacagagtcggacacgactgaagcgacttagcagcagtagcagcagcagggtagggcacagagcagagtaggctatggatagccccttgcataatgggagctttctgactggtcggctaagcagagatgcaggcaattttcctgatgcagatgactgtcaaactaatgctatttgcagacactcatctcccttcttggcaggagaaaacctgggctgaggtggtgaggggaaggtagagaaaagcccagcatgagtgatgagtggttagaagaaaggagaagctattattccatccaaacagaactgctatggaaatgctgggctagggcaagaggcaggtattgtgagatataaagagactttttggttgtcacagattattggtgttcagttacatgactttggttgtctaaagcctgtgtgtgctcaccagctacttcgttctttctttttcatctccatcattcaacaaccagatcctatcagccatgccactttaaacccatctttcttttcatggggtctggatatcactgtggttttagctctttgacagatatattgcttttttgagatattcagaaactgtctaaagtcatgggaggctgagacagtagccacatcacgaccctgatttcccttgtcttgattctactcagttgctcacgttctctgtgtgttgctcagaatcccaagaaatgcatttctatctacttagaatttataaaatacaactgctgctggttttatttgttctctattatcacagtgacctagcagatgaaagaataggggatagacccctggtggttcagtggctaagactttgtgctctcaatgcaaggggctcaggttcaatccctggttagggaactagatcctacatgctgcaactaaagaccctgtgtgccacaactaaagaccctgtgttgctgcaactaagaatggtaaaccccaaatatatatacatatatataaagaagagtggaaagaggccataattgctcttagagcagatgtattagaacatttttaacattaaacatgaaatcaaaaatactatttgaacaaattctgagaatggagaaagaatgccttctactgaaggtataaaaaagttagacttggaataaaaggtagtagtgcctttaaaggcagagatagtaactatggtatgttgattctgaaagactcagtttatgtagactaagagtggaaggaagaattctgtaaaaataaatattgagatacctcttacacagtgatacgctcaaagtctgaagtcaaaatattgatatattccatgaattttctttctcaattgtgaaatgatcagtattgtgttttagaaattcatactctgggaaaaattatttagaacattttaaaggttcaggtctacatcaaaggtcaagaagtgactcaccagtctttcatctctaaggtctagtctgctcagtgaaaacaataaatggcagagttctgaatgttcatgtctcgaccccagaaaaattcacagaagcagcaatccatgtgaacttgtcttcaatcccttttgtacttgaatctttagtaaattgcaaaaggcaatgctagctataaattcagttaaccacccacctcacttcaggacacctgtttcgtctttctcgtattggacaatgcccagtcatttcttgccaggacgttcgttcaccccaggcatacaaagatagttcctgtgaccaccatcactactccatgtggtattcctgattggtactgtgctgggtgaagctgagggcctagcttttattctggtcaagagtttgggtggcaaaaatggaatgtggtccagaaaggagtaaaatgtcatgtgtcagaaagattaggttgtctttaaaggacactgttgctattgcaggttctttcaagaatttcaaaacgtgatttttgttttctatggaaaacgtatgaaatttaaaaacatccatttcctgagagctttctgaatggatgaggaaatatggatgattcacagagcattttaaagtagtgatgctgggcaacatgattataatgattaaagatgaaaattgagaatgtatgtgctttggataaatccttttataacagggagttgttttttctcataatttttattgatttaaattctactaaccagggaacacactttatgttcttatccatagaatttgtgctttgtcatagtattcaatatgaatatatctcataaaactatataatacggctatcaaaaccttaggtaatttgtattatatgccgtttactaagttttctaatcacatctctaatctaagaagagggttggcctaatccagcccactcatgtttttaaataaaattttttttggaatacagccaagctcatgtgtttacatactgtccatgactgttctcacagtacagtggcagagctgaatagttgtatcagaggatggtgtggcccacaaagccaatctgaccttacattaaaagtttgctgacttctgacctaaattattagaattttacaagactataaatatgttcatgatctttgtgtgtatatatatatatataatatatgcatatacatactttatgttgttatatatgcatatatacacatgtatgcatatatacacatagatgcataaatatgtacataagcatatatagatacacatatgtatattgggtttacatgtatatatgtgtatacatgtacatatgctcataattttttccttctggttttattgagatataattgacatctagcactgtataagtttatgatgtacagcata

SEQ ID NO: 25688 - DNA, 1028 bp, Bovine  19866880635374
  misc_feature (1)..(1): n is a, c, g, or t
naggtctgtatggttctccaaggtgatgtacttatattgtgtccccgggcccctgtggcttgcagattgtcccatgcagccctttcctgttctttctccacctttatcacccctgctgctgtctgccctggcgctccccacggagggaccaatcaatgtccagtgatgcccagtagggtttggccaatggggagcctcaaaagagattagaagaggggaaaggagtgaggtgaggatgttaattctgaggctcctccctctgaggtcacattgggctggctgtaccctttcacaaaagatgactgctcccccccaaccccaggcagcctttctatatagttctctctctttgcaggttctagaaacctcttcctctcccatcctttggagccaggtcgtgttgccttcattctgcccactgcttccccgacactctactgattcagacctccataagtcatctctttgtaaataaactttcttggaattattctcatatgagccagccatccatttcctaatactcccctaagtaattcacattaataacagcctattgactattgaaaaaaagttttaaatatgcttttagccagtcattcatatttttaaaaatattttttctttatgtagctccttgaatttttttcatttctctttcaattttaggcaagatctgttgttacacataatcccgttcaatttcttttctccttattgtcccccagcaatgtacaaatctttctaaaggctgatccctctgtaatgcatgaaatcgagaccgttaacttcaggaggtgattttaggaggaattacagacctagaaaccattttacttaaaactttttcgctgcttgttaatcttcaccatcttcatggacattattctggagtccaattcacatccgaaacaggtctctgaggttaactggctgtcgctatcatttaagcaaagccggatgagttgaagggaggatcaaggggcttagaacacaagggaaaggttcgaagccacaaatagattcct

SEQ ID NO: 25689 - DNA, 948 bp, Bovine  19866880656873
  misc_feature (1)..(1): n is a, c, g, or t
ngatttaggttatgttatataaataaatatgagttttttaagtattgaagtgtagttgatatacaatgttatatgctacaggtgtacaatataatgattcataatttgtaaatgttatgtttcatttatagttatcaaaaatacttgctatattccctgtattgtatccttgtagcatattgtatacctaacagtttataccttttaaccatgtttccctctcctcttaccctccccactggtaacccctagtttgttctctgtatctgtgagtctgcttcttttccattatattcactagtttgttgtatattttagactccacatgtaagtgatatgcagtatttgtctttctctgtctgatgtatttcacttagcataatgccctccaagttctatacatataaacatatatatacatgtatacataaactattaaatagctggtctagattacattattgtgtaatggggcttgacatcaaaaaattggcaagtgatttttataaattaattattgcagaaaatgaccactccttgtaatataatagtaatatacgagaaatccaatctcaagttgttggacagaagggggttgtttgctccatgcaggacatattttatttcctgtcagcgttggacattttgctgactgtctttcacccatgcaacttccaggtcacttggtgcagaagctggaagtgggggtgaaggaggggtttaagactggatcatgtgcctgaatgcataggcctgatttcagaccccccaggcatccactcctgggacacactaaaatgctgagggtgttggcccaactagtttcccattgtgcaagcagatatgtgtgacaatggtaagaaaacaacagcatgagatgcctgctcccttgaggaccttatcatcagaagcagacacgggcaagggagaatgggttcgctctcagca

SEQ ID NO: 25690 - DNA, 1673 bp, Bovine  19866880761687
  misc_feature (1)..(1): n is a, c, g, or t
ngtaacatattccttaaggtgtggcccaatcagagttacagttctctaatttttctcagttttcccttcttggtgtgttggattgattctgaggctagcatgttatatgttggcaaagtaacaataaaatcataactttacattctacactacaaagaaagaaagaaatgtgtttcagaaataccagtaatagttctgagattggctataggccaagaccaaggctaagaccatctctgatctaatcaatgtagtcagtacaagagaatgtcctctttgggccagtacctgtcatttgttccagccctgaagaaagatatttgaaggtaatgatggatctccagtggacgtggggactgttgcaaaaggttcagtggggcatggattttgggggtcagccaacaggtgaccaccacaatactcaacacagattctcacacagacacacacacctcagctagcagcaactaaaagcttaaccaaaagaatgagcataaatcatttacagagtatgttagagcaagatattcatactaaagacaaaaactgtgttaagttgcaaaactatagtttagtggaccaaagaggataaataatatataacattgtgatgggttttctttcatctttcctattgaaggacttgtataaaaaagagcactggctttcctttgcacttcaaggattatgcttttgagcactgtacttgtactctcaagtataatcgtattacatcagatcttaaatcaatacttcaacatctttgttaatgttctaagaatgttccatgctcatgactgtataagcattactgaacttggcattctgctcatgttgccttcattgttagattaatgctcatgtaaaaacattgctataattacaatgatggcagttggcagacaccctctgtgagcataaaaggaaaattagagcaccaagaaaatgtgtggtaaagaggagaggggttggctgagcagggggtgataagttctccaagttaaagctcattgaatataaaagttggatttatatactgagctggaaaagatctcaagaagtcatctggtccccaacttttaggcagcagcacacattaaaatgattcaaggctaagagttaattgtattctgtgcagcatttttttttttcccttaaaaattgaacaaacagtaggggaaagaaaagttaattaattcttaattcaaaggttattgtattttgtagttctgaaatatttgagagaagattttaaaattccaaatccctgccagatagaaagaagatatttcaaaataaatattttactctttgctctgccggtgtgatatgaggcagcaattcctttattaccacaaaaagcctaagggaagactttggaactaggattgaactagcaaattctgcttttctgagactgttgagggacaatttgttctttaatttcccccagggataattaagtacacagtccaaccaaaatgctaaaaaaatatgttaattatatttgtaagaaactctcacatatttcatgaaagtatattattcttttcttcatatcctattgatttatatgtaatttaaattatgatagcaacataattttgtataacacttttctccaacaactcaatttccacttctaaaagtttagccccaagatataatcatag

SEQ ID NO: 25691 - DNA, 3522 bp, Bovine  19866880798120
  misc_feature (1)..(1): n is a, c, g, or t
nttttccccccttcccccttctggagtcttttaaaacctcaagcatgtgtcattaaaagaatatttttaatattctgtttcttcatttgaagttgccacagaatttgaaatatctttctcatggcagctgtcttaagaatctctttaaaacatctgactgccttctcctatggatggaaggattatgctatttattgatggatgacttctctctgtgtacaagtcaggatggcagagaaatttaagtggaaaaacttgatggagtgacttttgccctgcaacgaaacgtgtttacccagactgtataattatggttatcaatagcagaagtgattggtatcatcattctgcttcagttttgataaagggtaaatttccttaaggtgtgttttacttaatattgtgtagccggagggtacaggtatgtttcggcagtggtagggtggagagaagaaattttgttcctgccacttgttttacatgtttactgcacaagatgggttcacctttttactattcaaatatcaggtcgtgtttcctgcaacagtctaacctggtatgtagtgctagttggtatggacactattcatcagcataagaaacccatgtcatgagtaaaatttgcaaagacaagtttaaacatcaaataaaataatgttagcacccttaaaaattagttatgattggtacttactgttaagattttttttttgggggtgggtagttcatctttagctggagttgattaaggttgtaatcaaattacaaatgtatttgaatttaaacatttatctccccaaatctggaatctaagcagtttctagtagcttagggtaaacttgttttagctattccttacttgcaggggcaagaattgttaattgaaatattcaaggtttgacaagcttcaggtgtgagcaagatggtctacaaattcaccttaagttgttgattttctgaatttagagaaattcaattacttaaaacattgggggaatccccttataatttgtatttctgactttcttttggctgtcagtcccataaaatagggcatatttgaattggcttgactcagcatttcttgatttttatttctcgtttctttccctagtgcccttccttcctgtaaagctgagagtgacttggttccttgtttttacatttagagactctatgctatttccagcttccatttttcatagagagtttattttcatcgtctcatggtcatgataacgaacatttgtataacatgttctgttgaacacttaattatgcattgctttatttgctcctgcagtagccctctgaggtgggccctccttacatgtgcatttgcagaaactgagatctggaaaagctaaagaacttgtttcaggtcatcctgctaatgaatgacagagtcgggagttgaacccaggcctgtcttaccatttcaccattatactaaaaaactcaaacaaaacaatccttcagcttgttgttcggtggttgtgaactttcacaaagacttggactttagaaggattagagctccctgtatggatttggttggttgatacattattcattgcttggttccacacttgctgagcatgagccagacacatggtatgtccaagatggacgtcgactctgacttcatgggattcagagcccagggtctagttggggaggtagacatctcgacaggcaatgctttgagatgtgctgtgagcaggatgactgaaagcacatgggaggaacccctgacccagagggtcagggaagacttgcagaagggaggcaaatgtaagctaccacccaatggatgaacaagagttactaagggaacagagtagagacatgttctagacaaagaaagcagaatatgcttggaagccagagagagcttggcgtgttagagacatattaagtacagtgggagcaaggggtatggggtggaaaatggcccagcctaaagcgaattctttttcttgcagtcgggatcaggtgaaaattgggattgtttaaacaggtctcttcctaccacctgttcctaatgaccaccacgtaaactttatcctctcctccctcgggaggccgtagggcccagcggttaaggccttgggccttgaatcctgcctggttcacaccatagcccagccactttataacactgttcagcctcgcttcctttctctgatgaaacaggccttataaaagtatctatttgtaaacagtttctttttttttctattttttaatttaaatattacttttttctttaaaaacaaagttgtgttaggtgagaagttgctgtgtagcacagggagcccagtctgtgctctgtaaatggtttctttgtggattaactgggatgggttttaacactgcctaacccactccagtactcttgcctggaaaatcgcatggacggaggagcctggtgggctgcagcccctggggtcgctaagagtcggacatgactgagcgacttcccttccacttttcactttcatgcattggagaaggaaatggcaacccactccagtgttcttgcctggagaatcccagggacgggggagcctggtgggctgccgtctatggcgtcgcacagagtcggacacgactgaagcgacttagcagcagcagaacatgatcaacaaatgagaaagcagaaggaaccaaaggattctgcattctgttttcccagtggcacagatgatttcaatgcccagttgtttgtgttaccttgaaagcaagatggaaggcaactgatgaaacctgaaattcttaaggtgtgtgctggtccaatgaaatcagaaatggtaggatattcaggggagggtgttttatggccaaacaagtttggcaatcaaacattaaacaaagatcaaccagtgtctttactgcacgactttgactcagagactttggtacactcatgtgcatagtggatttctcagaatgagatggaatatacttgtcgttctcaaacttacatggccagaaaccctactgaccatagtttgggaaactgggatggaacagttaaagtgaacatggaacaggctagaacaggctctccgtcatttggaatgtcctcctaggggacattcttcggcctggactttaataaagggctgggcaggtctgctgcaggccacactggcactgtgccatctgtttctgtgatactttcctgtcttgtctttagagggtgttattaggaagtgattctgtgttagatggccagccttttcctcccatctgctaattgaatctccacccaatttttctagtacctggacttttaaaagtggaatttcattcttatacattaaatgttgcagttttaggtaactgtagacttgcatgcataggaagtaatgggcttccttggtggctcagaggttaaagcatctgcctacaatgcgggagacccaggtttgatccctgggtcgggaagatcccttggagaaggaaacggcaacccactccagtactcttgcctggagaatcccatggagggaggag

SEQ ID NO: 25692 - DNA, 2290 bp, Bovine  19866880976318
  misc_feature (1)..(1): n is a, c, g, or t
ntttcataaggctgttatggtcaacgtttattgtacacttaccgtgcgtcactcactcttctagaaggacctgaggaatatgacataacccccatgagataggtgctattattatgttcacttcatagatgaaaatctgagacacagattccccaaaggtcacaaagtaggtgacagaatgaagattttaattcaagtggtcagtttccaagtctcatgtgttgaccaccataggcctgcttccttgataaggcaacttggaaatgcacgcatcaacctcccgacagctgagatcttcatctctgctccctttcattatacagatgtcctttcacctatctttattcagatctgctccatcagcaagaccttggacttggcaatccctcattcagctgcctccttaccttggacacctcccactttttcacaactacagcccctcctcagcatcctcattgaacctcctgactctttgttctccagggccattcatgcctcattcctgctttcccttccttctttaccacatcaggaggacctgccatggttctaattcatcttatattttacaaccttttaactttactcactccttctgtctggattattctatcatctctccctccatttcagcatattgaaaatattccccaaccttcaaatgccaaaaacaaatgtgatgggatggaaatgtatgtgtctcccagatccacaagctgctttacctgggagatctcaggtcctctctacccacagtacatcaggaaggacttccagtcaggcggtgttagggggagttttatttgaaaatggttccaaaacctgtgaaagggataaagcagaaaaatatgttttggaaacgtccatgcccattgttttgccaagatctgtctggtacctggtactctgctctccctgagacagcatttgttgtactgtttcagatattcgtgtagtttcacatttccagtacgttgaatgcagtcccttaaaacgtgacaactgtgtcttatttttatttgtctgtgataggccttgctttaaggaattagcatatgtaaaatatagatttgtattctatacacaaaagcattaggacccagtattggtgagggtgcaggtaagcgggctggtacactatttctgggaaggtgagctggcttcctcagaacaatttggcagatgcatcaaaagtcttcacgctgcgtgtgtgttggatactagcagctccacttctaggaatttatcctaagaaaccactatgaaagtatgcatgccacatcaacaagtttatttgccaaaacgtcatttcaaataatgaaaagttagaaacttacagggtgcatcaaagattgttcagtaaacacgtaggtacaaaagtacatatagtactgtcccatttttattttttaaaaaagtgcctgtgacaaaagattatctagacgtgtgtgtattagtcattcagtcgtgtctgactgtttgtgaccccacggaccatagcccgccaggctcctctgtccatggaattttccaggcaagaatactggagcggtttgccatttccttttccaaaaggaactagataccaaaatacaaattgcctctctggatggtggggtcatttgttgttttaactgttttttgttaaggagggtttttatttttaaacattaaaaaaaaaatttcctgcagtagatatgtattggttttatgaccagaaaaatatttaataaactcataaatcccattttgagaacaacaaagataaattgggctgtgactgctttccaagatttattatggaattctcttacacttacacttctcttacatttatgacctgtgttatcaaaacaatataacaaaatagtcttcagcatcagtatcctagaaacttccaagtgaaagtgaaagactctcattcgtgttcgactctttgcaaccccatggactgtatagtccatggaattctccaggccagaatactggagtgggtagcctttcccttctctaggggatcttcccaacccaagatggcattatttttttaaagagaagtaaccttcaaatctccaccaaagttgctacatttcctttttttccagaacaagaagtataagtgctgctgaaaatgagcaaaacttggaatgttttttagcaggtaaaatgtttgagggttgatctatgtgtcccaacactagggaccccaaagataaattaatgagtaacaatgcaaattatatatgtactaggatgacattaaagaacagcagcaacaataacctcc

SEQ ID NO: 25693 - DNA, 1498 bp, Bovine  19866881023329
  misc_feature (1)..(1): n is a, c, g, or t
ntgacctcacatcctggaatactgtagagcctgccttccccattaacataacacttagggaaaccaagcttcactttgctattctaataacaattgcctacgaatattctaaacataattaaaggtgttctcaagcagatgcaggggggaatttatctgtgatgaacacaatttaatttcagtgtgcaattaggagcactgttggtttatttgcataggcatgaatagcaaccctgtcgggttttgcatttagcagggttgacctgctccgtgtcagacggaagaatgtgactgtgtcatttttatcagggctttcggtcggtggacatgcagttggcattttgaaaagtgagatggtgcttggcgcttgactcattatgattcagaaaagtccttcgttctctaggctttgttcagtgtgcttacaaatttttagggcaatgtgtggaatttttatctaatgtgtgtgtgtgtttcctcctcccagagcgctgttattgggcctggcttctaatcataacttgaagggagtttctcttgatctcagcaactgtgaggtaagagcacctttagactatgtactggaatagataatagtctgtaaattgctttgtctttttcttggaaaaagtgtaattctgtgactccagagggtatacatgaaacaggaaaatacactttatagaagtttctgatgttctgtgttttgtgagttttatctaaaaatagttatggaacactattcagaaagcactcaaatgtgcttgtaatgaccttttccccctccctgtcttcttgccagttgtttaagtattttgtgatgacactttgagttaataagcattaaactagctttaccatcaagagaagtagaccgtgaagcattcctcatagaggccagatggatacagcctaacttggacttggagaatgtgaaagggaaggtctttggtcattaattttgctttttagtatcttgattttaaaacaagaaaattaagatgcttatcaaaattataacaactccaaacactttttctatccaactacacacagaggagaattgaggctaaaagcttcttacatttctagagtgtacctgaacttttgcactgtcttgaaacttgtagtttgtgtggaaattagcaagaaaatacctcaggacagactgtccagcctcttcagagctatgctttacctaccatgtcgaacctggtgtcttttctcagggctagagatggaaggctcttcattcctcttcttgggtttttatgctcactcttctctcttcgcggtacattcctgccatgtccctcttcttccccaaggctcctctttctttgaggatctagttcaggtccagcctcctctgtacctgcatcagacgcgtactattcgatcctagtttggccataactagctatgcagtcctgggtgaattagttgatagcactacctctcaatttctgtgtctgaaatgaagacaatatttgtgcct

SEQ ID NO: 25694 - DNA, 1763 bp, Bovine  19866881177877
  misc_feature (1)..(1): n is a, c, g, or t
ngaagattttatgaaaggggcttccctggtggctcagaggttaaagcatctgcccgcaatgcgggagacctgggttcaatccctgggtcgggaagatcccctggagaaggaaatggaaacccactccagtactcttgcctggagaatcccatggacagaggagcctggtgggctacagtccacggggtcgcaaagagtcggacacgactgagcgacttcacttcactttcactttcagagaagctcctagtctgtagctgctttaacataagattcataggactatctagaaacctcccagatccatctttaaggaccaagcctgacactgagcatctaaagaatcctttctgttctgtgcggtgcctgccagtgaaactcaatgtaaatgccttgccgtgggctcagtctcctttaaagcatctccttagtcctttatctgttttggacacctctggtttatcttgacaaacactctgtgagccctgtcgcctcacactgttctcacacctactctgccctcatgagcttggcatagaaaatccattttaagcttggatttaaacagaaattttctttattcattcatttcctcatcgacaaatggggaaatctcacctacctcacagtggggattagaagaaataatagtcaacggttccaacataaatggtgcccaaatgttcttttctctccccaggcccacagtctcccaacctcagccccaacgttgcttttttttccaattctttttttttattgaagtatagtttatttacaatgttgtattaagtcctgctattcagcaaagtgattcagttatatgtatatatacattttaaaaatatttttccattatggtttatcataggatattgaatataattctctgtgctatacagaggaccttatttatccagtctgtatataaaaagttacctctgctaatcccctcccccttcattctctaacattttatagtttatgaccctaaatgtcaaaagtacaaaattctgaaatattgaccgtaccaaacagaagctggaagagatacacaatttataagtctcaatttcctcttcttactcatcagtataaatttgctcagtgacagattaactcaagaaccatcatttccaagaatttagatgcaaagacacaatataaagcacacagtagcccacatcaacaaccagtgataatttttattgccgcctgttatactagttgccaggaatttttttcgaaaatcttggatgtttgctttaaattagtaataaaagaaaatatgaccggctgttgaagcccatatgctactccttttcagaactacaaaatgctcattcagagttggtttgtacacagcaaggagcagccggaggggagccagagaactcaatgaaaactcaactgtttagaaaactagtaaatagaaaattggagctgtgtgtctctggtttcttctcatttaaagccccggatgcaaatcaagttgatccttgaattttcattacagtttcactgaagactcaaatagaacctctggttaatgatttctgtgctacaaatctcagcttcatctatagttaattctcagaagctttaagcacagttgaccgctctgtgctgcttgaaataatccccattctcctggttctcctctcttgtcactggctgttcttcctgttcctttgctggctccagtgctcctctgaatgttacgttacctcctggctgggctttcaccacttttctcttccttt

SEQ ID NO: 25695 - DNA, 1930 bp, Bovine  19866881225387
  misc_feature (1)..(1): n is a, c, g, or t
ngtcccttttgcttgtactttagaaagggggccagcagcacccggcagtaaaccaagggcagaaccccactgttgatggtgttaccactctgctcaactcggcggtcatggcatcagttctgtgtcaccacttcccacagctgaagcctccacccctggctgcactcacagctgccccattccagtattcttgtctggagaatcccatggacagaggagcctggtggactacagtccatgcggtcgcaaaagagttgaacatgactgagcaacaaaacactttcacattatggccaagggaacaatttcctctctgaagcaatttgaatcctgtatacaacctctatgcaggattaaggaaaattttattctaaactactgaattataaagaaaattgtaaatggttataagaaatagagatttaaatttgagtaagatcttcattccttctctttagccattctgattctcctcaatgtaatatatacatagtataatatatagagatctatatggtgaatacataatatcctctagaatataaatggtttttcatcttctttatctttgatgagcaagagattttcaacagagcatttatgttcattacctgtggtggattcattttgatatttggcaaaactaatacaattatgtaaagtttaaaaataaaattaaattaaaaaaaaatatatatatatccagaacctgaccacttcacaaaaaaaaaaagaacttatgtcaacaaatattcaacccttgatatcaaagacaattgtagcttatacttctaaaattaaggttaaagaaatctaaaaattctaatctccagagttaaactcacaaaatcaacaccttagcagaagatacctttaaaatgaccgtaaggttgtaaaacaaaagaaaaaaagacctggttttgtcaatagtcttaaccacaggcgacaaaatggcagttgttccccctctggtaacatgacagggatccccagtccatcagcccagccttgcttactgagactggccaagacctcagaattctttccagagcagcatccaggaaacaaatattaagctgttggtgatggcatcttactgtcggtatcagtctgtgttcctttgaaaattgcaggatcttctggctaatttatgctaaaggagagttataatagctcataaaatcactaagggggctgaaggtacacagtctagcctgaacttctcaagaactgggagctgtaggcagcaggctcctagaagcatcatgcctctgccatgatcaggaagcttctgagtttcatcctgccctgccccttctgattttagcagaattaaagccactgcactggcccaaaggtctacactccctccacaaggccaacagcttgctctgcccacttgctccttcaagactcatatcagggcaccagccttgtcgactcttaagtcatgtgaggatctctagatgtgggatacttgtagctttccaccctacacagcaggaaggtgccttgcaggagggatggcagtctacagttctgcttcagcatctcacaatgaacctgtggcgttagatacaggaaggaagcatggaagaatcaagaagaactctaagatataacagttgggattggctaatgttcatccagcactatctaggagagaaggtgccccagtgagatagatgtccagtcctttgtagaggtgaacctctaaagagaggagagagaagctctgggccattgtcacctgccaaagcatggtcaactgtcttgcttcctcaggactggaggatgaatgtacagttttcagtgcttcacctggaaaagtctctggcaagccagaatgcattggttgtcttaactcggtgacactaaccatcagtatcagtcaactaactcaaggacttggttcagattttactctcac

SEQ ID NO: 25696 - DNA, 1127 bp, Bovine  19866881243897
  misc_feature (1)..(1): n is a, c, g, or t
ngtgctgtagagaaaacacaagtgtgaggggtgatcgtggtggagatgggtcagaggctcttcaagtgagctgaatgaggccagccgcgaatgaggaccatccagtgaatgattcctttgttccatgatgaaataaaatactagaaaatgttcttgtaacaaagagtgttgtttgccaagagtggacatgatgtagtgaagagcttttgaaagctttcatttggtgactaatattttgactcagtaaaaaaaaaaaaaaaaaaaaaaatatatatatatataaaccatttttaatcacaaggtcttcatgtgtaaagaaggtaattataattataaatactcagtaatgttcaatgtggtaggagggaactccactggctgtgactgcactgctgtgttctgtccccaggacttttgtcccctgggagactcgatcttgaatatgttacttgtcgaatcacagtcttttattctttatgcataggatgatcataggggccagtatagtcccttgatcttcctagtagttctgcctttacatattcgctttactgaaaaaaggtggcccttttttctgtttcttgactgcttttcttagagtctatacttttgggaataggtttgcctattataaatcattgcacttactttataagaccagagaattttattctgaggaaatctttgtatttagcacttttccaataaatgggccattgattggattttaataaccattttaatgaatgagttgttctgttgtgaaagaatttcacacttaaatcttatttattcttgggttgtgctatatttgtcttttgcaaattacttaaaatgaaaggaattagcacatacgttttctacgaaagtggtagttggtcaatcatgtctgatttcttgtgactccatggactgtagcctgccaggctcttctatccatgggattctccacacaagaatactggagtgtgttgcgatcttcccaacccaagggattgaacccaggtttcccacattgcaagcagattcttcattaaagggtgacttcattgtttcagaatttgtgtctctaccagctttcctcctcccatagagggttcctaatgggtgcagtgttttagtagaat

SEQ ID NO: 25697 - DNA, 1077 bp, Bovine  19866881401072
  misc_feature (1)..(1): n is a, c, g, or t
ntctagagctggaaggacttgttccttttctgcggaagttccatgtctctgagttcagctgtcatagcctcctcaccctttgtctctcaagttctctgtatgaacttggggtcattatctctttctctcccagacttcttttgttttctctgggtctttggaacagttcctcagggattccatttgccttcacctctcccctggctcctggtggaaaccagttgggataattgagctgaaatgtagggaaaactgtcccggaatggtgagctgcacacaactcctgttgattaacatggatgtgttaaaccagctgttctggagcctggggccttgggtgttgggcccaacaactggtgccagtcttaggcaggtcatctgtatttccagtcacaaaagatctttctgtcacgttggagaagactgaaatttataagaatcagtgggccattgaaaatgacaatgggtagcttagcctgaaagcagatgtcaccagctagtggcctgaagcctgttctgatgtgctttgagtacccagggtttaaaaaaaatgaaattggtcaccagtatttacagattgggaggttttggtcacacatgtcgattccatctgctcttgagaacttagaccttggaatcaggcccacgtctgtgcctgacatggatcagaagagctggggactgagtgcttccagctgagaccagtctctccagtttgcctcagtccccaaggcgccctcaagtccagtgttggcagccatttgtcgttgtcctcaaggttgtttttctactcagccttttttgctcttttacaaggcttccatgtacatctgagttccctgactcttatcctaagtgatcaggacgtgatgtgtttgaaagtctgttatccttgcaaaagctcaagatgaggggtgctcttatctaagaggcattgatggtgttcagatcaagatacaagtaagaggaagcatgtgtttaaatggagcacataagggatcctttggagaagtgaacaagagatcgatcaactctttagtcatatcttaggtacaatcccttctgtttcagacagga

SEQ ID NO: 25698 - DNA, 953 bp, Bovine  19866881510436
  misc_feature (1)..(1): n is a, c, g, or t
natgctcatttcgagctatacatgccctctttcatataaacatactctgctattggcaatttatacaagtttgctcatggtggttctgccaccagcactgtttcttaacgtctatatttttacatatttttcagggcccaattcaaatacaacttccatcatgaaaccgtcactaaacaatgcggctgaaagtcatctcttctttctctaagctttcaaggcacatgattacagctctcctacagcatttatgcctttcctttattttagttactatacatataatctctcccctgctaatataggaattctatgagagcaagacctatttgactaatttttgaaagactcacagaacgcaacacagtaccaattacagtgcatttaattaaaaaaaaaactagaaagcaaatgtggaatgttagcaaactcatatattaagaaaatatcaatgaatcaaggatcttatttttgctaatttgtttatatttgaaatgtgtctaaaaatttaatttataaagttctttaagactatttaaaagaatctgtaagtgaggagtaaatatttctctaaatacaatgttttattttgttttaaagccatcatcagggagctgtgaaaaaattagttcattcttctttttaagtcaattaaaaaaaattacttacatgaacacacaaaaggtttctcatcatttgcgtatttggaaaaggaataatttcttggcttttaaacttcactcttgatttcttcaacattatagctgtgaaatatccttcttcacgaccttcaggtatttgtggaaaagaatgtaggctgagaggtcaggggtattttgcagtttaccccaagttctcctactaaaaattctattttaacaaacaggtacagattttaaatggatctacatgttaagagtaaactattacttcagaatagttgaagatggcca

SEQ ID NO: 25699 - DNA, 1133 bp, Bovine  19866881529515
  misc_feature (1)..(1): n is a, c, g, or t
nacaaattaagtggatatctatgtcatgttattaggaagagtaactacaggggctgagtatcagaagcataccattctcattaagacttgtggtatttcagagtttgggaatacactcagccctctcccttaccacttctgcatccacggggcccacatccctgaccatgtatattacaaagttgctgagtctttattcctattggtggaggtccaaacgcatggcctattgcacatgataaaccactaatgaattactaatcacttttcttgtgtttcctgtaaactggagctgagagaggcctcagcaatagtttgtttttcttggagaaagaaaaggtaaaaccttttaaaatgttatcttcgattttcaacccacaagtcagcaaaccccacctccctctctgttgcttctggtcctcagaatacaattcttactgaggtctcaaacttcctagagctgctcgctagaaacagcacagaaatggtggttggccgtctcgaagcagcaaaaacaggagacctcagccctgtacgtgtgtctcttcggcacaggaaactggctggacagagggcaacccgcaccgcagataaatcagcttaatacacacagacctcaggctccaaggctcctatgacagaaaccatgctgggaaagtcccctttaaaggcaattactgctcctaagagaagtcagtcctctctgcatctgtactgaactcatcttccccaggtgtctgcagacagaaacagatgcacctttttcttaacataggaatataacgctgtgttagctacaaaaacacagaactcttttaagcatataccttagcgtcttaccccacctttactcctactaacaagcatctcagtgaaaagagttttcgttctgtgtctcgaaaaccccaagaagacaggtcttttctatggggacacacctccaacccagtgtgaaaggacaggaacacgctattctaacaagagtgagttttgtctgtaactcccaccaactctgcgggattaaaggattcctgtagacgtccttctgtttcacaaccaatcgctccattatctgtcctttgagcaatagcgaaagaaactccgtttcgaggatccgttcaggaaaccttcgg

SEQ ID NO: 25700 - DNA, 748 bp, Bovine  19866880115906
  misc_feature (1)..(1): n is a, c, g, or t
nacataaacaagcttaaagagctatctatgcttttggatatatttctagataaaatattaccaaaaaatattaaaagaaagcctgtactaaagaggttatgcaaaacaggatccattcaataaggattcatacagataggcaaacccagcaatgcctgaactgttatccaagcaaactgtctcaaaaattaaaataagcagttggagttactacctcaataccaggacaagtaaatgtcgtaggagtactaatcctggagcacctatatgttctttttttttttttaattttattttatttttaaactttacaatattgtattggttttgccaaatatcaaaatgaatccgccacagatatacatgtgttccccatcctgaaccctcctccctcctctctccccataccatccctgtgggtcgtcccagtgcaccagccccaagcatccagtatcgtgcatcgaatctggactggtgactcctttcatatatgatattatacgtatttcaatgccattctcccaaatcaacccaccctctccctctcccacagagtccaaaagactgttctatacatcagtgtctcttttgctgtctcgtatacagggttattgttaccatctttctaaattccatatatatgtgttagtatactctattggtggttttctttctggcttacttcactctgtataataggctccagtttcatccacctcattagaactgattcaaatgtattcttttt

SEQ ID NO: 25701 - DNA, 1588 bp, Bovine  19866880346175
  misc_feature (1)..(1): n is a, c, g, or t
naactactctataaagaaagtagtgttattgtctgcaattaataaactggaaaactgaggcttagaaactttgagtaatttggttaaatcttaccactagtcatagcagaactttgaggaaaacataccctagtctggcccatgaccttgacaactatgctccactgtctcctgaagactaagagtcaagataattgaaggtttacttagaattttgcactgacactttcactgaggtttacaagtaactaagagacactttagtttgaattttgagattgacatgttttgcttaccattctgcacgatagtcattttctgctgaaaagaatgatttacttgtataaaagaatgacctgtgattggcttattgtcagaaacaaataaaaaaagttataataaacatgacaggttattttgaaggtggtgaaaacctggaatcaggtgcagtattaccttttttgtatatgtatataatttcatttaccttgtctggagcatccatttttgtctgttttttggaataataaatagagttattttaactgagtgctaatgtggtgagtgccaggtgagaaattcaattgaaatgctgtcacaagatcctttttgttttcttgacaagaggtgtcatgttcccttgaatcctgatacatgggagtgtgaactgataaatagtttggagatgaaattgtcagtcaccattatcacactcaagcaattatcttttctggtggcttacactgccatgaaatgcaagttctggggtgtgaagcaaatagaaggaaaaaatatgaatgtgaccataaattggaagtgcttaggttagaaaactgatactgcaaaggggcttaaacatagggaggaagatttactgctgcttctgagactgagcagaggaaggaagctaggaagagggagaagatcagaggtggatcgagcagaaagctaaggaaacttaatctttagtgtcacttccatgatgaagatcattccagtgaatgcaattcatcccaacagctgtatacttttgtaaaatttgtgcaagacatgtaacagcaatcaattaagtctgctgcctttttctactctgacttctcttccattacatttctccttcttttgagtggttttggagtgaccctagacattgtttgaggcctaaggaaatatgagtggagaatatgttttgttttcatgtaatgaaatatatttatgtgatccacatcattacttcccatatatttaagttactgtttcctcactctggcataagaatagcttctagaaatactcctgttgcccactctgccaacttgattgatgctacgattcataggtgtgtggccaaagtgaaatgaatatgcttaaggtgcccagcatctaaagtatgtgtgcagtggaacaaaacaaggtttaagatataggcagccagaagccagtctatagaaaatttttctaatcatcagatctgtaaaactgtaattgggggatttggtttctatcagtattctcaactgtcagaaatatagttaacaatactgtatataaattaatccagatgtatttttgattttcttctgttgga

SEQ ID NO: 25702 - DNA, 3280 bp, Bovine  19866880385736
  misc_feature (1)..(1): n is a, c, g, or t
naataataaagcccttaggggaaaaataattccctaagatgctataaaatgcccaaataggatgaaatcttctgccaagatttatactgactttgaggtttgatataagcaactcactgtgccttccacaagacttaggaaaattttattggcatttattcaaataactgaattaaatggaaaggagcaaatgtgagagtcaacagatttaaattgcaccctctaactacaaaggaaggtttgcatttgtttatttagatgacagtccatcttggtgccatgatttaggatccaagagcctagtaaagtgagatagcagtgctcttgaattcaacaagaaggcaacatgtttggaagagaatattcccaagctgtgctaatatgaaaacatctgtcagttacagattaattttctccacagattttctacctttggaaacatctgcagctgaaatgtatttctctaaaatgtagattacagaggtcaactagtttatcagccattctaagaactggctgccttccacagtacacagatatagctgaaatagcaagcttaagtgcaaacccttaaaaccagagcaaaaagcagttgggtgagggggaaagactttcaaaaagaacacattagtactaaaataattcagtccgaaactcacttgaggtctgccacattatttcaatagagtaaaatcaacctgttactcattatattaaaggaaagtttacaccaattttctttcccacatacatttttctagcaaaaacatactttttcaaatttaagtaaataaacaaatgaaaataaattgggcaaacaaatgcactttgcagaatctttatttgtaggtttatacttaattattcagtgttttcaaatgcacatgtataataacaagttaggaaaatgtaaaagtagaaatctatccaaaggtctaattaaggtgaaccttaccaaacaattaacaattgcaatttattttagactgagatttaagactctgtagggaacttgcacacaaacgtctgaatttttggtgatgtcatcagaatataattatagaagaatctatagttcttattattttaatattcttattaaaagctaaatttgctgtgaagcagtgccctgttgcaattaacctccttcttatctattcttctaatcattatcctatctttttttctgattcctttctgcatccaactcttattgtcacacacacaaaaaaagcctcttataaagcctctgtgtatttggggatcctgttatctaaataatttgtagaaagaacattttcttaaagcttgaaatgttacactgtaggaaggattctaattgaatagaactcttgagaatcctttataggtaaaaaatatgagtgagatagaaaggaaaggtgagtccataaaataaatttattgttttaagaataccacccattttttgccattatgagtattttctgttgtttttatatttactggatatattacctatcgttttcatagaactccagaactttaattttaggctggaaatctaaatatgcatcaaaattaataattaaatattaactccccaccttgcactgctgtgtattctttattgtggaaagaagatgtgaagttgtaagcaaagtgctaacagccataagcatagagcctttgtcaaaaactcttaccctcttttaagttgaaggatttatgaagaggaaaaagaaaaatatttaggcatacagccagaattgaaggcagcaggttatcttggtaggaaactgcaaaataatattttaccagagggtaaagcaatactttgaaaattttcattgaagctataaggttctctatctgtatcaaagtgcttggagatcatttcaaaggagcttaaaaataaataattgaaaaaaaaaagttatttagaaccaaaggtcttaaatttgaatagagaacagcaaaagagaaaaatcaacaaaggatatctgttttgtcaaatctagctgtatatgttgttaaaggatttattctggtaaatagttgggaacattatcatttttatctctagacatacacctttaaatggattaaaggaataattttgttaaccctatgaggatggtacaaaatgtacttcatgatgaagccattaacaaagtatgctttattaagaaagctatcaatgaaaagatgaaagattataagatttctatatgtgaaaattgttattttttattatgaaaacatatcctcaaggctttccaccttgatgtcagcgtgtgttttgaaatacaagaccttaaatattcctccattatgaaatactgaagtttgaacttaaaattatatgcttctaaaaatattactggaaaggaaatttattttatattattacctatattggtaatcttgaaatatttcaagacaaggcatactaaaattaacgtatttcgctgtgatgaaaaggtttatcttcatatagaactcatatgaaagcttcagtttctgaagcaagttttagaaataacttcatgctgaaatttacattagtctccttaatgtttctaaattgggccatctgaaaataaacgacaattttagtctttatatactttgtctttaaatgaaaaaaattcaatagaaaaaaagcctgaagttttattcagtgtttcatcttatgatagaggaaaaaaattatacagaccaaagaaatgttgtgaatgccatgtcaaaaatttgacacttctaagacttttgtgaaatgctttagtaaagaacaagaaaattatgttaagatttgtcatagagaaaaaaattctttttaacttttgataaattagaacttttttttattcagggatcttaaactcttgaataagggagtatattgtataatgatcatggtgcatttatctctccacctatggtgtcagcgtaagggtcataaggaaaatccacatttccataaatgtctcctctggttgattgccctcactaaaaatagctgagcttgagctgacactctggtaggtcttgtcttattgagggcacccttagtctttaaaaacaattatcttttcttaaagatcagaccctgtaaatcctgacagcctatttccttttcgttgtcattttatattaatgaatggggggaggtagggggagacgtcttttatcctcactttggtccttggtctttatcccagggcaacaagaaaaagaggtaatgctcaccactcatcattcttcacacatttttataatttctttgatgatttaaccg

SEQ ID NO: 25703 - DNA, 1526 bp, Bovine  19866880412468
  misc_feature (1)..(1): n is a, c, g, or t
naaaagcactaaaatgagactataaaaaggattgaatcatttgaatgatactttaatgtcaatatcttgccttaaaattatatttttaccaaaggtcatgattacacaagtgtttatgagattcataggttagatatttgtaccatatttccaaatttagaatctttttagatttgattcctcaataaaggttaaaatacaagttctcctatctcaagttattgatactagaatggaaattcagtgaccctactgaatcctatttttcctgaaacctgaaatcttgtaagtgaatgtaccttattgcttgtattctctgtagatgttgacttgaaaagtcacacataatgagagcattgctgaagtgataaccctatcatttttatacaggttcagccaatagtttcctgatatcaacaatagattcaacggctagaacaagtgactctcctaaaatcctatgacatctatagtgtgaaagtaatgaacgcattgctcaagagaaatggtgtggtagaaatagcagatatttactatctgtctgacagctctcaataataggaagttgacaggttcaatacctaaatgaattaattgttctctattaaatatagtaaatataaagaattatgtataagtgacatatgtataaattcatatatttatatatatatatgttatatatataaagtagtttactgtagtttactatatatataatatatatatttatatatgtataagttcatatatagatgtgacacagatggttcattctctggtgtattttagtgaagtgtgtctgtcagtcactttaacatcctagaatttttaagatttgtgaacatatcgttttaaaaataagatgcaggaagatagtatagagttatggttaaaacaactgactctggatttagattcccttgttttaaacctagttccacccatcagtcattaataagttatttcatgtttgtgcctcagattctccacctgccaaatgggcaaaataatagtccttaatatgttataggcttactgtgaggaatatatgagaattgtgtgcagttgtagcagatagcttgcccttgataaatgtacaaaaacattaaatattattactctatgtaagttgaccttattgtagatgttttcatctaaagttatgtgataatcaaattcttgctcgaaaaactatcatactttttttgcaattaaagaactccaaaaaaagatgatacatttgtatgtccttgttaagctaacatagagttttagtctttgcatttcaagaaaaaagtattcattgttttgataattgggaccgttatgtaaaaatactccaagaagtcatcaaacagatgtgttctaaaattttattaatgaaatatgtgcattgcaaactttgaaattttcattttgttcaactttaatgttgaattttaactgtcatttttttatggaataaaaatgtgaaaagatatttgcttatgtaagtactgctgtcagtatattttaagtagtgt

SEQ ID NO: 25704 - DNA, 835 bp, Bovine  19866880439309
  misc_feature (1)..(1): n is a, c, g, or t
ntttcccctaaattttgtataggccagatatcaaaccagtaacaagaagaagcataatatttccattgtatatgtgaacatttcctaatagcaactattaatatgatgtttcaggaatatccactcaagaaaccataaagatttaacaactgtgtagaaaagtgattagtcaacaagagtctttctgaactacatgttcatcttctcttcaatcatttaaacagcccatcagagtgatgctttgttagaaaagaagggtaataacgcatgtgatgagtatactgggcaatgacaggaaagagactcatccccaggggtgggcactatctatacgctggcatttgattttagaaagcttgcaaatgtatttgattgaagagatgaaaccttcccaaatctgtttcctgagttcagaaatacatatcttcctcctcatgtacatttcttaagtattttaagatttatgagcaggttaaaagtgttctctctgaattcacatgatgcttcctttcatataaaaaaatacctcagctttggcaatagataaaacacattatacagcacatgagagggtcaggtaaattcaactttgttgaatgacctgcctcagctcaaacctcagtatcttattttgttcttggaacaggaataaatctaaatttgattagtttaaatgtgtatctttatattttaaatgtctggatagggtgttatctagaattaagcatcaaaaataatattgattaggacttccccggtagtccagaggttaagactctgcacttccactgcagggggcgcagattgatcccggtccgagaagttccacatgccc

SEQ ID NO: 25705 - DNA, 1423 bp, Bovine  19866880442214
  misc_feature (1)..(1): n is a, c, g, or t
naaggaaaaatcagttgtaattttatttgagggaattgtaatcatgtgctctatttccaaataaattagaacaagaacttattccattgccatgagagactacttgtatagttgagtatttcaaaggcatattcagactgccgtacaccatataaacacaaacaggaagttcacagtatataaatatgtacacaaagaatattcagatatattattgtgtactataagaaaaaaggactagaaatcaagagatctgaggtcttatcctttcctgtgcttactcatgtttaaaattctagacaaatccattttttaatggactatagaattaaaaatttaaatcagggcaaagaacaagtatgtgagtttctgtgctcccacacacgctagtcaccacttagctatcagggcattcatttctgctggccagaatggcagtctcaaaatccttttttgtactaggctctaggcagttccttcaactgacttgaatttacagcaaatacaaagttcattggtcatctggtcaaatgaccttaaagcttccttttgtagctaatttttaaaagtacattttctttcattccaaaaggatttgcaacctgaaaagaactcatttacattcacgtgtatactagcaaaataagtgcaaaaagtatgaaaacttctgtacctttaatcacagatatatatatacattcttttcctcttcctcttctcctttttatcctttcttcttcttctccattcccttccttcttctcctctcccttcctcctcctccccgttcctcctccttcttcttaaattacattgattataaataggcaaaaatagattttatttatattctccagaaaatttcacaactgaaactttccaattcctttacaacatagaaaattggcactgtcaggaaaagatgtttctttgtacttgacctaaatagagagacatacactatatttctattcttaacattttataacacagatttcatttatttacattctgtattttccacaaaagaataaagttagcttgtgaaatatacatagacttatgcactttcctacttttttcttttttctatattattaaattttcactgagtatgcaccatccagaaacgatattacatttgaactacattcctcccatagaacacctttcctaacaatgtatatcactgcatcttatgttttatacttatcctctttttgagtgaccagtctcatctgtacattttcctatgtccttaaataatgaggctatttccagcatttcagaatgagtaattaattgcctagcctggaatccatctgatatcaaagtattaatgcctgaattaattttcaacttataactgttttcatttacacctacttccttggtagttatttaaggcaatttcatcttaagt

SEQ ID NO: 25706 - DNA, 2111 bp, Bovine  19866880443746
  misc_feature (1)..(1): n is a, c, g, or t
ntataaataaggaaggaaatgtagatcattagaaacttccttatcattcctaaagcataatcaagtgtcctttctggattctggtttatatggtactatgtaattcatgtcacaaataaggcatctgtttgatagatttcaaccaaaatttactgaacacttgctatgtgcctggcgctacactaggaacttgagctttcagtggtggtcaaatgctgagatggtccctgttgtcattcacttaggggatgcagaataaatatctgaaagaatccatgaaagaatattatgcagacagaatagatacattatgaccatccacctcccttcaattagtgttgttgtaagccaggaattctctcctccatatatagtactcaagagcatgaacttttagttttaataggcccaaaccacttgttaagtaaatggccatgaaatatcactttgcctctgtgtcctggtttctgcacatatgcaatgtctgttaaaagaaatattttagcaggaatattctagcagaaaaacctatatctgattctgttctacttccaggcataggggatatttaggccaggttatgtgatttatttcaaccaatgagattttgagcagccatatgtggggcttatatatcaaaacatagaagaaccaaaactgtattctctttccctctcaagctgaccaaggagaacatttgttctttccaagcagtaaaataacatgacagttatcctgatctctcagggaaatatagatatgcatgtggcaagacaataaatattattctaattccttgagattttaaaattacttattacttcagcactgcctaatttattttagattagatgaagcatttgttgtgtttagcacaatgtctcagattcagcaaacactcagtaaatgctagccttcactcatgacatagacggtttctctgaaaatgcttagtttattttcctggtgtttaggaggctgatgttctagacatttgtcttgtataaaaactctcttattctttgtatggggaagctatcaacttctctccacacagactcatgtgaaatgactaactccttcttttatttaaatcactgtacgttgacaatatttgctgtaccaaaggggctcatgttattcagctccacaaagtcgcaaataatatatatttgaaaacaagtggtagctgatgtaagcaccagatggctcaaacataaaatcaagggagctgcttttagctctaccccagggctcttaaagccgccttctcagtcctcctttatatgttgtagtttatttctgaagtgacaataaaattgggagcagcagaatggaaaggagcaccacggcctcggcatgttttaacaatctgctatgcatatgagatgaaactttgccatcaccagaatcaacaacatcttgacacatgattcaaacgtcaagaatatccaagaatgtaagatgtctttgaaacagtgacaagaagctgaagtcaaatccagattggagtccaatgcctgacagaattttgtcttctcttttctgaaagctgataaatatagagggcagttttgaccttgggggctggacccctaggaaatccatttttataaacccttgcattggatagctgcatagagtgaatttagtgtgaaagtgtctcagaaaagtgttatgccctaagaagcaggaatgtgcctactcagatatgcaccagctatggaaaggctcatgaggcagcagaacaggccccatgtcaagaggagagctggtgggactattctagtactgttttgctacatgataaattatctctaacttattggcttaaaacaacaaactattgttatctcagtgtctgtggatcagaattccagaagtggtttagctaggtggttctagcttaggtctcttatgagggagtagtccaggtaataactgaggctgtagtcatctgaggtttgatgagtctggaggactttttttcaagagcattcagagtgttgttggtaggatacctcagtcacttccacatggccttttttagctgcttgtagcaggccttttcccaagctattaattaagggggcagtgggtgaagcactcaa

SEQ ID NO: 25707 - DNA, 1319 bp, Bovine  19866880452140
  misc_feature (1)..(1): n is a, c, g, or t
nttccctgaggcactgcttcattctggatttcattttggctagataaggatatactaaaggattttaataacaaagtgatgacatggagtcatcactataaattcttgtaccatataaatagggaagaaaagtaataaatcaattgttattaaaggaaagaataagactgatacaaattttaaatctataaatccatttctgcacactaacattaaatacataaaagatatatctgcctagttaatggaaggaaataattttaattattataaacatatatatgatatatataaacatgcctattataaatattatatataaaatatcccataaaaaaggagaaaaggcatttaatgtaaatgtatttaagtatataccaaaatccatagatgattattcttgtcacatgattaaaaaacatcaccttagtcatggaacttccaggacatctttagatgaaagagtgagatcacaatgataccctttgactgatttaaaactaataatatctggcatattaaatatcttagttgaaatgctagcatcatatacaaatcttatgtcaagtttggttaatattttatagagcaaagtgcatagaaaatagctttgaaaataaaatttctgctttaatttttctggagaacagaattattttaagctaaataaaatgtatttgttttactaaacatactaaagatataagcatgcatttacaaaatgcatataaaatggatataccatcagatcccttggaggaggaaatggcaacccactccactattcttgcataggaaatcacatggacagaagatcctggccaatcacagttcttagggttgcaaaaagtcagacatgacttagtgactaaacagcaagaacaaattataccatcacagtgtcatcaaaagtcaaagatgtccgtgcttggtgtacaaaggtgaatgtgtgcttacatactagtaatgtgaagacttaacctagttttctggtcttttaactggctcactggaggcttacatactgtgaattaagtttagttgtttttatttggtctaaaaaaatccctgtgcttaacagaaatttcattgacagataagtctaaaaacgggaaattaataaaagagaattaatcatagcatttcaagaaatcattgatatatcctagcctaaaatagttttttcctgttccaatacatacgtcacaagttattatcaccaagtgtacatgaaaatataatatgtaaataaggcttatctaggaaaaagtagtgactttttataatttaatatatattttggaaagtgtactatataa

SEQ ID NO: 25708 - DNA, 1581 bp, Bovine  19866880455044
  misc_feature (1)..(1): n is a, c, g, or t
natgctaaattgtgtccaactctttgagaccctatacccattgcctgccaggctcctctgtccataggattctccaggcaagtatattggagtgggttaccatgatcttctctaggggatcttcttgactatgaaagaataaagcttgcatattataaaagagtaatgcttacaagtttgttttaaggtaggagaaattccattggcaatccatatggagtttgcaatgttatttcattaagtacttataaataatatctataaaaattctccttcaggatgtaaaatgtagagccccatgctatagtatagtaaatttcttttataatgctagtgtctgcgacagcataatgtccatggatgtaggtgttctaagttacattcagggagatgtattatacacttaaaatggtgattatgtaggtagggctgacttcatagcttgcccaggtattatatttcaagatgctagaaagggaacaatttccctaaatccttgcccacaagctaattgttactctcatactacaagtagcttttctaaaccatggaaaagtatggtccagtctctcctactaagtgatttggataaggaactggaaagtggatgtcagaagatatcttgtgaacactagtctaggctgtattctcaggagctagaggagtagttgaccatgaatatgcaatgttttgcaaaggaagtaagaatttgggagccatgtagctcccatgagaatttgggatacatctcatgtggatgttttatacctgtggtcacagtgtttctgcaggaagggctggattcaagaaaagtcaagtccacaacagtagacagggaaaaattggattagagacaaaaataagttcaccttcaggatcctgtggagcaggtgtgagttagaaactggagaggtctcttgaggtaatgatgtttctaggaaatgaaaactccaggacccaggagaggaagaaagtcttaaggacgtaacacaacaagagccagagagtttcaactttaaaatgttataccatttatagagtagcatgagtgatgaaaaaaaaaatctgtgaaagactcaaaaggtaatatggcaatgaagagaatgaaaatgatcataaatggagaagtgaatatatgctgaacttgagagctccggataacacatggtggatgataaaagatggagaagacaaaaaaaaaaaaacctcaaagactaactgaccactctaccatttggcctttgacagtagaagtgattatcctacaatgctgctaaatatatggaggagtgggcaatttataatatactttaagcttcagttcagttcagtcgctcagtcacgtccgactctttgcgaccccgtgaatcgcagcacgccaggcctccctgtccatcaccaactcccggagttcattcagactcacgtccatcgagtcagtgatgccatccagccatctcatcctctgccagccccttctcctcctgcccccaatccctcccagcaccagagtcttttccagtgagtaaattcttcgcatgagggggccaaattacctggagtttcagcttcagcatcatt

SEQ ID NO: 25709 - DNA, 2478 bp, Bovine  19866880461188
  misc_feature (1)..(1): n is a, c, g, or t
nattgtttcttctgggcttagccaagcaatgtccctggaaaagccatcgatagtgaggctgtttgatgatcttgcagaaaagattcatcggcaatatgaaacaattggcttggacttcacagtaagcaaaatcattttttaaattcaaactttagtgcaaacactgctttggttaaaatgctctgatttttcttgtctatttttcagtaatcattttcttggcatttgattctttttttttttttttaagcattttatttctctttccttttaatgctttagtgatcattactgtaaatggcagggagaagtagaaagttgaagcatggccaggagagaactgcgtggttttctaccaagaggccacaaagtagattacattgttggtatttgccgttattccctgtatatctgtgggctcatttttctgaaagttggttctgttttaggaggtcagtttcactagtcaaagtcacagaagattgactacagggttcataatttatagtgaaaattaaaattggatgatttgacaaatgaaaaagtaagtatcgggttcaatagagctaagatgaagatgcagagcagattatcatctaaaaattttcaaatgcctatttacacacccaacagaattggggatgggtaagagatgtgagtacagttgaatccccctcttttctgaaattattttgttttacatctgtcctcagttttaaaaacctctgctctaaatgtataccttttttgcaaaatatactctatttgtaactgtcagattatactttctttttaaatttttttttaaacttgagatgtaactcacatacaaaaacctttttaacaaaacagttgtgtgcttataatcacaatagtctattctcagggttgtacaaccatcagtactctcattctggaacattataattactcaaataaagaaaccttatacccaataatggttgcttcccatttccccatacccctgctgctgctgctgctgctaagtcgctttagtcgtgtccaactctgtgcgaccccatagacggcagccctccaggctcccccgtccctgggattctccaggcaagaacactggagtgggttgccatttccttctccaatgcatgaaagtgaaaagtgaaagtgaagtcactcagtcgtgtccgactcttcgcgaccccatggactgcagcccaccaggctcctccgtccatggaattctccaggcaagagtactggagtggggtgccatcgccttctctgttccacagaggcaagataaaataattgtcactagacgtactcagagtaggagaaaatatttttttaaaggcatgattcattgggaaaacatggtcttgtgtaatcattaaatccatgcccctgtctcaaagtgtatagggttcacaactgtcccttcagtactgattttgaagcccattttgactgacatggccccatgcatttttcctggccatcagatcacattaacactgcataccatttatcaaattatgaagtttcagagaaatgaaggtagttattagtgagaaaaactggcatctattcattcaaaataactaagaaactgcataaaaagcgattgcaggaaatatacaacaaataatagcgctagttccaacagtgtcacttgtactaacaacctttataaaaatacctatagcagatttatttcagtagcataaacactgaagagtcctttgacttccaagaagatgaaataatatgtaggtcatgaatacataagttttatttctataactgaaagtatttcaccacttcaagaagtatttatgagacaaattactggaatagtacagaattaaatttggctttatatagcatctttcatacctcaagtatctcaatagctttttgaaagtacagaaatgcagtgacgattggaaactgaagaagccattatgcatttaagggcagatgatataggcttggattcagagacatgctttatgaattcagggaacaggatattcttccactcattctttataagttctgtgtcatctttatgttttacctgaactgcaatcaaggacaggcagtggggctttagtgcaatagctcctttaatcataaagtaaactgtccctaggttgtagggacagggttgccagggaagtcccaccataatattatatagcttttattataagacttgaatttctcaaaccactgaccctgtaatgataagtaaccctggcatagaacactctgtaaaatgccatccgatctccaggatataaataaacttacatttaatttcataggaagatgatagggactggaccaagtttttattccaagatggtcaagaaatggaaaagttggagacaaattggtttttcctatggtggaattcaatttataccaggtggagaaagatctaaaaaaaaaatacctgcagctttttcaataagacgggggaagagaaat

SEQ ID NO: 25710 - DNA, 2246 bp, Bovine  19866880477066
  misc_feature (1)..(1): n is a, c, g, or t
nacttttatggacagaggagcctggcaggctacagtccatgaaacagcaaatagtcagacatgactgagtgacttacacttcactacatctcattttttaggaaaagggtctttgacatgacactcatcaaacagtacagtgcctattatggttaggaggtcacttttatcccagaatcccatcatgatgatgtttcatcttctgtaaccaattgcctacactagaaatcaatgatgttggttgttcattcaataatagtgttttcagtgcttggtttgtagcatatatagtgtaggagctagggatttcatagtataaaaaatagcttcaggaagctgctgtcacaagcttacattctagtgatgagagatgcataataaataaaaaataataatagtaccaatctgtcttaatgtaattaacaaataatacctgatattaacaggaggaggagggaaaacaggaggagtagtggtgataggctcctatggaaataaatgatacttatttttggatcattttgtttctactcattatgtctgaaattcaaacctcatttgtaaactttgtgcattgataatatgttttgaacaatttcatatggctgcgtcactgacacctcaacaaatatacaaaacaataatctttgtcatcttcagatgattttaatgtaaaaaaatgatctttaaaaaattatctgtgttcaaatcagttacttatatattatatgaagataaaatagacattttaaaacactttaacactacttgtctatagtgatatgatagtgatggctatgtattaatattttctttcactattctctattttatgccttaatacaactagaatctactaaaatcttgttactctaagtcttttcccttcaatgtatatttttaaggacaaattaatatgaaacaaaacacctacattttgtgtgtaataattctgtacatattgagagatgagttaagcaaataaatgtttctatctttagcttatataattgtggttatagcttaaatcttatgtttcctcttaaaagttattaaaacatgcagatattcttttcccacattaattggagccctgccctcattttccagtacatagttgactaccctgaaagttaaataactctaattattaagattcaaaacattccatgtatcagtgaaggcaattaatgtgatttgaatattattaaatgaaaatgaactatttctgtttcaaaaacctaaatagatatgcttagggatttttacattgttaagttgcctcaaaaataattggacaattcaatataataaagtaaatgcaataaataattttaattcataacaataagtaacatgcttatttgcatgattagggtaaagaatgctttgtacaaatactaaacagagactaatggggaaacctagattattatacttctaaacacattactgtgattaactgtggcataattccactgtagcttcctgtgcaagagttcttaagcctctcctatttactgtgtgaggaaatggccatatatcacatcggagaaactgcataggacttccacaggatttcagactcactggcataatatagagtttggttggaaatacagaaatggaaaactacctaagcagtcagtgcatcagcaaagttttttttattggttttatataactcaactgtttttcttcactagctgtgttttctctctagccctttagaaagacctcaagtacccaatggctattcttttacaaggacatagggagaagtgcagggtcagaggagaattagcaccagtgacagtggaccattgaaagtgaaactgaccttctggacacttaacgaactgggcatacacaccgaggaaaccagaagggaaagagacacgtgtaccccagtgttcatcgcagcactgtttataatagccaggacatggaagcaacctagatgcccatcagcagatgaatggataagaaagctgtggtacatatacacaatggagtattactcagccattaaaaagaatacatttgaatcagttctaatgaggtggatgaaactggagcctattatacagagtgaagtaagccagaaggaaaaacaccaatacagtatactaacgcatatatatggaatttagaaagatggtaacaataaccctgtgtacgagacagcaaaagagacactaatgtatagattagtcttgtggactctgtgggagagggagagggtg

SEQ ID NO: 25711 - DNA, 1809 bp, Bovine  19866880504227
  misc_feature (1)..(1): n is a, c, g, or t
nattcaattcataagacctaagtgccaattagctaaatgagaaactcaagcatgatacccagtatttaggcagaaagaggctcagaaaagcaacagagctctgcagctgtaggctgatctgcaaggacaacaacacctgggaaagacatgacccattgaagatagtgttgcaggttgttagggcctgagtagggtgttcgagaaaacaatgcaaaccttttaaagggaatctataaataaggttctgtttggaacataggggacattatttttaataatactatgttgaaagacattttgatattcaacgtgttcaatttcatattacacattaggtaaatttaaaattctttgttaacaaaaagactgatctggttatgaaaattttagttcttaagtctaagaaatcaatgacagctaaactattaactttccaaatcaaaatcttagtgattaaaccagataaatgcaattgccttgtttacatatcctatctgaatctctgtaaaagttattttgttaagtacattcaactacatcttaccctcctgaataaatatacctatgcattacttatttttgatcctccatagtgaaagtgaagttgcccagttgtgtccaactctttgcgaccccatggactgtagcctaccaggctcctctgtccatgggattttccaggcaatagcactggagtggattgccatttccttctccagggtatcttctgacccagggatcgaacctaggtctccctcattgtagacagacgctttaccattctgagccaccttgatcctccatagttcctattaaaaatcaatgcatgtggtaggtatttggcaaatatttacaggaaggatgaacggatatttggagagataaatttaagttttcccaggaagatgaacctggaaaaattaaagcccagatcatttacttttgaaatagaaaggaatgggaaggttggagctaaatgaggaaggaactatcacatgactgaaaaacagattgatgagtagtaccaaagatgatgaacacaaacatggtgatattcactgtcattgctattatttttgcaacgcttctcagtgcacagagcaccatatcgttagaaaggttttaagatattttctgaaccctcatcttagtgtaattgtgcaccatgttctacaactacagttgttgaacccaaaaggagccacaagggtcctttctggtgtcttttcctcagagaagtaatgagtgtaccgaaatttagtgaaaaatgaaattaagcggttcagtgcctaactggaacttagtaaattagtacactgactcatgcggaggtcaagcaataattttacaaaataattcctgaaaataaattttcacttgtcaactctgaaatgtccaatggcttaacttgactgtagacttattatttaaaacatccccatcatttgttatgaaggtaatgcaaggataatattacaatgtgcctgtctcctggttgcaaatgaaacaaaagatgtggtcccttgagatttgctggagacaatgttgaatgatgtattttataaattaaatctttactacatcaaagtgtcagtcactcaagcatttatttaattttctggtatacagaagacaagctcttccattattgtcccaggaagcatctttgttgcatgaatgagctcattttttttttccttaggtcccaaccctgttccttggatgtaggttattcttgagggaaattagacttcatgtttttcatgcaaactagttttttaattccatttaattttatatatcacttta

SEQ ID NO: 25712 - DNA, 1859 bp, Bovine  19866880537857
  misc_feature (1)..(1): n is a, c, g, or t
ncctggaaagccctttagaaagtttactctttgcaaagatatatagctaaaggtaccatatatatgttcactgcctaaaggaagagagaattaacctgctactctaaatagtgaccaagagtgaaaatttgatgactccagctaagtatacacagaacatagaaacagccagttaatgttcaaagtttaatattttgtcaaattctattcctttcataggttatttaagaaaatgaagttagcaaagatttattgaaagaagataaatattctttggtaagactgcactctatctttgaacagataaaaatctcttctagtgttcctttgttgctctttgtaaccctatggattggaaatatcttcaagtgtccttcacctcaatggggtattaataatacataggtttgaggaaaagatccttgagaaattcttccaagtttctgtttaggtttctatctgataatgttcttaaatattagcctgcgtatttagtaaatggtattttctacagtgttatataatgaatatagatcatcttatatttgatataactagattataaaagctggtacaaagtcctgaacttgacatacctatttagataatatttttaaaaaattattggagtatagttgctttacaatgttgttttattttctgccgaaaacagaaaaacaaagcaaataagctatatatttatacatatttcccctatttttttgatttccttctcatttaagttaccacagaacattgaatagagttccctgtgttatacagtaagttctaattagttatccattttacacagagtagtatatatatttgtcaatcccatttcacctcaccccctcctcccctcttggtgtctatacatttgttctctagagaatattatttaatgtactataagatatcagttgctaaacctcttctctttaaatgaaaataaaatagtttctagatgaattctgagagccagattcatcaaaacttaatgcacaatagcagtctctacatggcactgaaacaggggtttccctgatagattttagcatttgaagcatagaactcatatttccatgtaatatgcctgaaattcttatatgtctgagacaatgtacttattacctagtcaaaagattggctagacagaaaatgggaagcatgtgctgaagagagagttgcacatagctctatcagtgaatggaaacaaatgtctttactatttgaaaaattgaaacaatatgaccattatgtcaaattaaatttcctggcttactcggcaatttcagaagcatttatcatgataatgtatgaatctcgttgcatatattgtcttggatatatatacaattctaagaaaaagaatctatgtacaacaagttactattctatcctctcagtgacaatgttttgatatgaattttatatattttctacttacacacacaagttaataaacacatactcacacaactccattcagggaagatgaaacccaaaggaaaagagagggaaaattatattcccaaagtgcaaaccatggaggggaggagtatatattctgttttgaagttacacataaatattcaattaacctatttctcctgtcttttttatgactacatatggtgacaaatcttcctaataagaagggtcacagaacaacagatgtgtaaaatagagaactgaaaatatctcaacagatgtctaatttttattttgcatgaaatgattaggaatgtggaaagcacatttggcaaaggatgctgctgctgctgctgctaactcgcttcagtcgtgtccaactctgtgcgatcgcatagacagcagcccaccaggctcccctgtcc

SEQ ID NO: 25713 - DNA, 1776 bp, Bovine  19866880559722
  misc_feature (1)..(1): n is a, c, g, or t
ngtgagaaagtgacataaattggagctataaaatttctgcatacagcttcatatgagaaaaaaagaaaattgaggcataagatcactctaatctcatattagtgaatgatctgagaaaatataaagagggactttttttcttttcttagaggagggtcagagaagactttatggaagagaaaaactcagaggttgtcttttaaaattaagaatggctgtaatttgaagaaaaggtatcaccaagttggagtaataacaaaatatcaactaatagatggaagggggagaatttaacttttacttaaaagaagaagatgcgtaaaacaatgaaaagagataaacaagacaagaaaaaaaaatagccaaaactgataaagaacttgaagcttgcagtttgtaatttgggttcagttttgtgtgtcaggggagagttttgagaaatggaatgacatgatccaagaggcagaggagagataactctgtcagagacatatgggactgatgagaactgggagatactgaggcatgagagcctttaaagaaaaagttaaagtcatttagctaacaaatgaccaagttctggatccaatataagttcatgtcaaaattgcatttgattaatatttggagaaagacctagaaaacatgtcccttgttaccagggacatcaaagcccctaattcagtcattcatccatttaagaaatacctgttgtgtgtcatgtgtactagaccccatgataggtactgagttcaccaaagttaataaagatatagccccactttcaagatacttatggcatactggtatggttaaagccatatcaaagttgggcagaaaagtgacagtctgaattaaattatgtagaacatgacaaggcagtttgacaatcaaaaatatatttaataaaaacctactatggtatgtaagcactataaaggctattgtaaaataaacagctcaatcccagtcattaacagcctacaccatgtctagatttggaagacacaaatacacaacagattaaagcaagacaacctttaatctaatgacaaaggtctggtacagataataagagtttatgtgagttgagagaccaaccacatgactctcagggaagacattatagagtagatagatattaatctgcactttagtggaccagttggatttgcatccagcttagacaaaagtctaacaacatctagggatgaaaaatgagctcctcggaatagcagtttggtacaaggaaaaagacatgagcttgcagtaagatagacataagataaaaacatgtatatgtgtgatgtgtgattttgaatagtgatgtagcttttttagttagccttagttacatttattattaaataggaaaaataatgagagcctttttcatattagttgttatgagaattaaagaaaacagtatatataaagtcggatccaagtatgcatgtataaaaagccaattctttcactaaatctgcaattaaaaaaaaaagaaaaacttgctagacaacaatctatttaaggatagagcccctgtctctcatttcctcttttccctagggtctagcacaattcctggatcttacagggactatacttaagttcagttcaatttagtcgctcagtcatgtccaactctttgcgaccccatgaactgcagcacgccaggcctccctgtccataagcactcccagagtccacccaaagccatgtccattggattcagtgatgccatccagccatctcatcctctgttatccccttctc

SEQ ID NO: 25714 - DNA, 995 bp, Bovine  19866880595071
  misc_feature (1)..(1): n is a, c, g, or t
naacagtaaggatagggtagaaaaagatgaatatttacaaagtgtctatattgaaagtggattgcagcctgccaggctcctctatccatgaaattctccaggttagaatactggggatcttcccgacagggactgaacccaggtctcctgcattgcagccagattctttgccatctgaattcccaggaaagcatatattaataatattgatgtcaaaataatgagtaaaataatttctattttcaaggaatatctggtctagtgaaaagacagttatctacctatttaagtgctctatcagctctttatatatatatatagtttataacaattctttcataaaatattgagagatcacagggggaaaactcttcttggggagagtgtcttcctggggagacatgagggaaaatttaataaaagagaaaagagggcattctcccatgaagaagcacatgattctagataactgttgtactattcatttatccttttgttttatccatttcatctaacaaacaaatcctctaaatcatctaacaaatcctctaaaatgtgccaggtatagtgattagcaagatttcaatccttgggcaaaagaactcactgtctaatatacctcacatcatggaagcattgaggatgttctaacagctcttagagtatgcaggagaatacaaagacagctttcaaagagtaaatgcagcaatagtgagataaacagaattccaggcttgtaacaaatatcatcgacctatccatttatccttttgtccattttaacatttttaaactgtctatgtgctaattgcttttttgaaactactctacaaatccccaagtcctagttcaaatgttaactcctctaggaaaaattcagaatctagaggaaatctttaatgtaatgtaaattaatttacttttattcagtgttgatatcacttaggatctgctgccatatggtttccattatcatgaaatttttaagggtagaa

SEQ ID NO: 25715 - DNA, 1746 bp, Bovine  19866880638738
  misc_feature (1)..(1): n is a, c, g, or t
nctgtggaattcgatggaggggggatctttaagaggcatttggttacatgtcatgtattacatgttctctgtttaactgccattgtaggagtgaataatttaacatattacaaacacagttgcatgaaaaatatgggctctttattttctatctctgagcttatcatactcccaaatcccctattttatagagtagtgggaaaatttaagcttaccaagtcaagtaactcagtcatgtttactttatagtgatattaacacagtatcttctggtacttgcagagtctgtcaatgtttatgccacatccccttctctaagacaacatagcccctggatataaatattatcttaagtgtgctcatggcagaaggaagacagattcctaaatcaaagagttgtcctttgttctttcctccagaaacttcttggcttccttaaaaatattccttgctctttatgagtattcacttccctgtagtatatgctattgaaatttgtgactggtaaaacttggttgttttcttatcatgactggtaatctccatgcccgctctgatgacttggctcattctggcatcattcataccataaattatttaaaatcttagctacgttctccatatgggcccctgcccaaagcaggctttctggctttctactcttagctatctctgcgtcatctcctcaaattatacaaggacattctgcatcctttctatagcacaaaggagccaaaggagatgtctggtaccaagacttctctcaacataaatgtaccatactatcactgtcctcagctcagcacccatacacacaacaaaggtgttgctgctgattctattacgtaataccttcccagaagcccaaagaaaaaaattgggacgcaaattcttcttactttaacttccaccataaagtgtacattttccatttacatattttgttcccacctttcaaggatgaccagggtgggactgggcagggcacacagatagaaatgattaacatcttatctttatgaatattgtataggcaacaaaataaaaaacagacaaataggatggcatcaaactaaaaagcttctacactgcaaaggaaagcatcaacaaagtgaagagacagcctatggaacaggagaaaatacttgtaaatgatatatcagataaggggttcatgtccaaaatatataaggaactctaacatatcaatgaacctgaacatgaaagtcgcttagtcgtatccgactctttgcgaacccatggactatacagtccatggaattctccaggccagaatactgcagtgggtagcctttcccttttccaggggatcttcccaacccagggatcaaacccaggtctcccatattgcaggtggattctttaccagctgagccacaaatagcaagaaacaaataaaccaatttaaaaattgcaaaagacttgaatagacacttctcaaaagaatacatacaaatggtcaacaaatatataaaaatatactcaacatcattaagcattagggaaatgaaaaattaaaaccacatgagataacagaatggctattaacaaaaaaacaagacagagaagtgttgatgatgatatggaaaaaagagaatccttgtacactgttggtgggaacgtaaagtatagccactctggaaaagagtatgggagggttctcaaaaaactaaaaatagacctactatatgacccaacgaacctcattccatatttcatcaggca

SEQ ID NO: 25716 - DNA, 1078 bp, Bovine  19866880657048
  misc_feature (1)..(1): n is a, c, g, or t
nctattcattcttagagtcagacagcagcaagggtgaggggttcttctgtttcagatggaggaattaatatgtgagggataagttggtaaaacaaagatgatcagatcattaataggggaaagatgaagtaacaattctcaggttacaaacttggatcatttttcatctctggacttccaaatagaacattttaacagctagtgatctaggatccctttgaagtctagacaatgaaataatatgaataaaaatgtttagcaataaatatatcctttaattgtgtatgacatggattttcttgagagcttttttttttttttgctccacttaaaaaatctgctagactacctactttatagggacatgagtgaagcagttctaaaaataccctcctcaacataagctgtgctcacaccaagccagttatcatgacaaatacttaaattttttgtcaatcatctggatgtttacatacacagttccaaacatctggttgttgaaaaatttatagaaaataactttaatagttcattttgttcaagattgtttaaacctaaacttaagatagttaatacttttctaataaaactgacattgctgcatctgaactcttttaaggaattcctttataaatggcattaatacacattgtgttatgcagctctgctcagtcatgtccaactctttgagaccctatggcctgcctcctgccaggctcctttgtccatgggaattctccaggcaagaatactggagtgggttatttcttcttccaccagggaatcttcccaacccagagatcaaacccctgtctccggtgtctcctacattggcaggcagattctttaccattgagtcacccagtaaacccattagtacacattaggcaagtccttattttggggggtataaagtcccacttggtgaggtgctagttgaacgaaatgatgttggaattatcctaacagactctgtgacgctatctcctgtgtgattaaatctgaaaggtagacatcagagagcttagtagaaatgagcatatttggggtatttattttttttaagttgattaagaaa

SEQ ID NO: 25717 - DNA, 1453 bp, Bovine  19866880681450
  misc_feature (1)..(1): n is a, c, g, or t
naaggtatcaggtaatcatgtaggcccttgtaggctaaaatgagtcctttggcttgtattctgagtgagttgggaagcttttggagggttttgaccaagtgacatctgacttaacattttaaaatgattttctctggctgctgagttcagagtacactgatggagaactaggccagtgctaggagagttcctggtaaatattataaggaaccaagcatcacagaggtgactagaaagaaaagagtgctggtgactaatacatacatatatataatcaatgacaacaatagaggactgatttccaattaaatacactgtaatttaggacaaggagattatgtcatttaaaaatggaataaaatattatttcctatgtttatgcaagtttgtttctgttatataacttgctgtataaacatctgcctggctattcataaggtatttactaattaggatttaaaagtgtcttgttccttcatttgtttcccataaggtggctgtgatttgaatgtcctgttgtaaaaatgcaggtagtctgtaaagggggaggaattgggtatcagctaaattcctttacattttcttgccttcacttttccccaattaccaccgagaagtttggcaatttaaaatatgaatctctatcactaacataaattatcaagtctccatagtaataacttcccattaaaatccttgaagttcaggttttacatgatgagctcagagatggctacataaatgtgtggctctgcaggcaacctgtttaatctaatgtgaaagccatcatgccttttataacttacccgcaagaataactggaaactgcagtatgagcaatagagtcctgagctttaaaaaggaatattcaaaaaaaaaaagaataaaaataggaagagtgtattccattgtgaattttggataagtgtatgagaaggacatctcaataatatctctctaggttgttgacctgaaggatccactagtcgaatatgtggtcgtgctgatgcagagagtgaccactgattaccttcacttcagcagagcactagggaaaatatacttagaaaaatggaaatttgaataaaagaaagtgaaagtcaaatcataacctttgatgttaaagagtcaaagggaaagatgaaggctgccgatccaatgctctccaggatattctgagggaaagggagtcctgtgagattctttagtcttccaaggaatgaaataagaaagcaagacttttaaaaaatcaccttattggaaagattctctcgaaattatagggaagcatagaatgttgagaatatttcagatagaggaataatgtatattttgttgaaacctagctggatagatgtaatttatcagagccaacaggtaaatacaatatcatatatttctacagagtttataatgtataaggcattttacatacattccctcataaaaccaa

SEQ ID NO: 25718 - DNA, 1936 bp, Bovine  19866880704431
  misc_feature (1)..(1): n is a, c, g, or t
nagaactagagtggggtgccattgccttctccgataggtaagtatagttaactcataaatttatataaatatgtgtaaaaaatgaataattgtagaatagtgaaaaaaagtcccaggatatagcctcctggattaaaataaattttactggaaaacacagcaggaaaaagtgaatatcttagtaaaattctggaagacagacaggttgttgataagggaaaggcaattagtctcacgtttatttaatgtgatggatactgactgctagattatgttgacagtgctatataaaggttttattttcaggtaatagaatagtgtagaaaaggtagctaaagagagtagatattggagatttgcctgatatatttgtttaataaagattaaaacatgatagaaaaacatatggaatatatattcaggtcataaaaccataatcactctaaagaataattattttgatttcctttttccatttacttaataaaaagggaaatactatcatttttctgacaatctgtgatatgtaacagtagtcttaatacattaatgggtttcccagacttgtttgcatagttcatatgaagtatgtattataaattgagtatctattagccctgtgaaatgtaccacctggcttaaacatttttaaacataggaatgcaatattgacaaaaatctggtataaaagcttacaattttcttttatttttaactctaaaaagtgttattatttttatataacaatgttggacacatcagacttaaaacaatttcctaacattcacctgtccccctgcttaagcaaggtctccagaaatggtccccaaggacaatatacacataaaagtgattgattaagaaagtagccagggaagagaacttctcagtcagataaagcacatccatgggtaaaattatacttaattgttaaatattataaagtatctcaaagattgggaacaaaagatggatgtttaaccacttctatttttaatttgttaaattgaaacatagttgacttacaatgtttcaggtatacataaaagtgtgtatatatatctatatacacacatagtgtgtatacactatgtatatatataaaagtgtatatatatacacacacatagtgaagtgaaagtgaagtcactcagtcgtgtctgactctttgcaaccccatggactatagcccaccaggctcctcggaccatgggattttccaggcatgaatactggagtgggttgccctttccttcttcaggggatcttcccgacccaggaattgaaccctggtctcttgcattgtgggcagacactttaccatctgagccaccagggaagcccatatgtaaatctttgaggaacacatgcagattaggggagaatggcaggcctgcaaagtacatggacgttctgagccctttctccataccttgccctctgcatctcttccacctggcttttcctgagttaagcataccaaaatcattacatacaaggatctgcaaaacatgcacaaccatcctcagaacaatcatccatgaaaaggagaaaaagatgggaacctatgagaaaagatcttctgtagctaaatacattaagaactacaacaagacaagtattgtgggcagatctgtgataaattcaaatcccataccccctggggaaaataattatgttaagtgttccacaggagtaagttttgaacccacatcagatatcccagtccagaggtatgccaccaggaagatgaacctctagaatatttggctttgcaggtcagcgggacttaactgcaggagccccacaggaccatgggaaatagtgacttcattcttaaagggcacatacaaagtcttatgtccacaggcatacagggcaaaagaaataatttgatagaagcctaggccagatctacctgcttgtcttagagaat

SEQ ID NO: 25719 - DNA, 1775 bp, Bovine  19866880711250
  misc_feature (1)..(1): n is a, c, g, or t
ncttttaaaggtcccctgaaacctggtagagatcagaaaagagacttcagcctcagcacagggccttcattctctctaatgcttcttccttcctatgctatggacttcttggaatccatctcttttctgcccatttttttttcccctgagagaaaataatttatcctttagatgaatgcagagaattttcttaatatctctcacttcattctcttcaggggaaccttccagctttccaattcgtcatcctaaatccaggggacctgatttactttaaaagcatacatccaaacatcatattaggcgctagaaaaccctaccataacattgatgaatgtaactcttcccaacaatgcctatgactggacaaaagactaattcttaagtagttgctgaaaaatcaagaaatgttattcttgacccctggctatatttattgggcttctcaaggggcagagtagtaaaaaatctacttgccaggagacacaagagacacaggttcaatcccaggttggaagaccctctggagtaggaaatggcaaacccactccagaacttgcctggaaaattccatggtcagaggagcgtggtgggccacaacccataggattgcaaagattcagacatgactaagtgtgcacaggtgcccatccccccaacatttattatagaattcttaatgggcttgtatatctatttccataccctcagcaagtcatcaaaactgggagcattgtagggggatgaggaaaatgggaacaagacaaaaatacacatatccttacaggcaagcctggattgagtgaagaaacattaaacatcattttgaagtgccaaaatgaaccaaactgtattccccaatggtctggatgttgtgaatgtttattttgaataaaggactattaaatagtttctggcaccttctggttaaggtgggcatataactcctttaagattttgaacccaaaaaatggttaatgatttgacttattaagaagtaagtctcagctgtgtgactaattatctacattaggctaatctggccttcttttatgccattcaaatgaggtttactgcatagcaaagcctgcttttttttcttttcttttttaaaaataagttgccccacgtagactcatcaaaggtttatcactttctaaacgctgaatggaggaccagataacatttgtattataaaacagattaccttttccttttttctgtgtgtaatatgtatgtaaaaattagacattgaagatcagagaaagactacaatcatctttttcttttattgtggaagtctccatttaagaagtccctagacttagaactagacattaggagaggcgtctgaggagtaaggagtcatggggatgcaaggttaaagataagagaactctgtatgggattttaatccactggggaagctgtcacagcataattagaagaataagctgcgtagggaccatgcagaatgcagctgctcaaccacagcctatgacaatttagaaaattcatcttttttagcctcaaaataaaagcttttcccacatcaggactgtcgggagaatatgtcttctgtaaactctgcatgaagactgatttaagattcctgaaagaatacagcatatttcattggggatatatttctaaattagaatagcttttcttttatagtgtttcatctttttaactcttcagtggtttaagttcttgattttgtatggctcatgtatttctatttttgaaatggtgcttagccaaagtctaaacta

SEQ ID NO: 25720 - DNA, 789 bp, Bovine  19866880719290
  misc_feature (1)..(1): n is a, c, g, or t
ncaatcttgattccagcttgtgcttcttcccagcccagtgtttctcatgatgtactctgcatataagttaaataagcaggttgacaatatacagccttgacgtactccttttcctatttggaaccagtcagctgttccatgtccagttctaactgttgcttcctgacctgcatatatgtttaaacatagtcaaaaactaaacatcatatttaatacattctaagtctcaatagtaaacatttttcaattaatttttcaacatcttccaaacatcaatgttcatatatatatatattttaatgttcgtatattataaagggcattttattttgtttctagaggttaaatggccatttaaatggccatggcagcatcctgcagacttgggctgactatttccacttcataaataaacagcttttctcctaggactgaaagaggctctagatgtatgtattccattttgaaagaaacaaaatattattaagcatttccagagaaactcactggtggatagatagtaaagttgcctcaaggtccatcggggaagcccagagattatacaaacattatttgtcagcaaatatatattgattgaatacacgttggtttgccttctaattgctatgtttccttacaaggaactctgtagatcagggattttagtttatcaaaagaaaatgaaatggttacagtttgacctgacattctgcatatggggaaatacacaacagagttatactttttgaaagggactttgggcaaggaaagtgatttatagaacttcaa

SEQ ID NO: 25721 - DNA, 965 bp, Bovine  19866880757749
  misc_feature (1)..(1): n is a, c, g, or t
ntgaagaaaagagaaagacgtgactaacattccgggcagctattagtgtgctctccttcctagaaaattctaaaccataagctcactgaatattttagacctggaagaaatgtgagggagattatcttctaatatgatgttgtcatttaatactgcatttcctgaattctgagacccatgtttccccctagtgccaaagagattgatgcttttgaactgtggtgttggagaagactcttgagagtcccttggactgcaaggagatccaaccagtccattctaaaggagattagccctgggtgttctttggaaggaatgatgctaaagctgaaactccagtactttggccacctcatgccaagagttgactcattggaaaagactctgatgctgggagggattgggggcaggaggagaaggggacgacagaggatgagatggctggatggcatcactgactcgatggacataagtttgggtaaactctgggagttggtgatggacagggaggcctggcgtgctatgattcatggggttgcaaagagtcagacacgcctgagcaactgaactgaactggcagtcgaaagcattttatttttgcttttggccagtgttttcaaatttccagttgatacttatctttgggattcataaatgaaaaatcagaatttggggaattttcaaattcccttgccttttctataacacactatttgtatgttttaaataataattagtgaccataataataaacagtgaatcatttttttgtatgataggattgtactgggattttcttctttcaaaacaggaaaatgcatggtttattggcactatcaattaaaatgttgtaataacccataaatatctacttgatatagacatttcgtaataggtcacatttagaatgtgaagtaaaaattgtttacaatataaaaattatactaaaatttaatatttaaaag

SEQ ID NO: 25722 - DNA, 1620 bp, Bovine  19866880876223
  misc_feature (1)..(1): n is a, c, g, or t
nctgagtgccaaagaattgatgcttttgaatcgtgatgctggagaagactcttgagagttccttagactgccaagaagatccaacccagtcaatcctaaaggaaattatccctgaatattaattggaaggactgatgctgaagctgaagctccaatactttggccacctaatgggaaaagctcattggaaaagaccctaatgctgggaaagattgagggcaggagaaggggtcaacagaagatgggatggttagacagcatcactgactccaatgaacatgaattggagcaaactctgggagatagtggaggacagaggagcttggccctggcatgctgcagtccatggggtcacagagtcagacatgagctgaagaacacaacaacaatttggtacagccacaataggaaactaatacaacatccagtttcattctctttctgccatcctatcccttctatatctatatattaatataaagagaaaagagagaaagaaaagaggtgagagagaggaggagagggagagaaactatggaactatgagttttcatagtagggaatatgttaatacatgcccttatttattatattttagattccaacatcagcttcttctgcttttctctgctagataatatttaatcttaaaagtgatcttgaaagaattaaataggaggctttagaagttcaagttaataaaggtttcttttagattaattaactatacaaatagagagcagagtgcaaatcagtttggtgctcctgcaggatgctattagaaagaaaatattactgtcattttcactagaatgagatataattttgtttatgtctgctcattcagtttgtaatacacagaaattcagacaccattgtgtttgagtaataacttaatgctttatctaaaaatacaataatgggaaatcctgataaattaaaccagtatctactgaaataagagtttagaaaaaatgctctcatgtgataattacaaaataagctgttgctagcagtaaactttacctgttatatcataaaggcaattaatggttctgctgaaataattttatagctataaaatggaacagccttttttttttttttttttacccaataagaacattttcctcaaatgaaaaaaattagtccaaaatgctagtttccttattttatttctagccaaaggactagtcaattaataattatgtgttgcctgataaagatttcttaatcttttattcctgttctgaatttcaatttatatcagtaccttgaaacagtaacattaataagactatgatgtataaaatgacaatgatgttagtacaatttgcatagttaggtcttcaagtgcagaacttttgaaataagacctattgaaattttattgtaactatcaccttcataagcagttcgattagctccttactatttgtgatcttctgcctattatttgattggattgttttcatgctgttaagtatcatgagctgtttgtaagttttggagacaaatctcttgtcagtctcattgtttgtaaatattttctcccattctataggctgtcttttcattttgtttatggtttctttgctatgcaaaagtttttaagtttaa

SEQ ID NO: 25723 - DNA, 960 bp, Bovine  19866880895467
  misc_feature (1)..(1): n is a, c, g, or t
ngtctggaaggcctttttttacacaaggcttatttacgctcagaactctaaatttaccatgtcgttttaacacattcttgggggctgacagagctggaatactttcataggctaatgtaagtggacacacggaagtaccaaagtgcattaggaaaatggaaatctattctgcttcacggttgaatttacccttctccagagactgaatttatttgcatattttatttcaaatatatgtgagttacactgaagagggtttgaaattaaataaatgccacaattaaatgacagacatggcaatggcacacctagtagcctctcataaatttttcttttcataggaatttacatctttcttacttttttgattaaaaaaagtatctgtcctgtaaaagtgactgaaatattattggaaaaggttggccactgacaggtttacttgagaattactgtttgtgttactaatactttttgaagaattaaaagataagttgaatcaaaatatgggtaaaattatatagcttatttttctaaggggttccttttgataaatattctttcctaaatctgtgcatgatagtctattgatgaatattttcaaatattgaagtcattggaaacattttacagatgatcaacttactacttaacggcttcctggtggctgagacactaaagaatttgcctgcaatgcaggagacctgggttcgatccatgggtggggaagatcccctggagaagggaatggctcccctctccagtattcttgcctggagaattcctcggacagcgggtcctggtgagctatagtccatgtggttgcaaagagccggacatgactgagtgactaacacatatttattgaaaaaaaagactttataccatgtatttattataactcaactaaaattctttatagcaattggatccaagttttaaaaatagcttttataatttcaa

SEQ ID NO: 25724 - DNA, 1150 bp, Bovine  19866880944507
  misc_feature (1)..(1): n is a, c, g, or t
ncaggaaatctatatttacttggattaccaaaaaattaaatcaattacaaatgccactacaactaatgtcttgaataaaagataagaaagaacattccagtattattttgaagagcttaacaaaattaattaggattattaaatttttaagtgaaggacatttgcccttcagctttcacaataaagactgtctttctctaaattgttaaacttgaccatttttacataagtagttgggaaatgtcaaaatgaaaaaagtaaatgtgacatatctgaaacagtttaaggagaattaactttaataatgggaaaatgtgtacaaaatgagaagataaacaatattaaggggaaaagacaccaaatattctttttaaatattctaaactgaatatgaaacattgattagtaattaacaacaacaaagacccaatgaatagtttttaatatttttttgtccattggaagccatcttgatgtttgactttgaattttaaaaaatgaaacaagttctggaatgcgaaaaccagctgctgaaaaatattagcaatacattttctgactaggcagctgttatgaaaggtgaggacaaagggctgcaaacactctttaaaaactaataagtaagcagaatatgtgccatgccagctcatttccttagtcttgtcagagaaaaagctactgtgacagtaaatgaaattttttgactactttactatttttcaacagctatgttttctttccagattcacctcataagagtattttaaacacatgcaacttgtatttttttcccaagagttataatatgcaaaaagtttattgaaataattgaagcttgagtgtgccattaattgtcttctgaaaacatttggaatgtttcactaaaacaagtgggaaattgcaggctttctatttggaagaatataaaaaccatattttatcatctttttactgaagaataattgctttacagtattgtgttggtattttctttatgaattgggagaaaattcaaataaaagttaatagaatctgatttgaaaatgacagagtttagtgatgttagtaaaaatttattctgatggtgagaagcaaataacagcagaaagtttttcaggagatacaaaaattcattaagagaaagagataa

SEQ ID NO: 25725 - DNA, 1494 bp, Bovine  19866880963106
  misc_feature (1)..(1): n is a, c, g, or t
nggaaaaatcacaaataacatacaagggaactcccataaggtaatcagctgatttttcaacagaaactccacaggccagaaggaagtggcaaagtgtaatcaaactgaagaaagggaaaaacctacaaccaagaatactccatccagcaaaactctcatttagatttgaatttattgcaaatctgcccccctacttgtcttgtagattttatgtctttagctatagaagatcttttctcgtaggttccgactttttctctttttcatggatggttgttctgaagactgttgtgcgtgttctgcagatccttgtgtgtaatgattttggtatgctcaactcaggaacagccaggtggaagagatgcagagggcaaggtatggggaaagggctcagaacgtccatgtactttccaggcctgccattctcccctaatctgcttgtgttcacctaaaaggtttacaatttcaaaagattaatttaattataagtaatcaaagtagtccagggcttccttcgtagctcagctgataaagaatccgcctgcaatgcaggagatgctagtttgattcctttgtcaggaagatcccctggagaagtgacaagttacccactccagtattcctggctcagatggtaaagactctgcctgcaatggtaggagacctgggttcaatccttgggttgggaagatcccctggaggaggacctggcaacccactgcagtattcttgcctggagagtccccatggacagaagaacctggtgggctacagtccatgggttcacagagttggacacaactgagggaataagcatatcacaaagttatgttctgggattatgtaattaataatcaaggaacatttgataggtttttccctgaactttggtgaaggagcagatattagcctgaaaaaaagaaaattgctaaccattagagaaaaacatattaaaattagaaataggttgaagacttaaaaaaaaaaaaaaccacctaggtttaaattaggtttgttgtttatttacactatgtttaaagttttatcaggaggagggagtcattaagtatagctgtctcatatttttaattccagaaattgatactgtataccatcttaaggactaagtaataattttactattcattctgttccactgtgtgaaattatgttggcttagagctaggttaaaaaaataaaaaaactatgaatgtgactattatctgaatctgtaagtgcctttttattcattcaagtctgtgtgctcaaatttgagttcatatcacactcatgagatgttttttaatgaatgtgctaccctgaaaaggtgaacgtttgttcaaaacactgcagaagcaaatgcgccccaaatgcaataaactaacagatttgtatgtgcctcacctaagcagggttttgaaaattcaccctgaaggctagaatattgtctttgtaagaatctcagctttcatagaacacctggggatacgagag

SEQ ID NO: 25726 - DNA, 2220 bp, Bovine  19866881041110
  misc_feature (1)..(1): n is a, c, g, or t
ntaatgttttaatcctgtgaagccagaaataaaaaaatatattaccctgtcataaaaagtttcagtgtcttgtgttaacatcacaataggttgcagatccaatgttacctctcctccaatctggccagaggcaggggaggaggagtacatattttaagttgctttgaagtaggtggaatcaattcccttccatatcagcactcctactaaaaaaaaaggaaaaaaaaccttaattttgtttgtttgtttcctcattgatacctatttaaatcaagatccttggtatgggaagatcccctggagaagaaaatgacaacccactccagtattcttgtctggaaaatcccatgaatggacgaatctggagggctacagtccatagtgttgcaaagaatcagacatgaccgagcaactaacacacacacacactatagtgtgggatatactttgggatagaagattaaccagtaaagccataattttaaaacttgagtgtttattcatttactaatctgttgaccagctaaatgcctaatcttcctgtgctggttggaaatgcaaaggtgagctaacaagactcctaatgattcttaaccttttgaaaactgctctttttgaaggggagttagggacacaagcaattaccacacagtatggtcagttttggcaacgcactccagtgttcttgcctggagaatcccagggacgggggagcctggtgtgctgccgtctttggggttgcatagagttggacacgactgagcgacttagcagcagcagcaacagtgtgtttccacatgaaagggtttgatgccttttatcaggttgaattcctttcgattcctagttttttgagaggttttatcatgaaacggcattgaattttctcaaatgcctttactgaaattatcagaataatcgtgagtttttttgcttattgatagcaatacgtgacattaattaatgtttaggtgttaagataacttgcattcctgggataactcacttggttctggcatatacatttttctgtatgttgctaaatttataaaggtcttaattccaaatataactgtagtgctctataagaaagatttactttttcttctaaaagtaaaaatgctgattcacaatattactgattttgtatttcactcttctatttcactggaagagccttagatatattcattgcataactataatcattaatgttcatgtaacattaatttcacaaacatatacacatattttaacttcttcctcaggataaaacagtataatgatagcaaatgtaagaaaaagatataaaaatacagcgttttatgaatatgccttatatgctgtttcaagtacatcactgattttctcaatttaccaatcacttacatgaaaactgttcatacgtaccttagtactgagcagcagacattacaaaatacaacaatgctatcagtatttttaactgtcaaggttgaataagaaacaacaaggaagcattggatatctgtctctgagtgtgtgacatgaaatttttcttttgccaatgaaaacaaaataatgttttagcaatgtagttagtcactctataaccttatctacactagttatatattatttgcaagacactaaatcaatgttttcatgtagctgggaaatgagtagagcatttctactttaataatattgagaaatactacatatacacaaggtaaatgccatgacatgagttaacactttgaaaatatttgagaaaaacgttgtttccttaaatatccattgactgcagaccgcttttttcttttgttccaaaaaaaaaaattttcagtaagatttattaaaggaagcatcattatttgtcatataagttggccagaaacataattttaaaatgaaaaaaagtatacattgttaaattaactttcatactttggggaaaattctgccatagcatactcaccttcttttacccaaattcccatggttttgattcatctctttaaaaagttagctgagtaaatacatgagtttgcctaaagtctttaggaaatttttatatcagccatagaaatatttcttataagtgggatttctgaaggtttcctcgatacattcagttgtgagtataagggaatcaattttactttcagtacatgtagtataataacattgagtcttagaataaaggaagaatgaagatttcagtaaagaataaaacaa

SEQ ID NO: 25727 - DNA, 1531 bp, Bovine  19866881054612
  misc_feature (1)..(1): n is a, c, g, or t
nctggcatgctacagtcccatgaggttgcaaagagttggacacaacttagtgactgaacaacataatgtgacaaagtactggcctgttactccttgtgcttaatttgtatcaatgcctattcctgtatcttcctatattctcattttgctcatgtaatatcactacttggtccaggtgtatagtgtgcacaaaatgaaatttgccttgttttgtcccagatgacatagccatggaataaacaagatgaagaaatcattggttatcacttgataatgctatgcaatgttgaaaaattataccatttgttacactgaagtgtgtgctctttttaaggaagccaaactcttctgaaattattgaaactgtcccatctccactcctctgaatatcctattttgtggcacagatcaatacactgaagcttcatgattccctgaagggctgttaggacattggtagtgccacttctttatactcaaaacctcttgggggaaaactgctagatgtatcatctgcctagttctgctatattcccttcttaaaccattgatctctgctcctaattctgcttcagcaggaatatctcttaaacagatgtcttctccattttctgtagacactccttaggtcttttgaacttaacagacttacaagtctttaatcctctattcaatttgttctaaaacctttgcttatgaatctatgtaaccagttttcaagacactttccttatttaaagaaatgtaaaaaacaaatccccaaattatccatgtaatatgaaaatgaagtatgattttgcatttaaaatgttttggtttgggttttaatttggcaagggggtgcataatagtattatcaacagatttagttttctaattatttcatagagataagtattcacaggcatatctcattttattgtgctttgctttattgtaatttacaaatatttgcattttttacaaatttaagacttgtggcagggctgcattgtcagatgatggttagcattttttaacaaagtattttaaaattaagatatgtgcattgttttttaggcataatactattgcacagactacagtatagtacaaacagaacttttaaacgtaatgggaaaccaaaacatttgtgtgacttgttttattgtaatattcattttactgaggtggtccagaactgaatctgtgctatcaccaaggaaggctgtaaataagtttatatttcccaatacttatcaactaaaagttcctgtaacttaggagttcaatttacatcaacagattttattgagctcttactaaatgtaaagtggtgctattaggcactcatgaagaattgatgagaactttttctgtatccaagggcttccctggtagctcagttggtaaagaatccacctgcaatgtaggagaccccagttcaattcctggatcgagaagatctgctggaagggataggctacccactccagtattcttgggcttcccttgtggctcagctggtaaagaatctgcctacagtgcggga

SEQ ID NO: 25728 - DNA, 1306 bp, Bovine  19866881096321
  misc_feature (1)..(1): n is a, c, g, or t
ntgaaaaatctgaggcagagggaggttaagtaacctgattacatttatatagctaaaaggtagcagagctaggattcaaacctaggcagttggttccaaagtcttgttcttaactgttatgctactcattgtttgaagaaatatgaatcttcatagaggtaagagtaatttttttgtttgctttaggatgtgaagtttttgtaagatttcctactatttaaaggtactttctttcaatgatttcttgatacagatggcccactgaaaaagagtatttttatacttatcttcaataaaactttctctaaaaccacaaagttagtgaatactatgaaatgaatgccactagataccacttcttaaactactttgcattctactcttttttatttgaatagataagaaaggtaatatatccttttactgtatgaagactttattcaataattcaggcaatgcctaggaaggaaaataagtacttatctaatctccacttcagtcatctaggtgatacagcaatacagaaataatttaatatcctctttaaaacttactgagaaaaagagatcaaaagtttactaacaagattaataactctaagttctcatatgaacctgagattaggtaactctgtgaaggccgtaagtattgatagcaatcagacttagtgagttttttatgttaagagaaaaatcatattcaaatgactgagagttctaattatattatcatgaccctcaaacttaggaggaggctattaactctatctgtaaaatgaaaaaatgttatcaatcacataatttaaaccttgtatggatcaactataaaataatttaaagcagactactcaaatgaggttcagtttgagaggtattaaaaatctattttataatttgaccagagagtgttatattatgagattctttaaatacataatcatagacttgcttgaaattgtttcatttagggggtgggggtaattcataatcatctaaagtaattttaagcattttttgattgattacaatttgagaaagaatttttttttttttttaatttctaaaacactcagtttctcagatcagcaaatcctgttttagactaaaatttagagccatttctggaatgagaggagaaacaactatttaaccaacttatacctctttatggatcagcagcatcaacaaatcctttaactcagcagttacaagaaatccctatgaacttttcaaagttaaataacgttagcaactccacttttttctttaaatagccagcaaccagcattcaaaataactgctaaatt

SEQ ID NO: 25729 - DNA, 1328 bp, Bovine  19866881133593
  misc_feature (1)..(1): n is a, c, g, or t
ntattttgtaacaacttaaattgtaatatagtgatttaaaaaactattttatttagatattggtgttaaagagttattctaatatagccacagagtaaatttgaatcttacatttagaaacataaagtgttccaaaaatgcccagtcaccatgcttggagattatcagttggtccataagatctacttggcaaagactgtgaatggggtgctgaagaaaccactataaagagacaataatataaagaatgcttgctatgcaataatccctcttaactcttaagatatttgtgaaatcacataagtaagtgacttcagaagtaagtgctcgaaggaaagaagtaagagtatattgcccttcacaaactctcccttcctggatagtccataaatatctctgtcactctcccccagtcacacatgagtatgtacactgtagggctatcagcttcctggtactcccataatgatgacagggtcatgtatgacttggatgggcagaatttggaagggaatgctcaggcatattgcaagaatttgcagagcagtaggaatctggaaacagactgttggcagctctgcatcccttattaatcattgtgagcatggcagatggtcctcgggttattttccaagagaaatgagaacagggatatggagagaggtcttcctcttctactgtcctcattcaagtaagtgagccattaccttgatatttagatggataaataaaaagcttttattgagcaattaatttatcaaacgtcacctagattctaggtactattgtaggcagtggtgatagagtcataaggcaaacttttgccttcatggctgctaagtcacttcagctgtgtccgactctgtgcgaccccatagacagcagcccaccaggctcccccgtccctgggattctccaggcaagaacactggagtgggttgccatttccctctccaatgcattaaagtgaaatgtgaaagtgaagtcgttcagtcgtgtctgacccttagcatggactgcagcctaccaggctcctccgtccatggggtttacatccaaaatgtagccagaaacagatgacagataaaacaggaaaaattaatctgcatacaatatgttacattgagggtcagcaaattaggacctgtgatccagaagggctctaccttctgtttttgtaaataaagtattggattgaaagtctgaatgaactttttgaccaacccaatagtttcagagggctttcctggtggctcaatggtaaagaatccacttaccaatgtagaagacatgggtttgatccctgcaaaagggggtcagaaagatct

SEQ ID NO: 25730 - DNA, 4420 bp, Bovine  19866881150821
  misc_feature (1)..(1): n is a, c, g, or t
ntccaaaatatataaaatcatgtgctttcttatagtgttaactgctcagtcgtgcctgactctttgccacctcgtggactgtagcccaccagccttctgtgtccttggagttctccaggcaagaatactggagagggttgccatttccttctccaggggatcttcctaaaccagggatcgcacctgcatctcttgcctcctgcattggcagttcagttcttcctagaaccacctgggaagccctaaagttatatttaaaaaataatttgtgatgcattttacaatgcaatttattttgcaatttatgatgcatatggtagaatgttactatttccccttagtgtataacctctgggttattcatgttgcccgaattcattttcttgtaaagcagatatttttctcaaaaacatgtagttatgatttttgaaaaggtaacttttcaaaatgcatatattaaatatatgctattttggattaaaaaaaaagactctagcatcaaaactagaaaaataagatcatattttcccataaacacataatatgaacaaataggatattatccagtgattaaaaaatgtttagaaaaataaattctgtcttatgtaatggtcttttctgaaattaatatgcttagaacatcaaattcatcttactttaaaatgtcctttctactatttatccagaaaagaaatgaaagaactagattgtatattttagtatttttctaattagatgagtgtgactgactaacaataactcatttcatggaccttgctttactgttttaaatggatgttcattaaggttgtgccagtggggggaagaggggattgtaattgtatattcaggagtattaaaagaacatttcctgtaggaaacatacagctatctacgctttgtttaatataggattagtatagtgctatgcttaatcagggcctattattaaagaaagctacagagactgcagagagtgttaacaagagaacatcaaacatgagggaatgttctgaaaatgataatgaatacttttcagttgtaaagagtctgaagagaaatatagtgtcagtttttaagtatttttataataagagcataagatctcaactgagagaaacttgtatttgaatctaggtcctactcttatcagctcgccaagtgtgactatttcctctatgtaaaattggaataatgtctattttgctagactgttgtgaagaagaagatagctgacatatccagagtagtgccagacatgtgtaagtccttctataaatgaagttagtattagttatactctttttatcagatcttcattataacagttccaaagcagagttgctagtattggtggaggatggaaaataaaaagatggggtttcataaccaaagaaaacactggatcaggcagctctttatttagcatcctcatacacgggtgcatttggtagaattcaattttgctgcatactatgaggtacaacatttatttctgtttttctccctcccttccttcctttctttcttagaaatgttgctaaatatagctatgttccttggcaggggatttaatcaagtctgattttggcataatcttttcctcagattaccacctcagtagtaggtaataatgtatgacacagaaggaattaaacattggttagatttgtttcttgccctttgtttaacaacaagcaaggagtactatatatgaaaatgttgtatattaatgtatactaaactgttggcaaaaacataagtgcaatattgtttagattagagtaataagctttttcaagtagggcctttcctcatttttaacaatctggatctctgtcatcttgatttttccttaggtagtcttgatatacactagaggaaataatgtttgatgagcttgcattgttttccaaaactgtgcctatgctgaggattcacttacaataatcttggttaatgttttatttcattattcttgagaaataataatttctcaaagttccttgtgttatcaatgcatatatatatatatatatatacatatatatataattgctatctgatttgtacagttaacacatttctatgaatccatcagagtaaagagttttataaggaaatgaaaatagaacattgtgaacaataaaactttataaagaggttaggaactgaaggcagtgttgagaaaatatgtgagcctagtcagccacccaaggaaattttgccttgttttctgttaattatctcatacacttgattcataattttataccttactgaaagaaattattaaatgtaacacacattcagccacacacaggccacaccaggctcactatatatcaggtacagatatttgtataaaatctcatttaaacttctcagtaactccatttcagaattaagaaaatgtaaatacaaagagacaaactaatccactcaaggtcacattgttccaaaacaaagtagtctaactctagaggccgttgttatggcgttagacatcccttagcttcaactgtgaattggaagattcagaaaatgaaggattaaaaaaagctacaagagtcattccttgtgggtagaggttaccctatattgcttcttggattggtttgggggaatgacagaggatataagcaaagtggttttcttaatcatccagcctctttggtcaaaatcatgaagttgaacacctaaaaggatgaggtgagagtgaaagaaaaggactaacaaggaagcataggctgtaggctaattataacaataaatgtcattgattaaacacacatatgcacgtagtgtgacaacaactttttatgttgtggtggattgcaaaaatggccagggttctgtactgtccttgcccctttgcaatatgattttgtaattttttgcgttaagagatagaagctattttcccaattctttaatcttggctagttgcccttgttattgctttgaccaatggaatgtggcagaagtaacattttatgccatttctgagctttggtttcaagtggactcagggcatttatttgttctctgtcttaaaacctctaccacaacatgagaaaacactgatgaaaacgcatagccccattatcctcatcaccctagatagaagttaaccagctgccaggcaaagaccctgagaaagtcttggtgaaacctgtcaagtccggcctaaatcagcagatctgctcagatattttataaactgatgagcagaaataaataagccattgaatttttagtgtattttatgcagcaatggataagtgttacatgcatgttacctcctaaaatcttaaaacagcatttgttggtaaggatcaatattattaacatttcagagataacaaatctctttactagcaatgtagcaatgatgagggccagtattttctgtgcagttttgactttatgcccagggcttgttcctctcagaagggaaaatgttaagcaattgtctgttaatgaagatctagatataaatttctccttactttcaattcagatctttaaatcatgaatcaaggcaagttttttgaagcaaattccaatatccatggaaatggcttcacattccaacacaagccagtttatttggttaacattataaaaagataggccaaaatccagaactgaagcaaagctcatttatttattcaacaaacatttattaagtgcctgccatatgctgggtcctgtgtttggcactgttgtgtaattaatttaaaaagaatctatgatttcagaaaaaactttaagctgaataatttaggcagaacaaggcaagttattcataaagatgcagactaattggaaatgtcctcgtttaatgctatacttatgcggcagtgagaatgctgtggatctaaagggaatgcacgtgaagttctaaaacaatttgtcaaaataattaaacatattaagagtggtactcggaaccagatttcttcaacccactctgtagagaagtcagtataaatttggtgcagcattttgtaatacaaggtatagtgcagcagtaagcccaagtcaaatgctgaaagatggacccggctttatatattgccacaggcagaaccaggaatcacacgaagtaccagcaggctagagccaccagttcaaaatggcatttgctatttgtttggtatgcagctctgttttcttctcatcgcctccagctcataaaaacactagcttcttccagaaagattctctctgtagagaatgctaggcttgaccaaccatggagaaataaattttcttttctctcacagtgtataattttctctttctaactccagagaaggaaccattgatagcagttgatggtatttgtcttcagaaaacaaaagggtctgactcagaattttacaagatctaattattttcttattacaaagaa

SEQ ID NO: 25731 - DNA, 1859 bp, Bovine  19866881160509
  misc_feature (1)..(1): n is a, c, g, or t
ntgtgggcaggatgtagttaagtcataaaaaccatttgtgactccgcaatgagatgtcccgaaactgtgtatttggattcctcctagattctaccctatgtatttttttcttttggctggttttctgtatactgtctctgtattaacaataagcataatagctttcaataagtacttgagtctttctagtgcattatcatacccaaggatgaagatggggatcctagaattcatagccagctggtttgaagtgaaggtggtcctcaggatccacaaacttatggcttatgtctgaagtgagggcagtcttgcagcgactatttcctcgaactatacagctggttaaactcattgcacagatgcacttctttcttgaagcatcctctaagtccagtctccctcactgatatcctattcttctaattatctacagtagtatatactgagtatcattgtagttaggtaataagcagatatgataaacaaaggtttggatttggggaaccaagaaaatttagtaatctagtaacttcaaaaataaggggaagtacaagtagggaaggaaaaactacctatataatgctatgtaaaggtgaaagaaaaataagatggtagtgatgctgacaagatgatattagcattttcctaaggaacaactgcaataaagaaacagttcaacggttctatcaacatttaatgagcacacggtagacactgaaaatgtgccaccaactcttcaataacgaatacctgataaaaataactgataacctgaaagtaactgataattattccaacattctgttttttgatagaaaattattctagatgcttcctctggctggtagtttactcctttattataatttttcttatttccttttcctatgtaagatgccaatggtcaatgaggggttcctgcccagtttaacagaaagggacaattctaagtaatgtattatattccaagatagaaagagtagtgatgaacaacaagaacaacatataagtaaagcaatatggaaatagggcagcagaaaccagaaggaataatggagttaaagggccagaaatgggctccattggcatctgcgattagtttgggaaaggtagtcatagaaacttagaaaagtcctgaaattagaaatgatgaattgcttcttggtttgagtacaacagcaggtagtgaaagaggggatagaaagaatgaagatacttattgcctagaatatagtgcctagtgtataggcacttctaggcaatatagtgttctttgtataacacatcttcctttcctggttttactttttcttctttgagaactgtaatggggacacaattcacatttccttgggctgggatgatgaaagactgtattcttttatttttatcccaatataatgcctttaggaaagaaaaacatctcaaataggcatcctagagggtcctgaaggaccctaaattgggacaattctgtaaaaacagaatgtttgattatctgcttgttctgttcaaataacactacaggtcctggctgagctagggagatatgcagtagataagtaacaaggcaagaattcattatttacttgctagagtccgatgataacctaccaacagaataaatgtgtaaatccctactttataagcagtcatcacattccactagaccacttcctagatagttaagccacctgcaactttgctaacatctaccctgtatactggaaaattgatcaatcaaaacaaggcattcaattttgattgcttaatttggtttctatttgagcattagcttttatgaattagataaacagagcacagtgtgtccagtttcagaatactatctaactccaaat

SEQ ID NO: 25732 - DNA, 1466 bp, Bovine  19866881175943
  misc_feature (1)..(1): n is a, c, g, or t
ntcttaccgaacgacagatctcggagaaggcaacggcaaaccacttcagtactcttgcctgaaaaatcccatggacggaggagcctggtgggctgcagtccatgcagtcgctaagagtcggacacgactgagcgacttcactttcacttttcactttcatgagctggagaaggaaatggcaacccacccccagtgttcttgcctggagaatcccagggatgagggagcctggtgggctgccgtctatggggtcgcacagagttggacacgactgaagtgacttagcagcagcagaagcagcagcaaggacagcaatggcctttgcttctggcttctgagaaagaaccttcagtgccttgttttggcatgcctgataggaagctctttggctggcggtcttggagtagccagatagtaacaaagtggcaggaaagctttgaacatcaaaatgcaacttagggtgggggctttgtttcacatggtatcagctccatcttctgaagggctggatccctaatgtgggcagtcaactgtgtctacatgatggagttctaggaaaggctttggacaccaagagctggggtaagtttccctggttgatgacacccagtgcatattgtcacatatcaataccaggaaagtaactttgtcttgattgcacggggagaagacaacagaagctccatgttcgaaaatttacttggactctgccctatggttttcccttggctgatataatgtgtatcttttagctgtaatgaacagtaatcatgagtacaacagctttcagtgagttttgtgagcccttctagtgaattattaatattaaaactaaggatggttttgagaacccactgaactagtaatagttaaaatattaatatatattctcatttgcaattataactttctttcaccatggtatgtcaataatgaataagtattgttgagtatcagtttgatatttacaccgagaagactatcctccataagtcagttttaacactaaccaaggctattggtgagcattccttatattaatacattgcttaacctatgcagttttaaagcttttttttttttttttaaaaaggctcccttgcttgctattgataatatgaggtaactggcagatatttccaagactgctgtggtgtgtgttttagcagcaaattttgttgactttcactgaaaatccatccttagggcagaaaatttggcagatgcttttgttcagcaggtttcttgacaaccgcatatgaaaagctattttttgcctttcacagggtctggtcaaaggctgaggtttgcttttggtgacattacgttaattggtctccctagaggctgccagaacgctgaaggcaagttagcatttcctgcctcctgactcctctgagtccatgcttcttgcctactcagtgcactgtttatgcctgcagcatggctggctgccaccctccctg

SEQ ID NO: 25733 - DNA, 913 bp, Bovine  19866881250398
  misc_feature (1)..(1): n is a, c, g, or t
ncttcccaggagaagacaatggcaacccactccaatgttcttgcctggagaatcccagggacgggggagcctggtgggctgccgtctatggggtcgcacagagccggacacggctgaagcggcttagcagcagcagcagcacttcccaggtggctcagtggtaaagaatctgcctgccagtttgggagacatggattcaatccctgggtcgggaacatcccctggaggaggaaatggcagcccgctccagtattcttgcctggagaatcccatggattctttgtttagcaactaaacaacaatgggtacatttggaaactgggaatgttcttgagtagctgaaagaaacaattcctctaagtcttttccttaaagaatgtgaactgaatggtcccattctgccatctataggtccaattcatcaaatgtacactgtcacttgatcagtaatttagtaaccaaaaaaagtcattttcagatgttaaaaaacaataaataggtatagcatatgttctaatatactacactaatacactagatgggcccgcataccatcctcatagactagaggtagaatacagactttacatgggtgtttctgcagtaaggaattcccttatggctcaggcagtatagaatccacctacaatgcaggagatctgggtttaatccctgggttgggaagatcccctggagaagggaatggcaaccgactccagtattcttgcctggagaatcccatggacagaagagcctggcgggcaacagtccttagggtcgcaaagagtcagaaacaactgagcgactaacactttcactttctacagtaaggatgtaggatggttcatatactgatttactgacagaagtttggaccccttctcattgttttctgttacaaaccatgctgtaa

SEQ ID NO: 25734 - DNA, 764 bp, Bovine  19866881289631
  misc_feature (1)..(1): n is a, c, g, or t
natggttttcaagtttatactccccaagagcataccagttatttatcagagcatagaaaatgacctatatatttttgctctttagttctaaggaatagaaatctaggtgaagggaattcttagtgaaagtgccatttaaagacctttgtagatactgctattgtggaaattactattaaaatgctgagtactttcacttattctatgtgtttaaaaccaaaagaccaaaagaaagagtgttagctatttaaaatccactaatgacaattgcctttgaacagagatggaacataccatacatcaaactcccctgactcctcttacaatcacaggactccttccttctgagcatgaacatggtcttagacgctctcttatcatagcacacctggcagccattgccagtagatgagatttggcactgaagataaagcctatgaaccatgcctgccttaaaggtttgatacattcatatacatagatctacatatgtatatatacaaacaaatgcctcattggagtccagtcatctctagagagtaagatttaatgccaacatttaaaacataaatcatgtcatctaatttttttttttttcctcaaaattctccataggtatctcttgcacttggaataaaagctcaaaacctataacataaccctacatgatttgacactctgccattactctgacttcacttcctaattcttcctcctttggtcaatgtttttcagccagactggcctctgtctgatggccctgg

SEQ ID NO: 25735 - DNA, 1228 bp, Bovine  19866881292464
  misc_feature (1)..(1): n is a, c, g, or t
nttgcaaggctttccttcattgccttaaataattgagaggtggctatatcttaaagagatttttaaattatggttgcactgctactgggctcatatccaaagttaaatactagttaattttatgtgtataagtttatatcttagattttaattattccttttaccagtttaatgaggtttaatttttcgtattctcaaagtcatacaaaggaagttgatattcagctccagcttaccagattacctgttttccccattatgtcttacaggcaccacaggtcaccttctggatcatcccattctggttcccgttcaagttcaaaaaagaaataatgtattaaaatttacatcttagaaaaaaagtccaatataatgcatgaagcatattttttaagaagttggtgtcttatttggtcagaagtgctaaatctgctagtagaggtgcatgcctttcattgcttttcagaaaaatgcagctgtgtttatttgtgatattaaaagtaaatagtattttaagccatgatgtcccaaaatagatgctttgtttgtcattcattatttacatccatttgcttttttaagctataacatctcagctataacaaagtactttgttttctaatttaaactcttgtttttctcatctccaaatatgagcattatctaggcttatctggactttgggcatggaggcaagactgtggtaaagtagttggaaacaatctgtttatattaatctggggaaaggactcagcctgtttgttaacctgtgtcaaagtgattcttactagaaaaagtttaacagattgttaaacttctttattttgaaattccctatgttaagggtgccttagaatcattgtctctatctagttttactttttgcaccaccaagtttaatacagaaaagttttgtgaattgcagagaagaaaggtgttagtttctgcctttttgacacagtgattttgaacaagaatgcctagcagttcatctctactaatgtggttgatgagaaaaacatacgaaagtgtttaatatttttagaagctttgtgtgataccttttacaaattcagttatcacacaatagggtagacagaattaaatcctagttaacgaataaattgaagaaagcttttgaaatatatttctctttgggtataagaccaacagagacaagacattgtgaatttaattgagcatttgcttttgaggtgtttaaacactg

SEQ ID NO: 25736 - DNA, 795 bp, Bovine  19866881325077
  misc_feature (1)..(1): n is a, c, g, or t
naataatgttttctgatttgttttctatacccttttaaatgatgcccatgactgtattgacctttagtgttggcaagtgcacgttggactattgtctttaggaaataggttgtaataataggtccttttcctcctgtcttatctgacattttggcattcatcacttttaaagattgtattggatttttttttttcatgaaagccctacttttacttgccagtagtagagtttgtcattttcccccattcccaaggattcttaagatgaataaaaatattaataaaaatagaatatttagatattgccctcaagtttaagattattttattaattcatataaaaactgttctctgtcagatttattatcccagttttacaagtgaaaaaaattggagctcagataaatttgtggtttttcccaactcatataactgtcaatgcatatgtgctaagttgcttcagttgtattcgattctttgcaaccccatggactccggggctcccctgtccatggggattttccaggaaagaatactggagtgggttgcaataccttcctccagtcatgacccagggattgaatccatgtctcttttgtctcctgcattggcaggcgggttctttaccactagcaccacccccagtagtaaatgtcaaaatggaattccaacctaggtctatttgattccagatttctgctcttatatacctttttttataaggatgttatctttgcaaagttctttgcagtttaccaaatatttttatttataaaaataaatttatatttataa

SEQ ID NO: 25737 - DNA, 930 bp, Bovine  19866881398435
  misc_feature (1)..(1): n is a, c, g, or t
naatcttaatctttatgtaatcgagaaacatcaactttttatgtaaagaagcacgatgcttatttcagttcagttgctcaatcctgtctgactctttgtgaccccacggactgcagcccgccaggcttcatttaaattgctcaaaatatgaatggaagacatatgctgcggaaataagcccttaatcttctttgacatttgattctaaaactaatatttatagttattgattgatgagtatttgctacatcttattgctctacacaatctatgctgtaccattttaagggagatcttctgtttttttaagcaaagtaaaatagcctaggtaaagttacataagcaataggattggaattaattttcaaagttttcactctttactaccagacactccatatgccatctgtggcttgcttagagacaagtattcaaaagtttttattggaacacgagatgcggattctttgacaattactttccataataatttttgtatatctccaaataaatacacctacttaaacacccgccaataaaaaatcttcctaaacaatttaataaaggacactggtttcagcagagccactaaaacacgtgcttctttgaagcaggcattctccagggctgagcaggcaaaaacacagacctcgtatgtttcggttctaaggaggcgaaaggctcaattcttgtggggaaattaaagaccaataaagaaaaaaaaaaaaaaaaaaaagccagaattcctgcaaccaaaggaggttagcgttcggcaggaaaaagtaaaaacaatacggaaagaaagtttgaattaaattaaacaaaaaacaaacagcaaaatgaactaggtgaagcaaacaaatgagttcaagacagcaacgttttcggaacaagagtcagggttctgcagggaaaagtcacgtgggggag

SEQ ID NO: 25738 - DNA, 1835 bp, Bovine  19866881803735
  misc_feature (1)..(1): n is a, c, g, or t
nacattacctttattataatctcattctttatgaattagaaaaatacaaacatacatggcagaggcaaagtatgaaaatacttaactaaacagtctttaatatcttcatgtctctatactccactcctcattaggaaaccaaaatccaaaactggctttgctaatactagaatgttgatttcagtaatttctggtcctagaacttctatctcagtccttttttgcagttataggaaaagtcagttgtcccttctcagaggagtcatatgagatttcctggttaatatttgcaaagttctatggtgattaaagggattgtaaaattgataattgttattatagaggctgatatagtaaaggagtctacctggaagattggcagccagaaaaattttaggttggttgaaaaattttaggttagttctcattatcagagaatagctgctttcagaaaatgtatatttaaatattaacaacacttgagaagcaaatactcccagagataaacatatgctttgaatccacaattacttatgcatcttccctgtgcctcctcattgtctatatttttaaaattctgcaggcaaagaaatgaagttcagtctcaaggtcattggagcaactgtgattttattattatgcccattgaatacactatagaaatgtaatttaaggcattaatatgtacacactaaataaaaccagacagtctgtgggaaaagttattaatggtgctggaattttaccagtttgggaaataaataatataatgtgtgtatctctggaaacaatgcaaactcagcctactcaatagacagacacagtaaaagaaatctaagcaattctgtaattctatgaggagggtaatttcactgatgacagctttccataattttacttttagatagcaaataattttccttattctttattttattgctattttgaattgcactcgttggagtttcaccttttaccaataattcttcaggagatgtattttcactgtttttcatatggcagttactgctggcagtacctagttgaaaccaacagaattacaactctcttcaatatccctacatgacatgggtaatatttcagtttaatccaggggcatgaattgagccaggaacaaccatttcaatttctactgcagtttgtttaggcttaacatggactagctaccataccctctctcagtgaaccacattaaattgcttacagagacctactcagaaagcaaaaggcatggctttactattctcctgacatgcttttgcctaataatcatgaaagctataaaaagaaatccaccacagatgcccttgaaaagctctatactaccgcccaacgaccaagttcccacaagggaagttaaaaagctattaaggttacttcacttttatataacatatgtttagtacaatttttcttaaaaaaccaaagggtctcatctataataatagatcaatcctgtgcagggcttccctggtggctcagtggtaaaggatccacctgccaatgcagaagacatgggttcaatccctgagttggaaagattacctggataaggaaatggcaacccactctcgtattcttgcttggaaaatcccatggacagaggagaatagtgggctactgtccatggggttgcaagagttggaaacaacttagcaactaaacaaggcaagatttccctttaaccctgtgtgtaataatatgactctgctaccttacttatcatgtaagagaccgaatggatgcacaatgattaatccatactctcaaaagttctagaagggcattagtttacaaatgactgactaatgtaa

SEQ ID NO: 25739 - DNA, 2004 bp, Bovine  19866880290468
  misc_feature (1)..(1): n is a, c, g, or t
nctcccactagctttgttcatagtgatgctttctaaggcccactggacttcacattccaggatgtctggctctaggtgagtgatcacaccatcgtgattatcttggtcgtgaagatcttttttgtacagttcttctgtgtattcttgccacctcttcttaatatcttctgcttctgttaggtccataccatttctgtcctttatcgagcccatctttgcatgaaatgttcctttggtatctctgattttcttgaagagacctctggtctttcccattctgttgttttcctctatttctttacatagcggcaagtgctaaggagacgaaacaaagcagggagggggaggtgagatgctggggctggttggggtggttaggttttaggtcagacaaccaggacagacctcactggtgactttggagcccctgtgagctcctgaggtcaaggacattttgctatcactcagtcctgtctttcagactttcatcccccgcctctgcctgaagaagacccatattgcctggagaatgctccccccaacctgggctacttggtccgcatgcagggaggcatcctctatgtgtatgacaacaagaagatgctggagcgccaggagccccacagcctaccctaccccgacctggagacctacacggtggacatgagccacatcctggctctcatcacggatggccccacgtaagtccccttccccctccatgaccaggtgagtccacctctttctgcaggagcactgctctgtagaagggaccagggcaggccttctgctctgggctttccctcagttaaaccaccgcagagagggctttgtgggtttctctcttcccagtgcttttgggcttttgcgacaatttttcttcacagactggcgtattcttcgagttgctcctgcctgtgccttccgcatgcacgggtgtggagctcctgcttgccggtggccacctgtgcaccttaaaatgatggtcagccctcaccccaggccggacagcagcgatgcagagagttaccagcccagggctttagggtagatggtgggggagccgtgaagactgttgcttccggtgttggtttttccatgtttctggagcagggagtgcagggcagcctgggaactctgagccacaactcccaggatgcttctaggcttagctggagctaccctggcagggaactgtcttcctgagttcgggccctcgctcctcagagagcatttaagggaatcagcagtggaggttgtgcatgagtgcccagcttgggggagcagaggaagctggtcacagctgagggacttctctcttgtccttctgtttgggttttgctgggagttgggtgacgccagtttctacgggaggagagtgggccccgaggggatggacagagtgggtcgaggtccttggtgatctgagggcagagggaagagctggggggagagtgggatccctgggagcttgcctcagccagtgtgaacagaggatctgaggggaagccttggggacagggctgttccaggaggtgtgtgagcagcagctgtcctgtctgggagactgtcagggcgagtcctaccaggagagggactgggaaagatgcccttgagagtcccgtctgacccagactctgccatgcttggctgtgggctcatcctggcacacatatggtggtgctggtccaggcttggtggccgctctttacaagggtctctgtgcctgggtgccaagggagccatgtgcatctgggggccacaggggagcagagtggcccgacttgtggttgcatgttccgtgtagctgtggcacaggcacgtggccaggcccctgggcttggatgtgcgctggctgttggctgagaacagtgggtgctcccaccctccagtggcctttgcaagctggtggggacatcagttctttcatggacttctgtcctggtagcaacacccctatatccctcatctgcctacgatgcagaacatccacccctcgtcctg

SEQ ID NO: 25740 - DNA, 2441 bp, Bovine  19866880432291
  misc_feature (1)..(1): n is a, c, g, or t
ncctgaaagaattccatggacagaggagcctggtgggctacagtccatgaaatagcaagaatcggatacaacttagggattaaaacccacttaccaccaacccacacaagaatttataagtaaatagtattcttcccttattttacagaaattaagatttagaaaggtgaagtatcctttccaacagctagcaggtggcagagctctgattcaaacccaaacctctttagctccagaattttctctcaaaaccagatttgcttgcctccctgtgatgcccttgctctgacatcatctcttcagcccttttcctctactaatttgacaccatttcttttttgcgtctttgcctgttttctcttgtacactcctgctactgcaatgccaggagcctctccaaacaaagatccccattctctgtctccacatcctgaaagttgaaatgtttaaacctgtctgggaccagcccaaaaggtcaaggttgtctgcagcgtcctggcttccatgcccttccctcatttgccaagactggccacctacctgcctctagtccatctccgaaggcaactctctgcccccagttctgcactgggagcgcccagctctgctaggaaaggggcagagccccaaagtagaccctccagcaagtgcacagtgagcacaggctaatttgtcctaattcacaaggagaggtcccatttctagaagcaaacctattcagcaaagaacaacacaggaattttaaaatattgaaaatactccaagtgccagagtctttctgtggcaggcccggattgttcaaggccttaagcagccccacacttggcatttggaaaattagcaattaccgctgcatctgaacaaatggcatgctaaagtttaccctttgaaaggtgaccgtatgctttgaatcaaaactaggaaaacactttgctgagagaagtttctcttctgatttgtgagtgtacttaaaggaaaagtcccctgatggcctaaaaatactattatattcgggttttgcattcaacaaaaacccttgtataaacaaaaatgtaattctataaaattgagattgtgggccttcccctagttactctgtcaaggcaggcttacatctggaaggcttctcctaaagtagtgcttctcaacatgtaattgcctattacatatgctttaaattgaatttcctggattctattccagattgagggttgtagagcagggggttctgtcatttctaacaagctttctaagaaattcccactgaaatttgagaacgactgccctaactagtgacaggccaaaaaaagagactaatgagctcatgtgaaatgggaagttttagaatcccctaaatgcctataacttctctcaaaaaaaaaaaaacagtccatgccatttcttgcaaaagattgctggtttgtggccaagatggaataggaagaccctgaagccacctctttccacaggcataccaaaatcacaattacttacagaagggaattcatacaactcaacatccaacaaacaaacaacccaattaaaaaatgagcagaagactcaaatagatgcttttccaaagaagacatatattaaattgctagcatggtatgtatattcaataaatattttctaaatctgagctgatccagaagatgaagtcagaaagggaattctgggattccctttaatagaagaaaaaaagagttgagaacctggctctgtgtcctcacaaggccagtgtgcccccagggatgaagttggagaggaagttgcagtgtcctcgggcttggccacatcccagtggttcactactgtctctagtcacataaatcctgccacggtgttcagagatagaatcttgacctggtgagaagcagagcaacaactgtccaaactcaggtctcctcggtgttaagatgctgacacattaatgctgaaagtgtgcagcccagactcaagcacctatgttcttgcctccttctaagagcaaggagcaggcagggagactcagccatgaccttgggctcccatgcatagcatcaaatgtattggggtgtgcataagtgttaccagtgatcaaaggtcttctgttccactctgtacacacccgacatcattttggctttcagcttccccacttcccttggtctggcataaagaaggcccagctgtcagttcttggccctgcttgtcctccagccttcataggaacctagatttcctatagagcaaggagaataggtagctgacatccccttcacttatcagggattgaattaccagtgaggctgtaatttgccatgaggtatgaagcttcttcacagtgtcctgggctgaaaatagaagggaaaggaggtgaacagagttgggatctgacctcaactctgggctctgtggatccagcatggacagcgggcttggggatagcctctctgaca

SEQ ID NO: 25741 - DNA, 2778 bp, Bovine  19866880478282
  misc_feature (1)..(1): n is a, c, g, or t
ngacagtgaaacagttttaaagctttaatagtacaaatgccagttatccacactgtaagaccaattactagtatttgccaagatatggaagagaagaaaaaggaatataaggagggtccttaaaaacctacttttctcctcatgtggtaacgtttaccttacccagaatacttcatctctgacactcctagtcacccaatgtgtgggattttttcctcaaaacaagcaattatgcacaacatctgctgggtgtcctacaatttaactgactgattaaggttaagggctcagtcccatgagaccaacacacctcctccacctgagatgccaactgcaaacaggtccccaggttacctacaacttctgtatgactgacttggctacaaatcggaggttcccatgacttcaacctctttggattcaattaatttgctcaagtggctcacttaaaaaacattttacttacaatcagtttattaaaggatatgataaggaatacagatgaacagcagatgaagagatatacagaggaagcctgggaaggtcccaagcacaggagcttctctctctgtgcagctggggtgcatcaccctcccagtaggtggatgtttgaacaacctggaagttctccgaatcccatactttggggatttttatggtggcttcttcatgtaggcatgatcaatcattaactaaactgttagcccttctcccttttcaagagaatagcagataaacgctgaaagttccaagcttctaatcatggcttggtccttctcctcatccaggaaccatccaggagtcccccaagagtcacctcatcagaacaaaacactcctaccacccaggaagttacaaaggtttcaggagccctgtggcaggaacccaggatcaaagatcaaatattagaacaaaagatgtctctagtatattttgacttaggaattacaagggtttcagaagctctgtgccaggaactagcggcagagaccactttgttgttcagttgctcagtcatgtccaattctttgcaacctcatggacagcagtacaccaggcttccttgtccttcactatctcttggagtttgctcaaactcacatccattgagtcagtgatgccatccaaccatctcatccgctgtcgtccccttttcctcatgcactcaatctttcccagcatcagggtcttttccaatgtattgcctcacagattctcatactcttcccccctttttaatgcctaaactcaagttttaccctctctgtggatctacagaactcacagccttctttacacaattgggtttaacaatcaaaattaagcatttaacaatgtattttttatcctcagggaggcagaaatggacagtcatttgctaagataagaaaaatcatagttttcaacatcagttttattactaataaatatttatgatataggctaacaaaagactgaacagttcttcctctgaggtaggagctgcagtatgtcaaacacagagcaccaatgacaacaataataacaagctaccttatttactgagaactttatggaagacacggttctaagcattttaattgtatttttcttattttatttttacataaccctaggagattagtattatcagtgtcctcattttatagatgaagactcttgtcgctcaagaaattaagtaacttgccagatatcacaccattcagctgggattttcaacccaagcactcttctcattgtcatattataccaaatgttcactcaaaacaattgctttgatgaatactgctcgtgtgtgtgtgtaaatatacatacaatatagatgaacacacacacatatatacaaacacatatacacacactctctaaactttatagtcatattgcaaaaatactttagtgatcatcttttgcagtctctgattttatcaccacagatccaccaccagagagaatgtgttagtcatataaattatgctcaaccataaattgctttaaaatggttgacaaaaataaggcagttaattgcactcttacaaaacaaaatacaaatcctgtaactagaaagaaagaattcagatttttatttcaagaccaaattcaaaccatgattgatcactattaaaccaacctttggttttgtttatctacgtttttatttagttttcactaaaacaacgaccttgaaattttcaggaaaaaaaaatacaataaatatttgattagtgacacacactatcactgaagatactagactaagagtttgattataagaatcagaggaatttttcagcttccaggtacataaagattatctatttcatctttaatattaaagagaaatttaaatgggaagaacaggtattccagaaccaatgtaagtcaaaggtttctgtgttgggaagattatttttaataatgtgttacaattaaatcaccaaataatttaaaagtaactgcaacataaatataaccataaataaaacaagaaaagtatcattttaaaagtacagtaatacaacatcagcttaccaattcaattccctgtggaaaaggtgtatcatcccagtccttctgtggaaatctctggattattttccccagacctgctcctgaccctattaataaaatcaaagtgcattaagttacaggtacttaaaaatctgaatactcactttattaatacttatttctaaatgaatacttgttgaataaatttatatactgattaaacatgttcagttttaaagggtataaaactatcttctaaacacaata

SEQ ID NO: 25742 - DNA, 454 bp, Bovine  19866880490646
  misc_feature (1)..(1): n is a, c, g, or t
nacatccttcacacccactcccccctgcacacacatatatatacacacacacacacacacacaatgtatcccttcaggtaaaggtgatgttttgggaattaatatgactgtgctttaaaataatcatgttatggggaaagcattttgaaaattgatgtttggaactgtttctattattatgtgattttaatgccaaaatgaagtgtctcattgccaactatagagactggcatagccacagcctccaaaattaagaagtacacttttaaaacccattttgcattcttccaaatgaagagtttctggagtttaaaaaatcccattgttaaaaatatccccagaaacaactgatgaaaatgaaacggcttctaaaacatcaaccagcttatactggtttttgcctccccaaccagcttaaacggttctgcttccttcaaataagttcataatcaaa

SEQ ID NO: 25743 - DNA, 2166 bp, Bovine  19866880537962
  misc_feature (1)..(1): n is a, c, g, or t
nccttcgtcctctgtctgcctgatgacaccacgtctctctttaaaccctccttaaagaaactggattgacgttcccggtgaaggtggcgtgtggaagggatacagtattggtctgctccataagtgggatgctagggacagcgaggggacctgccctgacccccaaatgggcagagagaagcagcacagtttagggattcagaggtcagatgccagaaccagattcgtgggctcagagtccctgagcggaggctcagagaggaaacggatgggagccagtggctgggagcagtgcaggtcatggcctgcttattagaagtgtgaccctgggcaagttagctctctgtgccttcattctgccatctgtaaaatgggaacgacaggattaacttagttattacgtgtataggccttgacagagtgcacttactacatgctatataagtgttgaaaggcaggcaaagaaaagaatcaaccaggcgatttaggccggctactgatagtgagaagccggtgtgcagaggaggtaagggcaagcttctttgaggatgtgagtcttcagccgggctgtgagaggtaaagagtctccctgtccccagatttttatgttataggctgtcctgttagaagttccagagggtttgggagatggcgcaactgtggtttcctttcagcaacagttctcattttgtgtagtgaggaatgctcttacgccgaccattagagcctttgggctttggccttcctctctatgcagtggggagcaggcttggtcacggtagcaccccgcacggctgcctcattgtctacaggaggggttctgagctctcccctccacaggaggtgggaagggtggggcttgccccttcacgaggattccctgggttcgggaaaacagtagaacccttggttggacagttcatgctttcacttctgagcgtttgctttctcaagacgtaagctggcctatgcctttcacagtcactcacttagggagctagttgtaaaaattggcctgttgggtttgatccagggaattcctgagtagacagctgaccccaaagactagggcacctggccctcttttcaatgccttctcctgccctgcacaccagtgactcaggtggtctagtagttcttggctcacgttggttctcttttcctgccagccgagatgccgcgccaattccccaagctgaacatctccgaggtggatgagcaagtccggctcctggccgagaaggtgtttgctaaagtgctccgagaagaggacagcaaagatgccctgtccctcttcacagtccctgaggactgccccattgggcagaaggaggccaaggagagggagctgcagaaggagctggcggagcagaagtctttggagaccgcaaaaaggtttgtccccctgagctgggtggggttgtgcagacacaggtgggctgcagatgcttgtcttgtgatgaggcaccttgtgtgaaatcagctgtcctgggagctgactttagttcttaaccaagactatttaacttaccacgtattcactgaaggatgttgtggctttggttgaaaagatcgaaaaccactttctctgctgctgttttaaaaacaaatcatgtgcctagatactcacgatttccaaataacatttccatcttctttctagaaacttgagggttagttgggaaacatcaattttacttctttcatcacttgacaagtactttgtgttgttaattaactcagctcactatttgccaggtgttgtgctgggcactggggatatattaatgaactagatatagtccctgccgtgtagagcttacagttggtctagacaataattgactggacaaattaattgagaaatgacaagttgtgataagtgctgtgtcagtcagagtctaaccagaaaagcagaaacaccttgagtattggaagtaggatgttttcgcaggaaattggttacagaggtgatagagaaaccaagcaggggggagagaggctgcccagacagtagacacagtaggaagcagctgtccccccagactggagagacagtggagggaagtggggttgctggagcttggggtggaggagttggaactgcagtggcctttccaatggaaactggagcctagggggtgatgcaacagctgcagagatggc

SEQ ID NO: 25744 - DNA, 1140 bp, Bovine  19866880619243
  misc_feature (1)..(1): n is a, c, g, or t
naatccctgtaatgagaactttgccctcatgccctagtcacctccaagtaccatcactttggcccaaatgctagcacattgggagatttaggtttcaacatacatgcattttctttttttttttttgggaggggtgttcacattgtatgacagactcatagacttgataattaggatggtgactttagaacattagagagttgaaggggccaaagccagtttgctaaatgcacatcccaggtcatatgctgtataaactttatatagtccaatttatttcatttctttttagacaatctgtataacctacaaaccgtggcttatggaaagaggcggaagtgactaaaattccaaacttggaggtctgggatgttttttgataccatgacttaagaagtttgtaaatgtttttctattaaattacttatttgtgtttttggcttggaagattatgggttttacttgacagttatctagatggagtcttcagaagatggacaggcagaggctgaccacaaagacttgagagtcattagtagatagatctgcgtcactgtgagtacccaaggaaagtctctgtagagacagaagaatagaggaccaagaactgatctttggggaacactgttactaagatggagaataagaggaaccacagaagaaggagttggggagttgagagagagatttaatttccccaatagtagtagttcttctcaatggtgataaaacccctgatttttggctagttttgtagccatgcaggagagactgtttcaagttactaacagatagaaacacatgaatgagttctggccagttggatgtaattggaaataagacatgcagtatccccagaagtattcttaaaaggatgagggtatttttctcttacttttttctttcctgagactggctgctgctgctcttgctaagttgcttcagtcgtgtccgactgtgtgcgaccccatagacggaagcccaccaggctcctccatctctgggattctctcaggcaagtggatcctgagactggcatactggtataaaaactggagtcatcttaaaccactgtacataagggcccacatcctggggaaattagagcaaaaagctggaaagaacctcggtccctaatga

SEQ ID NO: 25745 - DNA, 1291 bp, Bovine  19866880632565
  misc_feature (1)..(1): n is a, c, g, or t
naggattttgaggcagcgaaaatactctgtgtaatactataatggtgcatacatgtcatcatacaatttttccaaacccacagaatgtaccacaccaagagtgaaccctaaggtaaaccatggactttgggtgactatgattgtcaatgcaggttcatcggttgtaacaaatgttttaccctggtggagctgttacctgacagaggctatgcatgtgtcgggtggggaggaactgggaaatttctgtgcagaccttcctctcaactttgctgtgaccctaaaactgctcttaaaaaatagtctttaaaaaaaattttttttttggctgtgctgtgtggtttgcaggctcttagttccccaaaaagaaactgaacctgggccaccgcagagaaagcgctgagtcctaaacactggaccaccagggaattcctttaaaacagttttgtttttaagcagactataaaacccatggtaagaccctagttttataaaatatacagaaatgtaaaggaagagacacaccatattaacaatatttatggggacttccctgacggtctagtgcttaaaactccactcttccaatgcaggggcacaaattcgatccctggtcagagaactaagatcccccatgccgtgcagcccaggcaaaaacaaaaacccagtatttatctctgaatgatacgattccacagggatctttcatttatttatatttgtttctgaatttcttacttatactttccatgaaagtttagcaaagaatacacattatttttattactaggaaaaaaatctgaataagaattataaatttaaaaagtactgggatgggaagaaagtaaccagagcagattaagccccagccttcgctaacccttttttcacatctgtggcttattagctgagaggcagaagaggttttctgtccggctggctgactgtcacctgtttgccttcttccgtggggaaggccctcacagagaagtcagggcatgcccaaggtcacggactcatgttgcctctgctcctcatccagtgaggctgccctgggctgtcacctggactcagggtctggcctccaaggtccacggggcagaaggaatccccttgaccttcccatcacctggactgtgatgctctaactgctcgagatcctggttactaactagaggcaggacggcatccaagtgcccactttggaccaaacagcctgagcctggagtcctcgctcaccaccccaccgtgttcccttggggcatgttgcttcacctctgtcaaccacaacatt

SEQ ID NO: 25746 - DNA, 1076 bp, Bovine  19866880868102
  misc_feature (1)..(1): n is a, c, g, or t
nttacatcactgggataaagacagagacagggaaacccacgagccggctattacaggagtccagatagaggtggagtctgggcagtgggggtggagtgagagcctggctaaaggagtgactgctaagataaccagcagaactgtgggcaagacaaatgctttaaagaaagacttttttttttaagttcaggacagattgctatagaaccacagagagacgccaccttatttcacttgatactgaattgcagtgtttttttttcatcttttattgaagtgtagttaatatacaatgttgtgttcattactgctgtacagcaaagtgactcagtttacatacatacgcatatacattccttttcatcttcttttccactatggtttaccacaggattttgaatgtagttccctgtgctatgcagtaagagagctgctatgttttaaagtaaaaataggagttttccagactagagggggaaatacatcacaggtggaggaaacagcatgtgcaaagatgtggaggttggggtgagaagactctgaaacaaaccatcttctgtttggttgcggtgttggagtgggacagtgacaggctgaaggtaagacttagaccaggccacgtgccaggccttgagaacagtctgggtgtttgccccacaggcaatgagacacccgtgagtttactccagcggccatagtcagatcttatttttagaacattgctctgacttcagagcggatgatgtattaggagtggacgttgaggagtggagagatgcgtttggaggctttgccgcagtccacggggaggaggatggtgctttgggccaggatctgtccttgggagctgccagggtttgagctctggctgatgagggtggtgttagtaggagaaaacagaccttttagtgacaggaatccctatggaatgcaaacatccgtattaccaagagcaggaggagggaaagtataacagatggagaaacctttataaacaggaggtttcacaagtttcctggggaatatcagtgatacttcccagagtccgaaggcagcacacactcactccagaccgt

SEQ ID NO: 25747 - DNA, 1620 bp, Bovine  19866880936728
  misc_feature (1)..(1): n is a, c, g, or t
nctctagagttaagatattgtggttagtgtactagtaaatttaaaaaaaattaccaaactttttacatgtagaagtaagatctaaaaacaaggttttctgcattttacatctagaaataaggtgttttttttttttttttctttcttagttacgggtctaaggacacagatttttatgttgagtgagagaaaaatgggacataatggtcttccagatagccatgtactcagctaaaaaccaaaggttccattactgaataagagggaaaaacagatactggggaacaactagcagccaggttgactcaaagcctagggaagtactgattgaaaaacagatctacctgttttgtcaagttctttagaggaaatggctgtaaatatttgaaatataaataaagaaaaaccagaaacatatggtattaaagttagtgtcccatctgtgaagacatatcatcccccagacattcccttttttcctaaacaaaagagtagagaaacactgaaaactattagactttcctggttaagctgtgtcaatattttaatgtttacttagattgactacacttacttcctctcatttttcagctttattgccatctctaaccatttctaaatgctgtgaacagtgaccagttgtgctgaaaatctcttgtctcggccacgaaaccccggcttgactaatttcaaatttatagaaagaaaactctgacacccaaatgaagagaattatctaagatcatacatagctaatggatggcagagtcctaaacccaagtctctgtcccccagtactgaagcaactatgtccaaacagaaaggggcccacctgctgttacagtccctggttagtaatggcacagaggccctgttcttcccacccagctcatcagttggcttcatttataccaactaagtgaactattgtactttacttaaaggaagtgggtggtagtattaatattaagcaagatggactctttctgatggccagaactatatgtagattcaatttaattacttcatattagaaatttagttaagaataagtggtgtagtgtggaaggacaagaaaaagtctccaccatcaggcctcgttgagaactggatgaatgaaataaaattggtatcccaacaggaagtcttaattgatcatcatcatcattcagttccctgattctgcctccactctgactgtagattcgttttcttcttttccatgactgctttctctacttcatggtttctgctgtactgcagcttctgcttactgccttctttgccatctcatattcagatcccctgaagaagaaaatcagactgagttagttcatcattttgtgagacagaactactgaacagttctcaggtcatgctaatgtaaaagccactggcctacatacacatccctggtctagttaattgtggcaaagtggaaggaactcatgatagaaagcataacatgtgatgcaagccttgagactgctttttccagaaatgaactgtggctgttgcttaaacccagagctttatatttgtctgtacacttttggtttaaaaatcaaagcatcattaaggaattcagattttaaaatcggtctgccctctcaagagcat

SEQ ID NO: 25748 - DNA, 809 bp, Bovine  19866880991810
  misc_feature (1)..(1): n is a, c, g, or t
ntaaatttatcctggaaacagaaggaaacaactgaaaaccagtgggaccatattttatagactagtccatcttcagtgggtcagctacctctattaggcttttaacaactccttgacgtatttggttatgggtttatctttatggtgggttctgttttgatttacagtgtttttaatagttataaaggacagggcctttcctgtaaataattattcctaaaaatgtcctaccttgagtttttgcaacctgaacagtgtgaaatttggaaagtttctaactaaaagtcatttatatgctgtacttcccttaaaagaacctaaagctatgatgttttgactctggtcaaatcaagggctagtaacttgacccctgtcatactattatgaataaaaaagtgatttaaaataaataagattttagttgaattccaggcttaatctgaactgagttgataggcaattataaaccattgttggtttcttgagagagtgacattttctggaacaaataacaatttgacatttgtgtggcactccctagtggctcagatggtaaagaatatgcctgcaatgcaggagtcctgggttcagtccctaggtagggaagatcccctgaagaaagaaaggcagtccaccccagtattcttgcctggagaatcccatggacagaggagcctggctagctacagtccatggggtcacaaagagttggataggactgggtgactaacactttcacttttaaaattacttaagggaaagagacacagttagaggtcaggttttctaactaataatcccttagtagt

SEQ ID NO: 25749 - DNA, 801 bp, Bovine  19866881057229
  misc_feature (1)..(1): n is a, c, g, or t
nagccccaggaacccaggtatctcatcaattaatcatgcctcatttccttttttaaaaaatatatggtcattaagctgatgattcaaggaatctatgagtgctttatgagcacctaccacgtgcaacatattgggcaagtgccagactgccaggggtcagaatgccagaggcggtgtaacttgatttcagtgaggccttagacaaagcatcccacgattcactgataggtcaggaaggtgagtggtataaaagtataatgacatgattttgcagctgactaaagagccatatccacagaggattgataaataactggtttccgttagcaggaagttttccatcagactcatccttcttataccttgctttagtcagcatttttatatatgacttaaaggaagaagataagcacaaagtttagagtcatagctaggagatgaaagaggcaagatgaaaaacaatctgaagagcatgaaattcagcaaggatcattattcagttgtgtattttgtttttttaaaatcggcagtacaaattcatggggattcctggtttggcaggagttcttgttaaaaacaagtaggtttttttattgaccacagcttcatcaagaggcattaatggaatgtggctgataaaaacaaaggcgagggcaattcttgaccatggtcataaatctcatgtccagataatatgctggcagttcagtcctgttctcatcagaccacgctggggttctattttcacttctaggcatctgcttcactgttggaacatggcacccttaacccatttttatg

SEQ ID NO: 25750 - DNA, 3043 bp, Bovine  19866881078397
  misc_feature (1)..(1): n is a, c, g, or t
ntgattttggtattcaccatctggtgatgtccatgtatagggtcatcgcttatgtggttggaagagggtgtttgctatgaccagtgcattcttttggcaaaactctgttagtctttgctctgcttcattttatactcaaaggccaaacttgcctgttattccagatatctcctgacttcctacttttgcattctggtcccctatgatgaaaaggacctctttttttggtgtttgttctaggaggtcttgtaggtcttcatagaatcgttcaacttcagcttcttcagcattagaggttggtgcatagacttggattattgtgatattgaatggtttgctttggaaacgaaccaagagcattctgtcatttttgagattgcacccaagtactgcatttcggactctattgttgactatgaaggctactccattccttctaagggattcttgcctgcagtagtagatataaggtcatctgaattaagttctcccattcctgtccattttagttcacggattcctaaaatgttgatgttcactcttgccatctcctgtttgaccacatccaatttaccttgattcatggacctaacattccaggttcttgggcaatactgttctttacagcatcggactttactttcaccaccacagtcacatccacaactgagtgtttccactttggctcagcctcttcattctttctgtagttactttttccaccctacctcagtagcatattgttcacctaccaacctggtaggtatgaaaaaggcaaaaagttatgtatatatacatatttatatacatataaaatatattcctccgacacagtaaagaatgaaattttgccatttgcaacaacatggatggacttggagggcattacgctgagggaaataagagacttattaggtcaaatactgcattttaccacttatatgtggaatctgaaaaagaaaaaaatgaatgaatataacaaaatagaaactgactcagagatacagagaatgaactagtgatgaccagtggggagggggaggggaggcaagttcagaatcgtggattaagagatataaaccaatatgtataaaataaatgttacaataatatattgaacagcacagggaatatagctaatattttataataatttaagaaaatacttatttatttggctgtgccgggtcttagttgtggcatgcagaatcttcagtcttcagcattcagaatctttagttgcagtgagcaaactctaacttgcagcatgtgtgggatctagttccctgactagggattaaacccaggccccctgcattgggagcaggcagtcttagctactggatcaccagggaagtccttataataactttaagtggagtacaatctataaaaattttggatcactttgttgtatgtctgaaatataaggttgtaaatcaactatgcacaattaaaaaagaaattgctgtcatcaagaagctttcagctcaacaaaggagactgacaagtcaccctggattacttaagccatgggaacacagagaacgttttctcttggggagggaaggccatgggaggggagagtctgaaaggaggtagcatctgatgtgggcctcgcagtgtgagtaggaatgtactagatcaggtgagctgatgctcaaccccattgcaaccttcttccagtgttcccgatactgcaggagctgctaacataaaactatttttctcagatttccttgcaagcagcgctctggatagggtttaggttcttcccataaggttcacaaacatgatgtagagggcaggaatcaggcatgagccaagctcccatccctttgactatttctgctgtcaagcttgtgtggaggtatttgctttttctgcagcacgtgtggtagcagcctcagcattcagacactagctcatgggtgtccagagaaggcagagagaggggcatcttttttgctagtgagactgtggccagtgtgggatggttctggagtgacagctgttgattcctgagagtagaaaatgttcaggccttccagaacctcatctagagttggagtagaagaactcagagcatagggacagtttgcctcaaactctccctcctgtgtctgctgatcacctcaacttctaccctttcatatccttaaaatgagggaggggccaccctttgcaggccctcagagatgatctgcctttgcaaagtgccaggatcttggagccttaactacagctgggagtgaagccatttcattttaacaaccagttgctccaagttaaaaaccatgaaatgtcaacaaaaagcttaagctggccctctccagtcttctactgtctccttcacggaacccatccacacaggcaaagctgtcagccaagtgaaagtgttgctggatccatttaagagataaatgtgggatctttagaaagtctataaactcagcagttgtcaggaagccagcaactgatgtttacccgtggtttctgggctgtgtacctgggatgtgctagttagagcagagttcacctccccccagtcctgggctgcagagatgctgacttgcaatgggtttttacggctcttgttttcaatcattaatgtaccgacatcacgtgccagcttcagcggggttctcgttctctagcaggctcccccactacagacattcacacacatacacacaccactccagatactcttcagagactgacatcacacattcatttgataaatatttatagctctggctggaaagcccacaccaccacccatggatcccacccacagtgggactggccctatgtcagcttggcttgtaaacctctctgagtgcagggcaaggcgtcctgggcaagaggcaataaacacacactacttggttgagcccctgactgacagaatcctgaaaccagaaacgagtctacatttcctgcagagtctgtacgctttagatctccatgggtgctcggcctcggtgggagacaagcaagaggacgaaacggatttggcttttgaaagaggactcttttt

SEQ ID NO: 25751 - DNA, 1392 bp, Bovine  19866881249266
  misc_feature (1)..(1): n is a, c, g, or t
ngggaacgctaacagaggagaaagttcttaggctttctgtgctaggaacgggaccagtggcctgagcccggcagctggtccaggcatggtcagattcgctgacaagcagccccaagctgcctgccacagcatctgctccacgtctgggacttgtgactcatcacactctcttgcagccctacattctcatgcaggcctaagcatgcaggccccagggtgctgagggcccaacgtatcaagatcagtccttatctccaggttgccttcctctgcctcagaccctcatccgagtccaccagctcctgggccagggcaaattgcctagaccatctcagatccaggctgagatcaatatcataagaggctcctaggctgagatggattcaagatctcgtggacactggtgtccattccagccctttaaatttagcagcccacgctcccaccgtgcccagctggcccaccgtagtgagctaccagcagcacctgttctaggccaatcctgtttactctggacatactatttttgttctcacctctctggttctcagattcctggctccctaccccggctaccatagctgcctctggccccttcactttggtgacccttcggatttccctttttagaccacagcctctcacatgtttctgactcaacttgcttctgcagtgctggcttcactcttggtctcaggtgagcacccatgattcagccccagcctctgggtaccccctcagctaggatggctcccaggaaaggcagagggtcaggacttgttcctaaggtccctgcttgcttccctgccctcggctttgctttgccctccaattccagcacttgggagggctccccagtcatgcctctggttgctggccccacttaggtccctcaccagagatagctctaccctgagctcagcacctgatttcatcctggccttgccgggcctccaccaggcacccccaacccccacccacaatctcattgagaccatagtaggggagtgagggtctgagaggagagggaaacactgcctcaagtggatcccagacggggtgcagagcctggggagagctttgcctctgtctcctcctctgggaacacttccatttacagattgagggttacccataagagaagcctaatggggcagtagaacgcaaggcccttgccatctcaggcccttgcttcctaccctctaaattgtgcaccgggggaggggtagtgtgttgctccagatgatatcttagccttctgggtgtaagatcctggaagctaacagtagtcccatgtggttcattccttttccttgtctgccagatcccatgcttgactttagggacacatctgatcctccagcctctccaccaaagaacaaaggagtccac

SEQ ID NO: 25752 - DNA, 2271 bp, Bovine  19866881273920
  misc_feature (1)..(1): n is a, c, g, or t
ncaaagtagttttaaaaaggaaaaaaccacccaactctgggctgtggaagaggcctcgtggtgcaggcatccaatcagcagtcagtgcatctggagatcaagttcctctcaggattagtgaaatcgagcttttgttagcattaatttaatggtggaatgtcaactcacaaacctcaaaaatccttttatgcttcacaccttttttcttttttcataaaaaaatgcaaactcccaaatgtatgtgaagcctgaaaggacaatctgagaaaggcttgtctcttcctttggtgaaataaacaatctgttgtgtcatggcacctgcacagaaatcctgtgtttgaagaacaagttgagactacactgttattcaggatagttagtggtgggggcaaagtagagagagctctacttatgtaaagatctgggagtctcagtggactgtggattttcaatgagccaagaatgacttggttgtcacagcacactgttgccaagtgcatgatgaaatgagtctcattgccttcacatcccaggcctcaccaaatccctgaaaattggcttctaattccatctattgacatggccctcccaaatatccaatagcttatttacagtcttcttcacttgtgatttaaaggtctcctagagatccgcatttctaaagtctattccactagtctagacatctctcaaggaacaatccttgcaatcctgtatttctaaccatcttctgggcatctccatttgagtgtctccatctgggtatttccatccaggcatcccaccagcatctcaaactgaactgatctttcttgaccagtgagtgcctgctcctggctgccctgtggtattaacattcactttacctgcccagggatcaggtcaaaattctggagccacctgacctcttctttccacaccccacatgcagttaggttgcaaatttattgagtctatgtctttcttcccactcttatcactgctgttactacttctgtgcaaagcttcctgcgttcagttatccgtgtgtcatctccacggggatgtttcatagtcatctacacacttgacatgtccaaaatgggactctggagtctattactcctgtaccccaggctggctttcacatctccataaatgactccactgtatatccagttgctcaacctggttcttctctcctgagagccacatgtctatggggtgtttcaggagcacctaggctaatgtttaccccagtcactccactatagccatgtgttgttaaaatgtcaaggtacctccctgccagttggtaaacagctcctactctgagacccctgactctcctccaccacctcagttgccctggaatctcccccagaattccctagatttccccatgacctggcaactcagatcatgaggagatctagtgttggtgcctcatactgcaggggatctctaggatccagtgactccagtaatatagccattgatacctattacaattggccagcatgtgggtcataacagatattttgaagataatccccagtattacccattttgaaaaagaagaaattgacactgaagagattacataatttccctataattccttggagtccatgtggctccaaaggacttttatcagttatctcttgactggtcccactgtcctacaacaatcgtcccaaagcctaactttcaccacacactagtcctgcttagaaacctcctggggctcccaatccacatggagttaagtccaaactcaagcctgggcttcaagtttccttcatagtctgaacaactcaggtcagctccatgacagaagccctgccactgcattcctgagcactttcctgcttctccacttagacccacaccacttattcctctaggaacaatctccctgacccactcttcacatcttgaaaccttgacctgtttggacacctgactgcctcaaatgcccactcctccagaatcaaaccttcctcattgtccccgcttcttcttccttggagcatctgcagctcttgggttcaagttcagcagcccagcccatccatggttgctaaccacattcttccttacagaacagttttactctaatgcctatgtaagcacacagagagagtttgtaaaccactttcacacaccttgtaatcacagatgttacttaccttcttgcatcttatcccataagctcctggaggacaggagtcacattttgctcatctgtataacctcactaccagcagaagtccaagcacaagtcatgca

SEQ ID NO: 25753 - DNA, 1301 bp, Bovine  19866881291496
  misc_feature (1)..(1): n is a, c, g, or t
nacttctttttcttgcaatctctcaaaagttagacaaaaagagttcacatacttcaatactctgatttttttcagccgcttctcttagagctataggttgtccatggactgtcttttaagttatcatgggtaagactttacctattatttttgttttattcacagcacaggtcaccatatttccagtccgtgatatcagtgttctggtttcctgccacttgacctcgaagtccgtgtctcctattttgaaaatttgttcttgaagttccctattactgcttctgtatatgttagtcagggtaggctaactgctataataaacattcctgaatttctgtggcttaatatgctaacatcttatttcttgcttatgtcagttgaattctgggaatgcccacaagaagactcagcttctactgagtggggccagcaacttcttggacgtcacgttctgaacggaatgccctgaatctggcaggcagaaaggggactacagggaatgcaaggtactaggcaggagaagtctgtttaggaaactggatctggaaggttcacattcgcctgccccttgctgcaagaaaagacaaaaaaaagattgtctaactgtagaaatcagattggtgaaaatgtagcagtctctatcacagaaaaatgtatcaaaaaaaaaaaaacacacaacaacacacacacacacagaccaggaagatatgggaaactagggtcagaaatgaggatgagaagcagaggaattgatggagcccctggaagggatctggtaacccagggcctgggggcctgggaggcactgtcacccagggtagattctagttcagggttgggcaaggttctgactcagctccacaaaattaggaggcatttggctgctgccaaaggtttggaaatgtgcttttattttcaaactcaggtacgtgacactctatagttcaatgctagcacacctgtgtgaggtttaacaacattaggaactgccagccagtgatacataaaccccgcatctccctctcctcttactccgccaggctgtatatgggagtgacacagaaagtgaaggtcctctaggaggggacatcgcggcaccaacaacagagtcctagggccaagcagaaatgtcagacctcagaggcatggtgaaggaagggaacttttatttctgatcaatatcactcactgttggacatacagggcctgtttctctccatttcactgctgctttggcaacagttccaattgcattaggtccatcttcgcttttaagaaataccgaggagtcctgtttcagg

SEQ ID NO: 25754 - DNA, 1756 bp, Bovine  19866881310554
  misc_feature (1)..(1): n is a, c, g, or t
ncacacaagcacatacacatgacattcggtgcacatagtaatgtcagagacaggccttcgagaagctaagagtcccacagagaacgtaaatgagaggacagaaatgcacagaaataaggataagacagctacgcgtgctctggaggattgtggcgtttaagtattttgagagctcctgggggagagagatcaagctgtaaggtaaagagtcaagcacaacatgaaggagcctgtcctaaatgcattctgatgtcctccagacatctgctgagggcctctgagccttgatgtccaagtgcagtggcctggacttctgaatcccatggaccgaggagttccacgccctctccagcatatctgctggttccctgtggggacctcagtctcttggccctcctacctctcaaaatgctagcttcctcacacaccacttctgtccccttaggacaccccctcccccaacacaaaattcagccactcatctggtttgcacaagaaaaactcaatcacaccaagaatttatacacacaggtttcccaaaatacgggagaacggctcctgggatgcagtcatattaaacagcacctggccttctgccagccctgtgccctctcaccacacttttgtctctttcctcctctttctcagaagcaactcaaaaagttcctgggtcttagtccagctgaaacctaggcctggggtgtgggtggggcgagggttggtggcagaagagaactaccctatctccaaggatttctcaaggcctccttccaaagcacacacacaatcttttgctaagaggaagccggcagtaaaagtctctccatcccgtttgtattggtgaattgaagagaacaaaatccactcaagctagattaagcaagaagggatttatgacaggatattaagtgtcttacaggactactaggaagaatttagaaaagattttaggttgagcttgcagtaaagtcttccaaagaagatcctggccaccagggaagccacttgctccaggatcagcactgctcctgctacaaggccagcggcaaaatgcataatcctgggcctcccagcatctatgagactgtggcaggaccccggggatgtctactcatgcctgcagagaaagctcagtcagcctctcagctgcagtgccagcagaaagtgcaggagcagcaaagggctggcctctgcctggctccccgctagatctcttttgcctcacaccttgaggtttgatcatccatccaagggaagacatctgagagtccatcacagtcaggatccactgggcctacccagcaggtagggactctttcctgagcactcatccttgtaatttgggccacacacacatgggtgccctactccttggccccaggcagagccaggactggaatgagacaatgggcaccagaggcccaaagctgaaagaggcacttctatggctcatgcaaatgcaaggtcagcccctggagtgagtgtctccttaaatatttgtgcactcagtcctctgttcgcctcatcgtagttccagccacctcccaggagagactaacctgtactcctcccccagccttgacaatctggaaacaggtcctggctggacaccatggtgagatttccatgtggaatcacatggtgccacctccagcttgattcctaggccagataccagaagaggcaccaggctctctgaaagtcaacccatctatgccagctcccttaatttgagagtcattagtaaacagatgta

SEQ ID NO: 25755 - DNA, 954 bp, Bovine  19866881375866
  misc_feature (1)..(1): n is a, c, g, or t
ntaagaaaactatttatgatttaatgttaaatcaaagatacatatagaattacagtgcctagactgtgacacactctggctcgtatccatacgaggggcaccgttgggagtctctgacctctaggtgctttgtttttgttggggtgaaatagtatttcacgtagtgtctcatctgggtagtcagaatatcgtcgtggtattccagataggcctaggaagcgttgggtttttgttcagatggggagaattctctagcctcttacaacttagtttttgaccagatgtgaatatttatcacacacaaaccttaccaagactagtagagagggcactacaaaataaaaacaatttgattctttggagaaacaggaatgtgcatttcaactcctgttgatgggcacaagaaacgttagggataatttaaattggaattatggaatgatcctccattcttgttttactttgcttaggaaaaatgaattattggaatgtcacgtatttagaataaggcctgacagagagtaatcagtaaatgtgagcttgtagcatcaacatttatgacacaaatggcaccattcctgtgtgaataaactcatagaatcctcctaacaatgcagcgagggaggggctattagcaccccagttttggagatggggaaacaggcattgagaagttaaatcacttgtctgggctcatgtcgctagtaagtggcagagctgagggcacctggcgtgaccagtcttgctcctcaacattcacccatgtgcgtgctcatgaagcagagatgattcttgtagggctcatggaaaggaaaactgagtggctggcagaccttttagtggaagatggtctttgggttcctgggcttccagggaaggggatgatgaaggctggagaggagaaggaggggagcaagggctggttcgtggtttctgcaccttctggagtggagg

SEQ ID NO: 25756 - DNA, 1392 bp, Bovine  19866881395949
  misc_feature (1)..(1): n is a, c, g, or t
ntgtgtgtcacactgaatttcttcccatttgtccagttggagtgtctattaagaggttaagtgcatgcgatctattatctactagctgtgtatcctcaggtatgtgatggtttctctgagtttcagtttcctcatctatattaatagtataccttcctcatggtattataaggattaaaggagatcattaatgtaaagcaattagaacagaacttggcataaagtaagcatgcagtaaataataagagtaattctcattatcttcaatattattccttgattactccatactttattgccttagttcctggaatgttattaacctcctagttacctggttaactattataaccttcaggtttcacttttaacataaattgctagaggaaatgttttctaagcaaccccgattaccaaaactgggtgatgtgctcattttcttgtatgttgtttccttatagcctgttcttccttctgatatcactcatcacactatattacaataggctgctttccatctgtctttcccattatactgtgagctccttgagtgcattccaggtacctgggtcttggtcattaattggtgaagaaatgaaagactatgaataaacagctttttcaagttaaactgaaactgtttcaagttaaaatgaaactgttcttgagccttattctattttaatctttaatactaattttaaatatctctctctatttttctctaagtctacaggttcctagacccttgttgagtgaagaacaggtttctatgaagtcatatggaagaacaaggctcagaattctttcaagttattattgggagtgcagtctgtgatcagatatttgcttttgaactatccgcaggcaatatgatcttctcatcatatttcttgtgcttagccaacttccctcctgctcaatcactgtatgcttagggaaatgtgagatcatttaaacacaacaatctagatagtaatacatattaaccaatactgcattgtttctctttaacagtatggaaaaggcagttataaacaattgtatttctgttagaatggaaattatgaattcattttcactcacagattgtctcattgccgatctcttggcaatctattagatatttccagttccataaatttagatcaaaattactttgcatcttttagaaatccagaacggagagttgttgttaatctgaatccctcctcatttgaatagcccttcccctttctgcagtcatctttatagactgggtgtattcccaacaggcaagtcaaccacagcatgggaaatgtatcacagtggtctttttgaatagcccataagaatgagcagcacgcagttgcttcgttagggtttcttgctcgactaggttcagtcctcact

SEQ ID NO: 25757 - DNA, 1900 bp, Bovine  19866881443546
  misc_feature (1)..(1): n is a, c, g, or t
naatgtacatatccaaagggaaatatctgtttactttttattatgtatgataagatccatatgctcttgaaagattttcatttgttacaaagcaaaagctaaaattaggttgggtggttctggaattcttagaaataataaaaatgtgatgaaaatgaatttaccaaagatttccacacttaatgaatcatcttttttatggattactaacaaaatttgtccttgcatgacaaaaaaatgactgaaattcctgaaagagataaagttatccacatttttatgagattgtgatacatgccccagagtaccattagaagtcagcttgagtaagcacataaccatttcatataaatgaccattaacctatgttaaactaaacataaaatagaaggcattggtcatttcctttaattaaatattcactaagtggaataattattaacaagaaagaaaaaaggtctgacataatatgaatcaatactaaataaaaacaagtccattttctttacatcactattatagattttgacctttactttgtaaatgtgctatgaatcataagatgctgctattcttcattccaatagctcttctataagaatacgatgtcccaagtttagagaaaattcgtattccttttttcaaagcaaagcactgctgtgatttttttaaaattgttgtttataacaagtctgattccagtaaacagtagtgttgtgattttggttaactttttctataagtaatttatcatgtaaaagaatagtgccgttttttatagctgttagaatatattttgtgtaataattttgtagtgatactaactctgttatgtgttttacaatgacaaattttcacatattgaaaagatgtgagaaacgtaataagcaggaaattaaaaacacaggaatacaaatgtaatagacattataataatggttagaaatttaacattttatagtataaagcgttttcacatactgaatctcatttgaacaaaacttacaagacttcttccaagctgagattattccttggttttagtaggtcccaaagtactcttgcctggaaaatcccatggacggaggagcctggtgggctgcagtccatggggttgctgagggtcggacacgactttcactttcatgcactggagaaggatatggcaacccactccagtgttcttgcctggagaatcccagggacaggggagcctggtggaccgccgtctatggtcggacacgactgaagtgacttagcagcagcagcaataaagatacatggagaaggaaatggcaacccactccagtattcttgcctggaaaattccatgcacagaggaccatggcgggctacagtcgatggggtcacaaagagtctgtcacgactgagcacatcagcaatagatacaaatttaccttaaattctgtttactgaactgcctcacattgacatataaagtgattttatcttatatttagtgtaagcatgtgccacaacttgcccactgactggtattttttcctacctattattactgtggaccacatctactagcggcattcccagcttccatgtagttcccattctatgtagctctcaaactcttcatgcctcaatagtatgggataaattagtacccatcatagcaatctgccttaaaagaactactgcctttcaaacatatcctcagggaaaaatgctaaaaattattagaatactgattttatggaatgactgcatatagcagataggcacaatctgtaagaagcttatcctatcacccaggtagaatacttcattctcatctctgctctactcctgatgcttgactcctgtctcttctattctgaaaagactaactgcatccaatatcatctgtgctaagctcatttttcag

SEQ ID NO: 25758 - DNA, 1265 bp, Bovine  19866881574544
  misc_feature (1)..(1): n is a, c, g, or t
nagagcaagttattcatagagaatgcatcagtggggacttcccctggtggtccagtggctaagactctgggctcccaatgcaaggggcccaggtttgattcctggtcagggaaccatattccacatgcctaaactaagacctggtacactcaaataaataaataaaattaaaaaaaaaaaagaatgcatcaatggcactcttatccagagaagtatttctgattttcccgttgtaagaattttcactttatataaaatagtgtctagaagtaagtgtttattcactttatttctgaaggatctaggagtgtttattcctgctcctatggctcaagggatgagaagtgacttctttctggagggaccgtttatgccacccaggatgaaaatggatagggacccacttggaggacttgctgatatgtttggacaaatgccaggtgattttgaacaaaagatagtttggttgcattaaataatgagtttaacagttttaatggtaaagagttcttcgtgtctatattttaaggaagcggaattggtactggtccaggagttatccaggatagattttcacccaccatggggcgccatcgttcaaatcagctcttcaatggccatgggggacacatcatgcctcccacacagtcgcagtttggggagatgggaggcaagtttatgaaaagccaggtaagaatacatttaaggatgtttaggcaacaagtaattaaattttggaatacatatgattagtattgtgtttttgtttttgtttttttagtgtaaatgttttaggtttagaaaacctaaaaacaatgtttttctaaaccaaatttatatctgtgacagttatttcaaactgggtgaaatgattttattaagattagtaaagtattagtaaaatcacatcactttatttgacagttaggttagaattttattcttctgtttcatcttttactttctctgggcaaatgcagttaagctttcttgtggcttggcctcatcactttggtacttgattaccataatttgtggacccctttttatctagacttttctttctctctttctgaaataggggctaagccagctctaccataaccagagtcagggactcttatcccagctgcaaggacagtcgaaggatatgccacctcggttttctaagaaaggacagcttaatgcagatgaggtacatttgcctatgttatttatataccatagtttgtcaattcaaaaatctcttgcccgatgattataaa

SEQ ID NO: 25759 - DNA, 1033 bp, Bovine  19866881645230
  misc_feature (1)..(1): n is a, c, g, or t
naatcctatggacagaggaggctggtgggctacagtccatggggtcacaaaaagagtcggacatgaccctagtgactaaccagcaacgatgtagtcaatttacaatattgtgttagtttcaggtgtacaacaaaaatgatttagcttacatatgtacagatatatactcagattcttttacattatgttattacaagataatgcatacacttcccctgtgctacagagtaaatctttgctgtccatctatatcatatatagtagtgtgtatctgttagtctcgtacttctattttatccctcttcccccacccctgttttccctttggtaaccataagtttgtattctttgtctgtgagtctgcttttgttttgtaaataaacacatttgtattactttttagatttcacatgtaggtgatatataatatttgcctttctctgtctgcacttcactcaatattataccctctaggtccatccgtgttgttgcaaatggcaataattcatgtccttttaaattctagctgaaaggccacaggttttaggctacttctgttgtcttaaaatagggctctgaccatgtctctgaaggagggcccctggagcaaatgcggtgggccagctgccaaggctggcagaaggagaggcagagctggaaataaacgcagggtgtttgcttacagattcttctccaccacatcatgggtgagtcagatgacttctcaccccagattctgtttttacccactttcttactcagaggcagggtgggaggattggataaagcttaaaatatatcccccaattatctccttttgtcttttggttttaatgcagaatcaggattctttcattctttgatgcagtcaggaattatttttgactttcttactggcattctgtttgaattcatacttggttgcagagagagcactgtggagtgagtcaggaggttcagtcaaatgtctgctctgagtgcccatcactgggatttggggcaagtcagtctgccttccctgagctgcagttcc

SEQ ID NO: 25760 - DNA, 1077 bp, Bovine  19866881859681
  misc_feature (1)..(1): n is a, c, g, or t
nttgttttaataataatatacatattgtatgctttttagtttgcaaattgtgtgaaattatcacatggtttgctaattcagcatattttacagttgatactttatcatttgattctttttccaaggtggtagcttttgaagtagagcgaattaaagttgaagaaaataacccaatgaagatgataaagcatgtcagagaacttgctgagcaactatttaaaaatgtacgtaagtatatttatttagatagtcattaattttaaaagtattaataaagtattttctttgaaaaattcaaaagcttcatattcctagtgatgatcttttttgatctgatttaaaacccttgagactatgagttccaaatattaaagttggtactgtgcatcaaaatagacctcatttttcaaagtgatttccctgtcaattgatacattatgaaaacatattagtcccagttttccagtttatcatttgccttcattgtgattttcatttggatctctgtcttcttaagagcatattgaatatttttgagatgtaacaattagactcatggagaccacaactacctgggacagatttgaccgatgtattctgctttagcttggtacagtgactgtccactgtatcgtgaaaaacttcgagggtgcattgctttgaatatacaggaatgaaaagcttaaagaaagaaaactgtcaggtgccatacaaactcaagggtgaaagtattccctgataaagaaacgcagtaagttaaagactggaatgtgttaaagtctgtatttggataccaggagagaagagaagatgcacacagaaaagtggatactggctaatgtggatactggcttatttctcctgcatgcgaagattttcagggttgaatctttttactaaaaaaaggaaaataaatgagaagtattgtcttccagtgtaaagttgaggggagatgtatcttaaagaaaatatagttaagaaggatttgggatcagtatcctaatattgcttcagttcagttcagtcgctcagtcatgtccgactctttggaccccataactgcagcacgccaggcct

SEQ ID NO: 25761 - DNA, 879 bp, Bovine  19866881941316
  misc_feature (1)..(1): n is a, c, g, or t
ntgataagttattcatttcaccttgtttttctttacagacagctttcttgggacagcgtggtctagttgagaatgatttcctcactaaagttctcaatggaatggcatttgcaggttttgtttcagaaagaggtcctccctatagatcctgtgatctctttgatgaggtatacttattatcaaatgaattcattatttacagacaaaattagtagctaaaagtagagaagcagtgttttaaacatttaattaagataaaaaaatatgtattgtacgtatcagatcttggtgtttataatgtggattagaaaaaatataattataggatgtctcagaagtaaaatgcatagaaattttgaacaactgaatacttttttggcttgtgggatcttagttccccaaccagggatcaaacctgtaccccctgtgttggaagctcagaggcctaactattggaccaccaggaaatttccttgaataattgaattttaaatagttgattaaaatctttttgaaaaattgacagtgattgtataagtagaacttaccagttttatagagcgaaaggtctaagtttaatgtataaatatgttatttcaaactgttattacattaaatctgtgtcctagagccatagtttaactaagccattcttttttatttatttatttattttttggttatctttattttaatcaaagcttggaaaataaagtaaggaggccacaatttcagtttctctataaaagaaccacaaatcagggtgttttcttaagtactaatccttggaaaatatagcaaatttcaagtaagaattagcaccttctttgcatttagctaagccattcttaactaatgctgatttttttctggcatttg

SEQ ID NO: 25762 - DNA, 3944 bp, Bovine  19866880137863
  misc_feature (1)..(1): n is a, c, g, or t
ngttgataaattaatagaagtctctttgttcttttttttattttttaactttacaatattgtattggttttgccatatatcaacatgaatctgccacaggtatacacgtgttccccatcctgaacccccccttccctcctccctccccgtaccattcctctgggtcgtcccagtgcaccagcccaaagcatccagtatcgtgcatcaaacctggactggggactcatttcatatatgatattatacatgtttcaatgccattctcccaaatcatcccaccctttccctctcccacagagtccaaaagactgttctatacatcagtgtctcttttgctgtctcgtatacagggttattgttaccatctttctagtttccatacatatgcattagtatactgtattggtatttttctttctgggttacttcactctgtataataggctccagtttcatccacctcattagaactgattcaaatgtattctttttaatggctgagtaatactccattgtgtatatgtaccacagctttcttatccattcatctgctgatggacatgtaggttgcttccatgtcctggctattataaacagtgatgtgatgaacattggggtatatgtgtctctttcaattctggtttcctcagtgtgtatgcccagcagtgggattgctggatcataagcctctttgttctgatctagatcttccaaattatattgatggctgaattttccagttcacagcctttgaagctgctttttcctgagtggtttctcctgactctgaacaatcttgagaacccctaatacccttccagtaaatacttacacttactgtctgttctttgtaatctaaagaaatctgaagtattatatctagcctctttactgggtctttgttttttaggaagtctattcctgttaaggggttcctggtagctcagaggttaaagcatctgcctgcagtaccagagacctgggttcgatccctgggtcgggaagattccctggagaaagaaatggcaacccactccagtatttttgcctggagaatcccatagacagaggagctggtgggctacagtccagggggttgcaaagagttggacatgactgagtgacttcactttactattcttgttaacgtaagagtaattattggaaataaggacaattcccactgaaaaagtaaaaatgaagagtaaaaatgctgagacattaaaaccctatgttataagactacatcattgtcagctttttttaactgaaagaagtgcatataattagaaataattgatggaaacacacttatgtggctaatatatgaggggcagcatttgtaaaagatccttgttcacacccctgtaatgagtacaacaatgttctctaactactcaacatatccattttcaagaaatatgactttagtatagtcaaccttctatttttctttcactataggtgttgtaggttaatattagataattcacagaataatgtagctaacctgcctctgctttatctctcattcctaacccacctagaagatggaataaggtgaaaaatcattgaggataaagcttagccaataaatatttttcatgctactttgccttaatcctttacataaaaatgtttagaactgtggagccaaaagagtgctatgattctaaagtatagtttaaggaaaccaggaaaaacccaatgaaagacagcaatgtttactgcagtttctggatcatagaagaaactcaataagcatctgtagaaagaaggcgagaaaaacataagacagaataaaggaaagaagaggaagggaggaaaaaggaatgtatacaaggtgggtttttgaacatcaaaatggaaattttcttttttgttctttgagaaattttaggacctgcataaattctaacataaattgctctccaaaaatactggaacagagattaaacaagatatctctaaactaacttatcaacatgaaagcattatataagatagacttacatgtcaaaatcttaggcatctagcagacctcactgtaaggtctatgggcccaatatttgaatctgacattatgatcgtcttactaccaatttcatgacctctcagctgttaagttggccaaatagtaatgctatgtcactgtagtatcagaaggagtaatgtagcctatgtatccttatgggtccaaagctgctataaagtaactctactaaattgtgttaccatttgagagaccaaataataactttttggggagccaggaaagtattaaagtccattaaaattgctttttctgtatccagttttccttcctctccctctttctacttctccttttacaattgctagaaactggtctttatagaagtcttttaaaactaggtcatagttaaattaattactcacagtacaccttactttaggatagaaagtcattgtacctatagaatacagcatgaaattcaggaacacaaggagaaatgaagatcataaatcaagttgagtgggacaagaagtgtgaaaatacagaaaaattctttttgtttatccacctaacaaatatttcttgacttacttattataccaaggatatgagctgggctgtggagatgtgtaatcccaaattactttactaatccttaattaaccaccttttattcctagcattgtctactgtgttccttctaatgttacactggaacctgaatttttagatagatctgcataggactgaatgacttcaataaaaaaatgggaacaataaacctaaagtgcctgtctgtgtgtgtgtgctcagtcatgtccaactctttgtggccccgtgaactgtatagcccgccaggctcctctgctcatggaatttttcaggcaagtatactggagtggactggcatttcctactccaagagatcttcccaacccagggatcaaaaccttgtctcttgcatctcctgcactggtgggtggattttttctttcccagtagcaccacctgggaagccctagaccatgtaattatactcaatgaactgcactgcactactcagcactgcattgagtcagcttcaaagacatcaccaaagacaatgttacaacaatagtatccaccctgatgtctaaattctcccttccttacccttcttgagcccccgtcaacccactgtctttcccaagtatcttttacagtgtcatttccattttagcatgctgaataatactgcaataaacaacaaagaaagtttttatatctatagagaaccaacttttctatttggtttagcttgaacataggaagggaaagcagctgttaaataagtagcctgtgtaaaagttcattatgaacattgtacactaacaaagtaaagatgccatattttctgaataatacatgtatataccatgttaatcttttataacatacccttatcaggaaataaatcttattaaggcacaaaaaagttattgcagttattaaaatgggtgaatcaatttaagctttcttatggtttgtcaaatttgcaaaatattatatttctcttcagatagagttacattctgtgtagctcaaagataatccctatggtcttggcatatgttacttaattgtctcagaaggaaatgccataaatagcatgctgtcatcccccacaggcactgtctcatctgtcacagtgggggctccagacagggtgaggtgctctaagacatttcttagtctatgtaaatcacagccattacttcttaccacttttcaatcggtcaattatgtataaacatgtgttaataaaaatttgcctctgtgcctctaaggtacacacccataaagctatgtgagtatgataaagtataaatggcatacattattatttgattcaacctacctcataaattagatccaaagtgcttccatagaaacaaaattccagaaaagc

SEQ ID NO: 25763 - DNA, 3851 bp, Bovine  19866880209261
  misc_feature (1)..(1): n is a, c, g, or t
nacagtgaaagaggagagtgaaaaagttggcctaaagctcaccattcagaaagctaagatcatggcatccagtcccatcacttcatggcaaatagatggggaaacagtggctaactttatttttctgggctccaaaatcactgcagatggtgattgcagccatgaaattaacagatgcttactccttggaagaaaagctatgaccaatctagacagcatattgaaaagcagagacattactttgtcaacaaaggtccatctagtcaaggctatggtttttccagtggtcatgtatggatgtgagagttggactataaggaaagctgagcgctgaagaattgatggttttgaattgtgttgttggagaagactcttgagagtcccttggacagcaaggagattcaaccagtccatcctggttgaaatcagtcctgaatattcattggaaggactgataatgatgctgaaactccaatcctttggccacctgatacaaagaactgacccatttgaaaagaccctgatgctgggaaagattgaaggcaggaggagaaggggacgacagaggatgagatggttggatggcattactgactcgatggacatgggtttaggtggactctgggaattggtgatggacagggaggcctggcatgctgcagctcatggggttgcaaagagtcggacatgactgagcaactgaactgagctgaactatggaatgtatctacaaacaaaaagcggatctataagcaaaaacattaataaatgaatcatcaaaaatgttccccaaataacctgcttatccaacagaattcaatcatttttttcaagttttattgggagtatagatacaatcttagactgaattagcctgaatcaatctaaactctgtaccttaaaggagttattattatgatgtagaccttctctgttgtcacatcacaactatgattttttaaagcatttatttttaaatcacagtgacttcttatagttattagcatataaaagtaatggaaatatttaaaatatccctataacattgagttttatttcaaaagaatattttgttgtacatttaaatacctgataataaggcatataatgaagagcctggtagaccttttactttgacaaaaacaactaaaaatggctataaaatctgaaggaaacactgaaaggttgacctctgaaggggatgcagaatccattttatttttaaactgatgctgaaggtgtgtcaaaatatttataatatccacaataaagagtcaaaaacatggctggaagatttctcagacttgaagtaaacatttagcttagtgactctacttattttgtgtgatggggttgaaaccaatgtagagaaagggtcttttaattttcctttacacctattaattgctattttaaactatgaaaaatcacagctaaactatacaaaaaagtatttttacctgccagtctagtttagggaaaccccaaaggcctccttcctaaacatgaaataacacacacaaaaagttaattttttagtgtttcaaaaagaatagctcatctcaaccatatcgcagtctatccgatctgatctccttctaacataaaactaaaatataagtttttctcatacctcagcaagggagtattttaagaacagaccatggagataaaaaatgtcaataatatatttattccttgtagtaagatgtagcctttgcaatccaataaatcaattaggaaacagattatacaatttaggttttctgaatgtcttcttttctaaactttataaaagcatgtttttagagccttagtagttattttattcagatggaattaagtcttttctttttctgtgatgtactttttctgttaattctcattatatgtttatatcttattttaaatgatacatcttttcacttttcttagaaatcaatctcatgaaagatactctggtataactgctactaaaagatgtagacaatttattccttattggaataaaatatctattaacaattagcaactgttaccaatcttatccaagatgtcagtcaaaaagtttattccctagtcaagaaaatactttattatttattggcacttaaatattctggtgtttcaaaggctttggttgctgtctcctcataatatttcagcctttaagctgcttccctgcctcactgagttcacataagatacatctgaaagctttagtacaaatttacttcgaataaagtcttcaattcattttcatggcaccaaaaagacagctttaataactgcaatgacaaataaactggaaatcattccaggccttttcacttaactgacaagtagaacactctcataatgagccgcaggttttacgttttctctttgaccataatagcttcatttaagagcgtcagaccctgacacttcatcatttatctacattatttctcatcttctttcaaataaattatggaatactagactgagcacataaaaacaaagtgacttgttatcagtaaacagcaagataaattgtccagaagttcctcatttagttccctttaaatttaagggcaagttattgggtgcaccttttttaacttccaatgtttgcatttttacagccatcttatttctcttgccactggcctctgtgcactcatccagagcctgatgtggaaggcataaagtaatcccattatcccaaggttggccgctaaagtacaaataggcagaagaggagaaaatcaaataaaaaacttggaaagagatttctccacatctgtaaaacaccctatccataatacatcttgtcatactaggaaatgtgacacttccaaagtaatgaacagtgcaactgtaactcttttagcccttgaaaatatagcaccgattttaaatggatgggcgaatgccatctcctctcatcaaatcagccccatccttttaagtgtatagaatgggagaagataaaatcactatcagattgtatttctttttaaaactgttgagcaagtttatagaaatcctcacatctcttatttcttatttgtttggtattaagtttcaaagacttacttacagaatcatatcagattaataagtacaaaactcagtatttaaaagcatgaaagcatcaatattgtaagtacggtacatattgaagtcttggatgtatgctgtatttatcagtgaggaatgtgtagtgtcatggggtgactgtgtactaacaaattttcaatgacttgagctattctgaaaatagctcacaataagcatagtatttttgttaggcttttcctagctattccaattaatttgatcataagatctttgagatttaataacaaattatacagaaactgattcacagatgacataacatttatagaccccctattctgagctatagcttgaataagagaattataagtgaaagggtatgttttattatttgtcctcaaagaactgacaaaaaggtttttcatttaactttagaatgctatttaacttctgagattctacagtggtaaaaataatttaaggagttaatttatatttctctatatttatccaatgaggagggcatggcaaccaactccagcattcttgcccagagaatcccttggactgaggagcctggtgggctacagtccagttgggctaccactgcagactcagacacaaccgaaacaaattagcacatatacatgcatatttatctactgagggactattccaagttctagctcctgaaaatacagtaatataatatggtctctggctccttctatgtaatccaatcctggaagatgttccagaagaggctgctgaatctctcatccagt

SEQ ID NO: 25764 - DNA, 4531 bp, Bovine  19866880372385
  misc_feature (1)..(1): n is a, c, g, or t
nttttaagatttttgttctagttctgtaataaaaaaaagaaagaaaaaaatgccattggtaattcaatagggattgcattgaatctgtagattgccttgggtagtatagtcattttgacaatactgatttttccagttgaagaacatggtatagctttccatctgcttgtatcatcttcaatttcttttatcagtatcttacatttttcagtgtacaagtcttttgcctctttaggtaactttagtactaggtattttattctttttgatgtgacagaaaatggaattgtttccttaatttccttttctgaatctattgttactgtatagaaatgcaatagatttctatattaattttgtatcctgcaaatttacaaaattcattgagcaagtctagtatttttctggtagcatgtttttggggttttttatgtatattatcataatctgcaaacagtgacaatttaatttctttcccaatttggattccttttatttttcttcttattgctgtcactaggactttcagaactatgttgaataaaagtggcaagagttggcacttgtcttctttgtgatcttagaggaaatattttcaacttttcaccattgagtatgatgttagttgtatgtttgtcatgtatggcctttattgagttgaggtatgttccttccttgtttgtctactttctggaggatgtttatcataaatgggtgttaaattttgtcaaaagctctatatgaatttctgcaccatttcattagtgtcctttgtaacttttttttttttattttcaattttattgacttgagccctctgtcttttttcttgatgagtctggctaaaggcttatcaattttgttcgcttttcaaagaatcagcttgaatttcactgatttttttttccattgttatctttatctctatatcatttatttctgccctgatctttaccatttcttcccttatgctgactttggttttgtttttcttctttctctagttgctttagatgtaagggtagattgtttgaggtaagattatattgctataaacttctctattagaatagctcacactaatgaatatctgccagaactgctgccactagcatctttgtccccagaatgaggcacagctatctccacaggagatcctacaatactggaaggtagtatacagtctcttatgacatccctgcttttatccctgggtcctggtgcagatgagaccttgtgtgtgatctccaaaagtggagtttctgtttctccaagtctgatggaaatcctgcagtcaaaccctgctagcctgcaaatccagattctctgggggctcctcttcccattaccagacccccaggctgggaagccttttgctgggttcagactgatgagtcctgttggaggacttctttggtataattattttccagtttgtgggtcacctaaacaatggatatgggacttgatttttttgcttccatttgacccaacaatcctactcctgagcacgtatctagagataactacaatttgaaaagattatgcacccagtgttcattgcactgctgtttacaatagccaacacagggaaacaacctaaatatccatcaacagaggaatggacaaagaaggtgtggtacatatatgcaagggaatattcctaagccataaaaatgagataatgccatttgcagcaacacagatggacctagaaattatcatactaaatgaagtaagtctgacagtgggagacatatcatgtgatctctctcataagtggaatcgaacttgaaaaagtgataaaactgaacttacttacaaaatagaaacagacgcacaattatcaaaaacaaacttttggttaccagaggggaaatttgggagagtggataaatcaggatcttgggatgaatacacaacacctctgtaaataagatagatggccaacaaggacctattttgtagcacagataactctactcaatgatctatgatgacctatatgagaaaagtttctaaaaaagaatgaatgtatgcatgtgtatgtatatattgaaacattttgctgtatacctgaaactaacacaacattgtaaatcaactatactccaataaaattaaatattaaataaattattttatgtgggatgctcaagtctcagtaggggcctagtctaggtaggtagaatgtggggtctccagaaatgctatcggggtacaattggagctctcagggtgcactttgttactgtgggtgtgtgtggacagtaggtatatttgaaggacaaagagaagatggattgaggtaccctgagcagtagaggtggctcagaaagtgagagaatcaggccccaggccctggaaccactatcatacttctcagacaaagccagatctcacaggatgtacaggggttgcacatactacatataaaaacataaaccccaatgatgggggatgcctcaccctctgcacccaccctattacctgcttagagaacttgaggctgggttaggtctttggaaggattctggcccagaggctatagaatcctctggtggaggattctctggaagctatatcccctctggcaggggagggtccacctgaggccagaatggggccttagcaacaacagaaggtgtccctccacccctacccttgagggacaagggaccctgcaggttattggaactcatgatcacattcacatggaggaagctgaaaccatttgtgactctgctagtaagcaatgaaccacagatgggtcaatgctactgggagggatacgtttaaggtcagagaaatgaagtcactctgctttccacactcctgccctccaacctttcagcaggcctgccactggtgaaacctagtcaaaagttagctaagaaaggtaccctacaggagtcaggccccactgaagacagaacagagcagagcagagcacaggggtgtggtggatgcctctcagggctggcaggcctggcaactgaaaatgcctagtaagaaaattcttctaacagaacacatttttgaacatttaattcaataaagcttcccacctctccctgcctttttttctaggattctggatagtgggaccagtgtgtattttaagtacgaaacagtgattcaaatatgaaaaaggctttagaaggaattctccagtacatgaagaagcttgattcaaaaaggtaaggttgtggcagtagaagaaatgaaatacttttggaaaattatcagaggataatttagaaattgggattaagaaagaaatgtcctgtggtttatattctcatttttttgcacagcccaacaatacccagggaacaaatttgttttaattggtagttatgttttctatgtaagataaacaaggaataagcagaaagtgattgcactcattcaagttttttggtgaattagaaataaaaacgaaatgttctttctgctatcatgagaagaaaatgcccttcaaatagagagagatctggaaaaaactgtatcaaataagaagcctctgtaaatatagaagctcagttggtatttttcaagctgcttaatgctgctgactggacatctttacatgacaaacaccagatggaaaaatcagttgagagtcacaagctgaagatgacttcattataaaatgatcatttactcataattatccagaaaagcccaaaaccctacagtgcttttgtaataacatttgtgttaccaaaatatagcaagagtatacttttgctaaaagtttacattctaatctgtgagagaaacttaattattctaatatgataaacacataaaatgcttgtctaattttaaaattggaatttcaatttccagtaacacatttccccatttatagttgttctcctaaactgctgtttacaaaaatactgtaataacgtagcttttctgattaaccaaacaactgatgatcaagaagacaaagtgactggcttagtctcatcctatgtaaacaaaaagcttattttttttctctatagctgtgcataacaataagatgcttttaataagttttaaagacctagacccaaaatcaatttagcaaatgcctcttccagtgaccacacatcatgacatgtttgcattgctatttggtgataaacaaaataaaaagatctatcaatgaaacttaaataagggagattggttgcaaaaactgcaacattctaaactttagtactatacagtccacagtttgaaacagctcttccaactaaacatagttggattgtttctccagagaggaaaaattaatagctaaaaatcatgacctttcgcttttgacataaattctaagaagtgaaatgcaattggaaaactggtaaaaccttaaattattgccatagagcagaataataaccatagatctacagtaactaaatacatacacccaatctcgggtcacacatttcctctcaagcttatattatagctgacccagtgaatggaccggtccatgtttttattccaactgtactgctgcaaaataaaa

SEQ ID NO: 25765 - DNA, 1191 bp, Bovine  19866880441986
  misc_feature (1)..(1): n is a, c, g, or t
nataagtttagataataaaaattaatgtatttagactataataaagggaaatcaagatttattattttaatcctttaggcctaaacaacgccttgctttaatttctgtgtgattgtttacttatattctatgataaagtccatagggtactatatatctacatatgtagatggtgttcgcattaagccaagtcatgtcctcatagttgtgttctgtcttaaaaaaatccaaactctttattaaattagctgtccagaggatgtttacactgtatgtgcttaaatttagttagagcaagaaagtgaatcataatagtgtcaaagcaactgaaaaccctgaggcacacaagcagtcaaatggaactatgtatacaatgatttaattttatattgtaacatgtactcatgtttctaaaaagtagtaaattatttagtgactaatcttatattaaacttctagtgctgtttctgatgttctttctaataagaaaataaagagttcaaaaactgcttcaattaatttcaactcaagtgttttcccattatgagttaagatatagaaccaaaagaccattttactacagtctatatcccatttaaaacccagtaaggcaaaactgagcatcttctatcagggaaataattagaattaggcagagaaggcaaacaaaaaatataatttttacattacctctatctccagtttatttttggttgagattagctttaaaagaacaaggctcagaagaggggagaaaataactctgattgaatgttgaatgaaatagaataataaagcccagaaaagtatggttcttccaacccttgatatgctgctaacaccaagcacaggtttgagtctaaaattaaatcaactgcaatttggataattttcagcataaaacaaaaaacaaaaaaaagagagagaggggattctacttccaagtagggtacggaaagtttcaaaagtgtctctcatcatatacagacgagaaaaggtcaaataatctacaaaattgttatgttttcagaggttgtaaaataaccagcagaactgaactccaaaaggtgagaagactttctgaggagaggtgggacagatggactctttaatctttggcagacagtggaggaatatataagtgggctggaacaaaacatcttagtattaatagtgaattcttaaacacta

SEQ ID NO: 25766 - DNA, 1291 bp, Bovine  19866880502156
  misc_feature (1)..(1): n is a, c, g, or t
ntaagatgaggattgtcctttctgaatttctacatgtaatacactgtctctccctgcatctactatgaatccatatttcgtatgaaaactttctataatccatcatccccctaccaaaaaatgaaacagcttatcagaataaagaatagaagtatatttgcaattaagcatcagttcaattaagtgagtgagttctggaaagaaatatagttaacaaacacctcaaacagtgcgtaaaaccaattgggttgatagttcttaccaccttggtgtctcattccaagatttacaatgacataggccccctttttagcaaattaaaccttatgtcacagcttcaaattaaatccaaacctcttctttccctacagaagaaacaatttggccccacgtgccagtagttgagggggggctgataggaaacagagtaaagtgagaactccctaacccagaaggcgtcagatggccaagtcaactgggataaacagtcaagcccacttaaggtttcacattaaaagactggtaaaatatagagaacttaaatataagaatttttcataccacataaaactgaccgggtgccaaaactctacatttctgtgctgtgcaagcactttacggggaatgtgctttttattccatttttacatgtttgttatgggtctgttttgcaaagattgctccaagcctaggtaataaaaataaaaaatgcacacaaatggccatgattaacgcacagaacaatctatgcttctatatgtatgaaatgcataatattcctgtctggatatttcaatgcagaaaaatatgtggaggtcactcaacatttcacaaatttattgtaacagaagatcatgctgtggaattatcccagaatcctagcacacaaagatcttagttttgtatgcttattttgcctataaaatactgtgaatctctttctcatgaatgttgcttggtattaatgtctatatcaaggataaacaggaattgcttccataggaatctgagaatatgacacacgaatgaaagatttttaaatgtattgctagattattatcttaaaatgagttgtagtatactgatcactatgcaaataaaacactgattttagaggacattgattaccaaatatgtgtgatgctttccaatgaaattggaacaaaatctggttcaaaatactctgtaaccagtgggtaagtggtgaatttctggattagtcattttttgtcgagggttttattttcaggatgtacttcaaaatacgagtgtgttttttatcaccattaag

SEQ ID NO: 25767 - DNA, 640 bp, Bovine  19866880510719
  misc_feature (1)..(1): n is a, c, g, or t
nacttaagggatgaagagaaggcctaggggaatatgttagaatgagctaatggcattcctacatcagtatctcagattcaagtgattgcttaatagtcaatagtcaaataatacttctgccctgttaaattttaaaatatagaagtaaagagtaaatttgcctcaatgtattatggtagtggaaatgcggacccaaatggataaaaaataagtctcctctcctctcctctcctcagaagaggtcatggcacatgacaaatatgctcatcttttgcaacatagctaagcaaatgcttaactacagtatggtttctcatactgtatatccaggtttgttaaaataacaataacaacaaaaagcaattctgcattatggattggaattcagggtaaagaatataaaataaacatgttgaaagcttttagcagatggaaacccattttaaatttataaggatgcccaactggtataaaggaagcaaaaatgataaactcgagagaccccagatgttgttttatagccaatctagtgaagggaaaataacccagcttactttataactgggggaaaaaaaggcagggagggggaactgaaaatattatataagtctttatcaaattatttctctagtgtataaaa

SEQ ID NO: 25768 - DNA, 2091 bp, Bovine  19866880538019
  misc_feature (1)..(1): n is a, c, g, or t
nttttgagattgcaccccattattgcattttggattcttaggttgactgtgagggctgctccatttcttctatgggattcttgctcacagtagtagatactgaattaaatttgctcattccagtccattttagttcactgattcctaaaatgtcctgtttgaccacttccaatttaccttgattcatggacctaacattctaggttccattgcaatattgttctttacagcatcggactttacttccatcaccagtcacatccaccagaggcaaatgcactaagactatttggaacagaaaataatatacttgtagtttccatagctgccccagaattgtgaattgtagagagatacagccatttctaagagattaatcacaatattgaacaattggtatgaaaaaatatactgaccatcagattagatgctggtataaatgggctgaaaattgttccatcctcagaggattggacggccagagatcttctggtacagaccatcactgatcactcgggaaataactgatctttaatatagaaatacctagcttagaattaattatttttcttataacaagtaatgtgatcacactatttttaaaacatggaaaatatctatcaatgcccagagttttgaaatacccttatttctcttatgttaaagatagttttatacttggtaggttgtggaagagccaatacaacatacatacacatacatatatacatatacacatacacatacaagaaaataaaatgtaaaagatcatgtctggcatatgatacttgaagaaatggacatcagatacaaggagtccaaatgatgcatgctgtgagggaataaaagtcagcactaagcaaaaactagcaaaaatttgacaggaaatagagccaagtttgttgcagaaccatggatctttaggaaatctgaggaatatttaaggaacccttagtcaaccttagtgcatttcatctcattttccagggatggtatagattactgcattttaatttaaaggaacttctgtttaccaacttgaagtttgctaaagaacttacttcgaatcattggacttaacctattatgtggcggatgcacacaaaccctacaatactgtgaaactttagtatgaaaggacaaaggagctcgcaatttcattctctttgttgaagggtcttaaactatgagaaccaaggtagttttaatccacttcacatgtatttctttctgcccttgtacatacatatatgacatggcttgagagtttcccttaagctgcaattactttgggacattttctcttaaatttaagaaatagatgcagaaaatcaggtttgaattcctggctatatgccaatgactaatagttctcttcggctcttttctgtgatgcttctgtaactggatagatgatggtgacttttaatggctgctttgggccttgggaaaaattatatataatatatatatggaaaagaaagccattaaggacaaaagattgtcgaaagctttactgactttcaaactgtgaaaagaagaggccaaggtaccttatgcttttgatgcctgagggctatgaagcagaaagggaaagaagaaaaaaaaatcacatattggggctctgatttgaaatcttttttcttctttccatctgtgggtacctaaatagggtcaaaaagccagcacctcagttattttgttgaaaggctaacaaaatgtctcaactttcagcacacattcccactataagtgataactaagtaagttgatcttcaagtcactaatgctttcttcctgttagaactatagcctcatggtgaactttagaaacaggtttgaatttttcataataaatttcccctgacttacttatgtagataattaaactaaattcttcccctcaagagtcaggttttttctgcagtggaataagtcagataggtttgaaatctgatccaaggttcaatcaaatgttatctcttctttaaaaaatggtacccaagtcagtcattacatgtattggtttgcgtttaggagaaactatgagctcatgttatgaccagtgctatcatcttgtgaaatcacaat

SEQ ID NO: 25769 - DNA, 1582 bp, Bovine  19866880707133
  misc_feature (1)..(1): n is a, c, g, or t
ngtgaggtctgggtgggagtagcttggttaccttgtctccatttaatgaagtttgtttttctaatagctcattcatgaagtctattcctcctttatatttggagtgttttgtctccatttttggtctccaagtttgggtaacatgcacagaaatgtgatttaagtcaccgatggtttgcagtttggaccaataatcacacccacacactccttggcaccgtgtcccacagctctcagtgcttacagtcctcctatatatgttcataaaccatagaaatggcacagaagcatgatttctccttagcaacttctctgctgaaatcttgcattgtcagagaatctctctacagagagtcagcagcaagtgccttctcatgactctctttagagtctctctttagaaagttgttaggatagatctgtactgcagcctttccattctgacaccaagcttttctcatgaagtctcgggagacctgcataatccccaactctcactttcatcatttcccatatttaattgtaccgggcagaaatatcacaaaattttgctttggttattggcatcttttttcattttttcccttgttttattttgtgttatagcaagaaaaggaaaagcttaaaaaaggggagaaagagtaaaacacttctactcccctatatttcaaggaaaatgaccatttcactgatcctttaatgggactatatttctaactcttcatagatgcaagacaatagaagatttagctactctttttcaacttgcccctcttcctagcccccgggctctgtgggtactttcttcaaaatattgatgtcctgttccttccttttgtttctcacttcaggtctttatttttcttgcctctactctgaaactttgctactctttcttcaatcacttaccatttaattcattcaagtaatattaaaaaatgaattttctccaaacaatgttccctacgacaaatacttctcattgtctaacaaagttagtcttaatgctttttcttcaagcatacttggcaataaaactggcttagttagaatgtatcctatatgaatataaacacagatggaaactaagcattagagaaacttaaatatttgtctaaaattttagattttagaggccattatacgtacacatgcatagaatattctttaatgaatttaattaggaacaaatcccttccttttaactatgatagcattttgctcctctttatagtatttttggaaggattttaatatttattttgtgtctcttcaatgtcaaacacaatgtttttttcacatcagtatcctattggaatcttattcagatacattaattaattataatggaagggtaaatacactgtggatataattgtttaaaattgtagtagataaaacagataatttattccttataaatgaaatgattcacttgatacttatctcattcacagggtattcttaaaaatacttatactttctctagtcattattgataaggtgaactcgaatttgctccttacccttctttttcactcttgacattttttctgaagtcaaactctgaagtactgtgtct

SEQ ID NO: 25770 - DNA, 987 bp, Bovine  19866880719206
  misc_feature (1)..(1): n is a, c, g, or t
nctgagattcctaaacttttatttatttatttatttattttatatcctatacttttaaaatcaaggcaaaaggcacctggctagcaacaaaattcagattacttggacatgacaatgagaataaaggtcccctgtccttaatcctacatccatctggaaaaagcctatggaggacttcataactaaaccaaagatcactctaagctaactttcagatcattatgggaacccattttacagcatccttcaaaggctttccttcagagccttacttcccaagagttaggccacttcaagttacattttaacacatattagttataatgctaccatttatgcttatttactctgtggcaattatttaagcaaacactctaaatttctccatataattgttataattgcaaattcttataattatgttctcaaaagctgcaggactaatctgggaataatttttcactattagttttctagctgccacacttttgctccacattaagtcattcaataaatttttggaaataacagtaaattttggtgaggattagaatgaaactcttagcaataaggcatttcttttcaaccattgagtgcaaattaaaaagggaaacaacagtaagaccacataagtatgaaatttcaggaaacaagtactcgtatacacttcaatataaagttcatattaagtaattacttaatataagacaagagtctgaaaatttctatgtcctttggtccaatatttcccattggtacaattcaataagaaggaaaaagggatgaggatgatgaaaggtattcaaactgatattaaaattatgaagatacttattcctaaatagtgcaatgacctattacaaagtttaaaagaatggaaaagtttaataatgatgagaaattggtctagctataattttttttaagtttttactttgtattaagggtatagctgattaacaatgttgtgacagtttcaggtgaaca

SEQ ID NO: 25771 - DNA, 1593 bp, Bovine  19866880742914
  misc_feature (1)..(1): n is a, c, g, or t
ntccaaatattgtatgcaagcaaactttggaatctcacatcattaaggaaaacagaaaaattcccagcagctacagagctccaatgcttaacacttctttctgcagcccacaactccctcatatgctggctttccggaaagagctccaaaaagcatgactctcaaacaaaatgaatagatgagccactcactgctctaagggaccttcatctataacagatgctcagcgatttcaggagcaagaaattgcagtgagagggataggcatttttagtccattaacttatctggtcatgagttaagtgtgtatccttattatttttttatacaaagtctttctctgtgctttaacttctatttcctcttgtgccaagtggcagtccaaagccttcaattgaatctatattaatctagtttgtttatgagaagataagtgccctgcagacatccataaatgcattcaaacatgtcctggataattttattttcattatttcaaaaatattgacacttggtttttatttatgaccttgattttttctcaaatatggatgaattctatgagaacatgacaaacaggtaggataacttgtgcattatcaagtaggacatagaaacattgaaaacattcagggggaaaaaagtaatctattacaaattacttacagctctgggaaagacagaacattaaaaatattcttttatgatacgaatttttattttattggttaatcctttacaataaatttgctttctctttatacaaatttcagaattctctgtattcattttaatgaatagtgtttatgaaatggcatttactgtgatctagatttgatgccttagggatacaaacaaaaaatctccagctgcgaagagcttgtataatatttagtgttgataacaattagataaataaagtagaaaggatttttttgctagcaataaatgctacctacaaattagtgtcagtatagtcatataaagatttccctatattttccaattctaacataaaacttttaatatgctttcactgaatttttcctaattttccaaacactgtgagctttactctatgttccttacctctctctgtgattcttcagccactacaagcctatctttgtctaacagtttctctatctaaatgatttgtgttccactggcagttctgtactaaagaaagtgatatatcctgatgaagccattaagcacggtactacagacattaaggggatgatataggcatgatttcaatcatgcaaaagggaactaccctagttctgagaaggaaagcaccagagagcttaacccactctcgtctacattttcatttcattagattcagatctggggatgtcagaacaaattaacggttattccccccacaaggcaatcactgtaagtgtcatcactagctgcacggtgagcacccacagggagaagggtcaggactcggaatatacagcatactggagaggcccaaagaacaaattgaggatgaatgggttgatagtacggaaaatatgtttttaaaaaaatgttgatcttttcactctgtgctgtcacgaaaatttcctttaaaaatcg

SEQ ID NO: 25772 - DNA, 1978 bp, Bovine  19866880760293
  misc_feature (1)..(1): n is a, c, g, or t
nttgaggaaaagagaaaattatttggtgtgtttcactattgtacctgtcacacacttttaattaaaaatgtattgacgcatgactaaactgtgaaaaacagaccccatttcagttcaatggaagtaatgtacatgtagcccagtagaataagcccatgtaattatagcacgatagctcaggcacagcaagcctctcacacctcaatctcaaagcagatgtaaatgtcaggcaccaaatatcacaaatctgtgtggactcagcatcagtgattttactaatctagtctaaatacctatgatgaagtcattttgctaatctatggcaaattaaatatgtgtagaagtgaatgttgaataatgagtaactttccttttattcaccactagtattgcatatcagaattaactgaactcagggctgaaactaaatgcatatttcaaatagtggtagatatgtgttaccatgagtttggaacctggacctaaaatactttttatattaactgatttttttttaaagtaatttacccacaaaaacttaacacaatcaagctgaagaaatggaaatcagagactaaggtctgaggtactgtccttcattgagtagtcttgaaatagtcactaatggcaagatgttttagaaatctcagaaaccataacccagtaaagaaaacataaaataaaaaatcataccagtttgatagttctttccatttttaaatcaaatccaacagttgcatatttaatgatggattaacataattaattaggccagtaatcactaattcaccattctctataagatccactatccatgtgttatagtaaacactggggaaaagatgaaaatgcttatagtaaacactggggaaaagatgaaaatgctttatttatttcttcagcggaaagtcttcacattgggcacttccacagatggtatctcagttaatcctaaggacacatttgagaagtaggaattgttttactgatgagataaactgccactttgataaatgaaccgaatttttcatcacacctagtgagtgacagattcaaacttcttatcctctcaaagcaaaatctggtttctttctcaccattgtgatttattgctactcctccattcaagtaaattaacagttttaaaaatggagttatctttaagaaagctcactaacttatgtgaccctaatatactccatgtatttgcatactttaccttattttattatcttaaggctttagagttaataatgcaatctgcatcttacaataaggaagtgggctgaaagaaattatgtgtgtcattcaaaattactaatatgggagacttatttcaaattcagatgtccctagttctcgaagtcctgtttttttttttgttgttttgttttttgtttttttgtttttttggatttaatgtatagaaatggcttaagtgggaggtaaagatgagcatactaccattcagattttgggagttgaagtttaggttgaattatttagacttggacaactaactgaagatttttattccttggcctctcattataaagacccaggataattataggcatatatctggcagcaacataaaacttgatttaaaagggaaaagaactgacatggagtaatgaagtaaaagtatctgatggcctgagaaattgtgcagtggagaagtgaaagctgtggcatggggtgattgttagagaggtatgatggattggatcattctgatacctgtttaatggctgagtgaatgtttcaaccctcactgaaaagacactgacatgacaatatggccttgagaataaaaagtaggagtaaaagagtaaaataaaaacatcattttgagcatgaagaacttaagagtctttatcttctgtgggaacatgggatttgatgaatgaaaaagaggtcagagcaagatataaagaccaatgagtatgattcaattgctcaaatgtgagagctcaag

SEQ ID NO: 25773 - DNA, 1822 bp, Bovine  19866880800305
  misc_feature (1)..(1): n is a, c, g, or t
ntgaatactaaaaaattttaaatatacatatatgcataatattatagttaaatcatgaagattatctcatagaaataatagagacttattctacatatattgcatagtattcataaattgcatttctttttagtcttttgttgacaatattagctttgctgctttatacaaagaaaccaaatgtaagtaattaaaaaaataaaacatatcttagtgaactaatgaataacaatgaagtttgaaatttcttctaaaacaactagtctcaggaaaaattctatgcaaatttttacttcacagatatgccttcttcagaaagtggccaccagaattcacactcaacaaatattttaattcctgaggtcttatagaggaagacaatttttgtaattgttctgaaaaaatattctttttatgtccttcaaacaatgaatgcaaacctaaatgagttttatattcctagagggactccctcccagatccatagagtctaagtaggcaatcactcactaccctgtgaaagcaagcagatgatgtctagttagaagtcacagacttttggcaatactaaaaaatctaagagtctgtgtctgatttgaagcagctttttgcttcactttctgtgatagaactaacatgacctgaaataatgcagttgtcaaatgagaatctgttccaaaattaagatttactgaactagtcctttctctgccagtgcattgtattggtgggacatagcaattttatgctttggaagaacagccagaagaaaaccagctgaaacagcagacaatgcatttcattcataacttcacaatttttgtttttctcttgatgtcctgttcttaatattactaggacacagcctctacattttctacccaattaattggaatgtaaagagttcattctctgctatgtgattctttctactttctctataaggaagaaagtttttagaagaacttatccagctaaaatatagaaaagaaactagggcagcaaattttttctcatttttacttatggactatactgaaatggatataaagcagttttggttcacatgtaaaagatctgattcaatactagaaataaaaaaattggctttaaagaagttttggttcacatgtaaaagatctgattcaatattaagaacaaaaaattggcttagcgggtacagtgatatggagccacagaaaataatcattcacagaactcctgacagtttcagtcacaggattccctgcaatgactgaaagaaattgtggggtaacttattcaggaatgattcagaattgatgcaaacccaaagggtaacttctttgttgctgatgttagtggtggaccacaacaaaaatatcgtcattaaaatatctgtcctaaaatggtatgcgtgtgtgtgtgtgtgtgtgttgtcatgaaattgcatgatttgagatgaatcaagtttcatttattgtctccaaatatcttactacttatctgttaaaaatgaaacttctttagtaaaagaaacccagtgtgggggtttctatccaacattgcttccgtccaagagtttgtaaaacagaagttgaatttagaccatactctaacacaaagagataaagctttatagcaatccatgcgtaactccaaaccaaataactgcaaataaattggcaaatggcatggtctttttaatacactgtcagtttatggagctgggataaactaaacctggaatttaattacaaatgaaagccaaaagtatctgaatgaagaaactgagtaggaatatatgtccataatatgctgaaaccctttttcttttctatat

SEQ ID NO: 25774 - DNA, 1242 bp, Bovine  19866880971978
  misc_feature (1)..(1): n is a, c, g, or t
naattcgtaacatttttttcccatgatgcagtctatcattatttagatgactaaaagctttaattatttacttttgggagtccctgaaacccatgtcattgcaaatactgaagaattttctgggaaaggtttgaaacacttccagttaaactcttgagttaatatctcaagaaggaaaaaaaaataatgtttctaccacatattttattaaaccctttaggtccttttacaagagaggaaataccaattaacatataatttagcagaacaaaatattatcccatttcaaccagtacccacttccttgaagtttattcaagcattaataaccatttaatgcaatttaactacactgaggtatccattacattaatataatatatccatcaggaaattagagttttgtttccatgaattttgtattacaagaaggtctttataattttaatctgcatttgatgatgcttaatttcaactcctcagtctctgttacagtgtgagatgatcaaaatgttcctaatgttaagattacaattccttgatttattgagccacaaagcacaaatgatttgtgaatgtgtgtatatgtgtgtgtgtgcgtgtgtatatgagtgagagtcgcttagtcgtgtccaactctctgcgactgtagcctgccaggctcctctgtccatgaaattctctagccaagaatattggagattcccttctccacgggatcttcctgacccagggattgaatctgggtctcttgcattgcaggcagattctttactatctgagccagagaagatacacacacacacacatctcatatttaaggatttagctatttagatgtgcagggttatcaaatctcattaggaatgtaagaaagtgactatatttttgagaatggatcatttacagtgatccttttaaagcatacatattgtgatgatgtccataaagtatcatcttcatgatctggtgtcctctacagtgttttcaaaagatgttatattatctatttggacagctacatcagtagatatgctattttatgctttagctcagaaagtatctgatcatggaactttagctattaaaacacttcaatttgcaagaaaaatgtaattatatgatagcatatgttagaatattagatatttattggacttgataagtatttcattggctatctttaagtgcttaaagagctaaaagaaaaaacttaataatagcaacttgactacatagtgt

SEQ ID NO: 25775 - DNA, 1965 bp, Bovine  19866881034632
  misc_feature (1)..(1): n is a, c, g, or t
ngccctgctgtccttgcaggttgtcagaggcaatgagccaggtttatttcaaatggctccttaaatgaacatttattttgtgccagtaacacgtttttgattaacagctccttttgactaatttgcttccctaaacagcccaataaaggactcgtttaaaacataattaaaagcatgttattgcttgtagttaatactgattaaaacagacattaagacaattatcattgaaggaaagtaagcatcgcgtagttagtattgaatccatccttactgtttttatgcatcatatacagagatgggtacttcacaggctagaacaaggtattatttttaatggaatcatataaaaatatgttcctgttttgtttgttttaatgaatggacagatctttgtctctgtggactatggacttttttttcttgcgggaaacattcatatattcaacaaggtgtaaaggtcactgaactgacttcggttatgcagagttaaagctcagctaattctcttgtgtaaatgggatataaactcttcttctttctacttgctctcagtacacaaactctcttggtcccattattgactgaatgcagcttttattagtattatttggtacttttgatccatttgttttcacattgattcttgttttgttatgccatgaaataaaactaagaccttcattgatttctgattctttttaaaacagaacaatagtgaaacaatattatgtgaagtaagtacgtaaagtttttttaataacttctgtattttgcatcaaagtatgatttttttaagaaatcatactttgtgtaggccaggagtccccagcctctgggtcctgatgcctaatgatctgaggtggaactaatgtaataataatagaataaagtgcacaacaaatgtaatgtacttgaatcatcctgaaaccaccccccccccacccccagctggtagaaaaaattgtcttcacaataccaatccctggtgctgaaaaggttgggaaccactggtataggaaattaaaaaggagcatgtgttttgcatgaatgattacttcactgaaaatgaaaatacagaaaaccacctccatttcatgtgaaggatttctttctagaagtatttttattatgatcaacttgatatttaatcttttttttatgtatgggcttccctggtagttcagctggtaaagaatccacctacaatgctggagaccccagttcagttcctaggtcaggaagattccctggagaagggataggctacccacaccagtattcttggacttccctagtggctcagatggtaaagaatccacctgcaatgtgggagacctgggtttgatccctggcttgggaagatctcctggagaagggaaaggctacccacttcaggaatctggcctggagaattccataagtccatggtgtcacaaagagtcagatgtacccttcacttcacttttattttgtgaccattcaagaaggcatgtggtggacataatgaggaattgattttggtatacttgatgagagtgaaatagcttttacagaatgcatttataagaagtcattttaaaagttaaaataaaatcgcagagacaaaactctgctgacagatttgatcattgtttagattcctgtttttctgtggtagcccctggatagtctttcaagtagatggcactcacttaagtgtcttggccagtgcaattatccagggatcatttgtcttctccctcatggttccaagaaaattcaggggtcacaatagtcactagaggccaattcccaagaaacagacaagaacttataaggcattatgtgaacaaaactgtgggggacaaatactaaaaaggagaaagtctttcgtcatgttttatataaagaataaatatttcttttcattacactgcaatttaggctgtttacatctcttttctggatgattccaagaacctt

SEQ ID NO: 25776 - DNA, 1920 bp, Bovine  19866881053232
  misc_feature (1)..(1): n is a, c, g, or t
ngacgtggggagctcctctttgctactgctcctgtgccgtcacagcctatttaagtacattaatattataatctattcccttttaaatattatttcatgaatcaacgatatttttgtgctcttgatatgtggcaaaaactgttactagaaatggaatggtgaatgaaggtcagaatccttgttttctttaaatttgttctagttggatggaaaaggggacttttaaggagaggaaaggcatacagtaaataaacagatgaagaaataaaaaaaattcagaaagttacatgtgacaggtgactgtagatggcttctccaaagaagtggaattttgagtgagatgtaagtgttgttggagtaatacggatataaagccttgtgaagaacattccaggcagagggaaaagcaaatgcaaaaggcatgacactggaaaaaattggtatgtttgagaaactgagagaactaattggtggagtcacatcagagttggtcagtcaatgtgctgatgtggattgagttcctttctgccatgtttatttgcctcaatgtcccttggtgatacaattatatctctgctgctgctgctgctaagtcacttcagtcgtgtccgactctgtgcgaccccacagacggcagcccaccaggctccccaatccctggattctccaggcaagaacactggagtgggttgccatttccttctccaatgcaggaaagtgaaaagtgaaaatgaaagtgaagtcgctcagtcatgtctgactcttcgtgaccccatggactgaagcctaccaggctcctctgtacatgggattttccaagcaagagtactgaagtgggttgccattgccttttctgaagtatatgtctaaaatttattaattctaaatgggaagtgatacaaaatataatatttaaattcatattaccagaaaacctatcttagactataataaaaagttaaaaatctgttggaataattatcaaattatatatatgtgtgctcttaatctttcagagaaaaaagtgcaaagaaaaatattactggagtaacagtcatctagaactcatagatttattaggtatattttgtataatgtaagctatgatatgtactagattaaaaggaagggatggttggaggagaaggttaaaatgttcagaaaataaccttgaaatggttttccaaaatgttaagtttgacaggcagtagtttaagaaagcatctttaaaagcaattctaaaggaaattagagttggcttagtaaacattttcattaactcagcatatttccctaaggacccaagtggccaacctatacctcaatacttcccccacttttcttcccacttgcttaagatgaggttaacttttaacagatagaaaatgtgcaaatgaattaatccaaaatcattctaaatcagatattgtggcaggtcactaaatgttgttaggtttgttttagttattaaatattattatcttttacagtgtaaaatgagaatagaactttaaggcaaatactaattaaaccaagatttttaaaaaatcaatattgtttttttactgaaacatatagcaaattacaaatgcaaattagtcatctaaaaactatactaaataaactaagattatgtattataatataatgctatattataacaatataacactaaaatataacaggttgggcacctgtttcttcatagcatcaatataccaaaaaagatgcagtcaattatttttagataagtggtataaaatacatttgatattcttaatttaacaaatgcttctttgttgacacacattactgaatgtggaaattcataagttgcaaatgatcttagctatatcatccattaagtcataattcagacatatattctcatcagttagaattttttcccaatgtaaaaaa

SEQ ID NO: 25777 - DNA, 749 bp, Bovine  19866881085426
  misc_feature (1)..(1): n is a, c, g, or t
ntgagcattgccgaagataagtggaaacatggagcttagaaaagtctgaattagaagaaaagcagtattaagaagctatagtcctggatgaaattacctagtggaagaaaagagaagtagaaaataggggtctagagttaaacagtattggacttgttatgtgacttgaaagaagatgaagagaagaggcacagtaaccacaaagaagataaaaggaaaagtcttttcaacactgagtcagcaaagccaacctggcagagattattccatgaaaggatggagaagggctccacaggttttgtgaggtcacaaatcccattttccttcctctagagttgaaattctctgccaggaatgattttgcccctccccttccagagcattggataaattttggaaacattttggattgtcataactgacgggtgctattggcacctagtaagtagaggcaagggagactggtgagtaccacaaagcacagactacagccacaacaacaaaatgctctgctcccagacattaaaagtgccaatattgagatgccttgctctagatcctattgagcacacttgaccataaactgagttttctaaacctttccaaattagaaagggagcatcttcagaatgccaaaaaatttatggtacttcataatttgaaaagtggacccaagacacattttcttctttctagactaactagtagcaacagatcctatatgtttccaacactaaatgtcatgtctg

SEQ ID NO: 25778 - DNA, 890 bp, Bovine  19866881098847
  misc_feature (1)..(1): n is a, c, g, or t
ntctgatgtcatcttagactctggcaaagagcccatgtgcatgaaagtttagctatcctgagaaacagttcttgtattttttttacagttaatgattaatattaagccaaactaaagaaacaactcatttgaaaaagtggaggtcattttccaactattacttcatagtgtacactggcattgtgccagggagacagaagggaaagtcctgtaataaagtatgttttaataaattattaatttttcatagccaggctaaagatttagaaggaggatggcattttctaactagggcacaggcttattgaggttaaaactctttttcttttgcccaacattgcaatatggatgagctttagctctagcttatcgtaactgcactgcacaatcaatatttaaatcctgaaagatcagcaataatggatgcaaactgaacagatcaatatttagccttttgtggactataacgtttatcttagccccaattactctatggcataggggttgatttttttaatgtcctgggtgcttggcatctcactaatattattttaaaagttaaagaatacactgtgagacacctgtaaagagaagtattgataaaaactattctaagtaggttaattttttcaaatcacttgataatgataaatttcaattgtgacatatatgttggatttttttttttaatttatgagggagtagataatttaaaattcataaacagatatttccttggaatgttcctcagcagtattgcatgaccacttgagagatgtttggccagcttatctttttataataaaaactaattatgaatctgacaaaatattatcacagtaacattaaaatcttttttaatttattcagatatcacagtataatcaatt

SEQ ID NO: 25779 - DNA, 1022 bp, Bovine  19866881210628
  misc_feature (1)..(1): n is a, c, g, or t
ntccgactctttgtgaccccatgaattgcagcatgccaggcctccctgtccatcaccatctcccagagttcacattttcagttcaacacattgacaaaaactacatatatttttactaaaaaaagggctagggtctgttttataaaatttttaacctcagaatacttcaaaccactgttgcaatctactttaatttcactaagaaaaaagaagtaattcaaagcaatttgagattatttcaataataatggtacaactgttcaccttttttttttttttttttcccattaaaaagtgagttattagtgcatttctgctcttagggtaaactcgagtagaatttgtggtagggacagaatttcttatggttactgcagttctatagggcactttcaaatatactcccaaactgtttaacactcccactgcataaaaccgtataggtctctggtatttctcaagcttctgtgtcatataaaatcaatttatgtgtgtatgctttctactacctgatagtttagggattaattataaacaattttaaaataataatttataaaactggtaacataaggccaaggtaatacatggctcttctgataaaatataaggcctaatcaaaacaaaatgcagaaattcctggatggctgccccacaataatattttacagtagaccttttagagatatgttggtaggagagtgaaaaaatatttcaatagacacattccttaaattatgccacttaagcacttgtctatagtgtctacatattagtctagtttacaaaataagatttcaagattattgccttcaattcatttttagatctcttatccagaaagcatttcaaatactggagggagtattcgattgagggggtctctttagtctcatactggatgcaagattttggccaaagtacttgaaaattttaagctgtttccttgtaaatggaattaatgatcccaggaaggtcttactgtggaattaagcaagacaataagtagaaaattcaaatag

SEQ ID NO: 25780 - DNA, 1346 bp, Bovine  19866881257405
  misc_feature (1)..(1): n is a, c, g, or t
ngttaaaggctggaactggttattgatatgagttactttactcaaaggcataacatgtccattaaagatcttttggtttttctgttattggtgattatatcaaaagtagaataaatgaatatcctgtttaatttaagcaaattcactgttcagtatatttctgagtactttagtagtctttacaaacggatttttagaataatttctataagtataaaatgtcctcctataaatctttttctatgtaattctctaatttggttcaattttatagacattagaacttgaggtgctttcacatttcctatctttttaaggttatcttttctttttgtatcagaagtacaataattcaagtcccctcttgaaatagaacagtgagtccaataacttcctgaagtaattcctaaaaactctagagaatacagacatatcctgatgtttcttttcatctctgtctataaactgcacatcctgtggcctcatctctgctcctctgtgccacttgaaacatctgcactgaatgatactttggaagatcgatactatagttcctcaaaaaaatatcattagggaattcaaacaaataatcagagtattgaaaattgtctagcagactttgactgcctgtagttcattgattttcccccttacattagaaggtccttgatggctatttctccttgttctccctgtctcactaatctctttcctccttgagctcatctacattcatcccctcacttccttctgtctctttcctcaggtttccactacatgaagctcaagattccttcttaatataccaattatcactctgctgagatgcccattttacactattcaactggtataacctttcacactataatgaaaatagtcatcaacctcttatgaagaattgacatttttcttactgagcaaatatttgggcctgctgccaacacaatactgagtaaggtacttggcttacatattcatgacaaagagggtttatcaaaatgattcatttaaaagtctgacagaaagacaaattttggctttcttctttagaaccacaggacggaatgtgtgaacagattaaatgtagctcattttccccttcaaatcttctagtaatccaggtcagacattgaggaacctgaatacttaaaataattaaaagcaaatagaaataacatttctcccattatcattattattttttttaataataataaactagagaggaattatgttcccatttatgatggagtagcatgtctgaggggaaaaataaaaaacctgaaagaaaacccaaaaaacaaaacaaacaaaaaaggataaagatgaataataatcaaaca

SEQ ID NO: 25781 - DNA, 714 bp, Bovine  19866881378133
  misc_feature (1)..(1): n is a, c, g, or t
ngccacaaagtttaaaatatttactatctggccctttatagaaaatgtgtgctggctagatcatactgggattcaaaaaagtgaaaaagatagattccaggattttcacatggaggaactctgatctgagtcttctgtcactttaatgaaggtcaatgaaatgttgccttaacaactagaagagtcactgaaggacttaaaactgaatacactaggtgattttaattacctaggcatctattgggaaaacagcttgacaggatatagattgtccaatcagttatttttaaagggttgctgacagtgcttaatgtggaagagggaggaagctaaagagacggcaggcctcctccgcctgcataaacccaaggaagagcagacaattgcaaacaaaatgagatatgtctcttggaagaggcagagacggtgaaataaatggcagaatttgcaacgctaaggcaagggcttatgaaaagcagttgaagaaagactatgaattttaagaaagtaaactggagtacaaaatgccccaagcctgcaatgactggatatttgcatatatacacgcgcaatcacctgctggaggcactcagaaagtttgccattgacctcgttcgatggaaagattggaatacccaatcattcaggggaaaaaaaaaaaaaggaccagctgtttgagttaaatagaccaaaatttcaaaaaagaactcagca

SEQ ID NO: 25782 - DNA, 1454 bp, Bovine  19866881416644
  misc_feature (1)..(1): n is a, c, g, or t
nttttaggatggactggttggatctgccttgcagtcccagggactctcaagaacttgcattggaaagggttaaaaagacagtaaaaattacaaacaaagacctcccatgctaaaattaattttgtgttattcagctaacagactgacaagcttttattaaaaaaaaaaaatccacacctttaaactggctgtggacccacatagttatcaaaatccccacacccttttgtcatgcatctcacttgaattccttagatgcattatctgcatgtctttattatttatgaggagggaaactgagagaagacaattaatatgccccaaaccatgcagctagttagcagtagaactgggtttataacaaagtactggttctgagctcagagcttttcctgtattctaaaagttgaaatgtgataaagtattgtgttgtacagcattattacatgatttggatttctttctcagaatactggagctctcagggtatgtttgtgcatattggtggaggggttctcagagaatgatgaacctgaagtcccagagtgcacacagggatgcagtttgtctcttgagtcaaagggaataagatacaattacaccttgcagctatagctctcttattaccagaaatgcaagtgaaccattgagagggtgaatactttcagttatatccacccacagattatcaggagaaatatacaagataccatgatagacaacagtaaatgtataaatgtgtttgcttttttgatggaagaaactgggaagtgaatttactagcattcaaaaaaaaaaaaaaaatctagggatataaaaggaatatccagtctgtcatttcatgaatatgagggacaacctaaatgataaagtgattcaagattcatttcagagaaacataactggtgaataccaaaagtttctttgctcctttggtttggatttggtgctttaaactgacaaagtcaaattttaaaagggtgcttcctttagcataacatggacttaattagaaaaatcctttacccatcatactttctggaatggtgaaggcagcttttggaagcagaagcacactataaaatgttctgttcctctaaatctatcctgtggtattaaaagtttctccattggatttccatctcactgggcttttttggcataaagaagtgtttataaagtataaagttgcaaacgacagacaagatgctttagtaatctgctctatgtgccaggctaacagtggactgtcaaggccaaacgtttccatgcagatgattcattgacaagagcagccagtacagacacagaagacttgaaactttaaaatctctagacccaaaatatttcaccagtgaaaattagaatttatatttctgggtgtctttttcttccctcttatcatcaccaactgatgtttatttccctccttttccagaagtttatgccactgt

SEQ ID NO: 25783 - DNA, 1038 bp, Bovine  19866881467250
  misc_feature (1)..(1): n is a, c, g, or t
ntaaaatacatagccattaactgggaaagataaaagataaaatgttatgggtttctttatatttttatatttgcaaattacataacataactgtatattattttataattaaaaaaacaaaatcaattttaattaggatgaaattatccaaataaacatgccaaatagaattataaatcaaaatgtaagttcaggaaataatagacaggaaaaaccttcagataaagcacatatccactattacttgaaatataatgctgacatgaaataagcatttttctgatactgttatgtattactttttaaaatgtcttatcattaagttttgtgctactaaaatgtcagtcaatcaaatgtggaaagatgagcttatacattcatgaagcagtcaaacaattttagatctttcttttttcagatttgctagaattgacatcacattgaatgtaaattactcataaaatagaaagcattctattaatttaaactgctcttggtcatgcctgttcaacttaccaactgttcctatattttccttaagatatacgtaaaaaaataaaatgaacccttgcaatagtagatattaagcgactaatgttgttaacattactagtaaaggattcaaaggaaggtgtgtgtgtgtgtgtgtgtgagagtgtgtaacattccaggttttctggttgttagattaactggttgttagattacaaggaatgagtcttcagttctataatagaaagaacacaaaaccttaatcaataaacttgataaaatgcatgtcagttattttagacaatttgccctccagtttggataattgttgctacctgtagcctaaaccattaacctctcaacctcagtaaatggagatttcctagcaaaaaaaccacactgccaaaaggaaaccacatttctaacaggagagagagggtagtttgttaatcaaaagtctgtaccacagtgaatttgatagttaaaattgagttggcattttttattttctttcaaaaatagcttcttgtaactcctcaatagact

SEQ ID NO: 25784 - DNA, 961 bp, Bovine  19866881634175
  misc_feature (1)..(1): n is a, c, g, or t
nattgaatcctttaaattgcatttaggcagccctgccaatcattagtgttccatttctgcctagatgctaaggttctataaattctaatatctcatgatattaatgttcaaactatattttctcaccaagaatataggacattatgacctccacttacttatataaaagtaaagggagtaaaatgttcagccaaaactgtaatgtctatttctaacaataaataatgttgagataatcttcaaaacttaacagaatcaccagatgatatgttttctagacaagtcaatttacaacaatgtatttttacttttttgcaatgcaacataaagcctaataataagatctgaattctgcaaatataatactagacaaatctgcaagtataacattcttctctcctactgaacatcctgtgaattcatatttacatattacaagttataattatgtagcactggggaaaagggaaaatgtaactgtatatttatatctacaagaatataaaagaacattcataaattacaaatgtgcattgttctaagaaggatacctactgagcttttgtatcttaagggcaatgcataagacaagtttctccatttcccccatcagtgggctaaaaaattataattgtaagtttgaatgactattgattgcttattatagtttctattattagtcataaatggttatgtatgagcacatcattgtaggtatttgttaatgtagagggggaagtttgtattgctatagggataattctccttaagaaactgacaagcatgattataaagaatactgcaaagtacgtatttgcttaaaaaacaattacctaaaatagtacagttaaatgctattttgcttttgcttttcatactagtaggctttctatagtaaattctacgccatagattaatatgaacactaatcaaaaggtctgctaaataaaataagatttaa

SEQ ID NO: 25785 - DNA, 1372 bp, Bovine  19866881654949
  misc_feature (1)..(1): n is a, c, g, or t
nctgcagcatgccaggccttcctgtccatcatcagctcccggagtttacctgaactcatgtccatcaagtcagtgatgccatccaacaatctcatcctctgttgtccctttctcctcctgccctcaatctttcccagcatcagggtcttttccaatgagtcagctcttcacatcagatggccaaagtattggagtttcagctttagcttcagtccttccaatgaacaccccagggactgatctcctttaggatggactagttggatatccttgcagtccaagggactttcaaagagtcttctcccaacatcacagtttaaaagtatcaattcttcggaactcagctctctttatagtccaactctcacatccatacatgactactggaaaaaccatagccttaactagatggacctttgtcagcaaagtaatatctctggtttttaatatgctgtctgtgttggtcataactttccttccagggggtaagtgtcttttaatttcatggctgcaatcaccatctgtagtgattttggagccccccaaaataaagactcactgtttcaaatgtttcccatctatttgccatgaggtgatgggaccagatgccatgatcttcgttttctgaatgttgagctttaagccaacttaaatacattaatgtattccataaagtccttttaattttgagcatactcaagtttttatttcaagttcatcagttaattgactttgggtggtcaatcaaatatattttatcccattttacttatataatatagatgccaaactctagttgaattttaaatataatctctttattgagcacatggaatagaggaaatataataataaaattatatatatatatgaaatgtgcaattaaaagaatggcatagagactcagaagcatataattctgtctaaatccatagttaagaaagactttacagtgggaaagatcccatgaacagaggagcctggtgggctacagtccatggggttacaaagagtcaaacctgactgaacacacacacataattcctattaaggattcagtttacagattagactgtttattaaatacgtcagcataggatatttaataaatgaatacatgtttattggttatgtttaagtattattttcaggaagataaatttatacccctgaggcaaatatcaaatgaacatttgtcaaagagtctatttaactcattaatgaattagtgattaaatggtcaagtttaatcagttcaaatggcattttatgaggaataggtacagagttaattttaaaaagaaatattagggtaagattcttgggttagatataaaactggggtagtatcttacatgacaataaattataa

SEQ ID NO: 25786 - DNA, 1325 bp, Bovine  19866880401172
  misc_feature (1)..(1): n is a, c, g, or t
nagctgaaatggtgaccttttctttcctggacacttctcgtgattgagttattcccagaaacagcatgctggcatttatacttaagaattttgatatagttacaaagctataaattaagtagactttccacaatttagaagaaagacagtgaacaaaataaggaccctgagaaaacactaattacgttataaattcttattcatggacatattataatggaaataaaaattctagagacttggaagagagcctttgaactgataattttactgcagtaacactgtcatttaaaactatataaattgatgaactatattttaagtttaatttgttcagttttatttccaatctacacaaattgtacaactttttatataaatatggtatacaaaatgaaaatcattgccaaaatccaaaactattgttcacacatgtcaggctagcacatgaatgtgatggttcttttaaggaaaaatgaattcaatttttttttatatcctgaaaataattaagctttataattatgtgtgctgttaaataattttcatctatatttttgcaatagacattcagagaattttaagaaatttgtgttcattcttgaaactagaatttttcttacagcaaatgttaaggcaactttgtagggagaagaaagtccataaacttttttctgcatattgaagtataccatttatagctatttcaaaatagaaaattgctataccttcaatagtaacacttaagattatttgcatagacttctaggcttatgttaagcatctttattgtgaaactctatagtcttcacctgttctcctctgtgtttctgtagaaattattgaaacactttctaaaacattaaaaaatgtctcagagacattcagctactgtcaaggggagggatatatatagctaggaaccatcatctaacatccttctaaagacttgtcaaatctgtacgaaacagagagatcatttctgcattataggcatgaaaatggttgtaattaacttctcaagcccaactacatggtgagagggataactataaaagaattcaaaccaatctcagcttaattattctgcacagggatgggatgagggcatttccaatagcctcctgttgtgctattggaaccaaagcaagcttgattagtgcacattatgtcatgttcttcttcatccaaatagttatatctactcttaaagccaaattcaattcaagtggtaacctctgtcaacttatagaactatttcagagaatttagtttaaaggtatctgaaaaaggagggtggttccagattaggttgaggtcatata

SEQ ID NO: 25787 - DNA, 1507 bp, Bovine  19866880463466
  misc_feature (1)..(1): n is a, c, g, or t
ntttttgatgtacatagatattcttccatctttaaatggttccatagtattttattatacagatgcatttagcattttttatcaaacataagtattttttatttttatacattaagaataaccttgtttaatcttttattctatttaaattaatatatttcctgaaattttaagaagtataattgttgaatataaagctacccagattttaaaggccacagtaaaattgtgtaaccaccctatacaagatattctggattcacttctcaccagcagagtatgagagtgagtacttgaaattatcaatacccattttacctaggagcctcttccatggatagtcaacaaaagcctggttgcaaaggtaccccttatttacttatgctgctgctgctgctgctgctgagttgcttcagtcgtgtccgactctgtgtgaccccatagacagtagctcaccaggctcccccgtccctgggattctccaggcaagaaccctggagtgggttgccatttccttctccaatgcatgaaagtgagaagtgaaagtgaagtcgctcagtcatgtccgactcttagcgaccccatggactgcagcccaccaggctcctctatccatgggattttccaggcaagagtactggagtgcggtgccattgccttctccgttacttatgctattgagcaaatatatcaattttccccccagtaaactatagctagttatttataaaatatgttctgagtggattattatgaatttcaattcggtatcaatatatcaattcagtacatgcattgaataaaaaacatttctctgaatatgaaaaataatacagcttatttttcacatatcagcaaagacttctggagtccagaaggtgattagaaaagtggaattttcaatcttgtaactttcctgagcacacctttcctactttttcagtccccgagagtccttgttatttcagcatctgtgtcttcatacgacgccagttatccaagatgctggaggcaatcagtgtggctcctcgtcaacttcagcagccctggcctccctagtacactgcagtctgggtacttgtagcacatcaatacagggaccttagagaaaaagccaaccaccaccaacaataagaattggtagctctttggaatccctataatttatttgaatatcttgttccttattctttattacaagaccctctgttaacactcaaaaatactggaaaattttctgttctccatgttcatttttctatgggaaaataatgagcactgattatgatttgaacctgtaaaataagtgaagtttctgaagagtcacgatttaatgtagtgctaagaaaagaaataacacatatttacactttaatgaattaaaatactattaattccttttaaaaactaaacacccaactgatcatcaaatagatttaaataaaattaaatttaaccttgttagataaaaatttgggtcactaatagagaaaaggggttctaggac

SEQ ID NO: 25788 - DNA, 1944 bp, Bovine  19866880480836
  misc_feature (1)..(1): n is a, c, g, or t
nacgattacctttgtgtgtaacatgtatgcttgcatatgtaaaatgaaataaaacaatggataataagggttgttgttgtttcattgttaagtcatctccaattcttttatgacccatggactttagtccaccaggctcttctgttcataggattttctaggcaagaatactggaatgggttgccattttccttctcatgctgctgctgctgctgagtcacttcagtcgtgtccaactctgtgccaccttctcacaataagggctaaatgcacataatttctataggatatcggaactttccatttctgttgtgatccagatttccttggccataataattttattttgtattctcttgtacagttttataacgcatttctcagtctatcaattgttaaacccttagtaccctaggcttatccttgcagataaaattgtctttttatttatttcttttctgagtattttttcaattttaattggaggttaattgttttatcatattgtgttgatttctgctttacaacagtatgaatcagccacaagtatacatatatcccctccctcttgagactccttcccactcccaccatgaaccttttttttattttagagttgtaggcattacaagatactgactcttgaatgcagtgtaaggaagcttcagtagctctgaccagggttaacctagttgtttcttttgggtgcaatcctcattcaaagtggtttagctgcaaagcatgccaggtagatccttttattttaggtataatatatttgaaagataatgctctatcatctaggtctaaaacatctgactacattaacaccatttggttggttgttcagtctgactctttgcgactttatgtactgcaacgcaccaggctttcctgtttttccctgtctcctggagtttgctcagactcatgtccattgagtcgatggtgccatccagccatctcatcctctgtcgtacccttatcctcctgccctcagtctttcccagcatcagtgtctttttcagtgagctggctctttgcatcaggtgtccaaagtattggagcttcagcatcagtccttcaaatgaattttctggttgatttccttcaggattgactgatttgatccccttgctgtccaaggaattctcaagagtcttctccaacaacacagttcaaaagccttctttatggtccaattctcgtccgtatgtccaatctatacatgactactggaaaaatcaaaactactttaatttcatagggataggtgatgaacctgataaaatataaactccttgagtatctttgtatgtatgtgtgtgtgtgtgtgagtgtgtgagtttgtgagtgtgtgtgggtgcatgtgcgtgtacatactcttacattccttccttttgcattgatgacttctgtcttgggagtcacaaatattttaaggtactcagccataattgagatatacctttcaaaaatgtagctaacagttttgtatgaaacacattttggattatggttgtatataagcagaaagtatctttgggaatgcatcaggcacttaactatagcaacaaccttgagaattgctacaattttctaagcttggtaaagtgtctgtagatttatttcttaattaaatttgcaatttggattacagattttggttaatatcacaaaaatgttacaagcctgggaatagtttattgctgtttaatgtaaattatttgttaattgcttcataacaactttccagaagaaaatagagtatacttagctgcagttttatggctgcagcttaatcccaagacctgcagtctttaagaaaagggacatggtccttttgggtttcctgtggacctttcattttattctttttttttttttgttaactcttttcctttattcttgttgaccaaaaaaaaaaaaaaaaaaaaacattta

SEQ ID NO: 25789 - DNA, 918 bp, Bovine  19866880538020
  misc_feature (1)..(1): n is a, c, g, or t
ntaacattctcctggtcattgctcagtccctccctccctcatctgctactgcagaatctcacttatttcctctggccacttctttaccccaatatgcctatccaaacagcttcttttaaatcacttctaaaatatgcagtgttaacccaaggcaggcactaaattggagtgatgaaaacactcttctgatgactaagaaaggaattacaaagcagaaaagagcagcaatacataagattttggtcgagggttttcaaagccttcatctgctttcactgagtagaggacactttgtatacacttggtaactgatacagttatcaggtttactgtctattgcttaatttttttccattctccttcagatagaaattgcaatgtgaatttggtagtagtatgtattaatttaaggattgaaggaagatccagtgataggtgttgcaggactaatatttctgtataatctttacagaaaaatgacgggcagttcactgtgatccagctggttggcatgctgagaggcatcgctgcaggaatgaaatacctttccgacatgggctacgtgcatagagaccttgctgccagaaacatcttaatcaacagtaaccttgtgtgcaaagtgtctgactttgggctttccagggtactggaagatgatcctgaggcagcctacaccacaagggtaagatctaacagaatgccttctgaaatactatgctggagacattgaatatttaaagattttaaaaagaaaaagaagttcctcccacataggaagaaagagggaggaaacagagagggtggctaaaaaagtccaaataatttccttgttagatgtcagaaaattcaaatattaaacttagataagctaagtattcacgtaatgagtcttaactgtttattttttttctacagata

SEQ ID NO: 25790 - DNA, 1477 bp, Bovine  19866880559202
  misc_feature (1)..(1): n is a, c, g, or t
ntcctagcatgaaaatattttgatagagtgttgtttcctaggcaaatttctttgatatttgccatatacccccacaactcatgggctggcaaaaggcagagcttgatttgtgtgttgttgttgtaaagtcgttaagtcatgtctgactattttgagacccatggactgtagccaaccaggtttatctgtccgtgggattttctaggcaagaatactggagtggttgctatttccttctccaggtgttctcctagacccagtgatctaacatgtgtctcctgcattgtcaggtggattttttaccactgaggcaggaagaaagccttagtttgtgtgtagctcctgaaaattccagagtgatatatatatatcttattttctttagaacagtctaaattttgaggttaggcaatgctatactccttcctgcttttctgtgctatttttttttagagattcttacatatatatacacatatgaatacacatgtgtattaccagtttgtttcattcagtcaggacttatttcagtctcatgagtttctagctcatattcctaaattcctacacatgcctgaaaaatcacacaatcagaagccattcattctgacactttctctggtaccacaagtatgcagctttgtctatacttagtgtttttgtcacagcagtctactcataattcacccacatccaccccaatcaattctgaggtggaaaagcactgataagaattcttaggatcagttccattcacctgcttctctcagtgctgtttggctggaggaggacaagtagtccttgactaaaatcttttgtttctttccttgatagctacatactcctcccataacagttaatttatttttctcttgtttatttgatactggaacataaatgatattttacttttaatatttttatttcattgtactggaaaagggagctcctatacttctattttattctgtctcacccactcaagtccaaattttaatatcatgttacatttgcatacatgaaagtgtgcacacacacaccaatagaagatatatgtaggttagatataaggtacaccacttgctaactcttatttcagacgttcattatgttaaattttcattttgttacaaaggaaaaatgcctaccaaatgataatatatgcttctttaacattttatgaacttgtgttttgcatcatttcaaccaggtgttgtcaagttcatcataatctcagcatgcttcacaaattttaacattatttctgaagtactgtaaattctttgcctaatccagatcctctaccccagctctaagaataatatatagcaaaccttcaagcattcattaactaaatgttattcagtgagttattttttatttctacattttttacttcaaataaatgctggattcaccaagtaaacagagaacagtaaaagtctataaaatgtaatattaaaattaaataaaaatc

SEQ ID NO: 25791 - DNA, 807 bp, Bovine  19866880624527
  misc_feature (1)..(1): n is a, c, g, or t
ntggtttcatgcagcatatcattttagaagaggaagtcagagaaataagaaaaataaaagagttaatatatatcaaatggccatgtgaagggaaataaaggaggatgtggggatgaaatctgaaaaactaacctgctggtaagtttctaattcattggaaaactgtttctcaagtgcaattgatcattgaaatcagagattaaagacaaatatagtcaatttttctgtttagaaaaggtgattagtaaacatattgaatggataaagttttagtgctatcctggcaaaatctagttagagaaatcttttctaagaatcaaaatacacatgactctgcaatccaaaagcagagtgtaaaagtatgtaaaaaatctcaaacaggccaatccctaggaaagctttctgttgtgcttcaatgcaagcattatattttgatgcaaaccctatacatagcttacaggacttaatggagagaagcatgttttctttgtttaagaagtgcagcataaattattaccatgatgttaaattattcctcttactgctttacaaatatttgagaacattttgcatgagataaaatatgtctaaatataaatgaaggccactcaatgtgtgaaaggtagcagcattttgtggcacatggtgtgtcgctcaaagaaagaaaaaggcatgacaaaattccatttagttatgcagtattcatttcagactaagtaaatatgccagagaacaagagctttcagtttttattgttgtccactgaatgtaaaacactgccattggtttattatgtatatactttaa

SEQ ID NO: 25792 - DNA, 1231 bp, Bovine  19866880697032
  misc_feature (1)..(1): n is a, c, g, or t
nccagggctcctctgttcatggaatttttttctggcaagaatactggagtggattgccattctctactccagggcatcttccccccacccagggattgaactcatgtctcttgtgtctcctgcattggcaggaggattctttaccactgagatacctgggaagcccatgtccaatctgtacacatacacaaatcttgggaatggaaatgagaaaaaggaaaattggagtggtaaaagaagttctttgccctgggaaacaaagagtggagaagctaaagaaaataatttttactgcagttgggttatagacaggtgagcatattctccttggctctaaagaatagtgtttaaaaatgcaaggataccttatcttgagaagaaggatctcttgaagtttgaataaaagctaaagtaataaaaaataatagaagtaacaaaaaattcactccgtgaaagtaatggacagcacattcatttgtacttcaaaaattagttaatttacctaatatttcataaaaatgtgaaattcactcaaagcataacactaaaaaaatacactataaaaatgttgagaaggaaagaactgggggaaatttgcaatgtatttgggaaagaaaaacattactacatggtacatatgcaaagatacttgcaagcaattatcaataataatgataatataaaagaccagttaaataaagatataccatttctcctgattgacactttaacccactctaattgctgaggatgtgtgggaataatcactatcatatcctattgagcagtgtggaaatttgttcaatttttctagaagccaatatgcataaaaattttaaatgtgcatatactttgacctagcaatttcacttctggtgatttatgcaaagaaaaataattagaaatgtacaaagatgtacaaaatatttttcacagtattatttatgatgtcaaaatagcaacatcaactaaaatgtctgctgggaagaatttgttaaaccaataatataaacttattcaaaataaaatcagttcagttcagatcagtcactcaatcttgtccgactctttgcgatcccatggactatagcatgccaggcctccccttccatcaccaactcctggaatttactcaaactcatgtccgttaagtcggtgatgccatccaacggtctcatcctctgtcgtccccttttcctcctgccttcaatctttcctagcatcagggtct

SEQ ID NO: 25793 - DNA, 773 bp, Bovine  19866880764156
  misc_feature (1)..(1): n is a, c, g, or t
ngatgataggtcacttttaggctatatttcccataatctgagggaataaagtctcaggagtagagatgtatgagatggaagttttccctttccctgacatagtcagggaaatatattctaacctaaactgggagaaggaaactcattcatagtacagtgttgtatatcctgtaggctttcaacaatataattgatgatgatgatgctatgacagtcttatatgtacttgtctttagtccttgatattatagctttcattattctgactacatgtagcagtgtaaactacaaagtcagccaatacaaactgggttttcaggaggtaaagagatgtcagatttcaaaataatactttctttcttccggatttctcccttattcaaaaacacttttagtgacagcttttctctttattattcctttacagaaatcatcactgattgcaataagctctgtctccaatttttttgacaggcatctcagaattatggcactagcatttaccctcttgttcacgtcaaactgttccttctattcttggaataattcacaagatatgatatttgagcaatgtaggcttaaaggacacaggcaatttatgttgtgtcaatgatagtgacctctggtttttgaaagaaagacctgaccctttagaccatctctaaagccagtgtgctttaaaggctttaaaggctaaaatcaagatatatcatagaatggagatattttgaaactcacacatgtaccgcaagatttattcccgtcttccattt

SEQ ID NO: 25794 - DNA, 1964 bp, Bovine  19866880853575
  misc_feature (1)..(1): n is a, c, g, or t
ncaggctcctctgtccatgggattctccaggcaagaattctggaatgggttgctgtttccttctccagaggatcttcccgacccagggatcaaacctgggtctcctgtatttcaagcagattctttaccatatgagctatagggaagatccttaatatttccttctagtctggacataataaaaggcatcaagaagagctatgtggaaaactgagggttgtggttaaaagggggtgtgcttggtattacttttaaagtgtatacatttgtgtatacatttttttttcctgaattaaaataaacaagctatttttaagggttcttctttgattttaacaaatataaaactgcatttcttcatttgttctgtagtgcagtatctcctgactgaaacatacctgcagatattttagaatctgtccactaatttgcaaaagtgatttataatgtcaggtttctgactgtgttcaaggttaggaagtgaaagtctaattccatgacactacagtacacctaaagcactgatttcctagttttaagaaaaaaataaaatgtctaagaacttcaagatccttaaagtctaattctacaaaatacaaaagacagcattattattaaaatcaatcattaagcttctaccaattgccaaaaggcttccttggtggctcagctggtaaagaatccacctgcgctgcgggagacttgggtttgatccctgggttgggaagatcccctagagaagggaaccacaaccaactccagtattctggcctagagaattccatggactgaatagctcatagagtcacaaagagttggacacaactaagcaaatttcagtcaccagaaggaatgttatttttaagagtcaacactttaacatttttttactgattcaaatctatgtttcccaacttgcaaagtaacctgtctgcataatgcatttaatgaaaaatttcaacctcttccctaacagaataatcattcataagtccccatgtgactggaagcaacagttctgtaatggaaatgtcactgcaaccttaaatatagtgttcaccaccgtgaaaactgtaacaacagatgctcacaaatgcctggtgtgatgaatcaatgcagagaaagaaggacagaaagaagtctgtgtaggtgtttgtggagtagggggaagagtgccttacaaacacacaggagtaaacagatggcagtgatgaaggcattctgggataaatttgatttttcataccctgggacttctctgctacctgcaattacctatacatcaattggacaaaataatgacaattcaaaggcaagtggagaaaaaagaaagaacaagaatgactttattgctattattctggtgatgtgaacaaaagaaaggaggtaataaaaaagagcaaatgagacaggggaagttgttttgcaaaagttcagtcagtatacattgactgggctctttgacatatttcatggactaaaatagttcataatacattaatttttcccctattgttgtagtaaataaatgttctgagtaagagaaaacagatttaaaatactcttggagttccttttaattatgaggaaataagtaatttaggctaattttccctcttagaaaaagtttaaaaaattgaacaaaatactcaagaatatctcttgatgtatggggatactgtccctagcagtaattctgatccactaactgaaaggtaaagtggtccttttgatagtcacataggcttacagaaagagaaattggaatctagagcgacccaaaaacaggggctgagggatcccaggaaaatagcattataatgggaaagtgaacttgaaagcctcaatctaagttaagtcagagacattcacatacagaattctgctcaacttcaggttaccctcaatttctgaaaatggatttgagatcttagatcactaggaccataaaacctgggtcaaaa

SEQ ID NO: 25795 - DNA, 2626 bp, Bovine  19866880927830
  misc_feature (1)..(1): n is a, c, g, or t
ngcttaaaactgaacataaaaaactcgatgatggcatatggtcccatcacttcatggcaattaaaagggaaaaaataactgaaaacaacagcagattttattttcttgcactccaaaatcaccgtaaacagtgactgcagccatgaaattaaaagatgcttgcttctcggaaggaaatctatgaaaaacctacacagtttattaaaaagcagagacctcactttggcaacaaaggtctgtttagtcaaagctatggtttttccactagtcatatatggatgtgagaactggaccataaagaaggttgagtattgaagaattgatgcttttgaactgtggtgctgggagaggactcttgagagtcccctggatcgcaagaagatcaagtcagtcaatcctaaaggaaatcaactctgaatatccgttggaaggactgatgctaaagctgaagctctaatactttggccacctgatgcgaactgccgattcattggaaaagaccctgatactaggaaagattgagggcaggagaagaagagggcagcagaggatgagactgttggatggcatcaccaactcagtggacgtcaatttgagtaaactctcaaagaggagatagtgaaggatagagaaacctggtttgtgcagttcatgcatgacttaatgattgaacaaaagcaacaatacaaacaattcttatttaatgaatgaataaactgaggtacctaagggtttggaacacttgcaattttaattcatgctgttaccattattggtttcatttttagtgctgttctttatgtggtggagattttaatagttttatactatatgaattcattttttttaaaaaaccaactctaaaaaaaatcaactcttttaggtatattggaaatattgatcatatttttcaaataacatgaagaacttcaactataaaatcctgtggtttattatttttctcggctaagtctttaattttccacttgatgatacaaagaagttccctgaaagatcccagtttcaacgttttactgacatcatatatgacaatgtatctgcatgctcctttctactttcaaaaaatacactctacatattaaatgtatatgtcaggtataaatttcagggcactaatgaataaagcttccatgaaaattactgatgattggctagcaagaaaatactatcaacatatgatgacattatagctacttttcaccctccatattaacaacactttttggaaccactttaattttcctgacattagcactgaaatttatatgatatttttatcataattatttcatctgtatattttacaagtgtaaaagaattccaaaattctaagatgataaaaatgcaatacactatcactgttaaattacctttaaaaatcctattattcaatctggcatcaaaataaagcaaacagtaagccagggaggcttgtttaatgaaacgactttatttttcaggattatactcatcatttggcctttaactgtgcagactggaactatctgtgacacaaactgaataatcctccattatttaaataatttgtaatcaaagcacagcctgtgattcttcagcttattacatatttgcatgttataatcaattaaaagttcatgcgtacccaactgcacaaaactctttaaaatgaaacttctccaacagttctggcagctgtcctgtccggatgtatataatgtggagtggaatacatgaaggattcatgaaacatatgtacatttccattatctatgctctagatcaagtgttaagaaataaccctgaattggaacatgttttctgagtaagttcagattcataacctatggcattaaatattctgaataacactttggaagtgttgaaatcacagaaggcaatcccacataagaaaagcattaattgatgtcaaagactgtaaagactattactcaacagtaaagactgccctcctcttttgtttccatatttttgtatctgtaacttgcttctaagcaggagacttggcttacgatgcagcgtagggactctcataaccaggtcagcatacacaagggtgattttcttggcctctaaggaaacgatgagctaacaggatgttattagtcttcttactcataataactagatgtataccagaaagtagcatggaggcacagtgatatttgtgttacagaacagaatgatgataaccaaagatgtagaatcactggttacagtgaagtttagaataaaagaatagtgggacatatattagtaagattttaaattagtcaaatagatcaattaaatatgagtatcaaagaactctccttcctcaaaccagctggttttatctgaatcagtgatggttgacagaactgaatggtactgatcaaaatctttctatatgcaatttagaacattcccagtcagtctgagctggtccttcaaatttgaaattgggtgaaagccatgtgtgtgtttagttgctcagctgtgtcaaactctttgcaattccatggactgtagcccaccaggctcccctgtccatggggattctcaggcaagaatactggagtgggtttccaagccctccaccaaggaatctccccaactaagggat

SEQ ID NO: 25796 - DNA, 2194 bp, Bovine  19866880989592
  misc_feature (1)..(1): n is a, c, g, or t
ntttaataaaaaaaaattctgcccatatttaataagtagtcccagagtttgctattgtgctagacatttttttgtctgctgtcaaatcaacttctcttccttcttcctgcctcgctgggtgctgactcaagccaactaggttttcatatcttcctagtcaatggaccaagcttctgccattgaaaggcactggcaagattaggggaaaatgcaggtcagttctgcctctttgtctctgcattgagcattggccctttctcatccatggtccccactccctccagcagatttcttgtgcttcccactgattctgggctcaggtcactatgtttcctccctttgtcctttcatctctctgaatggttgctgcttcctgagtttgctaatttctcgattgcctcattgtttgcacttccagcatttctaggcatattggtacttaaatcccctgcttccatgcctcattgaattacttagtattcgtttggtttccttgctgcaaaataacttaaacacctctattttttgatgatagaccaaattatttagaaacaaatgcatcacattatttattccaataaattataaaagacaaaaaaggattaatgagaatattaaaaatctggcaataatacctctgctgcttctgctgctaagtcgcttcagttgtgtccgactctgtgcgacctcacagacagcagcccaccaggatcccccatccctggggattctccaggcaagaacattggagtgggttgccatttccttctccaatgcaggaaagtgaaaagcgaaagtgaagtcgctcagtcgtgtcccgtgtctgactcttagcaaccccatggactgcaggcataccaggcttctctgtccatgggagtttccaggcaagagtactggagtcgggtaataatacctctgaacataactttaaggttactgctctgggacataaaatcctaaactgataaagttactgtttccctcagtcagaactagaagaccgaattaaaaaaaaaaaaatctacaaaatctacaaaattcattaacaatttttaaaatgcaaacatattttatattttacacataagtggtagaatgcaatcaaaaatacaaaattcagttgtgctattaatagaattgctggaattcctcaaagaaagatatccaataatacccattcattcacaaatattcctaaacctacccaagttacacaggtaatattacattggataaagaaataaatgtgacattccttcagtttttcctgccattgacacagaatgtcttatttttttctcttgtaaatctctaggacatttttctttattattaagcacaacttcctgtatacagcagatttcagcattttgatttcatgggatttctctattaaatagtaatttttaataaaaatgaaacaagtaatatttcttttaaaggtattttgcagtttacttcactttttcttggagtatatatttttttagctttgtggcaagagaaagtaagacaaaatactttattttcctgtagttgtgttgcctggaagtggttcatatttaaactttattctttcaccttggacaatctgacaaggacaaatgattcatatattaagaaataccccgaactgcaaggtgaggctcacacactttgtgtacagagtgtcctacagaggtgactataatgactataatacatcatctggaaatggggtcgcagaaacagggtgaatccacatcccaggaacaaagtttatttatttatgctgttttgataggagctgctagaggcatttttctaatggtcctaatgagtctctgaagaccttgcttcttgtcttatttcttacagtacctaaaaatagaagtcagtatttgtgcacaatagagatagataaatagcttcaggatttatcttcaacaaaccatgttaatttttttcccccgaatggactctaggagtataagcttgtattcatatggttatccttaatctcttcaggaactaccaacagttgatataaaatatatacaacatatgctaaaattgtgattcgtatcctttgggtcttaaaggtacagtacttcctagccacatccagaatcattcaactatattttagtcctatcctctgcttgtttatttaagctcacttactaccatgacctctgaacaccaaagactg

SEQ ID NO: 25797 - DNA, 769 bp, Bovine  19866881016118
  misc_feature (1)..(1): n is a, c, g, or t
nctggatattaaagttgatgagcagacctgccttttttgggtgtgggtgaaaatccagtctttatagtagttactatgcaccaaattaaatgagatacctttccttctaaaatcatacttttttgtagaagttttatttgcagtctttttttaatgctagtatactagaactgcccttcagatggacctctttgaaaaaaaatgaatgagaaaattgaagaaaaataaataaagcaagagtagacataatagagatgaaacatggaaagttgattgttttcaacagtttttctaaattatttgtgtctcaatgcaacagaacacaagaaattaaaatatttttaatttaaaatatcctgaaattaatttcactggaattaatttcatatatctgcatatcatagaatttctaaaacataaaacattccatcagtgagattgatgaattaaatcatcacttcttaaagtacgcggcacaccacaattttcaatcgccaaattccttgactccctgaaatctcaatcaaagctacctcgtctgtatttggacagtctgccatttatttagaagaaaacgctgactaattatctcattccagccgccaaagtattgaaagaatagagcgggtcagtagcagtaagcggttaagggtgttaaataaactacccacggactcgcacagcctaggaatgctgggcggtgtaacaaggttgttgatgccacaagcctgcggtgggcagcaggcagtcggccaaacccacggccccg

SEQ ID NO: 25798 - DNA, 1712 bp, Bovine  19866881051295
  misc_feature (1)..(1): n is a, c, g, or t
nagtctataatttgtatatctctattttctttctgtctctaggtttatatttgtgggtacatgtatgattaaacccttcgtaacccagtttggggggtttccctggtaccttgaagtttacctggtggctcaggtggtaaagcatctgcctgcaatgtgggagaccgggtttgatccctgggtggggaagatcccctggagaaggaaatggcaatccactccagtacttttgcctggaaaataccgttgccagaggagccttgtaggctacagtccatggggtcacaaagagtcagaaacaacttgagcgacttcactttgacttcactctctggtacctcagtttttaaagaatccgcctgcaatgcaggagacctgggttccattcctgggtcggaaatatctgctggagaagggatagtctactgtcttcagtattcttgggcttccttggctcagttggtaaagaatccacctgcagtgtgggagacctgggttcgatccctgggttgggaagatcccctggagaagggaatggctaccaactccagtattctggcctggagaattccacatggggtcgcaaagaatcggacatggctgaacgactttcaacacagtttttaaaagagtcctacctgattggttgaatgaaataaactattttaagctaatgaatattccttcaagttttgttatgttgtgttgtttgagagttgaatgtggattcagtcatgtttatctcccttcttttcttcatttgctgcttttttctcattgttatggttttaaaaaattatacttccttttctacagactttcttccaaatatgcatatttccctcactgcttcttgttaatcatatcccacattgaattttatttttactctgaaatacatgaatttttctggagaatatcattcacatgttttcacacctgagttacatttgagacaatgactaatatattgcagattaatttaatttgaaaagggaaattatttttaaaaatttttattgtatatctccttctctcaatactgtatattgaggctacagaaattttacatctgaattaattttcttttattttgctggttattttctaatcatctttttacttttttgtttttctattttacattctacagtgggaagagattggtgaagttgatgaaaattatgcccctatccacacataccaagtatgcaaagttatggaacagaaccagaataactggcttttgaccagttggatctccaatgaaggtgcttccagaatcttcatagaactcaaatttactctgcgggactgcaacagtcttcctggagggctggggacctgtaaggagactttcaacatgtattactttgagtcagataacgagaatgggagaaacatcaaggaaaaccagtacatcaaaattgataccattgctgccgatgaaagctttacagaacttgatcttggtgaccgtgtcatgaaactgaacacagaggtcagagatgtaggacctttaagtaaaaagggattttatctcgcttttcaagatgtgggtgcttgcattgctcttgtttcagtgcgagtgtactataaaaaatgcccttctgtggtacgacatttagctgtcttccctgacacaattactggagctgattcttcacagttacttgaagtggcaggctcctgtgtcaaccattctgtgacag

SEQ ID NO: 25799 - DNA, 1627 bp, Bovine  19866881124524
  misc_feature (1)..(1): n is a, c, g, or t
ntcccttggtctgcaaggagatccatctagtccatggggagggaggagggaggaaggttcaggatggggaacacatgtatacctgtggcggattcattttgatatttggcaaaactagtacaattatgtagagtttacaaataaaataaaattaaaaaaaaaaaaaactagttaactggggtcatcacacacaaaaaaataataataataaataaaggagatcagtcctgggtgttcagtggaaggactgatgctgaagctgaagctccaatacttagccacctgatgcgaagagctgactcatttgaaaagaccttgatgctgggaaagattgacagtaggaggagaagggggatgacagaggatgagatggttggatggcatcaccaacccaagggacatgggttcaggtgaactctgggagttggtgatggacagggaggcctggcgtgcttcagtccatggggtctcaaggagttggacactactgagcgactgaactgaactgaactgaactgaaactatgttttgcttttgtgtacttttatgggccaaagttaaaatttaaaaatagtcattttaataagtattcattgagtgagtacaaaaatccagttactatgcagagggctgaggatataggcaagcatgaaatgttatctctaactttaggatttatatcatatcagaggagacagacaagtatctagataactacaatgaaatgtgataagtagcataatagaaatatagcaagtacaattataactaaatggaaaaaatgattcattttgtatggagggacatctgggtagattttacaaaccctgttaacacttgaattgaaaattttgaagcactgcttgacttttggcaggtataaaaaggtgcctaaagatttcaacaaagggagcactgcaggcaaaatactgggtcaggggaaatccttgggtaatggtgaggatgaagataagaggaaggtctggaggagtcctgggaaatagcaagtcatggagttgggaaaatgatgttgggctcagtttcaacttaaatttgcctttgtagaattagtctactccaagatctgacaatctggtgccaatggtgattcctggacaatttatgtatgtttatcatttgttttcaaacagttgccattgaatatcagttaatattttaataatttggaatcagaacaaaatgctaaattagttcattatcctggcatttcttttcattattgttaactgtggtctttcccaagagtaacatcaatgaagcaaaagataaaaattgtagaaatgtaatagagtttataggtgtggagtcaaagatcccattccatcaaaattaagctcacttctattagcaaaaatatctttactttttcttaacattaaaaatgaatgacatatcagagatgcaccatttaccaagtgcatgtgtgaaacatgaaccaagattttttctcagatccatttcttacctgttttgttgcttggcattgtataacttggggctgacgttataggctgctttgttcaagttcctgtagaagttaaatcaatcaggaagcagtggtgcggattagagggggatctaagggagaagtcaggaatttctcctc

SEQ ID NO: 25800 - DNA, 1360 bp, Bovine  19866881170437
  misc_feature (1)..(1): n is a, c, g, or t
ntttctgaatgttgagcttgaagccactttttacctttcctctttactttcatcaagaggctcttcagttctttgatttctgccataagggtggtgtcatctgcatatctgaggttattgatatttctcctggcaatcttgattccagcttgtgcttcattcagcccagcatttcgaatgatgtactctgcatataagttaaataagcagggtgacaatatgcagccttgacgtactcctttcccgatttggaacctgtctattgttccacatccagttctaactgttgcttcttgatctacattcagctttatgaacctttatgaactgtgcttttcctttagtacacatcctctctgagggtcttacctcccactacctcatatgctcctcaaaggaaaaaatatttcagaagcaagttaccatcttctgttctagtttttgaaattaacattttttgttcttcttttgattaaaatattatatgtacaagatatctttatatatattatctgaacccagagttatcatagcttgttactcatgagggcttccctggtggctcagatggttaagaatgtgcctgcaatatgggagacctggattcaatccctgggttggaaagatctccctgggttggagaagggcatggcaacccacttcagtattcttgcctggagaatcccatgaacatagaaccctggcgggctgctacagtccatggggtctcaaagagtcagacatgactgaacaactaaccacacacacacacagacacacacacacacacacacacataataactttaaatgtacaaacagaacatctactaaacaaataaaacaagcatgacaatcttacttgcaggagtacacggtgactactgctgatttattcaatataattgtatatattaaagacgaattacaaattttctttcatatgccaaagcagagcgggacatttaaaaaaaaaaaaaactttattcataattactaagtttccatgtgggaaatctacatgtgaaattgtgcttcatctaaacttcagtgtatgcttaatgaccatcttaaattccttaaattatttatcttaattaccttacgggtggagtatgctttttgtttttctaaaaaataatgaatacaaagctattctggaacaagactgttcttcattatactggcatttgcattatatagtataatatccattccctttagaattcttttctatcactgcccaaataaagagcttttctatatccactaatgtgctctttttttccacttcagcattattatcatctttattagcctccccacactcagtgtgggcctcaatgcttggcattatcttt

SEQ ID NO: 25801 - DNA, 2526 bp, Bovine  19866881192110
  misc_feature (1)..(1): n is a, c, g, or t
naaggctaagttctgaagaactgatgcatttgaactgtggtgttggagaagactcttgagagtcccttgaactacaaggagatacaagaagtccatcctaaaggaaatcagtcctgaatattcactggaaggactgatgctgaagctgaagctccaacattttggtcgcctgatacatacagctgattcattagtaaaaaccctgatgctgggaaagattgaaggcaggtgataaaggggactatggttggatggcatccccaactcaattgacatgagtttgagcaaactctgggagatagtgaaggacagggatgcctgaagtgctgcagtccatgggatctcaatgagtcggacatgactgaacaactaaacaataacaacagtacttcaggaagtctatcacacaattggagtgctattgtcaaagaaaatttagagaagtgaatctgaaataggtatgaataaaatttttaaaaagataaaatgtttttaagtgactgtccaaagagaaaggagttagagacaaagtatagagagcaaaatagatattgtattgtgctttgttgtcttaccaaaagaagactagatggacaaagatgtgattgtttcaaatgttaaaccaccatatacttcccctatggaagctccatctacctgcaatgcaggagacgcaggagaaatgagttcaatccctgggttgggaagatcccctggaggaggaaatggcaacccactccagtattcttgcttggaaaatttcaagggcagaggagcctgacaggctacagtacatgggattgcagagtcagaaatgactgcgcaagggcacatgcacacacacacacacacacacacatatctgttattgttactttatatttttataccggagaggtatttctgttatttgtcctatgtacatttatatcctacctgtcacatcattcagttttgtaattatttctgtatcttattttctctccaaactataagtttctaggagatcaaagctttattgtatatgtgtatatatatacacacatatatgtatacatatgtatatatggttgaagccaatcgagctttatttggatgagccaaatggagtatcagaaaatgacctgtagataaagggttaaatatttgcagatgcatatatagcacactcagcatatatagctgagccactgcttcagttttcttgccatgagaaccccacaaacagtatgaaaaggcaaacagatatgacaccagaagatgagcctcccaggtcagaaggtgtctgatacgctactggggaagagcagaggacaattgctaatagctccagaaagaagctgtggggccatagcagaaactatgctcagttatagataggcctggtggtgaaagtaaaacctgatgctgtaaagaacaatactgcataggaacttggaacgttaggtacaagaattaaggtaaattggacatggtcaagcaggagatggcaggaataaacatcgacctcttaggaatcagtgaactataatgaatgggaatgggtgaacttaattcagatgaccattatatctactactgtggtcaagaatcccttagaatcaatggagtagaaatgctaatgtgtttaattctgaataaaatcttggcaattttccatatcagtaaagaagtttttcaagtactcacacaaatattttcccaagaaacagaacacatcgtatggcaattgaaatactgtagacataagtaaatattacagagctactaactattcctacaaagcaaaggaagggcacctgaattttgtgtttaaaaatatctaatccatccaacaaagatctactctgttccacaatgatagacatcatataaatgtcatatctttttatgaggcattgtcagtttctttctccttccttaaggaaactgcccataccatgttatctcctaagttccatatagagtcccacagtatgtgtcctgagctttaagaagaacctgtatttgaagtcgatagattttgtaaactttacttttgcaattttccatctattaaatgattattaactagatatgtctttgaacaactgtattagtgaagtagaatggcaggtaatgctatgacatattaaaaatcacctttatgaccgtgtctgagaaagagaaacaatttaatataatttcactcatccattcattcacatgtttttgattattttgtcccaggcaatgaaatgatcatgacaaaatttagaaagacagatttcaaatctattatgaatctaatatatagcttttcatattttaagaaagaagatttttataccatatattctttctgctatctacagaagttattgatatatttgctacaagtctcctcctgctcttaaactgtacagatacacatctgagagccattcaagtaacctactacaccctttggaaccactgaaaagctatttactttactctaaagagcagtgatctgcctaaagtgttcacatttaaaagtacagactt

SEQ ID NO: 25802 - DNA, 831 bp, Bovine  19866881206671
  misc_feature (1)..(1): n is a, c, g, or t
natatatatgatgtccttttagagttgaaattaaatataaaaaaatagactctacttcttaattggatatatattaaagagcttttctatttcaacttaccaacttgccttcttccatttgtactaagtgagctggactatatgaactggagtcactatggctcatatacttctttttgggggataagtgaaagataatctcggtcccagtgtttgaacttaacatttagttcaactaattagatcttatcaagatagaaatttcagctaccataccattataactttaacattccattttatgtgaacggaaaagaaactggttagaacaaatctcaacatcacctgaataaatcctgcttttgtgtgagtcactgaagtttttaaatgctatgttttggccacgaaatacaattttgcagtcttctgaggcgtccatgggcttgtcaactgtcacttttctgtgataattatggagagaaatacacagataaatgaaattcacagtgattcgggcagccccctatttcactagattcaattctcttcactataaaacctttcctggagctgccaagtcttaacaacatttgacagaattgaatttaaccttttctttctttccttgccatcttctggtgagagttattattgagaggaaaaaaatagtggccagagcaaaaggctggcaacatttcaaggttgacatgccaagtgttctttgactaagttgcttttagaagagggagggagaaaaaatcactcaaaagttctttcagttccattgctgtacatccctgcaaaccactgagtaaagcaaagagtcagtca

SEQ ID NO: 25803 - DNA, 1622 bp, Bovine  19866881353317
  misc_feature (1)..(1): n is a, c, g, or t
natgaattgactactgcaagatgcagctgtaaaacaagaagactagttgagtcatttgtttctaagaaaaaagaagacaccttcagggcataaagacactttgctaatgagataacaccctggctaaattaaaaacctcggctagcctgaagtcatttagatttgttctttgttcatttctctctgttccctcttctctcttctctccaatctgtcagtgacatacctgtatttacattcttttcatataacagtgagacttcacatgagatgcaaagcactgcatgtttttaagctacaaagagttacgttttgtcttaatataaaagaaaacctttgccaacagatctcttcttagaaagtatttcctgatggaccaattttcctagcagcctcattgactccaaaacagacaacgtgtgggtttctcctgcctcacttcataaagttcgtgagaactggatatggtagtctgccagtgtgagccaaagactgaacgcaatttcagggctacggatctatgtaatcaggttagatcaacaggagagaatatgattcagatagttttaggattcacttctaaaaaaggatttgttttttaaattgcattaggggttgtggaatttatggatttcacaccatttcttctttcacttgaggagttattattttaataacatgagaatctgagaggataaaaatagttcacaaattagtgagttataacaaatagcacctgctgtttttaattttctaagcactcaaagttacttagtataattgaagtctcttaaaggcacctgtcttctgttcaagttcccttttttgatggtaccttacttaaatgcagtgcagcaactgtttattaagtacatattgtgtacaaagctctgagctaggtaatcaagacggtaaaagctaagaaaaatgtataatgttaagaaatttcctgcatgcatatctatttatgatggcatttaaggccttgattcattagttacattttccctaccacactctatgctgaatttatttatttatttttttaagttaaattcttttaaataaccaaccccaacttcaccttgattcttgatttaaaaaggtttgtcattcactctgtaaatcatactgatagatctccttggttattgcagttcttccttataaaaatcaatacttcttctatctagtgaatttgatccttcccagaagtatatttgtttccaaatacttttatgcagttatggatgatattgtttttgtggtttgattaactattgagtaaaccaatgaatgacaccacccttatggcagaaagtgaagaactaaagagcctgtagatgaaagtgaaaaagttggcttaaagttcaacattcagaaaaagatcatggcatccagtcccatcacttcatggcaaatagatggaaaaacagtggaaacagtggctgactattttttgggctccaaaatcactgcagatggtgattgcagccatgaaattaaaagatgcttactccttggaaggaaagttatgaccaacctagacaatatattaaaaagcagagacatcactttgtcaacaaaggtctgtttattcaaggctatgaattttccagtgg

SEQ ID NO: 25804 - DNA, 1092 bp, Bovine  19866881428191
  misc_feature (1)..(1): n is a, c, g, or t
naattcaagtttcatttctaattcatatgttgaatctaccaagattcaaaaagattcatcacatttttatcctatttaaatccaaaatgaaagctgttacacatattaaaaaaaacgataaaaaagatgataaacctgttctccaattacttaatttagaatcttaaactttaaatataaataaatcaattaactccttttaaaatattttttaaagtcacacatcatagtttattcctgtcctgtcacatacatttcttgcatagaagatttgagttctcgtttagaaacactggcaacttattttaaaatagcctgtttgttcttctctagttagatgtgcgagacacagaaatagaacactgtgtgatggaacagatgctatagcaatggtgagtttatatatggatgccaatgacagatgccaccttatagcattagccaataaaaagtatgggtgttacactacttaacaattactcaaatgagctgggctgtgggcaatcccaacagcacaatctgactctcatatgctgtaagtgatctcgtgttgtggatataataaatatccaaaattaattttaaaagaattaataaaaaatgtatttcaaggcaggtatatggatcacctcagttttttgttccccaccctgcttggggaagtgctttatcctctatggcaagaagaaacaaactaaaaataaaatttaatctgaacagaattcattggagatagttgagtaactttgaagattaaaccaagaacacatgttttcaatagctattagttatgagtcagaagtatattttctaggattattttccctttttttgaaaacttacaaacatgaacagttgaaatcctgttaaaattaattggagggaatgtccagtcattttatagtgagtagttactctacatcactgaacatgaatgtgcatttaacgtaaagtagttttatttaatttgaatgtagaggtattctacatagaacacttttgaatctgcatatgtaaaacaattaaactgaaaatcagtcaatctattacagtcatcttatagtcctgccagaattcaattttaccaggttt

SEQ ID NO: 25805 - DNA, 992 bp, Bovine  19866881498161
  misc_feature (1)..(1): n is a, c, g, or t
ntgatcttattttatatacaccccccatatatatatatacatatatatatatatatgtatcttgataaactcaattagatatattatgtttcaataccctgaggggttgttcttgtcagtactcacatttttccacctttggccttgtggaaactttttcaagggagcttatgatgcaactccaggttatctttgacagcatctttactttcatgtatggcaacatattttgtacatttcctagactcaccatatgtctcttaagaatatgaatgttatcatagataatgattctagaaatatcacatttaaaataatgataaaatagtattctttaaaatataccccatagttgacctttgctagtgcaatcattctaatttgaactaattaacaatcttatatagcagttattttccagcctatgatccaagttagaatcatacattgcatttaggtgttatatctaaagaatgttgcattttaaagacatacagcaagagttcaaagcaatatttcaaattctaatttagggtttcatggggattttggattctgtttttcttttaacctagtatcttaaagtcttacatctgaagagtttgtctcctacatggaaaatttggttcccaagagtaacaaaaggattactcatttgtttgtacttttttctttagatggcaaatgatattatttttcttatttttgtcatatattatcattattttgctctttaagatagactgaatcaatagaaaggtttcaaaaattgtagtctttaaaaatttatacttctaaatgtttttctaacatctgagttctttctatctcttttatttcaaatcttactgctgtaattttacatcagttgcttccagttgaatgataaaacaggatgaagttaaagttgctaaggcaacatttgatccctaatcccttgcacagcctcagagcagaaatatttgctcatctagtgaatctcttagtagtgt

SEQ ID NO: 25806 - DNA, 968 bp, Bovine  19866881772682
  misc_feature (1)..(1): n is a, c, g, or t
ncaatctacagtcaagcctgaagaaacctgagcaagggtgatcccccattacatactgaatttagaaaataaattgtacctgaagctaccaatgggcataggggacttctcggtatttggttttctcttcagttaagacatgttaactctcattacctatttggtatgtgcatatcatggtgaaaacaagttcgggttcataagggttaattttttccctataaggaaagtgtgttttcttcctcataagctgttcttgactttgacataaagtactatcctgtttcatgaagccactgagaaagatccaagttttaaagggcaagtcaccacactgtggacaaaataagagttttttcaaatgaaaaagaagcatgcatgatcaagtttcaatttaaaagaaaaattaaaacagaaaaaataatccaagtgcaaactgctttgaaatgacctttctgtattggttctatctccaaacagttactttcttgggcactatttattatgcatttaaagttaacctgtacattcttaaaagcaagtatgtaatagctattatatgcacacaacatggtaaactaagtcctgtcatcttccacatatgtccaatgaagttcatatggcagaacttatacctaaagaatctttagaaggcagttaaaagcatgccaagtctcatcaaagtttacatttgaatttcatataacaagagtattatttttctcttcagagagacagagtcatgatagagtagcagataaacaaagaaatatcccctgatgtgagttgttcaaaaataaaatttctgaaagcaaaatgaatatgaaatactacactgcaagtaagacactctctgagtactaattatgtatatccagtagaatataacttcaaatctttcatcattgccagaagttttaaaattctgagaggagagaaatcaaacttgaagagaaataatctccata

SEQ ID NO: 25807 - DNA, 1711 bp, Bovine  19866880399637
  misc_feature (1)..(1): n is a, c, g, or t
ngtatctgaggttgttgatatttctcccacaatcttgattccgcttgtgattcaccacccctgtatttcacatgatatattctgcatgtaagttaaataagcaggatgacagtatacagccttgacgtacacctttcccaatctggaactggtccattgttccacgtaaggtctaactgttgcttcttgtcctgtatgcaggtttctgaggagacagataaggtgatctggaccttgtgttacttgtgttcctgtttaaagacaatttacttaacgtacattgttgactcactaacattaagctcacagccagcaacgctctaactcacttctgaaggaaccttatctaacacacatgttttctccataagacacatcacagcattcttgcacttaggatccctagagagcacttcatgtgcttggagtcattttcaacagtgaaatcgtcaacaaaaatcactaaaatgagaaaaaatatggcattaaatagacttaaaagaaagatgattttttcataatatgagagctgagaccagaaggcagaatgtcatctagtttgaccttagcaaaccttaggaacacatgactcaaatttctcaccactctgtgcatgtccacaaatgactatgaaatgctacaaatattgatctgggttgcaaataaatttaacaagtaaacaaattttcaaacacagaatccatgaaaaatgaggtttactataacacacacagagagagagagagagagagagagagagagagagagacagagatgagagagggggggagggagagtgggggagagagagactgcttttctttctctgctgggatttgagtcacaggctttagctccttctctgctcttcttatggtttgaatgttcagttttgtttgtgtgagatatttcaagcttccctggtggttcaggggtaaagaacccgcctgccaatgcaggagacatgaatttgatcccttggtcatgaagatcccttggagaaggaaatggcaacccattccagtattcttgcctgggaaatcccatggacagaggagcttggtgggctacagtccatggggtcacaaaagagtcaggcatgacttagtgactaaacagcagcagtaataacaatgagatatttcgggatcctttctatatcctcccccgctttttgttttaaccgaagctgatgcagttggagttctgttgcttccaaccaagagttcagagttagtatataaagctcttggcacatagtaggtcctcagtgaatgtgagtccttccctcatggaatacagggttgactaaaggtaaccaatgagtgtatgttgtagggagcaacagtggttaagaaaaaaaggctttataataataacaaaaaattgagagtgacatatttccaactcttccctttatccctaccagcagcagtcacttcttgccatgttccagtacagatggaaaagtcaccgaattacaaacccagttgcaagctatttttggtggagttgtggtgtgtgtgtgtgtgtgtgtataatgtacgcattgggattcttggccacagcctctgtttgtatcagctgtcagcaaatcagaggcgccatacacgtttgtcataattcattacattaattaaccacgtttgagaactgggcacaggccagaggggatgcgggggagggaggcctccacattgttgtgtctgaa

SEQ ID NO: 25808 - DNA, 700 bp, Bovine  19866880538056
  misc_feature (1)..(1): n is a, c, g, or t
nttcacgggtcacttggacaggccctgggagttatagcatcgttcccccttccccgccccccgcaaaccagggctggggctcttgtgagggcatcacaggattctcacctgccttctgtcttccatgctaaaaaggtgactttcagagtcaccattaccttttgaaaactggcctgccagaccctttgagccagtggttcagcttgtgccgggctggcgggtctctgtctgtgggtggaccttgtaatgagggtctggcttccacccacccaggtgtccgcccaggaggtcaggaaggagagcccgctgcagttcaagttccgggccaagttctaccccgaggacgtggccgaggagctcatccaggacatcacgcagaagctcttcttcctgcaagtgaaggagggcatcctcagcgacgagatctactgcccgcccgagaccgccgtgctcctgggctcctacgccgtgcaggccaagttcggcgactacaacaaggagctgcacaaggcggggtacctcggctccgagcggctcatcccccagaggtcagccggtgggcctcgagggtggcgggttagcagggtcagcaagcagggctgtgggggggtttgggttctctgcagggcctggactctgtcaacagcccccgctgcagcgcagtgctcccccgggccccgatccccacccccgaatgggg

SEQ ID NO: 25809 - DNA, 1697 bp, Bovine  19866880538989
  misc_feature (1)..(1): n is a, c, g, or t
nagctttgcctgtgagcttgtgtgcgcgccgcccggaaaggtcctcctctgtgtgagcaaagggacaggttagtgatggggctacaggttggtgatggcagccgggggatgcccaccggcccttctcagcaaagtggaaagtactttttctctgcaacttcagatgaaaatgtgccccgccggtgagtaagggagaggacctacccctaacagcaggtgtggacatgctcaggtgtcctccccaggggccgacaggcctccaaaagcctggggcttcttccctgcagtttggaagtaaggagaggacagctttgggttgtttcttccagaagggggtcgaagggcttaatatatcactgtggctgcagacaggtgaagggctaggctagcttgcagagaggagttgccttccgtgagaagagggtgccgtggacagggttccttctaaggctaatcgaaccatgagactggtttctccccagtggtctcagaggccctgggagcgtgtctggatatcctggtagttgcagcattttgggagcctcgctgccccaggaaaagccagcactctgagcaagactgaaaagcatcgccctctagtccctccgttaatgagatcatttctgaatcgctgtttgtttgggttaagaagatattctcctttaagaaaataatcctttcatgattgacgccagaaacaaaagcaaaggctgtacccagcccattttgagacctgtaattttttgtttctttagcagatctaaatccgatttaaatcgttgaaatactttgctgtattatcgctcagttgtaaaaactaaactaccatttatggtgggtaaggaaatggcaacccgctccagtactcttgcctggagaagccaacggacagaggagcctagcgggctacagtctcatggggtcacaagagtcggacacgaattagtgaccaaaccaccaggcagtttcagagccagttaagtcacctgccaccatggaaacactgtttttaatggtatgaatgttagggcggtcacttactcaaaccaagcctggcacctcccaggaagcggtcgttcaccccgaaggtggcctggtcccaaatggtcagttctaggctggactgcctcagctgcgaaggggtgacgcctttgaaaatgaaggaatgcttccactggggacaggcttgcttcttcaggacgggggacttgagtctcaacctctgctggtctggcagagtgagacagctgcacagggaaacagattcaaaacccgtaagctcagcccgccatgtgcccccgctccctgttgctacttgctccttggagagaccacgtgttcggaaagtgctcataaacccaccgcagaacagaaattgtaagcaaggagcgagcgtgggaatttcgagacctggctctgtgatctctcactgaggatgttccaactttcagggtcgaattctgctccgaggattaagagtgctttgggattctaggccacgtggccctagtcttaatctgcctcctttggtgtgaccaccaccaggctcgtcagacctgctacccagggagcagcactctgtacacacattatctcttttaaccttgttctcagacaaaagaaatccaggagggctaagtcagtcgcttgctcaaggccgtacagataagtggcaggcttaggacacgaacccagtt

SEQ ID NO: 25810 - DNA, 1268 bp, Bovine  19866880603583
  misc_feature (1)..(1): n is a, c, g, or t
nccctcttaagtgctctctaagaagtgaaagtgaaagtgttagtcactcagtcagtcctatacgactctctgcatccccatgggctgtagcctcccaggctcctctgtccatggacttctccaggcaagaatactggagtgagttgccatttccttcttcaggggatcttcccaacccagggattaaacccaggtctcccacattgcaggcagattctttactgtctgagccaccaaagaagccctctctagtaccccaaatactcaatgagagaccgcgggcagcagcctggtcaccagcaggaagaaacgcgggaacttgggaccctgcccgggtgacgccaagcgcgcctaggctctctgtgacctgtcctcctcacttagtaatggccttgcgtggttccagaggtgtttcttaggtggcacctttgtctttctggagggagaataagtggaatgatggcttgctccagtcactgaagactgtctacaactggctagttggaatagaacaggtaacggggggtgcttgcccccagagtggtcacagcataagccctgctgaatggcaatttgtaccccagtattatcccaaggaccccagtggcctttcagacaccacctcccctggactttgctgggtcctggagtttcataaacattcacttctttatgtagggtttagagcactgaggttcatggaagaaacaacagtttgtttttaatgctgaaagagcccagccccagctctggaattctcccctggggctccctctctgaccccacaatctcaggtgtcccaagtgccccaatccttatgcattcctggcggcccagcaacgcagaatcaaagagggagccacctcctgcgggctctggaatttcaaagccccgttcataaaagagtttataggagtcctgtggtctctcccaggctacccggacccattgtacttctccagagctgttggtacctcgtaaacagctctcgctgttaaagatcacctatttaacatgtgcagcagcgctgagagaaacactatatatttgctttttctcacttcctgtgggaagggtggggcccaccgctgactgctcttctgcagttgctgtgactcactgtaggagagagggcctttagaagggagggaagtgatttgtgtggtctttggaatgcaggtatgggctgtaccttcaggagtgtttgctgataaaggagcgtcttgtcgtgagaggcaaacctcttacataaaagtatgcagtgtgtg

SEQ ID NO: 25811 - DNA, 1781 bp, Bovine  19866880671446
  misc_feature (1)..(1): n is a, c, g, or t
nggttccggaacctggagttcatcatccgctggcgcaaggagagcatcggggtggtgggggcgaacggggcgggcgcgcgcgtggtgaaccgcggcggcgcgggggtgcccaccgtggggctcggggtggcggcggggctgcgaagcgggctgtctgggcgggaggtgcgaggctctcggggagctgcccgcaggtggagaaagaggccgcttcaccggggtggcgttctcgtcgtgcggggagcccactctggggggcgccagcacaatgactggctccgtctcccccttagcgagggtccggtccacgtgtttgccgcccctggggctgaaggaggagggccacttaggagcagaggaagactgcgggtccttgtcctttcctcccttaaagaacatcacgtcttcattctcctcctcggctgacactgactgctgcgatttggacggcaggggctcccttttggctggcgaggcctgggacgccccatccttcctgcccgcccactgggggcctactctgcccgggaccctggtgcgggcgtgggggtgcaggctgccgggcctgcccgcgggcctgcgcaggtgaccatcgcccgcgcttcctgcctgagcgtccacctggcggtgcttgggaagcgatggggtgccgtccttggcaccggccgagtacgcgggtgctcggacgcccccggtccccgcttctgcgctgtcgtcgtccagattctggggagacgccgcgcgggaggactgtccgcctctggacgagtaagagtctgagaaggaggcgctttcctgcgacgtggggtgcggacggccagcctcggaggggaacgcaggctggggtctggaaggcggacgccccacttccttgctccttgggccgtggggttgtggctgggacgccgggacggccaaggagggtgacttttccagagcagcggacccggcacccatcctttggggccccgtgggctcctggtggtgtggggaccgtggcgcaggtggccggccacccagctgcgttttgggagacccgccctccgcaccagcgtctgtgctctgctgcgtatcctgagccttagaggacggaggtttggcctgagggggcaccccagcccaagtgcccgtggatttggggttctctgggaggggctccttccgctgcaggctcgcccctctctgggggcctcttctcagatggtccgcgccccgggaggcaggctgcctggaggaggaagacacgtgatggttcaccacggtggcaggaagtggcttttcgtcttcagcctcctcttcgctgtcttcttggcctccggggccgcgccgatggtcagaagctgggtgagaatccaccctcgggtgaacccggggggatgcggtggacggaggggagctggaggggtgcaaccggggtccccggccattgccaaacctgtgtggatatctgccgtgggcagcgaagggtctgtttctgagcgaactgaagtgtccagagaccggcgggcctgcgggtaaccgggacctaaatgttggggccgtggctgcagccggcctccctcgctcttccgtatcactctcaccatcgccatcggagccgcctgctccctcagaggcctgtgtcctcgaggacggccgggtggaccctgacggcgcgttggacctggcggccggcgcatcctgaccatccttccagccgcgggagagcggagacccgggctgtggttcggtgatcaggagccgagatgaccccccaggagatggagaaagtctcgagggtg

SEQ ID NO: 25812 - DNA, 1053 bp, Bovine  19866880717487
  misc_feature (1)..(1): n is a, c, g, or t
nttgttttgatgacctcccaaagcccaccaggggcttgcctccaagactcaaaatgggcttatcctgggcactggccaagggtttggaatggcgcccctgtccgaagagcgggaggccgtcggggctcaccacgggagtccctcccagatctgaaacaaaagcaaataaaagctgtgcagccaggtgaaacaatccagggaagtaaaaagcaagtggaaagtatcttctcaatgtcttatattctataatcaataaaaggcaaagaaataatgaaaaggataccagctgaggtcacagtacctgctactatccagaaacttctgggccttttatattgtccattactctgcactagcttataaaagtatataaataccgcattacctgcaataactctaagtctctaggaaggaaagtgattctttccctgtgcttactcctaccactacggacttaagtgttactttggaccagtgatagcaaagttattctgcaaagagccagagagtaaatattttaagctttgtgttgccactattcaactctgccactgcataacaaaaaacatagacagtaaaccaagaaacgcatgtttctgagttccaagaaaccttcgtgtatggagagtgaactatgaatgtaatataatcttcacatgtcacaaatattattctgtgattttttttggcagtcatttaaaaacataaaagctattctgagctcacaggctatacaaaaacaggcagcaggcagggtttggctttagaagtggtgttgctgaggtctgctctggactgcccaatcccaagaatgaagtcaagagtcacctcctctagacggtggagtctgtaggaagatagctggatcaggggaagaagctaagctccaccccttccaaggcacctcatctccacgaggttaatgaaactggaccaagggcccccattaaaaatgaggaaaaggaggaagagagaagttgttacgcttcagatgactcagggcacttttgttccatgaggaccattctcacttacccacaatggttcgaccat

SEQ ID NO: 25813 - DNA, 912 bp, Bovine  19866880818185
  misc_feature (1)..(1): n is a, c, g, or t
nttttctttaccattataatgccgcttggacacaaagggatgaacctagaacaaaatcagcagctgactcctccgtgccaggcggagtgtttatgctttgccatttcatccttacagccaccctgggaggtaaggctttcacagctgagaaaacctctgagtcctctgctccggaagacggcaggagatcctggttcgcacagctgtgttagaacccgggggtgctggatggcaaagccccttctgtgtctccatactgttgaggcccttgccacgtaggggtttggctggcttctgtccttccactcagttggttcttaccacttaactctctgtaccacaggaatctgaagacgcacttgcagcatctcaggtggaaaggcgcgaagagtgtgagccaggagtacaaagagaagtcctgtgcccgctgccagcagaccctggggctcctgctgaaccggggggccgtgtgtcagggctgcagccaccgcgtgtgcagcgagtgccgggtgttcctgaggaggacccgcgcctggaagtgcaccgtgtgcttcgaggacaggtgaggatgggcggggccggccaggatgggcgtggccagataagatgggcggggcggtggggcaaggatggctggaaagcctcgaagatggtccaggacaacaaccgataaagacagctgtcattcttcacacttaataggaaaatgttcagagaatgcttaatatggagctgcctttctagacatggaaattattgtaactcaaaaacacattttgctatatgaaaaaaaagttttgtttttaatttacaaaagtttgtaatggctgctgctgctgctactaagtcacttcagtcatgtctgattactgggcgaccccatagacagcagcccaccaggctcctccatcc

SEQ ID NO: 25814 - DNA, 2334 bp, Bovine  19866880827758
  misc_feature (1)..(1): n is a, c, g, or t
nccttgcccttctgctactgctaagtcgcttcagtcgtgtccgactctgtgcgaccccatagacggcagcccaccaggttcccccgtccctgggattctccaggcaagaacactggagtagggtaccatttccttttccaatgcatgaaagtgaaaagtgaaagtgaagtcgctcagtcgtgtctgaccctcagagaccccatggactgcagccctccaggcccctccgtccatgggactctccaggcaagagtactggagtgggttgccattgccttctgcccttctactagatgaaaatgtatgcaagtctgtccctgctgaataagccgtcttgaaagaagccagccctgacccctgaggctaggtaggccccctcctaccctcactcctaaatcctgtgcttctttttatcaaacctctttgaattgtaattatctgcccatggcccccaggggatccctgagagtagggaccgctttgtaaagatctttcttaaccttgtgaattctcccaagtgttggggattaaatgaaagaatgacaggatgggagagacagcatggggtggaaaagacagacaggatttggaggaggcaggtgtggtgggggttaggagttgagggcagccagagacagggttgggttgagcagactgtgcgacctctggggtaaatacaggtgctgggtgtatgtggatactttagtctggagggcgggggagaggctgggatagagaaccagatgggggccaccagtataaatggtgaggggcagggactggagccgctgcaatggttgtgcagaggccacgtaggaagtgcaggcagagagcctgggaagcctcagcactcatggggtgggagaaaacacgataaatagagcaggatctgtgaggtctgagtggttccagcagaaagaggaagaaagctgtaccaggaggcttgaaccttgggtgagaggccagtaagagacctgagcactcaagtgggttgactgtgtgcctggccctgatttgtgctttgcgtggatcatctcaggtgagctgcagatcagtgttaggataaacctgtttttatagatgagtgaattgaggcacagatgggctaagctgcccaaagatgtaggggaaggaagtgaagactcagggactctactccagactccatcccaacgagagagagataacctccaagtgcaagtgaggctggaagagtgtccccagggatggtattagagagcctcaggccagtgtctgtgatgagggccctggccaaactgcaagggaactggtgagtcagcaatcagtcaaggagacagtgagtgactgtttaatgaagtacaggggtgcttgcaatttcacgaatgtatttgatatcaagaaataattgccagtttatacttttacaattttaatttcttttaaaaatcatcttagctggtttggggtagcctgcagggtttgagagcttctcctgctgccaaaaacatggagactttgccctacatcccacgcgtagtgctctgatgtcccaaactgggctgaagaagcggcccgggtggctgacctgacggtgtgcactctgctggtggcgtcttattctcatcatcggaggaatgactaatgatgtcactgtggaacctcccagtgtcagatccatgactgatgatcgtggccttggaggcctgcagttttcttggcctacagagcaaatggacagtatagtacgaaggaccgcagccagcttcctgtttacagtgggaggcttaggtttcataatcctgggctgatccaatgcagcagacattccaaaactcaatagatttcttgttctgttcattggatttttgttctatagagttttttcatggttagggtattcatgagaatgaaactgcccaggctatctgaatgttaacatgccttctgagaaaaaaatcagtggataatggatttgctcctgttaataaagttttaaaggctgtatcaatcctctaacatgaaatgtgggaaagaatgaaaagcagcagaaaaagaagcatctgtgaaaagataggaagcatataaagctcagactagaaagccttctgcatatggaagagagaagcttatcacagtatttttttccctgctgacctatatgacatacattaatgatgtgaagtgacatgatcttagttttttgcttcttaaagaaaatatactccatttctacaactagatgattaaatacaacaatcttttttacaaccctcttaacatgttttggagatgatgtttctaattttcagaaattaatgtgaaatcaggaagcaagatcccatatactgagaa

SEQ ID NO: 25815 - DNA, 1051 bp, Bovine  19866880899697
  misc_feature (1)..(1): n is a, c, g, or t
ntaatgcaatacacttaaaaaatgggtgagacagtaaatgtgtattgtctacaattaaaaatatatgtatttagataattagagctggcatctggattcccaggtggctcagtggtaaagacttcacctgccaatacaggagacacaagacacataggtttgatccctgggtagggaagagcccctggaagaggaaatggcaacccactctagtaatgcttgcctggagaatcccatggacagaggagcctggtgggttacagtccatgggggttgcaaagagttggacacgactgagcacacacacaactacaaatttcctaaaatctggcacacctgtctctctgatgagctgggtcagactagaacgtaagtccctagtttattatcacccccatcaaccatcaactcacgctcagatctatctccactatacctccatgagagtggaattgtgtctccactgtaattgatctacaccagatcaagctacagacttctgggaaataagaacaaacagaaaggggcctgcatgtgcacactttttaaaagacctttaagctttcctatttattgttcaacaataatttagcttaaatggaaaagtatattactggcataacaaaaaaaatcagagtaaataaacaaagatgcaccatttacttctctgcaagttgctgatttttactttgtaaagatgataaacactagctcactctgcttactcactgtccaccatttaggaatggaaacggatacattttggttaaaaggcaaaaactttttttccccttacttcttctggtttataccctataatttaattcatggtcaacaaaagattaaagtctgccaaagaaaattacaatgagtagaagcagttcacgagtacttaatggaagttgggggcaaattaacacactgctgtcatagcgtgtgtccgacacacgtccttacttgcacaagcgtgtccagggtaaagatgtgctccccacgaacgttgtagaacttgaccatggcactcttcagaagagggccattggggaggtca

SEQ ID NO: 25816 - DNA, 815 bp, Bovine  19866880922613
  misc_feature (1)..(1): n is a, c, g, or t
ngtatctgatgagacagctttcctaagacatcagggtcaggcctgttggacgtttgtcgccagttttgatgatgatgtcatagtttagaagatttccagtgttatgatcttgacaacatatgcattttagataaaaagtgccttagagttctctctagtaccccttcttgttaacttgaatatgatctcaataggcttccaatctgtgcactttcccccaagggaaagcgtgagactctacaccctggaaaggcccttcttggcactgagggacaagtagccattgaatgtggacaacctgactattgatcactgatgcttttagagaaagatcttgatcaaaagagggaaatgtaaaaagttaataaacaataacctcagttaaatagacttgggaggatagaaaggagaactctcacaatctgtgatgatcagttcagttcagtcactcagtcgtgtctgactctttgtgaccccatgaaccacagcacgccaggcctccctgtccattaccaactccctgagtccacccaaacccatgtccattgagttggtgatgccatccaaccatctcatcctctgtcatccccttctcctgccttcaatctttcccagcatcagggtcttttcaaatgagtcagctcttcacatcaggtggccaaaatattgggagtttcagcttcagcatcagtccttccaatgaacacccgggactgacctcctttagaatggactgggttggatctcctttgcagtccaagggactctcaaaagtcttctccagcacaagagttcaaaagcatcaatttctttgg

SEQ ID NO: 25817 - DNA, 750 bp, Bovine  19866880929781
  misc_feature (1)..(1): n is a, c, g, or t
nacacttaataaactgggttttttaatagttcttagaattgtacacgtcttccaccatccaaaataacacgatttcgatgctgtgatttatttcggtcattccacagagaatgggcactacgcaaacgagccatggaaacgccgtgctcggccggtgtacttacggtgaagttcatttccttgatgggccgcttcaggtgttcgaatcccacagtcactgtatacttagtgtaattcaggtagctgaggtgagccacgatgatttctgcacatttctgcaaatgcacaagcaagatctgtgtccttaaagcacgcaggactcactctcccccaactgacttgtgaggtgacccattccaaccacagaggatcagcacggagcatctccagggagctcgccaggagcccaggggaactcaaatggcagccaaaagcagttcttagaaagaaagaaccaaatggacatatttagaaacaaataacacatgatttacaatcattagacctcctctacttcataggattcaaaatagtatgtcaccttgagaatagactactggttgccaacgggcgggggaggcatgaaagagctggactgggagtttgggattggtagaaggaatgttatttgggtttccctggtggctcagatggtaaagaatctgcctacaacgcaggagatccaggtttgatccctgagttgggaagattcccctggagaaggaaatggtaacccactccagtattgtt

SEQ ID NO: 25818 - DNA, 1485 bp, Bovine  19866880940813
  misc_feature (1)..(1): n is a, c, g, or t
naccttattatgtaaccttgatccctagatgcatgtcaaaaagtgtagtccagttatttcagggatagcatttccaaggtctcgggaaatgttttttctagatcttttgactatttttgttggaatagtcaaagaaaacctgcacacatagtaagggaaatattttattgtgaaaagaagaaaatttcatgaggttctacttattgcagtgtagattccccatgtgctaaatttcttgagttacagggaaatgttcttacaattattttggaggttgggaagttttctttgtcgttactaacactgtaggttaaaacatttagtggacagtgtgtgtctgtttcctacattgatttcatgttaaaaaaacttcgaaagcttatttttgttgattgcccatgaatccaggtttattacacatgtcatgtgctttgtactaaataaattctgtgttcttttggtcagatgtgcttcaattgcctgagaccaatgttagtgattttgattaaagaaaagagagaagttagaccggtctcttaattcagatttttatatttggttataactggtatgaggcagacagtgacttaaactgtcgttcttggagatgtgaaacggtggcttgacatgaaccgtgtgtttcagaaccgggggtagtgtactttgtgctggttactgcagaaaacagcaatggagtgagccgtcctgtttacagagcggagagcctgcctggtaagtcttaccttagaattggaggctatgtttttgtgacttagactgggaaattctttgcttcttcaggtcaatgcaaatctagaaatcattaaggagttcccaaacaagaaatttttagacctgtatagcaagctgaaagattgaaaactaggagaaattcatcccttcttctaaagtacttttgatataggttactagtgctttgtcttaagtttgggggtactcactacagttaaccatgtataaaagaccgaaaatatgtgttgtccatacagtttaggggtcaggtcacttggatggcctgagcagatcctttggaagattgttgagaagaccgttgaaatgtacattgagggatgcagtgaagtgtggaaaatcaagtagtcctcctttctaacgatcaagttgcattttcctaatttaggaggtgaatggatcaagattgatggttttcccattaagggtccaggaccatttaatgaaaccgtcacaggtactacttgctcattcggttcatgtcttcactgaagcaccatctcgaaagagggctgtgcttctgtcacacacatgtgctcacaaaccttcatttagttcccattgctaaactaacacacacgccgcacgttttggtcgatctgcactgcactggatggaccagactgcagccagtattgctcattcctcacggctctttcatgttctggtgtggggggtatgtccttgtctacatctggggatgctgttgctctg

SEQ ID NO: 25819 - DNA, 741 bp, Bovine  19866881002373
  misc_feature (1)..(1): n is a, c, g, or t
natgtggggtctcttttggtaaaaacaattcacggtggctgctcgatgcctgtaatgttcagtgaaagtgcgtccagtgttgaaaggcagctttcggtaccttggaccaggattaagaaaatgttttcaaccttcccacccatcctcctatgtcacgtgatgttaaagtaattcacgtttgcatatcaccagagacacgcaggttggtaaactctcagcagggcacccagagcccagggagccccgcccggtacccacagggctgctgtccccaccacctctcgtccggggctccccccgtgcccctgtggttagagcctgatgctgtgcagcaccaccttcctgggtgacccccccagcccagggtctggcctgcactgttagtggtttccaggcctccgcagggctgcaggtgcaggcctgggttcaggtcacgtgctcgtacctcattttcacccggcacttctgttcccgcagatggtccggcagcgtaccccatcccggtgcagaacatcaagcccctgctcactgtcagcttcacctccggagatatcagcctgatgaacagctatgacgacttgtctcccaccatcatccagtcagggctgaaaggtacggagccgcccgccttgcgagctgggtgtcactcccaggcctcctgaccactggcctctacagggcttaatggagtctgtccgtgaaggtctttcctctcgctcctctgcttgtctgaccagtcga

SEQ ID NO: 25820 - DNA, 1340 bp, Bovine  19866881487397
  misc_feature (1)..(1): n is a, c, g, or t
nagaaagtgaagtcgctcagtcgtgtccgactcttagcgacccccatggactgcagcccaccaggctcctccgtccatgggattttgcaggcaagagtactggagtggggtgccattgccttctctgagcaattgactgtacttggccactaataatcctttgggctattgcttctcattcatattcatggggagaactggctggctttctataaaggagttgaccctttagagctcgactctcagggaatctgttgtggccgtttggctggtccatccttgtttctcaggttattactttacctgtgtaaaatacaggggccatcaagttgggcttgagttttcttggccagtgaagtgatgctctggggcatcctcacccaggaggcttctggaagcaacatttatttcatcattatttatagctctctaaaagaggaggaataactgaagcccacagcaaaagtcatagaatctctcctatacccccaccaaacggtaccaaagaaaacagacatgtgttaacaaggacatggaattttcctgcactacagatgggcgctaaaccgctacagtcaccatggaaaatagtttgaggtgtatactaacactgaacatgcacgtaccttttggcccagcatctcctcttaggtatgtgcccgacagacatatacatgtctgtcaatgggcgcgctctaaaatgttcatagcggcacaatttgtaatactcctgaaccggaaggcagccaaatactcataacagtaggacagataaatttggcttgtcccatactagaatgggcatcccaggttatgctagtggtaaaaaatctgcctgccaatgcaggagatgcaagagatgcgggtttgacccctaggtcgagaagatcccctggagtagaaaatggcaacccactccagcattcgtgcctggagaatcccatggagagaggagcctggcaggctacagtccatggggtcacagagagtcagatacgattgaagtgacttagcatgcgcacgtgacatgtactttctgtgtgtgtgttatgcttcattagaaagctctaaagaacaccagctcctgtgtctcattgactagatcggggccccttgtcctttcttgaacacaggctggcaaggggatggcatcagactttagcaagtgtgagtgccccagaagctgaaggggagcccgttccccaagacttagctctttaagggactcctcccttgtgttagaagaagatgtggagaatggatgtcgggtaggcagtcagctatgtccatggcatgaagggtaaagggtaaagacaatgaaggacaaaagaaagtgaaag

SEQ ID NO: 25821 - DNA, 2612 bp, Bovine  19866880255103
  misc_feature (1)..(1): n is a, c, g, or t
ntcttgcctgttctctttccttttcttttatgtcgttagttagttagttagtcgctcagtcgtgtccactctttgtgaccccatgaactccagcacgccaggcctccctgtccatcactaactcctggagttcactcagactcacgtccattgagttggtgatgccatccagccatctcatcttctgttgtccccttctcctgcccccagtccctcccagcatcagagccttttccaatgagtcaactcttcgcatgaggtggccaaagaattggagtttcagctttagcatcagttctcccaaagaacacccaggactgatctcctttagaatggactggttggatctctttgcagtccaagggactctcaagagtcttctccagcaccacagttcaaaagcatcaattcttcggcgctcagccttcttcacagtccaactctcacatccatacatgaccactggaaaaaccatagccttgactagacggacctttgttggcaaagtaatgtctctgcttttgaatatgccatctaagttggtcctaactttccttccaaggagtaagcgtcttttaatttcatggctgcagtcaccatctgcagtgattttggagccccaaaaaataaagtctgacactgtttccactgtttccccatctatttcccatgaaatagatctatgccatgaccttagttttctgaatgttgagctttaagccaactttttcactctgctctcactttcatcaagaggctttttagttcctcttcactttttgccataagggtggtatcatctgcatatctgaggttattgatatttctcccggcaatcttgattccagcttgtggttcttccagtccagcgtttctcatgatgtactctgtatataagttaaataagcagggtgacaatatacatccttgacgtactccttttcctatttggaaccagcctattgttccatgtccaattataactgttgcttcctgacctgcaaataggtttctcaagaggcaggtcaggtaacatcacatattaaggtttctttctgtttttggtgtggaagaaactggcagaggttctgatttgacgattatgtctttagttgggccctcagagcaaggataaggatagggatatctgggataaggataataaacagagaagcaatttggatctttttcttccatactttgaattgctcagaaaagtaaagatactgatttcttcctataaattgttgattgctaatgataaacaatttcctagctttatttccattggggatacttctctttaggatattacccccccaccccacccccacggtagtattcatggatggaattatatgttcatttttaactccttgcattaatcttgttaaaatgtgttgatcgcattcatattgctatgaatatgtttttcatatactttatacttcaaggaattctgaatcactttattaaaatcatatgaaaatgataaaggaagtgttaacttaatatttcaagaaattccagatcactttattaaaggtcatatgaaaaggattaagaattggcgaccacaggactatggggctagaagtcatctttgtaattatgtgaggcttctgtgtttaccaagacatctgtagtcgtttaagaatgcttctatgaaaactgtaatacttatttgaatttttcatgattgtttataaagatagtaatgaaatccaaccaccagaaaaaccaaacaaaattaggacagatgtcgtattgctagttttcagttctccttttccaccttttttttttttaatgtcttgttgataggaaatggcagcaagggtactacaatcatcttgagtattattattattattatattctgctttgcttactatcctaaaaacttttatttttctccccacatcgttaggggaggacatttattattttgaaaatttcaaggagatttgaaagtgagtgagagatattcagaaatgaagttgcacgcccaccaaaacaacttacgttttaaaaaatgaagtttttaggtttatagtttcagattcactgtagaagaaatgtgttgtcattcagtgaaatgatatcatctttctgtctttcctcctccccaatgggcattgtagctttgttatgaattctctgtaggctcatggtgaccaaaaaggaatactgaaaaaggggaaaatgagaacacagaagaaaaaaattcagtaacagtgaatttctgtgtcatagttaagagtgggcagaaagaaggagagttcctgtatctttcctgaattgagtgattccttgacataactcagccaagcaaaccccctggaaataaatacagttgctacttgctatcctgaaggatctggattcttacctggatactgtgctctccatgtaccccattttaaagtaagagaaagtgtctagaaattttcctgcatgttgtcttactgatgtctgaactgcatttgtatgagtgcattgtcatctccagatccagatcctggctaaacatcccagtctgctgaaagcatttcagacatactacagggaagagagctttatcaactgtttattctgttcaaaccatgctg

SEQ ID NO: 25822 - DNA, 3981 bp, Bovine  19866880401917
  misc_feature (1)..(1): n is a, c, g, or t
ntaaaaaagatagcttttatatgccaccatttttaagtttttattttaatttagacaaaatatttgactaaattttttatcagctactttctaagcctgtatgtattttaattcacgatgtgtgtgttgtgctaagtcagttaagtcatgtctgactctttgcgaccccgtgggctgtagcccactaggctcctctgcccatggggattctccaggcaagaatactagagtgggttgccatgccctcctccaggggatcttcccatcccagggatcaagtacaggtctcccgcattgcaggtgaattctttacatctgggccaccagggaagcccttaactcaatgatagtgatgctgaatttaagaatccctcagttgttatttttatgtaccttttataactcattgttgtatgcagctataaagttattgtgtgacattgctagagaagttctcttgactggattattttgtccatcaatgtggttcatatataccatatggttaatatataccaactggtaatgtgataatttgctcagccttggcaatcagtaaagattgacaagataacacaacaaacacttttggctgtgatgatttgttttattttgttgttaattgtttttaaccactgcttgtctttattttaccagctagcggtaaataattaaagtattatcaagcatggttgttccctccacttccaggaacattagaattgaacactattgtctgtgtcccctttaaaccatatgtaaagttctaatataacaatgttaacaatttaatatgtaatcctcttcaaaacaagttcttcatgggtagggataggttatcttgatcatcattttagttccagcacctgaaatagtacatggcacagttatcttctttgactcctgaatgagtgaatgagtaatgctaaagctgattataatcattactcacctcttcattagcattttgtagcactttccaactcagtatttcatatatagcacatgagagctggagtgattattaaaggtgatctaattccttttattatgaatggggaaaagctgagatccagagaaaacattgacctgctgaaggacacagagcctgtgactggcagagttaggcgtagaactctgggtgccgtgtggtcagaccatgttcccattacactccttgccactgcccactgactactcagtcatttctccccagcagttcaacgttatacatagttggtaatgctgctttctacacgtatagctccaaggactttgctccctggtatttacagtgtctaactggattatcctgaagtaacatttttcaaaccaaggctgacatctaatagagccagaaagttccagaagttccagaatacagattatatgaagcaaagagctttcttgctcttgtaagttcaataatttcacaaaaatgcatagataagattgggagaaggacacttttattatcatattgtaaactacatgcagttcttgaaataacattctgaaaaaatttgtgccagatgtcatcagtttgagctgagttggcctgtggtggttggcctagtgaccattcaggtatggaaaggaaacatggaatagcaccgtgagttgtttgttaagagaaataaattaaccagttactgacaaatacagaagaggcctgggttttaatttggtttcatttggagtttagagtgaaactggatttattttcttttagtgttgttcagtcgctaagtcgtgtctgactctttgtgaccccagggactgctgcataccaggcctgcctgtccttcactatctcctggagtttgctcaaactcatctccattgagtcagtgatgccatccaactatctcattctctgtggcctccttctccccctgccctaaatctttccaagcatcagggctttttccagtgagtcagctcttcacatcaggtggccaaagtattagagtttcagcttcagtcattccagtgagtattcagggttgatttcctttagtattggctagtttgatctttttttagtgggaaaaagcctaatgataaggtaggtctgtttactctgggttccaacaggagtgcaatcaaaatgggtagagtatggtttatttaaagaagctctctgcaaaggtacaaatgggaaccaccaaggagagtccagtgacctaggccggaaaggagaatgagtggcccagaacctgaaaagagtgtattagtttcctgttgctgctgtaacaaattagcatgaagtcagtggcttttaaaacaagacttctggaggtcagaagtctgaagtgggttttatgggccaaaaatcattgtatcagctgggctactttcctttctagaggctctaggagagaatcattttcttagctttctggcttgtagaggtcttttgcattccatggccactgttccttcctccattttcacagccagcagcagtgggtcaagtgcttctcacatagcacccctctgacctcttctgccacccttttaaatgtttaaggactcctgtgattatattttcacccagggtaatccaaggcagtttccctatttaagatcatgtaattaacttaaatttcatttgcaaccttaattccttttgtcatgtaagacaatatattaacagatcctggaaactaggacatgggtattggtggggggcatattattctgcctaccacaaaaagtgaaaggtgcatagagtttgttagcttcagcaagctgtgaacttcagtcgggaatccatctagcctaaggtaaccttgtagaaaaaagccagggaaataaatgctgtgccttcaagcctgctgccagagctcgccattggctgaacccatctgaaaaccagaaggtgtaggcacgctgttgatgtagtggactccatacagggaggcaagggagaaaggagggaccagaaggggcaaactgaacctgtcccacaaaggaactgtaggcattctaggtcttgacttctggaagactactttctgcctcagtatagtttttgtgcttgcctggtagctcaactggtaaagaatctgtctgcagtgcaggagacccgattcaattcctgggtcaggaagatcccttggagaagagttaggctacccactccaatattcttgggcttccctggtggctcagatggtaaagaatctgcctgcaaggttggagacctgggttcactctctgggtcgggaagatcccctggagaagggcatggcaactcactccagtatttttgcctggagaatcccatggacagaggagcctggtggtctgcagtccacggggttgcaaagagttggacatgactgagcaactaagcaagcaagcaagcatagttattgtgcagtcattgctaatgaagtgcccatcacccaggagaggagttagtatgatgagagaagctgtatcatttagttttgtagttcagccaatatttgcttcccttttgttatctgcaagtatttatagtaaagtcttctttaaatagttccttctagtgttggctgcatgctgttaattaagaaaaggttcatgtgtgttcatgtagacaccagtgttagtgaacttccctgctgcccccaggccaccccaagcctactgagaacagtaattgatgaggcctctcaaagcagtttctctcccttcagtctccaggagcttaatggcagagtgtttcttgatggtgagctgttgcatgtggggcaagacagttcttccccccgccccgactgtgcctcatggtgtgtgagatcttagttccccaaccaggggtcgaattgacacccctgctttcaaaatgcagagtcttaaccactagaccaccagggaagtcccctttcttccttaagtgaggactgtccagtgtgttacagaacatgtaaaatttgttgtctccacccactcaataccagtagggtcccgcagttgtagcaaccaaaa

SEQ ID NO: 25823 - DNA, 5947 bp, Bovine  19866880440891
  misc_feature (1)..(1): n is a, c, g, or t
nctcagtttgatgtgccttgatgtgccgagaatttgacatttaaccactagcattatcttaaagacattcagttctttatatacataaaataaattttgttaacaaggaactctgactttaaaggaaaaaatcttattacatttttgaacaagactcaaagttcctctgatactctaaaagaaaaatcattagtgtcatttttctattaacaataactacacagtgtttattatgtgccaggcactatttatccaaatgagttcatttaaacttcataacaaagcacagaggttaagcaatttgcccatggtcatcagctatgaaactgggagagatgaaatctaaacctaggacatttggcttcagcacacaagctcgccatcattttctatcccagggatcaatggatttgccctgtataggtgcaaaacatttttaaatgtttataattgaaattaaaaaattttcagctttgtgggccatacagtttccgaggcaactacttatcaccatgggtgtagggtgaaagtagccttagttaccatgcaaacagtgggtgtggcgatgttccacaaagctttctttacaaaaccaggggacgggctggatttggccccccagccatagttcacctatccttgatctgcaccatcaaagcattaaaaaggcttcatgtcaaattattaaataattttaggcctaaacacagtaaatataaccactataaagttgttaaggcagtatttctaaaactatatttagagagctctgaagtagtaatttttattagtttatagactatagcagctaataaacacttcatttatttaagtcttgaagactataatgacacagtttcttcacagtattacaataaatgttttcaataactaaaaagacataaaagtatttaaatattattatgtagtatatattaaatgtcttatttctaagattaagtggactatctttactaaatggaagaatctcaaactgaaaactggtcatattctttcaacaaaactaaagctgcactcacacatatcaaaagacaaaaatcactgccatttgtatcaaaaaattaatgtgcttcagtcacatatgttttcatgaaagtttaaacatgaaatcacctttaagatcttggccatgtgatctgctccctgccatgtcagattacaccccgtgaagttgattgtcttaagagtgacagagttctttataccttgacaaacaactaaaagaaaaaacaaaacaaaacaaaaaaagaaaaccacacacacaataagatgaagagcctatacattggtcaaacttgacttatttgcttttcttgagtcaattggaggtttatagctagattcttaaaatcactgttgccaatcttccccaataggtaactgactgataggtgcattctaaaataagtcataacgaagtgctaaagtgttccagtttacagcaatagtttaattctgctgctgctgctgctaagtcgcttcagtcatgtccaactctgtgtgaccccatagacggcagcccaccaggctcccccgtccctgggattctccaggcaaaaacactggagtgggttgccagtttaattctacttagatactaaaactgaatacactgagtactgaaaactttattcctcaccactcagttaagtattatataccttttaagacacacgggaaaaaagaaaaacctaaaatgcataagactcttacttttatttccaatgatatatcccaattttcaatcaacaatttaaatgtcaactataaactcagaatcttattaggtactatgcaatataatacagtaatataagatagacgatctcaaactctgttccctgaaattgaaatgcagcccaccttagccctccaggccagtactgggcacagtgaacacccacggatgcttaaggatcccagcagtcaccttctttgtgattacttccatgatacacccctgccaacactactgagtttgctcgccttttaaatgctcttacagtactttgaatatatctcctactttaacacatttccgcagtgcattataattattactgaagatggatgttttagccatttaaagatacagatttttttatgctcttgacatcttgctatttcccttcccataatatttcttaaagagaaaccacaaaaatataaacaaacacaaaaaacagaaaatacaaaatgtgtggtttggggcttaatgcaaactgaagtaaaagtagtgctcagagtacccagcatgacagacttccgtggtacaaatgagaacggaccacggtacgagcagatatgggaaacaatccagccggggacagcaccaaggaaaggtacacaggactcaacgtggtgtgcagtgaatcacaagaccagtctgatgggaagactcaagactgacactcactttctaaacctccatctccaatcggacaattcgcaagagacaggtgcaccagagtggccgatttattccaatccctttaatgaggaaaaaaagttcaaaattttattggtttagtttccccccaaagcaactatcaaacgttggcaggctcgctgaagggttacctttgtcaacatcgttaagtctctctctctcagaactagcccgtttagctccaggttccttagcgcacctgacgcacttaaacagcatttaagagctttacacaactggaaggtcacgtctttatttcttatcgcaggaacacgacttctgtaaactttattcctgtcagaagctaaagcaaaactattgtaaaatgagtgacttcaaccatacattttatcatcattaaaaagcatccactctgggctaaggattagaaaagactcctgccctttaaaccctctttatggatggacatatgtaaactcaaaactttaaccacatgagataaagaaagataatctatatgtacagaggttcctatggaagcaaaaagttatatctaagtgatggcttcatgatcaccctgaagctgaatctagaaagatgacactacttagagttggacagggaggtggattaactgcagagagcacccttgtgaagacattcaaaccggatacctgctgggcactgtaaatactgcaggtcgggatgataaaaggccaggggtgcaagtgggagaagaaacaaattaaaatagagatgttgtcactccactccagtctcaggccaccactgagctgctttctgccactatagattagtttattttctggagttttatagatgaaactatacagtaggtagtttttttttttctcctggtctgtcttttctcactcagagtaattattctgagaaacctgtatgcaggtcaagaagcaacagttagaactggacatggaacaatgaactggtttaaaattggtaaaggcatacatcaaggttgtatattgtcaccatgcttatttaacttatacacagaccacatcacactaaatgccaggatggatgaagctcaagctggaatcaagactaccgggagaaatatcaataacctcagatatgcagatgataccacccttatggcagaaagcaaggaggaactaaagagtctcttgatgaaggtgaaagaggagagtgaaaatgctggcttaaaactcaatggcatcaggtcccatcacttcatggcaaataaatagagaagcaatggaaatagcgacagacttcattttcttgggctccaaaaacacttaggatgatgactacagccatgaaattaaaagatgcttgctccttggaagaaaaactatgacaaagctagatagtgtattaaaaagaagagacattactctgctgacaaaggtctgtctagtcaaagctatggttttcctagtattcatgtatggatgtgagagttggaccataaagaaggctaaatgccaaagaattaatgcttttgaactgtggtcttggagaagactcttgagagtcccttggactgcaaggaggtcaaaccagtcaatcctaacagaaatcagtcctgaatattcattggaaggactgatgctgaagctgaagctccaatactttggccatctgatatgaagagccaactcatggaaaagaccctgatgctgggaaagattgaaggcaggaggagaaggggacgacagaggatgagacggttggatggcatcactgactcaaggacaggagtttgggcaaactccaggagatagcgaaggacagggaagcctggcaagctgcagtccatggggtcgtaaagagtaggacatgactgagcgactgaacaacaacaattattcaggctgttgtggatagctcattcctcttaattgctgggtggtattttgttgtaaggacgtgctacaatttataaacctagtgatggacacttaagttgtttccaccttggggctactgaaaataaaactgctttgaacatatgaatattaaaaaaataaaataatagagatgttggctgaagcaagtctgggagacagtatggcttttataccataggtctggggctacgctggctcaataagggtgccactgctgattagaaaaaggagccccgctgctgaaggaccagttagataaagggaatgattagaaaaagaatcctcccctcagggccaaagagccccatgaggcttggcagagcacagttcagatttcatccctctgtgcaaaacacaagctgtgcaactaacatgcaataatcctgtgtgggaaagctattgcaagcattgttttaaacatatctttttattttagaacatcactcaagctgagtaggcagatggacttagagaactaagcccaagtgtagcaaaaccacctaagtgcttctgcaatagtccaggcaaaatgtaataatatggatgaagaagcaaatttaggaagaggccaaaagctagacccactggatgcaagacataaagaaagttcagtgaaggaactataagagaatgctttctgccatatatttttcttatattcaatgcaaaatattagggaaaattaagtacagtggactttaaggtccctttcagctgtaatttcttttgatttctaagttattactctggttaagtaagtaccttcagaggtaaggaaaagttcctacacctgaatgggatgcagagaataatctgacttcctttcaccaggggatgagctgagctgtccttggagaagagttaacagatggtgtgaaccccagatcctagaaaagggccaggtacatgataagcattcaagtttttaaaaacaaatcatttcctctcctagatctacacacatctcctctgccagctactttctctcattcataaacattctcagatgtgtccacttaaaaaacatctcagaactataactcattggatcttctttgtgcataacctcatgccttcaaacacctgtcctccccaaaacccagatctataccttgggcccaggcctgtttaccagttggctctaaagcactgaagatgaagtaacatcctctccccatccccactcccttcctactgtgctctgtatctctcagaaagatgtggcttttcacccaagcttgctgccttcctttatctaactggtcactaggtcccacccattctgaatcactgatctctaaaatccagtccaaccatttataacttaatttggacccttagattcaattcatctgcatccaattaactgcctttcacatggagatcagagtgagtttctaaatcaaaagtccatctcattgttctcagtgtttcccacagacttcagcataaacaaccaaccttctgacaggacaaacaaagcccctttctgtctggccccacgatatttccagtatcaactctcatctctttcccaaaccctgagttccactccagtacattagttttgccatattttcttatatttctcaac

SEQ ID NO: 25824 - DNA, 807 bp, Bovine  19866880471262
  misc_feature (1)..(1): n is a, c, g, or t
ntcgactccttgtcaaggaggtatctccctgttctaaaccagtatcagttatctataccaagaacttgccaaatatttaagttttggggggcatatcttgtagtgttgttttgtgatttaattttcatcagttttacttcttgattccctaactgtgatacagactttctgaaggctttgtactgagtgttagtacttcagagtttccaacaggcttccttcaggaccagctcaaaaaatacctcttctatgaagactcacccaagcagtacagtgaggtttattgtgtaccatttcttcagtatgaactttgaaataggaaatgagaaaacatggtgttttttttaaactcataaagaagagaaagctctaggatggccaaggagaatgattcttggacacaatttaaggctaacaccaagcaaaagcatgttgtaaatgacacagtctaatttaatgggcagccagtaagggcaatgcacatacctgtagagtcagaacagaaggataaaaacagaattaatgtattctatcagcacacacacaggtggtgtgcactaaaaggaaaacctgctctttatcacagggctgtgttgtgaggaatgcaaatgtatttagaattagaatcatgattttgtttggtcatgtctcagctaatgcagcataattttcttttgttttttgttaatttttattagagtatagttgattcacaatgttgtattggttttctgctgtacagcgaactgactcagttatacatggacatatagtcactctcctttagattctggcccatttaggcca

SEQ ID NO: 25825 - DNA, 2706 bp, Bovine  19866880539671
  misc_feature (1)..(1): n is a, c, g, or t
ntgtggaccacggcagcagctttgtcctctcttcctgcactgggggagctctctttgaaatccatcttccaccccactatccaagagtttctcgtgaacataaactcactcacgttctcatctactcaaaatcccccagctcccatcccagtttcccactctctacaggacagaatttccaatgtaaaccctgaagaacctcctggtcacctcagctcccactctgcactattaatcttagccaagaggacccctctcatttccctggcaagcctattcatatcaccatgcttttctctcgacaatcccccagttcagccttcaaaactgctacttgtccttccctacccaaatcaaatggctccttttctctgaagtctttcctgcccctcaccatgcccactcccaggcagtcactcctgtctctttactccttcagtaaatgtgcatcttcacctggtcagtctcacagaggatctaggctggcctgatgacagagaccaccacttctctttcctcttcttctctctagctcctaaagtgatcagcaccttttaaactataaataaacacttactataaaagagaagatgctgcccatcttagagcttcatgggtgtatgtaaatttacatcctttctctctccatccaaacctatgatgggaatacacacacacatgttcatttcacccaacaaacacaagtctaagatggggaaggagtggcaaagttgtatggttaacctaacatctagaaggcaaagattcagaaacccagattttcagataaaagatctgcttttttcctttatgactgacaaaaagtttctacaataaaactccctagaaacaaaattggcaacattcagtgttaagtcttctgaaatgtatcattacctaggtatttgggcatcaccatgtgaggggttgagatctctggtcccatggagagtatatacaacacatgctctaaggtcattcttgtccttactagaggtcactgaaaaggacccaaattcaatgggacgggtagattacattgtgtgcatgctcagtcatttcagttgtgtctgactctttgcaaccctatggactgtagcctgcccaggctcctctgtccatgggattctccagggaagaaaactggagtgggctgtcatttccttctccagggatcttcctgacccagggatcgaaccctcaactcttacacctcctgtattggtagggtgggttctttaccactagtgccacctgggaagattacattaagccaacttaattaacagccagttaactgttctaactgttctgcttttgtttctatctgcaggctgtgtccctgtgtggtccctcttgtcagtctccaccttgattaccccctctcccaccaacactaccctgcttggtttgggggaggtgattacaagtgctggtggcagcacgtagtgggacagtgggatgcttgctctacctcctttaattgctgcttccctcctatttgttaaaagttccctttactctcctctctccatcatttttcagcctcatgtagccacacaccccgtataccaaatgacctggcatctccccttcaatgtaaagcttcagaagaaggtgtttcccccccacccccacccctgacttatgaggctttctctttcagccctgggtggaaatcagcacagattcctgttcttatcaactgagtgcttaaggaaacagagcaggtgccagagtcaataggatatcgaaagcgagattttgctgaagattatttgtaatggggttccgctgctgacacacaatcaggagttcacacttggtgagaaagcatgacaggggaaaagggccagaacttcacaaaggggacaggcttggtttgcctggatctaactggccaggtaaaggtccatgcttttgtaaacttggacagaatttcctcctctcgctgaaagaacactctcgtctgtatatgcagacaagaaacacaccattctgccccaccctcatttcaatagactgtcccttaggccacctgaccactttccccacttatggcagtacctgctttgcctggactctgggttcagaggtacaagagctttggcagagtgctaaagaaaagggacatactgtcgctgtacagaggaagtatagccatggtaaccatggtttggcaaactgttctgccttgctaaggtctgggagtcccgtgcccactgctcctggttctcacaccctccactagcagcaggactcaaacagttggctcttctagtccacctacagcatgaatttacctcctctttccaggtatccatttatcatctctagaagtattactgctcagctgtggggccttgggaagactcctggcacagtgcccttggtcccaactcttctcttttgtccttcaaaacacagtaccttttgcaggcagctcaggtatcttaatatctgaggaggaaacctcagatatttgttctaatgtttgcaattatacccctggccttgtatttacaattatactttttctaaagagctgaaagaagatgacatcaatcccttcaagtcagcgcagagatgacttgatttccattttaccagtggggaaactgagacaaggctgatggatttgtatcctggtagtcagtggtaaggctgtcaaaatagaggctcttttagcatatacattcaggcact

SEQ ID NO: 25826 - DNA, 709 bp, Bovine  19866880574740
  misc_feature (1)..(1): n is a, c, g, or t
ngaaaaaaatcttgacatattaaccttgaaagaaggctactgtagtttttagtcaagtcacttgaattaatatttgaaaacatagtgaaaataataggtcagtttttttcccctgcctcatgagaaatataatgaatgatttttaatgttgtaccatatacagagaaggaacataatcatcaagtccaaaagctgaagggagcccttgaggccttccaggcatgttctcctcctctatagctgagtgagcacatgaggttcactgctgaccatgtggccagcctgggtggacgctctttccacacacctgcctgtagatcatctcacgagaaatatgaaatgaggcagaaaatggcatttcagatctgtcctgggccttttcctccactgccgttttcatttgttgctttccctgagggaaggccacgtgagccattctatcctgagcaggaatttactggtttgatgaggccttcacagtgctttccagagcatggtgtctggtcattttccaactcgtgcatttttaaagtatgcagtttatgactgagtgtaacctgaaagtctgggccacttacattcacgttttttatggcctgaagtaatcaatgctaaacatctgtgggtaggtattctgactggttcctacttcttaaaatgttgttatgatgatgactttgggatttttatgggatcttcacgcatccaa

SEQ ID NO: 25827 - DNA, 1523 bp, Bovine  19866880593826
  misc_feature (1)..(1): n is a, c, g, or t
ngggcttctgatattctacccaggaatctcacgcacatacaaaaaaactgagggttgaaactcatgtaactaaaagggagccagaaaaatgtcttaatgctaaaactttaaattctttctgagatttgagaaagcaatatgaggttcaaatttcagcataacactcagaaaggatcatggaggggaaaaaaaaagtttctttttaggagccaggaaagaacagcggccaaagcaaaataaatccttttccaagtgatagaccaaggacatctaaacagaaagccaattgttctcaaatttaactacaatctttagtcaagaccacctcctggagagtcaaatcgagatgctgataaagcttcccagatagacacagccatctcccatagtctgtgatgtcttctgaaaccatctgggagaagtctttctgttttaggtcagttttacagaagatgatatactgatacataaacagaacagaaatggggacacaattctagacattggtgtaaatgatctatgagaccagcaagcaaaagagagtatggacattctgatgtgactggcaggttggctctatggggacagggccttatttctcttgttctctgaatcctttggatcctataacacagcacataagtaagtgaagtcgctcagtcgtgtccgactctttgcaaccccatagtctgtagcctaccaggctcctctgtccatgggattttccaggcaataatactggagtggattgccatttccttctccagagaatcttcccgacccagggatcgaacccgggtctcctgcattgtagacagatgctttaccatctgagacaccacggaagtccaataaatactcgtgcatgggtatgtattgactaagacaaccaggatgatcacggtttgggaaagcaataggaagagggtttgtctggccaagagaaaactcaggactaattggacaagtctgttgagtaacaaagcatcctcacatgggggcaggcgagctgccatttgccccttctgatgaggactctcgggacccggggccagccacacagggcaacttaggttgtgtactgggtttcctggtaatgactcacatggtttaagaaaattccttttggaatctttaagcaggagtggttctcagtagcaaggagggtggtccagaggagaacacctggaattgggggcactctgcttggatcctattacactgaccttgggcagcagctatgccatgtgctgggcatttctgcccctgtgagtgctacattcctggtacttgctattctaaagatactgatttatgagagaatctggctaatgctggggaaaattccaagtgattctcctactgctatggtcaaaatgtttgtgccccacctcccccaaaaattcgtatggtgaaaaccttatgcccaaatagatggtattaggagggcctttgaaggtgattaagtcatgaatggagccctcatgagcaacattagtgcccttatatttattataaaagag

SEQ ID NO: 25828 - DNA, 1761 bp, Bovine  19866880619969
  misc_feature (1)..(1): n is a, c, g, or t
ngaagcactgggcaaatcacgcagctcacatgtcatgtagctggccctgataaagtttcttcagttgggaaagttctgaatgtggctagaaagtaaaggaagagatcataaatatgaaagttacaagagaaaaaagggaatgagaatgacacaggagcagttttcttgtaggtggagggcaaaaaggtggtggtcctgactcagaggagaatgatgcaggctgagaatggaaacggagatccagcctcagggttataaccaggtatctcccagggatcagtggtaagcactgatgggtaacatcctcctggacagagtagcaccttccacaaagcaccaattctggctggttaattaattacaagattgcttttcacacctttctttgaaactcagtggcaattgtgtttcctttgaggtcagagaaccgtgagtgagctttgactatttgttctatccgccttgggaaaaaaactcagtctatagtatggagagattgagggaatcgtcatggatggtgatttccatgtcttaaacgatagaaacttaagcatcactgaactctaaaggccgtgagcataattcaggccctaggacagagaataagtaaatgcagtgctcatttaatcaggcaataccattaaaggagtgagaggccaaactgccacataaatatgagcaggcaggaaagtatatttgtgagcacaatgaggagcaatggtgactaatgcaaaccagagagtgtcgggcctgttgaaagatgctcagaagcaaatacttccagaaccaagtggggactgagcagaatcctcccagaggttaggtttaattgcttggccatcagtctacaagccctgataatgagtcgttgagaaaaagaagaccctatggtagttcagaaaagcactgaatccagtatctgttaagcagaaggtaggcacagggcctctattgggtgtatacagagctgcttttcagcgttgacgttgttctgtgtccctaagaaggctgtaggctaccttcatggtctgctagggtttaattactagtcaggaagttcttttattgctttggacaaactcacttcattttcatcctgtttcctctttgtgtagagctatcttctcctaaggttgaacatatctttctacacagaaagacatatttttctacttttgttacaagagtatgtgttgttttccccgtttgaaaatattggaaatcctaatttgtaaaacatggtgtgagggaccaaagagtttcatttcatcagaataaatgatggttctgtctgtcaacagagatgttagtgattgattaatcttaagtaaaaaggattcttcctttgatttcacgttttgccaaagatccttagatttttgcatcattcatactctgcttttcacactctggttcctcatcttgctctctggactccttttgcttctcaagaggaattgcctgaatatgttttaccagctctcagtgttaggtgacaagcattacagagtttttacatggcagactgggaaggagatactagaggccatgagtttccagttgtgtcaaggagaacccttatacattcctatgtactccaggcattagtaaaaggagaaatcaattgctctcaaactttcctaagaatcagttcagttcagttctgttgctcagtcgtatacgactcgttgtgaccccatggactgcggctcgccaggcttccctgtccatcagcaactcccggagcttgctcaaactcat

SEQ ID NO: 25829 - DNA, 1010 bp, Bovine  19866880627067
  misc_feature (1)..(1): n is a, c, g, or t
ntctgctttatgagtctcaatgactataattaacacatgtgaagtctttcatagagagttataattatagtatctcttatatgctttaaagtccaagcttgcagcctgtacttgagtcacctctgtaagatctcccaatttattgttattttgttctcttctgtgttcagtggtaggaacatcattcccccaagaggaataacttctcttccgttatctgtgttgcttagaaaatattcgcatactgggctgaaaactatcctgaaactagtttcatcaatcccttgaagacacagggactctcaaagcccctggaacacatctacttttccaaataattgaagttgtccttatgacacacctggggtttgctttcttctttatgtttaacattgtgagttctttctatcatttcttataaggcaggaacatcttgccctttatcattctagttgttttcttaaaaaagaaaaacaaaaaacccaagtggaacctagcacttgaggtatgtttttatgaagtcagagtagtatcttttcccgaactgagaacacatgtgaattcagaaatctttgtcttttgtctaagcaaatcatcccaagaaaaagcaattttgagtatagagggcatctgtaactttcctctaccaataccgtgatgattcttataatttttcttcagtacagaactatttatttgtagctctgtttttgacttgtggtcatctatgatctgcatacaatcctctgcatttttgcatttgttatatatttgcatatggctcccacctcatcccctgccagttgctgagagcacttctttctattgaatttcattctgcttctgttgggagcatctttccaaggccaagatcatttcaactttttttcaacatctagtatttctaatccttcctagttcactctcagagaaaagtagatgaacctatcataataagatttattaagaattacattaagacaagtgtttttgttaagagtcagtaaaga

SEQ ID NO: 25830 - DNA, 4520 bp, Bovine  19866880691515
  misc_feature (1)..(1): n is a, c, g, or t
ncccccgccatttgcaggcttgggaataagataccttgcataacataggtactgtggtttggttttgttttctgtctgaaaagtcaaatacattcagttcggttcaattgctcagtcgtgtctgactttgcgaccccataaaccgcagcacgccaggcctccctgtccatcaccaactcccagagtccacccaaactcatgtccatcgagtcggtgatgccatccaaccatctcatcctctgtcgtcctcttttcctgccctcaatctttcccagcatcagggtcttttcaaatgagtcagctcttcgcatcaggtggccaaagtattggagttttggcttcaacatcaatccttccaatgaacacccaggactgatctcctttaggagggactggttggatctccttacagtccaagggactctcaagagtcttctccaacaccacagttcaaaagcatcaattcttctgtgctcagctttatagtccaactctcacatccatacatgaccacttatgtaaatagctcaatgcaattttattctttgatgcttatgaagatttttctggcattcacagagttacatgcccattcatctatcaaaactgaaagagaaatattactcaaaaaagtgttgaaaggcacaggtctaaaaaaaatgcaacagaataaaactgaaaaatggctcagtcctaaacattctaagcattctgggaagcatgggtacactttaaaacttattgctgttctaattctctgtatatcatattcatggctttaaaaaaaattactgatttctttgatgaagcatttagcaaatgaagaaatagaatcttaattttggaatgatttgattgcttctaattgcctgttgttttttcacatgtctgagtttaacatcacataaagctattgaatcattagctctgaaaacataagcccatcacttaatcacataataagggaatcagaagcatccaggatagccaaggaacctaacctggaagttctaagactcaactgggagattcatctgtcttcaggatgccctcatagctataattttccagtctcatatgaaaattcattgccccatccacaattgaacattctagggagtggaagcggagaaggcaatggcaccccactccagtactcttgcctggagaatcccagggacagtggagcctggtgggctgccgtctatggggttgcacagaatcggacatgactgatgcgatttagcagcagcagcagcagcagggagtggaagaagctttgagttatattcactttctgaaacaagggactcttgaaggacttgagatgggagagaaagggcaggacaaagtggctctcacttcctgagacacccacattctgcctatagaatgtgtatctctaaataaacttgctttccctttactctggctggctctagaatcctttcctgccctgaaccaaggaccctcacttggcgatctcacttggtggacgggatatttgcctctactgccacagtcttcagcgtgccggcctcccctcctctctctcctcccctcctcccacacagcagcagtagtggtgcaatgcagagggagccttaaactgacctgaacgttgtggtgagccctctgcttaagaacaaaaactgtggaatagacctgcctttaggacttcccacttctgactgtacatcccaagaaagtgatttactctctctgagtctccatttctttatttaaagaatggaagaagtaatctcaacttcaaatagctgttctaagaaataagatggcatctgttaagcacacggcctagttctcggcacatggtaagtacacatgaaatggtagctactaatgttattgccatggctgtttctttcttttaaaatggatgtatatttgatttacaatgttgtttgagtttctgatgcacagcaaagtgattcagttataaatgtgtgtatattctttttcagattgttttccattggagtttattataagatattgagtagcatagtttcctgtgctatacaataggtcctggttgtttatctgttttgtatatagtagtttgtatctgctaatcttaaactcctaatttatttccccccttttcccctttgataactgtaagtttgttttctatgtctgtgagtctgtttccattttgtaagtaagttcacttgtattatattttggattccacatataagtaatatcatatgacatttgtctttctctgacttacttcacttagtatgataatctccaggtccatttttcctaagttctgcctgccaattgttctacaaaccaaccatcaatggaaatctttggatcttatcagtggaagggagttttaaaattttgttactcaatccacttaatttacaggtagagaaattcatcagtctataaaatagctaagaagacacacacttgtccaaggttacactgaatgacagagctgaagtctcttgattttcatacttgagttcaattctgcttgaaatgctgaagtactttggttatgttccgtatgtacagaattattccttctgctttcatatttttctaattcttgctgtttaagttctagcttgctatcatgtaagccttcagctaaccaatgtactcatttgaaaaaaatcagaaaacagtaaaaaataattaaaagatgaaaaacttaattggaagagaaatattttgaaaatggtcaaaaagagtacaagataatcagaagaactatatatgcaaaaaacattgtaggagaataatgactttgttataaatgatgatagttttctttttaattttctaaagaacattttccaggaaaaaatgatgtttgatgcaaagtttaatgtatactcttcatgtaagtaggtttacactgctaaaaaatttttaaagtatttttatcctaaatatttcagctaaacgagagtgaagattttgaagaaggggagggtggagggagtgacctggtactgttttttccctatgacaggaagagtttaccaagaaacagaagatggatgccacattgttgggtggtaggtactgtggcaggtacttctatagccagaaggacttcactaaagcccaaagcaaaagaggaagttcaataagtggttcttgctgacagctaagacactgcgctgagagctgaggagaagcattcttttcttgcagtagttcagcatcacctcggctttattctcttgggcctccagcctggagtgtcaccaactcatccttgacttgggagagtgtagtgcaggaaatctactgaatacatgagaatagtactaatactgttatggttacttggatcaaatgacataagatgaagtaagagtcctcttattcttatttacataaacaaaacgtacttactataaataatgcaaataatatgaaaaagagtgaaaaaccaaatcctctgtacccacagtatgtggtatcttgttctatttttttcattcaaccgtatgtcttttttaggctcttctatgaaataaatataaatctacctcattttaaaaaataattaaatttatttatttttaattgaaagataattgctttctaaaattgtgttggtttctgccaaacatcagcatgaatcagccataggcaaacctatgtcccttccttcttgaacctccctccccatcccattcctctaggttgttacacaggcccagttccagttccctgagtcttacagcaaatttctactggctatttattttatatatggtaatatatttgtttccatgttactctctccataacatcccccaccctctccttccttccccaatgccctccaccctgtgtccataagtctgttctctatgtctgtctctattgctgccctgcagatatgttcatttttatcatatactatgaaagggaaagtgttagtcacttagttatgtgtgagtctttgtgaccctatggactgtagcctccaggctcctctgtccctggaattctccaggcaagaatactggagtgggtagctcctttctccaggggaatcttcctgacccagggatcgaactctggtctctagcactgcaggcagattctttactgtctgagccaccagggaagccctatcatatagtattccacaatataaatgtaccatatttaatctaatcatcctctaattgaaagaaatttctctttttccaattttttgtattataaataaagcttcaatgactagctatacttatattataaacatctgtgaatatttcagaagaatcaattcttagaaatggaattaagaactccaaaaaactacttattttgaattttgatagctatttctgagttgtcatcaaaaaagattgtacaaatttacactctaaaactatgtgagggaattccttggcagtccagtggttaggactccatgctctcatggccaagagcctgggttcaatccctggtcaggaaactaagatctcacgagctgtgtatcgcag

SEQ ID NO: 25831 - DNA, 1539 bp, Bovine  19866880752219
  misc_feature (1)..(1): n is a, c, g, or t
ntttggtattttttttttttaatgccccaaagtatcccaatgtgccagcaagattgagaagtgagtttatagtaataaaactaagtatatatgtgtagacctcagccagtagatgaatgctgctgctgctgctgctgctgctgctgctgctaagtcgcttcagtcgtgtccgactctgtgcgaccccatagacggcagcccactaggcacctctgtccctgggattctccaggcaagaatactggagtgggttgccagttccttctccaaagcgtgaaagtgaaatcgttcagtacttcccgacttttagcgaccccatggactgcagccttccaggctcctccgtccatgggattttccaggcaagagtgggttgccgttgccttctccgagtagatgaatagttagccataattacctactgcagctgggaagtaaggccagtcctgactaacacggcagcagtgctaggctcaacgctcacatcaccgaaccaagcaagcccctcccccaccaactgtctcattaggactttacacattttttaaaattaattattaaattagttttggctgcactgtgagacacgcagggtcttagatctctgaccagggatcgaacccatgccccctgcagtggaagggcagagtcctaaccactgaacaacctttagacatttaaaaatttcccttttcctctcattatattcttaaaatctttatcaacattgattgtcctgggaagggaggaagctcagaaaatataggaaaatacatgggagaaaattaatattatccataaccctaccacccaaagataacccttgtttacattttttgcttgatcttgaatcttttctattcagatggatagacatgaagttatttacaagttaagatcacagtggacataatatgtatttatttttaaatttgtacaggcatatggaaaatgctcaaataggatgaaattttacacaagaagtgaatctcccctcccagtacctacccacctctcacctcctcagaggcagccggtgttactagttctgtggcagacttccagaaatattgatagctatatcttctagttacaaaaatggttgcatactacacaacctattctataatttgctctccttacaatacatctcagagatgggtccatggccttcacctttctttttgaccctgcatagttttccagtgcagattcccgacaatttcttaaccagtccattattggtgagtatttgtttccaatgttctgctacttttataataaatatttatttatgtgtttatttctttgttcatcccttaaatttttttcatttgctaagtatacttcaaaaattatgctaatggctactgggcattccattgtgtgaatttataataatctattcaaataatactgaactgttagacatctatgttgtttccatttttatcattatgaatgatgatgcaatgaacaatccttacatataaatctttgtatctgcatgtccctagaataaatggaaacggtataatt

SEQ ID NO: 25832 - DNA, 960 bp, Bovine  19866880754055
  misc_feature (1)..(1): n is a, c, g, or t
nttactctgctatttaatagttaaggcaatatattaaattatatttagcctttgatctggaatttacatacttttttacttacaaaattttaaagtaaatataaaaatgggctttttgtcaatttatagatttgaattataaacatacttaaaaactacatcttgtacatctgtgagagtggcaccaatactcttcagcaaaagatgtaaagaacgaattgccatcagtccttcatgctgttctgaatctttcggttcttcaccacctgaactcagtgaaacacttaaatgcaactaaagaaataaacagataaatatttaaatcactttctttataataactcttaaaattcaatctcattctaaatttactataccatacataagatttcaaataacctagatattaattttgatataattaataagtggaatgttaaaggaatttaaaatctaaacagcacctttaaaaattttaaatccaacaatgtaatgtatgttatttagctcaatccaattcttttggtaaacctaggaaaatattaatctttataaatttttagtaacagtaacaatctagaagttgaagttgtggaaaataactcaaatatctccaaaatttctccaagttgaatgtttcaactattagaattaagttatcatggtgaaagaaagtgaagtagctcagtcatgtccaactctttgtgaccccatgggctgtagcctaccaggctcttctgtccatggaattttccaggcaagagtacccggagtgggttgccatttccttctccaggggatcttcccaaaccatggatcgaacctgggtctcccgcattgcaggcagacgctttaccatctgagccaccagggaagcatggtgaagccagttaaaaacatttttatattatatgcatgtgtgtgtgtgtgtgtgtgtgtgtgtgtgtgtgtgtgtgtata

SEQ ID NO: 25833 - DNA, 1090 bp, Bovine  19866880768488
  misc_feature (1)..(1): n is a, c, g, or t
ngggcacagtaaagcctgtaaggtcactcttaaagtcactcctggctgcaatggtagaaactacctcaaacagactgcctgaacccaagtcttgtgtcagggattttctgggggacaaaccctaaaatagaaacctgaggaaaaagcaccctaaccacttgggtgaggcaaaatgtttccaaggagattgggcaggagaagggcttcttggcaaaattttgcctgaaaggttgaagaatgaactcagcactatgtagatgcttccggaactgctgttgcttgactgttgctgtatggttaaaaaagttttaatcaaaattgctgcaaagaataatatagagacccacaaaggaaataagataagaacagttatgtggggttttgtgagaggaagagagcaaaagaaaagtcttgaaaaggaagattcaaagaatgattcatttctctaatctgagtagattatgcagcccctggcaagtatctttcatttaatagcacacagaaaatgtttgctgagtctgtgactggaataggagtgagaggtggggatgagtatattaataaataagcaaatattaatttgctctgccaaagaaccctcctgttacctgctcctgggatgaagaagaaaagaaaagcacacggtgacctccataatcaaattaacacaggatgcttcatgaagtaacacagggcgagacacagttgaaagctcttatcatgataaggccaggagaagagtttacagagaaagatgaatttgctaggtgaacctgactgggcatggggacaggtggattaaacctcaaggagtgagacatgtgtgacttcagaagtctacagaagattttatggagtcctcgatagttaggagctatagctggagaagcaatagttttgatcctctgtccctaatcattttagaaaagcctgcctcacatattacacttctagtaatgcttatcctgtatcctaaaccatctccccattctttccgatgtctctcctgacatttattcttcctttcctccttccctccttccctttttcttcccctctgcattctgttccacctaccttcttaccatcc

SEQ ID NO: 25834 - DNA, 2139 bp, Bovine  19866880779539
  misc_feature (1)..(1): n is a, c, g, or t
natgatcatatatttattatttaaaaagtggaaacatacaggattgttttcaattttagtttttacagcttctctgtgtctataaacataaagaatgtctatttagaaaactcaaaaaaagggaaatagaataaaatgaaaagattcaaattagcacttagaagtaatcacttttaacattttggcatctaccttacctttgtatatataaaagttatccatacatttttatgtaaaattaataacacattatacatcttcacatataacttcatttttatacctatcaggtgtaaattattttcagttaaaattgatttttaaagatttcagtttttgcactgtgtaacattttactagtattatttgacatctttgagtaaagctgtttgattaaaaaaaaaaagcgaggcattcatttatctttctctaatgggtaaactcatacataaacccaccagtcaatattttgtggccattaaaaattcactctagttcaagaactagaaagtagcattaagaaaaaaaaaaaagagtttcttggcagtttatctaaagactggcctttataggatatgaatattttacaatttgattcctacgaacacttacattgacctttttctctatttgctttggaaatgtacaagatgtgatgagtctaagcattatcaaatgcttttaataaaaaataaattccatttatccaagaacaagaagtcatactctttatttgaacaatgttatgctatgctatgctaagtcacttcagtcgtgtccgactctgtgcgaccccatagacggcagcccaccaggctccccggtccctgggattctccaggcaagaacactggagtgggttgccatttccttctccagtgcatgaaagtgaaaagtgaaagtgaagttgctcagtcgtgtctaactcttcatgaccccatagacttcagcctatcaggctcctctgtccgtgggactttccaggcaagactattggagtggggtgccattgccttctctgttgaacaatgttaggtagctataaatgaaaagaaaattacagcgaaatgattgattaaaaagaacttaaattctcttcccactatataaacgtacccatttatgggcagtgagccccctctctctgaggaaatgctgttctgagaccatcaaaatatatgatatattttggaaaattactcacttttgtacagtgatatgcatcttaaaaagcactgtcaaacataccagtttattgaattctcatgaaaagcctgcaagttgggcagaccagggttaatattctgttttataggagagtttggtaagccagctgttagatgacctcaatgctccccaatcatcattcatggcttcgtttaatcctcagcccttgaatgtgggctgggcctagtgactttttcctaaacaacagaacagggcaaaggtgacagcatgtcactctgtgataaggttagaaatgactacaatttccatcttatgagcagattctctctgttgcttttctacttgcctgcttgaatgaagcaaggtgtcatgtctgggaaggcccatgtgacaaggaactaaatcccaccaacagccatatgagcttgcaagtggatccttctccagttaaatctagagacaattacagcccaaccaactcgttgcttgcagctcatgggagaccttgaagtacagaagccagctaagccaggccagatctctgacccacagaatctatgagaaaataaatgtgtattgtcgcaagtcactttgtggcaacgtgttatacagcaatagagagctaataccaatggtagtccgaggctgagtgtgacctgtttgcagaaatagtgaaatatggccacaattctgtggtagacctgccatacacagatgagttctaggtcccctccgcttgcatctggacaggcctgtgattgcttccgtccacagagttcactcaaagtgatgctatttgacttctaaggcagggatataaatacatcttactaatatctttacttatttattattgttctttttaatgaatcaaagttatacattttgttgaatgtttatatctttattgaattatagttcacaggatataccatcatattcaagaatttt

SEQ ID NO: 25835 - DNA, 1497 bp, Bovine  19866880787434
  misc_feature (1)..(1): n is a, c, g, or t
ntatatgttttgtaaatattttctcccaatatatggcttatcttttcattctcataatagtttctttcttagagaagtttctaagtttaatgaagtccaactttttcttccctgcatcatattgctgttgtacctaaaaagtcatcaccaaatgcaaggacacccagattttttagtaaataaatgtatccttttaatttggtaaaatatacataacatacaatccagtggcattaaatgcattaataatgttgcattctaagaaatgtatttcaatatacatacataattttaattgcaaaagtaaaataggttctttttgaaactttaaaaatataggagagcagaaagtataaagtaaaagtcacccacaatttcccttcccaaagatatagctattgatattttggtgtacaacctttcaaacacatccctattcagttcagttcagttcagtcgctcagtcgtgtccgactctttgtgaccccatgaaccgcagcacgccaggcctccctgtccatcaccaactcccagagttcagtcaaagtcacatccatcgagttggtgatgccatccaaccatctcatcctctgtcatccccttctccccctgccctgaatctttcccagcatcagggtcttttccagtgagtcagctcttcacatcaggtggccaaagtattggagtttcagcttcaatatcagtccttccaatgaagacccaggactgatctcctttaggatggactggttggatctacatccatattatatcatattatattgtatcatattaaatatatataactttaacaaacataattaggatcattctgttcacattgtttgaaaatctgcttttcaatttaacaatgcatttcatttgatattatgtttttaacaatcattaggttttttttttatgtagcacacttgttcatggttacttcatattctatcacatgatatagcataatgtatttagccaattctctaacatttgatttctagaaatgtcgttttactaggtcaaaaataatgcctggtcttttaggcttttatttacttatttattttattgtcactaaattgctctccagaagagtgttgccagtttataagataagagcatgtgcatttcttcacattaccaccaatgcttgacaattaatttaaaaagaaagctaaatctctaccaaacaaaatgcatcgatacagctcgcactatgggaaaatgagaggaaggggttatgttcagcaatcagaaaatcgaaattaacatagtcatcttctaaaagcaccaaaaatggaagaaattttaaaactcatctgagaatggaagaaacaaggatcatctcctttaaataataatgtattttgaggaaaaccttattgtattttgtctgttaaacgtattcaggtttaaatttcttggcaggacttaaccctgaatttcaaaacctccaatgctttaagctgtatatttttcttcaaaaca

SEQ ID NO: 25836 - DNA, 837 bp, Bovine  19866880811541
  misc_feature (1)..(1): n is a, c, g, or t
ngaactgtgctaccagaaactgtgctaagtgctaggaatatagtggtatgaataaataatgttataagatccctgtcctctttccctggtggtcaaatggttaagactctgtgcttccactgcagagcgcacaggttctatccttggtcagagagttccacatgccacttggccaaaaaaaaaaaaccaagaaaacgaaatccctgttctcaatggaacttctcaaaaaaagtagggaaaacagatatataaccagtacacccgtaagtaaataactaataaaccgtgatcaaaactctggagagaaagaacaaaaacagagttagggagtgatggtggaagggctggggtggatctcgcctagaaacttaagctttgacctttgagtgggtgtgagagtccagttttaaagagattattttgttgtttcactagcaacagtcacagtgagccttgcatattaggtccctgtaacagagtacatagtattgggaagttccgtgagattcaaaggttacttaggaagaatggctgtttacaggaggttggttatgttgcttagagcaacaggattctgttagagggagagattgtgtgcaaacagcatgtgtgaccaggatatctaggcagcggctatgtgacaagggaaagggcggtggcggctataattgacatggtcgaagaataagcaaatattgatgtgggactttaaaccatggcaatgctaggaaattcaaggaagtaacaacagcagtaaggtatctgtgtgcttcaaatataaggtttgtataaagttaaattcttcagctaaataaataggaaaaagtcttcatgttt

SEQ ID NO: 25837 - DNA, 1212 bp, Bovine  19866880823532
  misc_feature (1)..(1): n is a, c, g, or t
ntctgtccatgggattctccaggcaagaatactggagtgggttgccattcccttctccagaggatcttcccaacccagagatcaaacccaggtctcccatgttgcagacagattctttatcatctgagccaccagggcagccacaaggcactgaacccagtctatttcagggagcctcctagatccctgcaaaacaaggccttggttataaaacgagggtctctaaaatctaagaagatacacaggcaattctgaaaagattctttttttctttgaattcttatccctcaagacttgaaatctgatctgggttgattttctctcttcctgttttcttcaagaatgcaaaggccagatatttttctgttccaaaaacctatgggtaaaataaggcagcttaccctctttaattaagagggtaattaaaccaaaccatagtagcaaagagctgatggggttccctttggcacaggcctttgaccacactgctttggcccttaggagccttgaaggagcgcttttgcagtttagaggactatgggcctgtcccgttgagatgggctgctgaaacttaaaaggtccctgaaactttcattctgttttcagtttgcccagtatatttctatggtgggtattttaagcatctttagagatgagagtcccaggataaaacaacggcaagtgaaacttggcaaaccctagaagtctgcaattggaattccacactgtatgcgtagctgctaggaagctcccatacctactgataagaccatgtttgtgtctactctgaggtcccctgacctaggacaccatgcgtcttaggaatcccacacttcccgttggggcacatctgaggtgcagggcccacatcagttgctggagatgcaatggctatgttcccaggctcagagcagcattagccaaaggggcctgctttcttttcatgatatgagatgacccacccagtggtatcctggtaaatggttaacagggagccgtgcaggactgtggtactggtaatgagcactgatttccatggttgaaatactcctccaccattcccaattttaagctactgatttttaaggtcactacttaagtcccaggtagcacagtggtcaagaatctgcctgccaaggcaggaggtacaataaatgtgagttctatccctgggtccagaagatctcttggaggatgaaatggcaacccact

SEQ ID NO: 25838 - DNA, 1840 bp, Bovine  19866880861431
  misc_feature (1)..(1): n is a, c, g, or t
nggctggcagactagaaagcagcataagtccaaagtcccagaaataatgtctgtggccctacctgctgttgggagaggatgcagtattctgtggatggagtggcagcatcctgaggacatcctgaggacagggcagcatatgcccatgcttgtatgactgctcctgctcacacccttcactttctagatctgtgtattgctcaggttcagctcttatttctctgagtttgctctctcctcagagaatttaaatgacttgactgacaactttaaatcattttaataaggggggatgtgtgtagaagaagggtcatagtctctggaatagatggatgatttactgttctctctttggtctgatttctcagattcttggtgaccctagacagatatatgagctgggtttcagcttttccttctgcaaagtgggggcagagattactagtgggacacaggggataacatctatgaagccactgatggcaggactggcccaacctgacaccatcccttcaacccaggaccattttcctcatcagaaagggaaggagttacactaagttcctgagatctacaatttgaatctgataacagatacccccaaatgtgtgtaagacacactgaaaatccttcatattttgatatagatagacagccttaaagatgatggtaatttcatcccatttcccagctctgcaaacctccaccccaatctctgggcaatcatctaggaatggctttgtgctgacttacaagggaatgtatcataattttcctatccactgctccaggacaatgctgggagagacccactctcagattgcatgtatagataattttagatgacattccaaaattccagctctttgagtctgagaaacatcgtgcattaccacctgccccacccccagctctgctcctctaactacctcttctttccccataaaacatgtcctttcaacagcttgcaacttgccaagacctgtcataaatttcaggtagttgtgcaaagtcagagaagtgggattggatccagtgccagttggatagaagtgattccatcatcagtggaaacactgacctaaagttctaactaaaggacaacatgttagtactagatgctatgatcagcctttcagcctcagcagaaacacctggtagaaagatgggcctcagcagttatgggctcgcaaaagttgccaagtagcttctcaggatcaccagggcttcgtggagggtttcatgcctatcctcactccactatttaaaaaataaccaactttttaaaaagttgattaagtttggaatattcactatggaaagttccagaaaaataatgtttcagcaacaaagactgtcaacaatgccatctatttcattctttctgccttttttaattcactcttggagtatcaagcaagcactcatcagtatacctgatactgaggtatagccatgagcaagttaagcacagtctcagctctcagagaatgtactttctagaatgtactcattctacagtgagtaagttttagtatttcattgactagcaagttatgagagaagtgtcccaagaaatgagataagggtgggcagggggtacttttgataaggtggtcagtcacagtgtgaaaagatggtgcctcaatagactgagagatgggcagagccagccatgaggaggctggagggagggaatttggtgagggaaggagcctgagagagtcctgggactgaaggaggagttcggagattgagcaagtaaaagccctgagccaagaggtgaccaaggaccaggtcaggtgaggtcttgtgggccttttaggagttcagttctaaa

SEQ ID NO: 25839 - DNA, 884 bp, Bovine  19866881141987
  misc_feature (1)..(1): n is a, c, g, or t
nctctccccattacacttaaccattggtcaaacaacatattctctgaggcccctctggttgggcccgtggggaagatgtttgggggcaagtggagcttcatggggccttcgtgtcaactgccatctctcctgcaaggtattgctccaacctcggccactcactgtaatgcaagaacacactggggtcaccgtattggcacagagtgggattaaccagatgaagtgctctcaaacaatcaatggacataatatgacacattgcctctctacagcagctgtgatcccataattacctcctcatgactggagtgacaagaacatctgaataattcaggtactcaatgtctaaatactccaagatgcactgggggggcataaatccaaagacgctgcaggaaaagagagccattcagctcgggaggatgtttgaccccagaacgcggagggtcttggcccagcacagacaacaactcagccaactatctgggaaggagaggtctacttgtcagcgttccagttccttctgagtctatcttcagagtgggacttccttctttgctggaagtggtgtaaattctcagaagatcaggcacacccatgctcaaatctaagtacaaaaacacactgcaaagccaaatacaaagggctcctccactgttaattggaggccatccatcagataaggttgattttcttctacgtgtttaatatggcaccttcacaagagataagaacacttaatgaaaatctacttgccaactttaaaaagttagcactcaaaacacagatgaagtgactgcaaagctgctttacacaaaaagtaggaaagtaagcagtaaacagaaaacagattttcttaaattccacactgttttgttaccact

SEQ ID NO: 25840 - DNA, 1019 bp, Bovine  19866881182256
  misc_feature (1)..(1): n is a, c, g, or t
ncaatagcacacaaagttaaccctacgatctctttaatactctgtagcctctggaactaccaaaaaagaaaaagaaaattaaaagttttaaaaggtacattttagaactcaaaagtcatctttcctaataacagaggggagagaaacaatggaattattaacatgcaagatcttcccaaaaaggcttgtatacttctatacattcaatgagttcatgtctaagaacagcaaaaactaaaaagaatgtgaaacaatattataaatgtttgggcactattatgcaaatacataggatcttttgatctcagatcctatgtatagcaaaaaccgattatgaaattgtaagctgagatgtataaacccctcaccagcatttatgttgatttcaaaattgctttgatcaaacatgccacagaagttattaaaatttaaaaatacatctacaaatgcctatgggaagacccagtagaaattttaggtttgatgatgcattttagttagttccctttaaatcctggacattcacaacatccaaaagtaaatcttaccaagaacactaatcccaattcctttgtagtctaataattctttttgcatctctagcaacacctaggaaaaaaaataaaagaaaataagatgatttcagtatgctatgcacaactctctctggacacacaaactgcaaaagaggaggggcaaggagaagctccacccgctgggtctgtgaggaagcatctgtccctgccacagccagtcccttctctctgcctgttcccaccaaaccccgatgatgcaacttacattcaagttgagtatgaaactatgcaatatgaccaattctaagatacagtttttccaaaggcacaaatttagagataaaatctcacttgaaagtaaaataaaaatccaagtaggaagttttctaataacaattctttacctgtcaatatcagttaaagaataactttgggaaaaatctgattccctagaaaatgtccccttcacaattgcatttgcga

SEQ ID NO: 25841 - DNA, 991 bp, Bovine  19866881233994
  misc_feature (1)..(1): n is a, c, g, or t
nttcgaaacatttctgtccctgaaaaacctgttctgatatcctgagattatcgcacatgtaaagtctcatgttactggaaaattcaaacacagagaacaaaggaatatgaagaattctttttctgccactttacccagaaaaacagcaaccaggtactatttcctcagttatgctggggcaggcactaaacacacacacacacacacacacacacacactcagggttagtttctgccccgagtgatcaaggtaacactttcactgcggctgaagagttaccacggaaactcagagctggaagaatttttagagactgatgaatccagcctcttccttttaccaccaaggagcttctatgcctttctgacttgcccaaggtcacactccaaaacagaaaccattcttgaacctacatcaaagatttctggcaattcatcacaagcatatagacaacatccagctttttcaagtagttgaaagtttaaaagtattaaagggaaaagtaattcattaaataggcaatgtatcaaatgaagtggagaatgtttagaattctggaaaacatacaaatcagaaataatattactgattactgctttatcggatagcataatataaagtattctttgagttttttgaatcataaaaactaaaaaaaaaacaaacacaaaactttctcttttggtcaacatgattctccttaaagagaagatgactttaaacagaaattttagatgctcaaaataaacactttgaacatgtaaacatacttttgttggataataagttttctggccatttcctggtttgtatcaagatgcagcttgatacatactgcaatgtatgcagacagaattgatttaattcttctaagggcaaattcaaaatgccttataattgcaaattatctggtggtagttgtggtagtttgtgtagttgtggtagtttgtgtatatgtgtacaaataaattggctttatcaaggccatgc

SEQ ID NO: 25842 - DNA, 884 bp, Bovine  19866881341009
  misc_feature (1)..(1): n is a, c, g, or t
ngaaactttgttgagtgcctctgcctttcggttattatgtgatgtggtctctgtctttactgatggagagttagattaattacaaattaattacatttgaggataacagaggatgagatggttggatggcatcaccaaactccaatggacaggagtttgagcaaatgccaggagatggtgaaggacagggaaagcctggtgtgctgccaggtccacggggttgtaaaatcagacaccactgagtgactgaaccaacaaattgcactctgaatgttttagttttgttctttaaactagatgagactacttttgttttcttttgatgacagtgagaaaaaatcatgtcaaatattttcaatcttcttttatagttggaacatgaaaatgcccagttaagaaatataaacttctctttgtctgaagcccttcatgcacactcattgacaagcatgatcctggatgatgaaggtgttttgggcagcattgagaattccttccggaagttccatgctttcttggatctccttaaagatgctgggttagttcttttctcttcatggcattcttctctttgtaactttagaggtagtttgctgaggaacttgagcggtttttattacttccatgaccatatttagccaaatgcagcgaattataggtaatagagttgatttttttttaaatgagtaaatctataaagaaaagcaaataggggagcctgctttggtagagtgggaagcccattataaacaagtaacctgtagacagagtaattagtaggtataattttttgtaaagactacattgaaggcaattttaattgaaaatatttgggaatggataaaaattttactgcctttcacttatttttctccttcaataag

SEQ ID NO: 25843 - DNA, 931 bp, Bovine  19866881365770
  misc_feature (1)..(1): n is a, c, g, or t
ntatgtattttgttaacagttcttataactttcctaactaccctaaaacaaattgtttttttgtttcatagatgaggtagctgaggttcaggaaacttgagagaccagcctgaagacaaagggctgaaatgtgctgaagtctggttggttctcaagctattgttcctggacttcctctttgctactttggttctctgggttactcagtgagagagagattctgtatagttgaccctagatatcagcaaagtcaaccaacgaaggatgaaaaatattgttagggggaaggaattccagaaagctccaaaaatcaaagcttgaatttgttgtgccctggcaacaactagcatagcatttacgttgtattaagtaatataagtaatctagagatgattttaaatatacaggcggatgcataggttatatacaaataccaagacatttttataagggtcttgagcgtctgcacatacctactctgttctgatactgcgtgcagagggacatgggtgctgtaacaaaggagaatcagtagatccctagcactgaaagattacatacaggattcaaaattttcatcagagacttcaaaaggctgtgtcatgtagtaatttgtaattttgctgagccatgagttgaatcataagtgtggagaggctgtactataggaatgagtcactggctttgagaacccagccagcagtagctcagtgtgactttgctattctttgtcagttttgcagtcatgcccataagaaaatgcagcaacagctgtcactctgtgtacagtgcaccatacacagagaagtgtacactgatgaagtcagagaaggtgaaatggtctaagaaatgacagttcttgccaagtttttggtaggaaattttatggagtatttgcaaatttgaggactcattgatatccattatccag

SEQ ID NO: 25844 - DNA, 761 bp, Bovine  19866881404803
  misc_feature (1)..(1): n is a, c, g, or t
ncctagtggtccgtgtgactgtgagagctggaccgtaaagaaggcagaacaacaaaaaactgatgcctttgaactgtggtgctggtaaagactcctgaacgtcccctgaacagcaaggagatcaaaccagtcaattttaagggagatcaaccctgaatattcactggaaggactgaagctgaagctgaagctccagtattttagtcatctgctgtgaatagacaactcattggaaaagtccctgatgctgggaaagatcaagggcagaaggcgaagagagtgtcagaggatgagatggttgggcagcatcactgatgctatgaatgtgaactcccaccaactctgggagacagtgagggacagggagacctggcacgctgcagcccatggagttgcaaagagtcggacctgactaagcgactgaacaacaacaatgaaccataaccaatgtctaccatctatgaaagtatattggcctcaaaatatgcaaagatcactactttgccttcatccaggtctgaatttctaagtcacttttattgcatccttagctttgttttttaattctatccttgctgttttgtaaaatgacattcaaatataatctactgtaatttgcatttatgtaagagctttcacctgaagttctcaagttatttaaaactatgacagcattttacaaaatacacatagaatttcaaaaatgcctatataaatgtcctcaacaaaagtgcaattctctctcttttttttggtaaaaa

SEQ ID NO: 25845 - DNA, 1034 bp, Bovine  19866881410350
  misc_feature (1)..(1): n is a, c, g, or t
naactgatactcttcttagtatccagtactcagtttctaaatgtatgattacatatttttctccatgttaaaaaaaaaaaggaaaaagaaaaaccaactcaacaccattcagcatgtggttttaattttatcagactgtaggaattttggacattgtctttgcctagatgttagaagaaaatattttttctacaacagccaagcctttcatactttaaccattggatcagcttctccttgtgaagagcctgtttctacaaaagaaagagtggcaactgtagaatttacataaaacttttgcagtttgccttattgagcaaattgcctccttagcagtagaatgttggattaaaaatagttgtgtctatgaccagactcactgcctaaagaggaaatggatcttgcttcctcactcttcaaagccattgctatatcatgcgagggacattcttagaaaaacttctcagtttccagtttttctccagcaggagcatgtcaggaagtggaaactaaactttcagcctggatacatattttcaggaatggcttcaggtctattcatggccagggacaaaggtgtgaatcagaaagccgtggaaagcaaagaacatgatttcccacacaccctgtgtaattgtcattaaccttcagtggctgggtacaaagcacagttgtttactttgcacttctgatccaaacaggttcttgaaacaaagacattcagaaccaactaagggaaccccctgaaggaatgactcacacaacggagagacatgccacccaagtgaagtctagctagggagatgatatttaaaaatataaaaatgagaatagcacaagacagtgtatcattagcacatgccgtaaatgctacctggaggcaaaaagagaagtctctgtgggctataaagttgctgcctctcctgcaggcgtgcccttatcagggcagtgcctttgtgtgacatggaaaaggccttcctggggagtggacccccgtgtgtctggccagcagcacgtgggcaaggctttcggtt

SEQ ID NO: 25846 - DNA, 1717 bp, Bovine  19866881835113
  misc_feature (1)..(1): n is a, c, g, or t
ncctttcctgattaagtcgagaatttttaccttttcttttaaagaaagtaccttatggcttctctttggcatatttaagttgccagcattgttactcttgcgtgttgggtctattattaagtaaaatgagggtgacttgaacatgagcagtgtgataactggacagtcaatctgataaacacatagctgctgagtgactaatggatgggatatgttggataaaggaatgactcacatcccaggcaggacagagcaagacagtgcaagttttcatcacactgctcagaagggtgtgcattttaaaactgaagaattatttgtttctggaatttcctatttcgtattttcagagcatggttgaccacaggtagctgaaactgcacaaattcacttcgtgaataagtggggggcggactactgtacttacatctgaataaaactcgtttcatgttctgccagtatggtgagcaggacttcaagagaatgattgtttaaccatccaaagtggacgatagtgcattgtactttgaaagacctgcagttttgggattctctatgcttttattcttaaccggaacctgcatttaattacactagtatccacttttgcttcagtatagtttaatttattttcatctaaatttatctttggggtggaggaggatggatagaccagtgggccaggtactctagttactggtgtttcagcaaaatgctttggtgtttggaaatggacaccttgtctccttgcctgctcttattgaggcctgaggattttaagtccatcctttcttcttgtcagctctcgttttagagcttctttctttccctttaagtaatttttgtctttgctttattccttctccaattatttttcaacatgagcaaacatcaagcttttcttagataatccataacttatgtaggaacaggtttctgactttagattcatctctgtgttgactagtctgggtttatatgactcctcatatcctttcagagattgagaatctgagtcttatcagtgcccaggtggtgttatttcttggtaaacatttctgtaagaatagaggaaatggcaattttcaggaagagccatgaactggaagattctaaaatcatttatgaaaatgcttacagtttgtctttttaaaaagaaacaattttgagtcagaatcatacactagaaagtgatctcctaactgtccttagaagtgaaatgagctgtacttctaataggattgctaatattttagctataagccacaaagattatttgaatagttttctccctatcctttgtgtggtttattcatttttagggaaaagtaattgatgtcctgggcattttccaaaatagagttttgccattaacaagcatttgattcttaggattctgtatattttattacttttccaaaatcttatacagatgagctattgatacagaatgagccaaattgtataactctttgtagaagtgttagaatgtttcgctagtgatgaagatctctgaatcatgttgactacatacaggagatgcatgtcaattaatgacagctgtttcctgacttaaagcagttaatgctaaactgaatatttctattgattttttaatgagtaccacatttatagcaaattatagaaatttggctgtataggtagatagctcaaattaattttgagcaaaaagtagccttatcttcttgcatttgaa

SEQ ID NO: 25847 - DNA, 2104 bp, Bovine  19866880474019
  misc_feature (1)..(1): n is a, c, g, or t
ntgattccttattttagagattcgacattcctggaattcagaaatgattatccatctctggggatcattatttaaataaaatgtgtatagaacagcatgaaaagtttggaaaaggaagttaccagcaatactgtaacagaaagcattaagacagcctgccagctgcactggtttcaaaacttggcttaacaagcgatgaaaagtagctcccgagttgcattgtaaaaaagcagaaaaaaaagaatatattggaaattggaattggaatctgccccgaagtccagatatggatataattaggccaaaggtaatagaaataccattcactgatagtctcacttctctcaagtattggctcagatgtcatgttttcagtgagccatcctacttcttctctgaaaacagctctttcttatacccctttcttttacttctgtctcattgtcaaactttatttttgcttaaaaagagccttttttttttgcttatttgattataactatctctataactagaataaaatttctatgaaaataaagacttggcttatctacttcaaactatcaccaatatctcgaatagttttggcacacagcagatgctcagtaaaataaaggtaaccaatcattttaattccaaaatcagaaacctgggagttatttggccctctcaacttctccttcttcaccttccatatcaaatctatcactttttattttctcagttgaacaatgcctccttatctttgcattcttctttctccttactttcactaccttgattctaaatctgcatctgaagcaacacaatatctcctgctaacttgatgcatccatttagcagccaacacagtaaaattaaaatatgagggtattggtttgttgttgttttaaaatcaccaaattggctgtacagaagatctccttgaccctacattttctacaagcctaagctttccctatttctctctctacttcattggtgcctttctctaaacccacataaagcaaaagcagattatataaaactaattaacggaaacagtgacagactttattttgaggggctccaatatcactgcagatggtgactgcagccatgaaataaaatatgcttgctccttggaagaaaagctatgaaaaacctagacagcatattaaaaagcagagacatcacttttgctgacaaaggtctgtatagtcaaagctatggtgtttccagtagtcatgtaaggatgtgagagttagactataaaagaagttgggcactgaagaactggtgcctttgaactggtggtgttaaggaagacttttcagaatcccttgtactgcaaggagatcaaatcagtcagtcctaaaagaaatcaacccctgaatattcattggaaggactgatgctgaacctccaaatactttggccacctgatgaaaagtgcctacacgttggaaaagaccctaaagctggaaaaattgaaggcaggaagtgaagaggggcaacagaggatgagatggttggatggcatcaccgactcaacagacatgagtttgagcaaactccaggagatagtgaaggatgggagaacctggggtattacagttcagggggtcccaaagaattggacacggcttagtgactgaatgacaacaacagtctcactctgagtcttcatcctggccagccaggccctttgtgatcgtccccattgtctctgactcagcctctcattattctcctcctcgctcactcatcacctgaccacacaggcttctctgctctctccacagatggcagcatgttcctgcctcacagcctttgcacctgctggttcttctgcccggggccctcattttccagctatctacctgcacggatgagccctcactccctttaggtcctgtttaaatattatcttctcaaaagcacaatttacctactgctttcccttgaccaggcgccccccactccttttctgctttattttcccccatgacagttctttccatacaacatactacagaagagcacttcatttatttattgtctgtcttcttccgttcaaaagcaagctccataagagtaagaactttggctgatatatattttt

SEQ ID NO: 25848 - DNA, 1158 bp, Bovine  19866880539853
  misc_feature (1)..(1): n is a, c, g, or t
ntgtaagaaaactgaaatattcacaatgaggtatttttcaagcaactgtttaatccatttattttacatcttaaaagccacgtaataaaatggaggtttccttttttattatatgtacacgttgcatgtttattgtggtcttggggataactgagggcaactccatttaccagatggcactccataccaggaattacatttcaaactagagagaaaaagtcttcacccagctgagtactgcttttgcgtgaatgtgtatgtgggcaggtgggtgggggtgctttttgcttatactatactgtacgtagctcatctggtctattgactctacttatgaattacttaaagagacatctaactaatgctatagtagcatagtcccatataacatactaatggtaattttttttaaatgactgaatttctatctaatttagttgtaaggcaatacagtttcggttgttaaataagcttacccttaaattcctaatctatgagcctgggacttatttctctatatggtagggtccttggctgacttgcctctctcaagtttggcggtattgggacccctacagactttatagagccaagggacaaccaaacccatcagaaatatcatttttcactggccacgcaatgttgaatgaatatgtggaggcaattcaattcatggttcctaaaactatctatattctttacttgtttaatcttgctaaaatttacatgctttttcaattcacaacaatgtttgggggaaatagcaaacttatgtaaaatgccaggcttaaagaacagatgaaggatgttactggatgttttaatctaatactgaatgaagggagaaaaaataattctagagtgaaccaaatgttgtcaccctgaaactctaaaacagaattctacctcaaatattgaataggtgatgacatttagcagaatacccataatggagaacactagattgcagttactttaaacttttattctttatgaataaccttttaaaaataaataaaatattttctttattccatctaccctccccaaacaatatatttattttaacatttcttatggttaaatattttatttttccagggtttgggttttggatttttttttggtgggtttttttttttttcctttctttttttt

SEQ ID NO: 25849 - DNA, 2021 bp, Bovine  19866880560747
  misc_feature (1)..(1): n is a, c, g, or t
nttttgtccgagtggcatattatgcaaaatggatacacaaaaatcatattaacgtataaaggcaccacagtcgtagctggtataactgtctgaagcttccaataacacaagtctcttttacatgaagattttggagtacatggaattaaaatgtaacttaaaaatcctgagacaactacttgagtgtcatgtttgttaagatactcattaatatttatgggcgtttgctgttgttttgtttgtcagtgttattttgtaaatgttgaagtgaattaaggtacatgcaagtgtagtaacatatctcctgaagatacttgaatgaactaaaaaatgcaaaggtataattgctggatgctaaagatacaatggaaaagatcaattaatttctctcagctgctttccaaggttagtttcataataataaataaaccataagttaaacattatttcaacctcacaaaaacaatttatatcttgtgtccttaaactgtaactctatattaaattatattacctttaatatgctatacattatagttcattcatttctcctcatcatgtatcctgtaatactggtacatatactttttacaaaaacatatgcctatatgcaaatacatgggtacacatgtgcatacactacagttcaaactgtggtgtatctaatgtaatccctaaatatgctgaaattgtatatttatagtttttccttaagaaaaatattaaaagaattctaaagactagtaggaatattaaggaaaagtgcaagatagaagtgactagatcatcctccatataatctgcagatggcctctactccttggcaattgaggtgtggtcatgacacacagagttaaataacacctaacctaggtgcttacgtatatttattatccaagttattttagatagtttctgattcttaaagggaataggctatttgtttattagtattctttctttcaaatttagggacacttatttatgcaaggtatttttagatcttttttcctaaagtagttaaaatcgtgagagataactaattgaaatttaaaagtgttatggtccttaagatgtatttaaggatctaagtctaagacttgctgctgtgattggcttctttctcatcttctttaacttaaaagcaaatatttaagaggaaaattcccatgtctctaaaatttgtaaatagcctttcaccaaattatgcattaaaatatatattgaagaaagaaataaaaataactttgtataactggaggtgttttagtctaatcaaactttactcaagtaaaggaaaaaatgtaaaaggaaaggaactagtttgtctaaactctgtatttgattattttttaaagtacagttaaatctgctgaatgaggtattttatcaaaatacctttattttatcttacttaattttacatagatctttcctaatgcatgggaaatttcagattttgtattctgtatgataataaccagaccatatttattactgtattagtcatgattagctaaagatcatgtatttgtcaagaaataacaaagagtaattattatatgttctgaagtttcacaaaatattcctgtataagaattctttaaaaataattatttgaacattttgaatctagtatgttcatttctctaacttgtttcttttggatgatctcagttaaggccacggatccaaatgatgctctaaaaattccagaagacactgttcaatcttgagtaaaatggttttaattttactcaagaacttagttcagattatgggcagcaaatccaaaattcttttcaaaattgtgccattttctttattttttgtaataatatatggtgctggtatcaagaaacggtgacagtgaagagaaatccaacaagttgctagtacataacagtgtattgtatttttctctcccttatgtaatataccattataatcaaacagaaatttccaaggtaaattgtctagatattaaagtatttttcagtttcttctcgctaaatgacaaa

SEQ ID NO: 25850 - DNA, 2499 bp, Bovine  19866880705041
  misc_feature (1)..(1): n is a, c, g, or t
ntattactatctcattcaaccaaaaggaggataaaatggtggactcaacttgttgacattttaaaaatattgcttgcctctaagcagatttatttattgcctttttgtttgtccaatttcagtgcttaccatacctgataaagatcctgaaaatctcagtaagaaaatatttaaagtacaaaattaaacttataaaacttgagctctctctttgtcttaaaatatactcacttatacaaaatataactcaaagcattctggagcaactaaaattcatataccttctcaaaacatgcatgaaaatgtttatgtttccatgtaaactcaccagttacctttaacctaaatggttattcaagatgcctctggataaaactcaagttgacaccgtctaggatagtttaaaaagtgaataaatgtcttttattcatctattctggaatttgatgtatcatttctccaaaggagaggtcagaattagacatgtcttcagaggctagggatgtgtataaaaatgtaatatatttaacagtgtaaatactttaaaagtggctctttagcttcattttgaatctttctttcttgcaaataattattaccttatgtggctgaatgctttatttcatcgagttccttgcaaaggtagtagagcctaagtttggagttgttctatgaagctttgtgaaaaataaggattaattaatgaccatctcaaccactagaacattttttttttccactagaacattttaaacacaaattttcacaaactgctgatttagtaatttttcttttaaaaaaacttcttcttcagctcatcttaaaatgtgttatttcttatgcatctgctttagggaatagaaatgcagcttagaaacatcctaaattaaaaagaaatccaaatggacatgagaaaatgtccacagattgacccataaaatggacattgagagtggatgacttagaaattagtatctgttgatattggcaatgtatattgattcagagggcttccctcatagctcagttggtaaagaatctggctggaatgcaggagaccccagttcgattcctgggctgggaagagctcctggagaagggaaaggctacccactccagtattctggcctggaaaatcccatggactgtatagtccatggttgcaaagagttagacacactgagcaactttcacttcacttcattcattcaggaagaacaaaaattttgaactgagaaagtacttgtatagaagtttatactatttaagttcattatgattttaatactaccctgaagttctttgatgaaatagaaaatattaaatttcatagattctgagggttagaactatatttcattaaaacaaatgctactaagctattttttctgataatttgagtggattgttaaatgatttgaggagattgggtatgtgcccggaagtctttaaagggtgacaactctaaaacaggtactgacatatacatctaattataaaactatgatgtgaaaaaagacaaaaggaatgtccccaggaatctgtcacttcattagcttaacattttaagaagaaaacttttgatcccccacttcttggacacaagctcctgggcagtaaacttgtgacctcagtcaggtctcagattactgacaatggcaagaaggtcagagttagggcagccagagcaaaaacacttcctctactctcatggacttcattgcctgacttgggtactaccgctctcttactttcttagttatgtgtgtgtgttgttttgagtgttagtgatccatccttctcagtatcattttggcactatgaacttgcaactgaagaatccaggcagccagggccacctttggctagataatgggccttgcacgcccatcagaggttaacacactctactccttgtactccactatgattgtctagacatcaacctaaacaatgtaaaaagaggaatgataaaatttaaaagctagtaaaagataaatatttttctaatttgaggttaagttttcaaatttttggagtcctggtgaaaagaattatctatattacaaaaactctaagtcaaagaaaagactacctgtataagaatacggaggaaaatatttctttgctgatcaatgcattaaaatttcagtgtcaagttcagagacctgaactgttttactgaccttgcacctcaactgcagaggttcccagaaagttttaaagaatttgttttcactttaactatcataaaatcctcatttgaacaattatgctaaatattttttctgaacttttattattatattttaaaaatgatataaacttattataaggagtcactattggacagggaggcctggcatgctgtgattcatggggtcgcaaagagtcggacacgactgagcaactgatctgatctgatctgattattcactaaaagacagtgtaatttaaaatggttagattaaaaactaaatttttggattggattaaata

SEQ ID NO: 25851 - DNA, 2249 bp, Bovine  19866880712906
  misc_feature (1)..(1): n is a, c, g, or t
ntgaagtattattgggaattttcccaagtagttacatgtctaagtgtgttcaaggagaagaggatttcaacataaaattatcatccaattcataagcacttattgttctccattgggtcaaaggggtgtgtgtgtatgtgtaaagctttgtaaagtattttaattaaagtaagtttagagttaattggaatagtataaaataattacattttaaaaacagttaaacatacttttttcaatttactgcaaaatgataaagactctgaaacatcttctgttagttaatagaagattcttgaatctgtacttgaattatttcacatcattcaaatagatatcaggaaaagtttttttcggtgcagttatgttaattataatttagtttttaagttataattttaaattatcaaatatgccactataatggcagaaagtgaagagggactaaatagcctcttgatgacggtgaaaaagaagagtggaaaagatggcttaaaactcaacattcaaaaaacaaagatcatgacatccagtcccatcacttcatggcaaatatatggggaaaaagtgaaagcagtgacagattttactttcttaggctgaaaaatcactgtgcaaagtgaccttttgaaattaaaaaccacttgctccttggaaggaaagctatgacagacttatacagcgtattaaaaagcaaagacatgactttaccaacaaaagtccatatagtccatagtcatagttatggtttttctagtagttatgtatggatgagagagttggaccatgaaagatgagctctgaagaactgatactttggaactgtggtgctgggaaagattcttgagaatcccttggacagcaaggagatcaaaccagtcaatcctaaaggaaataatccctgaatattcattgaaaggactggtgctaaagctccaatactttggccatcacatgtgaagaactgactcattggaaaagacactgatgctgggaaagactgagggcaggagaagggggcaacagggcatgagatggcatcatcgactcagtggacatgagtttaagcaaacttaaggagatagtaaaggacagaaaagtctggtatgctgcagtccatggggtcacaaagagttggacacaactgagtgactgaacaagaaaaagtactcaatctgaagttccagtactttggctacctgattggaagagccaactcattatacaagaccctgatgctgggaaaggttgagggcaggaggagaagtgggtaacagatgagatggttggatagcatcactgactcaatggacatgagtttgagaaactctaggagacagtgaaggactgggaagcctggcatgctgcagttcctagggttgcaaagagttggacatgacttaatgactgaacaaaacaacaaggttaaaaaattatgctgttataacaatccaagaaaaacagtctttttatagaccaagataatataacattgaatgaaaataaaaggatcaaataaattaaagtacagttttcattagtggcaaataaattttctgttaaatttttctgttagtagagaggaaagaaaatgtatattttcttgacacttggtgaaacatactcatgggcactctgaacatcccttatgcctacaggttatttttgaaataatatgaaaaaaattgacttaagccactttcttctgtattgctatgttgttctccatttaaaaatgaaaaagattaaaggcataaaactctggtatctcccagtttaacattgctgtgggtaagtggaatgtgtcccttagtgctttgtaacttttaaaaatattgctttcctagataacacctaatattttggttttacttctctattttaaatttaacttctcttgttctttctaattctttttgtgtctctttttttaaagcttctccatgggttgataacagtagaactccaaacaaaattgacctttatgatgtacgcaggagaccatggtaagaatgtttgggtaataatgaaaagatgaaaaagacaaaataagttttatttctttttctttctttttttctggtgtaaaaggttggagggacttgttctactattaggtgttaatagttgtctgattattatagagctcttgtgtgtttttttttccttctatacatttgcattttctatacacttctacttttaaaaataaagttaaatgaaaatgatgagttcagtgggcactgata

SEQ ID NO: 25852 - DNA, 2283 bp, Bovine  19866880760031
  misc_feature (1)..(1): n is a, c, g, or t
naactctcccttcctgtactataaacatagcatactagttcattttttgggaaccgtttaggttattttgctccctttatagtttatccacatgtcatccattcttcaaggtctaaggaaaatccattctctcctaaaagctattactgccaaacactaagaactttcagaattgaacagattatctacaaacttgtcactcaatgtgaggtccaagaaccagaagcatcagcatccactgggagcttgctattaatgccccaaccctgattcaccgagtcagaacttgtcctttattggacaagatctcaaagtaacgtttatgcacattaaagtctggagaaggtctgatctaccactcatgctggaaagtggtcatcttatagaatcacctgtttcatttgtgtagctatttttcctttagaaatttaaaaattctaaagtttcaggagaaacggtcttttaataatgctccacaacaatttcccaaaaaataattttattcgttctaatttgaaaaggatatactcttataaactgcattttctaatggacacaaaataggtgtattctgattcttaagtactattaaagattagaaattgtacatgtgtatatttattccttatctgggattggaggattctattatatgctttcattcaatacaaaggagcaaacgacaatgatcgatgatacgtgaacctatcaaaccttacattcttttcaaaatggagactaagtaagcttgtaatcctattcagatggaaagcggaaatgtgatgatccgtaacctatgcagatttgatctttgccagccagagcacttttatctacatgctcttggaccccctcaggtgtttaccgactgttgtctgggggagctcagtatcaaatgagaggaagctgaatctgtctcttttcttacttcatagattaacttacatgaaaagaagtagatagatcaggccaaatggtttcatgttttagatatttaattgttaatgtcctattagattataaaaattaaagtttcaaaagtgatgattctaatagtatatcccaaactactataaatactcattagcctagatcccagtggataaaatgaaaccctgatatcttttcccacttcagctaatgttagatgatcagtaatcacaagatacaaatgatgtgtttggggaagtttgccggattcgtaggaaagccaagcaatgatttattccacagggtgcctgctgtgctacatcaaatcaacctgtccatttgagaagtctcattttcagctagttgatatgattcagagttttcagtgtggcctaaggtgccagccagaaaactattaattaacctcagagaatcaacagtaatatttagcatagttagatcagtttatagatttttaaaaatagtgagtacaagaagttcaatagtaggtcatattccatcctaagctttagataagaatgtaagtctgctcggttattcgatgtggatgctcactaatagaaaggaactgtgattttttgttttaaaatatttgtattctttaaatagtactagattactatttgaagctggtctctcaaatctgtgtggtcctgatctttgcgttaacggtagcagtatgatgtgtactcatttcaaactgtgcattttctgtgtatgtattgcagggtaagttgaaagaggagcactattatgttgacagtatagatgttgagatccctggcattatagaccgacacagggaaaattcccaaggacttttcagtttctaggtacctttcagatagttatcaaaaattaggaaggtagtatcttggccctgtggtaattttgtatgacactaactacaaaaattccatttaaactgtgtgaaaagttctgtagggagtattttatgccactgttaatggacattgagccctaatttaaagttaaaatagtatataagttttcctaaaaatatccttgctgtttaggtgatttactgttctttaaatggaacagtggtgctcttgattttgctgtcagaagcaattaatatgccatgctttgattttattagttgaatgcatgacctgcaatggggaaagttaccgaggtcccatggatcacacagaaacaggcaagatttgtcagcgctgggatcatcagacaccacaccggcacaaattcttgccagaaaggtaaaataccaccaaatcacgtttccaagtgatcctctttacaaactgtaatttgtcccagacaaattacaggaaactctctttctat

SEQ ID NO: 25853 - DNA, 2251 bp, Bovine  19866880779742
  misc_feature (1)..(1): n is a, c, g, or t
naagacttgggtctattgtctttttaagtattttcctgtggaagcttccatatacatgtaaaaatgtatatgctttcatcttgttgatctgttttatgtctaatcccaagacctagacagagactctaaaatactagagtaaaattttttcttccttacaagtgggtacacctctaacagccttttttccattttgcaactgaacattgtataaatttgacagcacaaaggtctgtgctgtcttgtctttaaatgtgcatagttgtcgagacacagcacactctagaagatgaccatcagtagatggtggcagaggttccagtaaggggtacaagatgtttgaaaacagtagaacacagcagttgctaagcagataaaaagtggtgtggcagtagtggatgtgttcatgtagcctatgacacattttcagaagcacatttgagggttaatttataggtagctgatattctttgtgaaaaggagagacaaagttcagtgaccctgttctgatatgtgcatgagatataatgaaacttaaaatgctttcttttgatatttcaagagctttctgtttaactccattcctgagtacagcagacacagctttgcctttaccaaaacctgtatactgtatgtcctgctacacaggtagatgacaactttgagacttcctttcactaggtatggccaataagatgtggacagcttcagacctagcatgggaaaatatccagcatactttttaaattctttgattattcaacatagaaaaaccttcagtagtctttgagccctacagattggaagaaccacttgcctgaaagaacctagatctaaaagacaatatagaaagctgcccaccaaccggaaacatctgcattaaacttgagtgagaaagaaacttctactcttcttcttctacttctactttaagccattgttatttggggattacccacgctaacaaacggtctttcctggtggctcagatggtaaagaatccacctgcaaagcatgagatccaagttcaacccctgggtcaggaaaattccctgaagaatgaaatggcaacccactctaggattcttccctggagaatcccatggaaagaggggcctggtgggctgcatttcatgggatcacaaagagttgaacatgactgagtgactaagcatgcacgcacactaacaaacttagtcaatcaaacagtcttagatgctctctcttcacatctttttagctgattatctctctgtgtcaatgtaaaaaaaaaaaaaaaaaaactatctgaaaccagaaaccacaagaagtctttgtccacaaataaggagctatttgatctgccccacaaccatcattatttcaatccttgcattgtctacctgagaactatcataagcactgtgtgtcatattttgttccttgtctgggaaaaaaaaatagacatattcaaacttccatggccattccagtagtattgtttaaaaaaaaatcactgcacacttataaatctgtactttccttcttaaaatagggtgttgacctcaaacaaaaacagttttaagctacatctacatgggtgaccatgtgtggcataaaatagattttccagcatgcgtttatttggcaatgacttaaaagtacaaccagatgtttttatggagaatagctcttttacccacaaatgtttccaatttaaatacgtttgttttgactctattttgctacagatggaaagcatccattttctttctttccagtggggatagacagtgaacactggcaaatatcatagagaaagattaccggtgtagacaaaacttcagtgaaagcttgtatttccataaggagaatttttaaaagacaattttgcattttaaacagttggctttttaaagaacatttcccttcctctaatttgtaccataagtcttaaaccttgtatgtgtttgatccaaagggaactactttacttttaagtgataagttagacagacctatttggaatgacagcatagcttctgggtgtgccatcagtggctactgcaaatacatatttcagaatctcttatcaaaaggtgtgtaataaataaacttcttatcaaattttatttgcaattcgcaggctgaaaaataacagaaattttaaatatcattaaaaaataacagaaaaagtttttcttattttttttcaaaaacagactactgtgtatgtgacaaagtaaaaaataatcttggcaaaagtatagtt

SEQ ID NO: 25854 - DNA, 2466 bp, Bovine  19866880825120
  misc_feature (1)..(1): n is a, c, g, or t
natgtacctttccacttaatttattttataaagcccagtgatctgaaaggttcttgcaagtctgcaaagatttgatggcttagtttaatccattttagcttcttaaagctgtgggaagcatgttccttagtcgtgaaatcttgctatccaactagaaggaaggatcctgggtgggcaaatgatgactggcatggccccaaggctgccctagagagagagatgcaggactagccagcacactccacatgaggttatgaaatttggactgcagaacatttaaatgattgattttgccacttagtagctgtatagctttcagcaagctcgttaacttctcaaattttggttttcttatttccaaaatgaggatgatgttgatggtgataaaaacctttttatcatatggctattacaactgtgaatgaagtgatacatgaaaagcttttgtattatatggaaaattataagcacaataaatattagctgcagtaataaagatgacatgatgatgatgatgactacaatgtcttctatagtcaaactatcagaattcaatgaggtaacattttccattttcatgcctcaaaaagaacataacttgaaataataccttcccagagggacaaatttggtttgctttactgcatttaagaataaactccaaagaaaaagatactgtctaaatgccgctgtgtccatataagatatgcctgtatggaatttcccagggcctgacaaaagaacaaatttagtaagtgaccagtgagtttgtttaagtaaatcacaccaagcaactttaaaaaggaaatcgaaatgcagtagtttttgcttacatgatcttaaagacctagctgatatttctcttacatgtcttgcatgtgggtatataacaaagatacatgcccttgggattatgttggtgtttaaaaatgttaacaattacaatgaatcatccttgcatattaagattataagggagtaagttcaggttccccttctatctgcatgcactgacaggatttgataacagaggaagaagctatggatacatttcatttctaagcaatttagctctgcagagactattgtcagcggagaggtcacaacataagtgatatacttatttcagctgttcctcttgggtaaggctacatacttcactgacacaaataatgagaatactcatgaaaaactatgtgttggactgattagtatgaaaggagaggtgccatcagtacaatcattttttatatgaacttgctgctgctgctgctgctaagttgcttcagtcatgtccgactctgtgcgatcccacagatggcagcccaccaggctccactgtccatgggatttccaggcaagagtgccattgccttttctgttatatgaacttaagtctccctaattcttacagtgacatatacaagggtggaacattaattttactctacattccctttaccttctcatactgtttatggggttcaaagaatgttcagactaccacacaactgcactcatttcacatgctagcaaggtaatgttcagtcctccaaagctaggcttcaacagtaagtgaaccgagaacttccagatgtacaagatggattcagaaaaggcagagaaaacagagatcaaattgcaacatccgtgggatcatagaaaaagctagagaattccggaaaaacatctacttctgcttcactgactatgccaatgcctttgactttgtggatcacaatgaactgtagaaaattaaagagatgggaataccagaccaccttacctgcctcctgagaaacctgtatgcaggtcaagaagaaccagacatggaacaatgaactggttcaaaattgggaaagaagtatgtcaaggctgtatattgtcaccctgtttatttaaattctatgcagagtacatcatacgaaacgctgggctgaatgaagcacaagccggaatcaagattgtcgggagagacagcaataacctcagatataaagatgatatctttatatggcaaaaagcaaagaagagctaaagagcctcttgataaaagtgaaagaggagagtgaaaaagctggcttgaaattcaactaagatcatggcatccagtctcatcacttcatggcaaatagatagggaaactatggaaacagtgacagactttattttcttgggctccaaaatcaccgcagatgttgactgtagccataaaattaaaagacacttgctccttggaggaaaagttatgacaaacctagcagcatactaacaaaaagacattattttcccaacaaaggtccatcatagtcaaagcctggttttttcagcagtcatgtatggatgtgagagttggaccataaagaaggctgagtgctaaagaactgatgctttcaaactgtggttttgaaaactcttgagagtccgtaggactgcaaggaaatcaaaccagtaatcctaaaggaa

SEQ ID NO: 25855 - DNA, 1668 bp, Bovine  19866880840188
  misc_feature (1)..(1): n is a, c, g, or t
nttttgcctccaatttgaatgaaaagagtgaatttgattctatttattctgaatttaatgtatacattgaagataaattctaaagtgattaactgatttataataccctttgtaatatatagtaacatagtaaaggaattcagatgatcattcatgacaacttgtatcagagcatcactctagcaaatatgaagaatgaataattctattttgcagtggaaaaaattgaagtccatagaaattaacagtttactgaagatcactgatattaccgtagatagaagttgtaacagaataataacttttgtcttggttctatacacaagttatataatctttcttgcaattaagcatatataatttctgtcaatgagatcattgttgtttgttttctgcattaaccccagagcagattcaaatatgtccacttatataactaaaatgaagagagcattttgataaaatattttattaataataataagcatggttataaaaataacaactttattaactacagaaaatttatatacacgtcataaccaccagtgttcccctttgggtaagcatccagctataccactcaataggcagcttatctatttcctatttacatacaagacaaacagtaataacatcccacagtattccattttcagtttcctaaagacagaaactttctgtgcaaatgggaagtgaacctactgaaaaccacactgtcaatatttatagggtccagagaattttaactttttttatattagcaaattcttagttcaaaattgttgaatattgaaagataaattcttttggattttattatgaaacataatttattcacataaagattatatttcattcaaattaactttatttctcaaatgagtttgtctatatatatggggtataattgattgaaagtagttcttttttggacttatgtcaatttaaaatatttttagtgtgagtttattaaaattcttcaccacatgatccttatattgcaaagccagtattttttttttaatgtttagaaaaagcaagaaaattcctgacagcaatttcttatttcttgacagtgtttttttcaagagaatgttgtggctataacattcactttctacagtaccattggtaccaacaagaaatattcacaggaataagtgaaatacaattttgttatcacatgtcattattgttatttttcttgccctccagtgtctcacatttcccatagtttgaaacacttagatagcaagcaagagcctgttaatactagagattcactcaatataaaccattttactgaggacctgcccacagcagataggtaaaagtcattacacatttcacaataaaattaaagaagtacacaaaaggattatcattccttctgcacggcagaggcattatgacaaatattttaattttacattactattcctggtagacataagaaaatgtccacaattataacagcacataaccattattcaaacagccaaaataaaaatatcattgaaaacttctaatttaaagatttttttccatgactcaaataaaatggatttttacataaattggattttttattttttattaagaaaaaagaatgcccaggaaatagtatttttcaccagagaaaaatgacatggttattccctgttg

SEQ ID NO: 25856 - DNA, 2114 bp, Bovine  19866880881493
  misc_feature (1)..(1): n is a, c, g, or t
naaactccaatacgttggccacctgatgtgaagagctgacacatttgaaaagaccctgatgctgggaaagattgagggcaggaggagaaggggatggacgacagaggatgagatgggtggatggcattatcaactcaacagacatgagtttgagtgaactccgggagttggtgatggatagggagcctggtatgctgaagtccatgggattgccatttccttctccaatgcgtgaaaatgaagttgctcagtcgtgtccgactcttctcgaccccatggactgtagcctaccaggctcctcccggccatgggattttccaggcaagagtactggagtggggtgccattgccttctcccaaagatccactgataattgcttatagctaaaaaaaatctaatgtaagaataagtgcataacagattaagaaatagtggcacctctgtgcaatcacatatctctgcaacatccacatatgacttcagttcactaaaatatcatatatacacatctgaaaacttttatcatccatgaagattttagaggaagactgaagtcaaatggagtccaagatgtttcagtaatcctctgttactgctatatcaagtatatcaacagttcagtcttatccccttggacgccatgaagacacatatttacaacagcaatattattgggccatagcttattcttcccttcgtttccctatctcttgactttttcttggtgcttttcttgacctcaattttcaacttaaaatttatgatctctggtctaatttatctcttttcagttcatcactttatattatttttgtattctgaaaggttattttcaaagttaatctaacattttctgcagtgttctaaatgtcaagtggttgttcctgatgagatcataaattcctacatcacagaccaatagagtggatggactgattaagtctccatagagctcaatactagagaaggcaatggcaactcaccctagtactctagcctggaaaatcccatggacagaggagcctagtaggctgcagtccatggggttgctaagagtcagacacgactgagcaacttcactttcacttttcactttcatgcattggagaaggaaatggcaacccccactcagtgttcttgcctggagaatcccagggacagaggagcctggtgggctgctgtctatggggtcggtcacgactaaagcaacttagcagcagcagcagagcttgacacacattgggctttaaagtattataaacatgtgctcatttctgaactttagagtctgctaggtaggatataccttttattaaaataaggataacacaacggtattgaaaatcctctgttatattgaaataatgtgaatattccaggtgtatcttagccactcagttgttcagtttctgagttctggattattatgactttctttttccttttctttcctcgtagggttactttgctacctttttattgatgtttctctgccatatttgtgaaatagcataacttctcatcatgttttagagtgttgtgtacttgctaaatgtgtggatgagagatttttgtagcattcttatttttttaaatagctgtttttgaaaatcattttctatttacctcagcaggtctgtgatcacaccagtaaagtattatttcagtaggatatgaaaaacaataacaatgctgatcaaaagagtttgaggaaagatgtgattacaattcagaaaaacaaaagacaaaaaaagcagatgaacagatataatctattataactgcagactgagaggtcactatagctggaatgagcacagaataggtgggttttgaaataacattgttttattttttttcctgatttgtaaaagtaacacatggatatgactactagagaaaattttaaaaaaaagataaatatgtaaaaagaaaaaaaaagtggcatctagaaaaatacattttgacaaatgaatacctcaaaaaactgtggtacataattttaacattattttattgatattttactatcaattaaaaatcatttaatataaaggctttgctgctgctacttagtcactcaggcatgcctgactctttgggaccccatgga

SEQ ID NO: 25857 - DNA, 1656 bp, Bovine  19866880913123
  misc_feature (1)..(1): n is a, c, g, or t
natttatttacggcctataccacacaggaggataagaatatatagagagttttagtttctattcctctctatgagttttggaacaatagataaacagctgttgttactaagaacttagatttaaaaggaaaagagtactttttaaaaaaagtttatactacactgatctggtgaaaaacagtttcacctacttctccaaagatggcgacttcaaaaggaagtctcctataagtaagaataaattcaaaagtatttgccttttcttctggagtaatgagatttgcagagatcctctaattagctcaaagatgtagattattggaaatttttctacagtaaagaaaataccaccctcaaattttacagccttcattatgtcttcacattgcatgattaatattctggtgagttttataactctattttagttactaccctacaattatcagcataaagatttataaaaattgatgttaattccttgaaagaaagacacactaagggaactctaggtcattttctacttggtgtataaagaatataaacttcatgcttattaagaattgacttattcattgaaagaaaaataaccagtttcaagttgtccctattctactttaatatcactgtgagttaattatagtaaaaatgaattttattcctaaattctaggaggctagagttaaagaaccaggggaaggtttagaaaaaaaggagatattccagtttgtatttaaaacatacaaattttgtaggcataaaatatggaggaagaaagctccagcagcacaaagggctggagggagaaacatggagggtcttgaaaacaagggaaaatgcagctagaattcaggtgcactttggggtatgtttcacgatgacattccaatagagatagatatataaaaaaaaaattttaatgttctgattaccatacagtataatatgtgtagtatatagaaagttctaaaatcaggttttaaagctagctcctattttcagtatttacttcttataataaataatcttaattttgtataataatacatttttaaaacctattttacatagaacatggcattgatttttacactaagcaatagacatgtcttgtcatatcaaatattataatttcaagactgttaaactatcagtataatttatacttttcttaatgataaaatattctagtattttaaattattgccatttttcattagaatgacaatgaaaaagtcagaaattaaaatcaaatataaatttttgctatgattgtgcataaacatgctagaaaataatctcataatatccttaattgggaaattaacataagtattacaactaccatggttatagcaaggtataagtaggttcctgtgtagttgtcttttgcttaacaactaaaatgtcacatcagggacaatggcaacacatatgggacctttgtaaacatttaaaacagctctatctctggaggcacaaactgcaaaacccagggatgtttggcaagcagaatgtgattcgtccctcttgtgtccccctcatatgggtgtcttgtgcagggcacaaccttcacggctgcacatggccatactgctgggaatacaactatttgcaaataacccaaatatgtgtgatttgtgtctattaataatt

SEQ ID NO: 25858 - DNA, 1166 bp, Bovine  19866881025041
  misc_feature (1)..(1): n is a, c, g, or t
ngattgaagatttatactaccaaaatccagtataatcttgatgagaatccaagaagtaagctaccaaatgctatttatcttttccttaaggctaatttactctgaaaatcattctcagtattattttgaggctgtctgtacataagaaagaagtgaggactgaaggaagtttgttgctaattcagaaaaagaatttctctctagaaatatagaattcaagaaggaggttagggtaaaaattattaacataattctagcaaaattttcccccaaatgagagtagtgctaatcgtggaaagaggtagacagaagtagtactcataactattaagtcagtttcataagctaaatctaaaataaaaataacttgttcaccctatgctggtgaatatctgttaaatgactatacattctagggggaatctagggggaagccatacatatttttaaatgcttaaaacaaatattggtttcactttaccgagaagggaaacactgtcttgcagtaagaatccaactttcctttatcaatgatcctccgcagatatgtttatttctaaaagaaagaggaaagaaaaacaagtaacatctgtacagaaagagtgcttgccaattaatgcaaaacctatggctccatttgttaagcatgaacacattgagaggaaactgtagatattaacccaaatagaataaatgagtattttttttatcagaaggatgatacttgatgatgtagcattagaacttgtttttcaaaatgtgattataattttatataatcaactttactgattcattagcaaacacatgttcacatgtgtgtagtctatccttataaaagaaagtatgtgctataaacataggattattagacctaatttaaattcaatgtttgattatgaaaatgacaaatttgagtgtttatttaaattctgaaaaccatcttgtggtaaccatatataatatttatgcactatttgcttctttcattaccattatttagttctgatacattaacaggatataacagtaaatttgtttgtccagcttaatatcaacaatataacattttacttatcaaattaaaacagtttttcaagatatatcatctaggaaattataatatatttgtaaagaataataaatactagaatatttatttgatg

SEQ ID NO: 25859 - DNA, 1566 bp, Bovine  19866881064898
  misc_feature (1)..(1): n is a, c, g, or t
ngccctttgtgaatgttttgggactataactctatgctaatttaaaaatggtcacaaacttacatcatcaattatatgggtagtaaatactattattaagactaaaaataattcaaactgttacacaacactcagttaactactatttacattaaaaaagatgaaagtagctgtgacttaccaatgcttagcagatcatgtagatcaccaggagtgggacctgaatttggccctgtgttctcatggagttgacactaagggatccagagcctaagcagaagcacacaaatcaatacaacaggtagtacaggaacaattacaaatgaggatgctgggatagcagggaaacacaacagccagattctttgtgagatacaagcaacttaccatttgtctaaaggcagtaatagcatcagttactgtgctagggcttagggtctaggcacatgttttggaatggcaaggttccaagcaggagcttctgcacaggtaaataaatatgcagtgactcagttattagaatagagattcaagtgagaataaggtaaaagctgagttatctgaacatagctgtgggtgattgcaggggtgacttctgtttagtctgatagttagctagagctccaagtatccctctaggatgtaaggaagtactgagcctgcgggtggtttgcaaggaattccagctgcatagagattactgcttcagccttgagaattttacttgactgtgaattcaatataagctaattttggatacctaggaatataatgtagttgtcatataagaatatagcatcataataagagtggtctaaaaagttctgtattgtgcttagttctggatgtaaagttttatgagggctagtgacatacaatttaggaacaaatttaattgcttttaaggtaccaggtatgtattgtaaagaagttaagtggacctagaactgaaagaaagaagaaaggaaggcaggaagggagaaaaggaggaaggagaaaaaaaggtggagaggaacaaagagaaagagggagccagatgttaaatggcaactgccgtttggccaccctcaggaaattagaacaggcaaagcatatggtgagctgggtggtgcatgacccgtcaaggggctaccactccaggggtctttgatcttgggatcttcaagtatttaccaaactgtgagatatatttattagtgtctattatcttctgatttttaatcccggcagctaattttttttagctatgtaatgggccaagaaaaatattctgcacacacgggactgttcctcagggtagcctctgttcctcagggtagcctctgttcctcagggtggcctctgttcctcagggtagcctgttcctcagggtagccttattcctcagggtagcctctgttcctcagggtggcctctattcctcagggtagcctctgttcctcagggtggcctctgttcctcagggtggcctctgttcctcagggtagcctgttcctcagggtggcctctgttcctcagggtagcctgttcctcagggtggcctctgttcctcagggtagcctgttc

SEQ ID NO: 25860 - DNA, 1417 bp, Bovine  19866881147120
  misc_feature (1)..(1): n is a, c, g, or t
nagaaggcaatggcacccccactccagtactcttgcctggaaagtcccatggacggaggagcctggtgggctgaagtccatgggatctctaggagtcaggcacgactgagcaacttcactttcacttttcattttcatgcattggagaaggaaatggcaacccactccagtgttcttgcctggagaatcccagggacagcggacgcctggtgggctgccgtctatggggtcgcacagagtcggacacgactgaagcgatgcagcagcagcagcagcagcatctcaaattaggataccacactcatttagccccaattcacatcacattgatacatatcatctactaaacataaagatttttcatctggctaatgctttcataaagtgatacatgttttaaagtaacaaatgtccccttctttgtgctgccagcaaatcagataatccacacatttctaactgtagattgagataagatatccatggggaaaaaaagaatatacaaacttttattgaaaacatgtcatgtaccagaccttatgttatagagtttctcatgtgttatcaaaggctgcaaagcatattgtaactgctctcatttgtacaaaattcacggtaatgcacttggtttctaacatcacaaatacacacagaaaagactaaaactaatatatatgcttcaggattgttttcaagcagaaatccttcaatatttaaaatcaggtaggtaatttcttacaacaggaaagcaattaatttagatgacatttagatgaaaactttttctttcctgactttgagctacttatagaaaagaaaccctttataaaatttatcttagatgaaagaactaatgctaaagcatcttaaactaaattcatcataaaagtatgttccagaaaacattttatccctaacatatcaatattttagaacacaaacatttccagaattttcttcaggtgttcacaaatattttttccctttttaagttagtttactgttgaaaaatagtatccatacagaaaagtgtatcaagtataatgatttgaacacgaaggaagtactcatgatgcattcacatcaaaaccaaatcaccagcatctcagaaatgtcccttgtgctctaacttctaacaccagagattagttttgcctttacagatattttttaatctagcaaagctctgataaattctttgtgacctttattgaagtattcatttaatttctgctagctctttcatttcttcactgaagacagaaatttatcccctgagatcaagtgaagcagacctgatgaaaatagtaatatcaaattggcactgatcgggacagcctttgaaagtctctcattggcacatactatacacttggcaggttctatttttcccttccactcttacaatcacagcaaa

SEQ ID NO: 25861 - DNA, 1450 bp, Bovine  19866881181338
  misc_feature (1)..(1): n is a, c, g, or t
naataatttttaaactattttaaagagtaattttgttaaaaatgtagttctgacatgaaatatttgtaacagaaatataattgttgcagatgacaatcataaaatgcaacctatgacctgaaaaatcagtttttttccaactaatctctgtggattcatgtaacatatgaaattatctacatgctgattaatactgtgtgattatttttactctactgaactgcttcatgactggactttcatatttgattactgcacttgtctgcatcgtttcagtttgtcaaaacgttcattttggagagcatatagaagcagtgttgcttcttttgaacatcataatgcttacctagaatatcctagaaatgtattatcagtagcatgttttttctgtttataattattttgctacacatctgtgatttagcctgaagcctttggcttggggcatgaaaaaatttaagaatggagctgaaaaaaaaagcaaagttaaatcatttgaaacaatattttaatatcactctgttcatagtggcctctgatattaggtggactcactgtggaaaaaaagagtagatggacagggttactacaaggcttagtgtaatttgacttttaaagttattgcaatgctctcttgagagtgttattttagatgttgcatgcttaaagaactgactaatagatactactaatttctaaggcatttatttcattgacttttaaataagctttcaaaataaatttctaatttttatgactgtttataaagcaactaaaatacagtgtcagatatccaaaaactaatgcataatgacaaagtttaaattgttatttgaatttgacttttttctgtgaatctatttttaggaactgggacttgtcattactggaactcttccggtcttcaacataaccggccaaaatgaaaataagacaaacttaaaggttaaaagttaattgataaaattaataataataaatgataaactatgacgttgaagctcattgtggataagatatttctataaggaaataatacaacgtaactgtctcatgaggctgaaagtaaaagtcagcagctgtctatgtgataaccacctgggaaaaaggaaatgcaggacaaattctcagttcccccagagacaagattcaacttaactctatctaactgtgacttgacaagaacacaagttcaggatctgggagtaattattgcttggaccagaaagttcatttgggtttcccgtaagatgttacggaatacatgataaatgggcagtactactgtgtgcacatttttaaatgcatctaagatacccatggagttcaggaaaaaaaaaataacatggtaatgtttgtatcagatatatataggtacctttttaggatcgctcatcctcccagtcccatacaataaattattttttttttaattatcatgtaacttaag

SEQ ID NO: 25862 - DNA, 807 bp, Bovine  19866881246396
  misc_feature (1)..(1): n is a, c, g, or t
nagagcagaaggggatgacagaggatgagctggttggatggcatcaccgactccaatggacatgagtttgagtaaacaccgggagttggtgatggacagggaggcctggcgtgctgcagtccatggggttgcaaagagtcggacacgactgagcgactgaactgaactaaactgccatctaaccacatgtacttttataggaagtgctaccaaaccaaacccattttaggcatggtgttgttacatctagaaataataaatcaattaaaaaatattattagccatccaacatataacttaatgctgacagattaattttcaataaattcatatttaaatttaacttagttggttttagttattcagagatatatgcaaaaattaatttgttgagttgaaaattcaggtatcttggaataatgcttgctatcaaaggaggattttaactattaccaaaacgatcttcctatttatttcacagaatctgtatgttgcattgtgaatagcaaaaaaataagatagttcatactctttgtgattaactttatcaagcattgaataatctctaagtttttaaaattttaagttgattccctattaattctattaaaattctttgcccttgattagtctgctttgaagagacttactataaaagaagttttccttttcttgagactgtgcttccttttaccagtttaatgaactggttatatcctgagcaatgtattctttagttcttttacaggttgtgttttattacattttaattatatgcatatttatcccatcactataaatacaaaa

SEQ ID NO: 25863 - DNA, 1085 bp, Bovine  19866881424843
  misc_feature (1)..(1): n is a, c, g, or t
ntaatacagcttcaatattgaaaataaggataaaatcttgaatgtcaaaactatgcactaaaatgatgacattctccctagagttatcacttctcctcactcagattttatattaagtgtcttcacacattatgtgtccctcacagggtcctgaagacaactgacttcatgacttcttttacagaaagaaatttacaatgtcttatataatttaaaaacacttctataaaaatgcttgcaaattctcagtttttccagaaagatgaaaaaagaaatatgtgtatgtgtacatgcaaaaatactctggtttttatgatataatttataaaataaaacacctagctttttatcaatagttttctgtatttaaaatttaggtctattctacagcagtttctcttgagtttgacctttccacgacttcttgaggcaggtatgtcatagctcagatgctatcataataacttaaaattttctttttgggtatgctgagtgtgtgtgtgtgtgtgagagagagagatcgaccatttaacatttttgtaggttaaattctttttgtcacaactttcctaatgccttagaaacattcctaggtcacattgatttctgttttgcagctgttatatattcaaattcatttattctaatgagagttaatgggtacctttaggagctgccactgtacctcatggagtaactagccaattatggtgcctgcccttatactgattgatttgttttgctctttgagaaatggaggctctgggagacccctcataataatgttctttgttttccccacagttgagatggaagatgatgactttacggcctctctgtcaaagcagagttgcattactgaacaaactcagtattttttcgataacgacagtaaatcatttagtggtgtattagattgtggaaactgttccaggtaattcatttcttcaattctggactagtcttgcttccctaagaaattgtactcacttgtataatcattacagaaaataacagagattgtcatttgagtatgagagagaggagtaactactttacatgaaaacgccacagatcttcagttt

SEQ ID NO: 25864 - DNA, 1308 bp, Bovine  19866881581167
  misc_feature (1)..(1): n is a, c, g, or t
ncctgctacttaacttgtatgtagagtaaaacatgcaaaatgctgggcagaatgaagcacaagttagaatcaagattgctgggagaaatatcaatcacctcagatatgcagatgacaccagccttatggcagaaagcaaaaaggaactaaagagcctcatgatgaaagagaaagaggagagtgaaaaagccggcttaaaactcaacattcagaaaactaagatcatggcatctggacccctcacttcatggcaaatagatggagaaacaatggaaactgacagagtttattttcttgggatccaaaaccactgcagatggtgacttcagccatgaaattaaaagactctttcttcttgggaaaaaagctatgacaaacctagacagcttattaaaaagcagagaccttactttggtgacaaaggtctctctactcaaagctatggtttttccagtagtcatgtatggttgtgagagctggaccataaagaaagctgagtgccgaagaattgacgctcttgaactgtggtgttgaagaagactcttgagagtcccttggactgcaaggagatcaaactcatcaatactaaaggaaatcaatcctgaatattcatttgaaggactgatgctgatgctgaaactccaatattttgaccacctgatgtgaagagcagatgcattggaaaagactctgatgctgggaaagattgaatggagaaggcgaacaggacgacataggatgagatggttggagggcatcaccgactcgacggacatgagtctgaacaagctcctggagttggtgatggacatggaagcctggcatgtggcatttcatggggctgaaagaatcacaactgattgactgaactgaactgaaggaagggccaatattcatactcagacagttcttgcctttgcattttatcgcatggtgaagcataagtaaataggattagggtacattatcttcacaaattaaaactcgtgattactgggatggaattgggcaagacttggaacataagtactaagccacatttacttaaaaaatgtaaattattacatggttccataacactagttacaatttgaataattatcagtctttcattctgttgtagaaaaaattaaatataaaatggagagttttcaattgctaagagatttgtatggtttttcacagttagaaattgaatatttaaaaatataaaaccttctttaattctacatgtaaacatatatgaagcattccaattcagatactattttcagatatgcaaacttattttccatatttgaaaaaaaa

SEQ ID NO: 25865 - DNA, 966 bp, Bovine  19866881590252
  misc_feature (1)..(1): n is a, c, g, or t
ntttaggagctgggtgacttttttgtagtgggggttgttttgtgctttgtagatgtttacaagcatctctggcctctacaccctagatgtcagtaccatgttcccagttgtgatatgcaaaactgtttttagatatcatcacataagccctggggagcaaaattactttctgctgagaaccactgtgatacacaaaatttaaaacaggcaatagtcaagctctgctggctgagaggtggtgggaagcatttctccaattgaggcagttctaaagaaacctacagggcaccttaggacacagtttgatgactactttcctcaactattgatgattctctgtgatatactaacatggtttgatctgttacttgagttaaaaaaaaatagatgtctgtcattgagaatagcttattaactatatttctgtaacaacaaaaatgcatacatgttgataaagaaaaactcattcagaggcttgacaacatcaataatagaagtagatgtagctgataccttattactagctttatgaacaataattttcttttttttggttagttcaactaacaattagagtgtggtgctaacaagggacaggtcattgattttgacacctacttatactgactaactgatcctgcataggtatcacaaacatatgccagtcattataatgaaagaggaacaattataatgtaggctataacatgggctaaatataattaatgttaattgtggctaataaatgttaattatggctctccatgatcatagcatcctatgtctaacatgataaaagtttaatcagcttagaatattattttccctttacacaaaaaagatgacatatgagataatctaatttttcttggagggtcttaatatatgtaaaatatgtaccatgcccccagcagattagcagattgggaaatcttgcctttgagaatatatgtccaagcctaaata

SEQ ID NO: 25866 - DNA, 1300 bp, Bovine  19866881608341
  misc_feature (1)..(1): n is a, c, g, or t
nttttcaacaggagcaggtatactacaagtctattttattgataacattcatgaaatgaaagagaaaaaaaacaactagagttggtgtgatttaaaataacattcaaataattgtgtctttatgtggcagactggacataggaatagttacaaacatattttaagtttatcataacatatgagttaacaggcagcttcacaatattaagatatgtgaaaatctaaattataaaatacaacttccatcttctaaattgaccaaggctttaagataattggggggaaaggcagtgctgactaagtataaacaaattaacacaatgcagtactattcagacataaaaaagaatggatttttacatttgcagcctatatggatagacttgcagagcattgtgttaggtgaaataagtcagaccgaaaaagacaaacattgtataatatgacttaatgtggaactggaaaaaatacagtgaatataacaaaagagaagcagactcacagatctagagaacaaactagtgtccaccagtgggaagagtgcagttagagaggagacaatataaagggaagggatttaggggaacaaattagtaggtataaaagaagctacaaggatacattatacaacatggagaatatagcaaatattttataataactataaatgaagtgcatgcgtgcgtattcagtagctcagttgtgtctaactctttgtgaccccatggactgtagcccaccatatttctctgtccatggaattttccaggcaagaatactggagtgtgggtttccatttcctacttcacaggatcttcctgacccagggatcaaacccacatcttctgtctcctgtattggcaggcggattctttaccattgagccacctgggaagactatgaatcactatattatatacctgtaacatataatactgtacatcaactatacttcaataaaaaagaaattaacacttcataaagcaaaattttgaatagcaatctaaaatactatttcagttcagtccagtcactcagtcgtgtccgattctttgcgaccccatgaatcacagcacgccaggcctccctgtccatcaccaactcccggagttcactcaaactcacatcatcgagtcagcgatgccatccagccatctcatcctctgtcgtccccttctcctcctgcccccagtccctcccagcagcagggtctttcccaatgagtcaactcttcacatgaggtggccaaagtattgtttagtaactgcttataaagagtattaaaattattatcttcatt

SEQ ID NO: 25867 - DNA, 1590 bp, Bovine  19866881856528
  misc_feature (1)..(1): n is a, c, g, or t
naaatcattatttatgtttaaccaagttgagtgccatttttatttttaggaaatacttatttccgtttcaaccttctcttagtctgttctgtttatataatcacatctctaacacaaatactttttggttctttaagtaatggcattgattataattgtataaaatagtcctaaaataatttgaatacttgaaagttgtatatataatctatgcacatcttaaaatttcaaagttctttcaaataagtcagaacttaaatttatcattgcagccctttgaagttggagttctttccctagctaataaatgagacgacaaaacaactttggctgtatcaatttactcgtttgctgccacagactaagaattgaacaaaggaatagaattctaaaagtgctttttagatgctttcgatttgtggtgccggagaaaactcttgggatcgccttggacagcaaggagatgaaaccaatcaatctcaagaacatcatatttgaggaaccgagcacggtccacagaattccttttccctgtccgttgtttaaaaattttgcacaacagatgaaatgcattatactccttaggactctgttgagtcttttggattacttgagaatcttttggattgtgactttcataaattaacattctaacaatcatacatgttttaattagagatgttatatctgagtcactgaacagtttgaatttaaaaagctctttgaattatgacttaattaaatgcaattactaaaactaggctaatgaagtatatgctactaggaagttttttgttggtttccaaagcagttatgtattattcagatggaatggagtgcttcaaaatgtcagaaattatttcatttatttcttctgcagtaacctttcttttttttactgtgagcaaaattattttcacagagaagtagctcaaattatttaagctgtaatttatcccctagaaaaacactgatttctactccagtttaaataaaactgaatggcattccattatattaatgaaaggtagcagcaattgatctagagcagttcctttctaccgtaatgaagagagtgccagaatagttgtgctaggaggcaagtggttgatttaagctagtttggggatgcttctatctcaaaacatccatcctcagaaacaggtactgattttcagagatgaatgaatatactttgacttgacgtttcaagacataaagaaaaataacagtatagaatcttcttatgcttttacatgtttctacagaaatatgtcagagacatttccagtgtggcggggaccggggtggagaggaggggaagtgggggagaaatagctttgtctttgttttaaagaattaaaagacaattgagttttgttggctattcaaatgagaggagaagcaaatctatcaaagcctcattgaacaaaatagatggaagacagctactgggtcttgtgtaatctaaagaaaaatagttacttagtggacacatcaaaatatatagatgggagaaatctagagaccatggctgtccagtgactcatttaaaattgaagaaggaagcctcaggaagtcacaatgtca

SEQ ID NO: 25868 - DNA, 1012 bp, Bovine  19866881972690
  misc_feature (1)..(1): n is a, c, g, or t
nttgattttttggggcacacataacccaatgtttacatagtgcataaaaattacatgtgatactctcaatgcacataggtaattttaactgaataacttaaaataactctgttaaatgttaggatatcatttgtttattctaaacttttgattcaattcctttctcctttttatctgcaaagcacaatttcagtcccttttaaagttaacatgatgtaaactatccacgtggcagggatatataataatgcaaagcagatgaatttcagccccatgggaacttgcagggagtgaaaaggggttttagtatccatctaggcaattgtgcagatgactgttagaaaaggtaataattttaagctcataaataagaaaaaaaaagtaagtaaacaactttattacaaacctctttctagtgatggaacaattttcgaatgacttaatatattcaatgcttcatatcatttgcctacaactggaaaacaacagacagttgttttaaaataatgttataatggagaacagcaaagagagctaaatacttggttatgactgcaggcatattctcaaatagaaatcttattaataagaagacaagaagaccctaaaaaagaagccagcataacagagatcccagtttataaagtacttgctttggaatagtcagttacccttactttgcttctttcctaatgaataaacaggtatgtgaaaggaatttttagtatacagaagttttaaagagatttgtatgcaatcttaaagagctgatgttaaattttcctttttttactgatgaataaactaaagttcaaaatcaaacagccattaagtggcaaaatctatatttgtttaatttaaaaatgttcgtgatggttgctgacatacatcaacataaactggccagaggtatacctgtgtccccaaccctgaaccccaccctcctctctccccctacctctgtctccaccctatccctctgcttggtcccagagcaccagctttgggtgcc

SEQ ID NO: 25869 - DNA, 1033 bp, Bovine  19866882015270
  misc_feature (1)..(1): n is a, c, g, or t
ncccattctcaagccctggaaggggtccctcttcttgcaacacctgcatccattaaaaaatgacattaacttcagggaataggaaaaacaagccaaatgtaattctgtgcgaggacatacatgctgtgacctctagcatgtagcagtaaaagtataacagtatacagaatgaaaatcacctgttcatgagccaatctcacgtgcaaatgttaagtaagttttatatgaaatatatacactgctgtacaatgcaagcttttttcatcaagcagccagttgtctggtgctaccaattaagtcacagtttaaatttattacttcattaaacattaaaatttacccaagacctacaagagctttagctctgtcacctagttccctgaaaagacctggaaacaataccgcatttgaactgctttcccaagtaatcaaaatttcaatagcatctctacccccatttataatacctctttaaattctgtccagctcagagccacatatccagcagcatgtgctcattatttaacactttctttaaacttccctgatattcctaaacagagggcacagctgtgcccccaaggtgagggcggcaccccctatcacgttgctctctgactcaatcagttgccaaagcagctctatcattatctctggacggggtctttctgcagagagcgcgcagtttgtatacgcttcccatacacttctccagtgcggcaaatatcatctagcctggttttacactgtcatttccattgaaagcctgtaattactttccacaagcaacacttcatcctgccaggctgattaaaggcaatacacactggaaggcaaagatcaacagtgctcaagcgatgtatcttgtgagtgtgtatcttgtaaagcaacagtgcaggggcatgcacacactaagcactaaataattgtttgagaagatagaacatttgccctttgacagacagggtaattactgattttctgctgaaacataatagatttttaaaaagcaaattccccagatcataatggg

SEQ ID NO: 25870 - DNA, 1301 bp, Bovine  19866880168731
  misc_feature (1)..(1): n is a, c, g, or t
ncatcctctgtcatccccttctcctcctgcccccaatccctcccagcatcagagtcttttccagtgagtcaactcttcgcgtgaggtggcctaagtattggagtttcagctttagcatcagtccttccaaagaacacccaggacggatctcctttagaatggacttgttggatttccttgcagtccaagagactctcaagagtcttctccaacgccacagttcaacagtatcaattctttggtgctcagctttcttcacagtccaactctcacatccatacatgaccactggaaaaaccatagccttgactagatggacctttgttggcaaagtaatgtctctgcttttcaatatgctatctaggttggtcataactttccttcaaaggagtaagcgtcttctaatttcttggctgcagtcaccatctgcagtgattttggagcccaaaaaaataaagtctgatactgtttccactgtttccccatctatttcccatgaagtgatgggaccagatgccatgatcttcgttttctgaatgttgagctttaagccaacttttccactctcctctttcactttcatcaagaggctctttagttcctcttcactttctgccataagggtggtgtcatctgcatatctgcagttattgatatttctcctggcaatcttgattccagcttgtgctttttccagcccagcatttctgtaagaccacccaaatcttccttttggcttaacatattattaataggttctatgttgtatagtcaaatcaactttgattaagacattgatcttttaagtacagaggtaaaagcaaggttccaggcattgtcagaaaatctgattgtcttgtcttaaaattagtatctaatagtgcatatgcggttgttcaaaagaactgtatgatcttaggaaagtcatggtaacactgaatctatgtttctttacctttgaaataaaggtagaaggacttctcccatttgacagtaagacagattagatatcctgaataacctgtttgaataaaacaaaatatcagataaaatatttgaattattcttaaatacatcactgagataacaaagaagtataaagatgtcaagccttaaaagtaacttaaaagtaaaaagaaccaaggctgagttttgacctgaagatttttattgaacttgtgtgaccttgagcatctatttgacacctgcttagaaagtaggggctttctgacataaaggccagggcacctcaagatgggtaattcaataagtggtccctgctgcactcacgtataagggga

SEQ ID NO: 25871 - DNA, 1496 bp, Bovine  19866880501299
  misc_feature (1)..(1): n is a, c, g, or t
natttcttggggaatcttgtataattaaggtaaatcacttcctgaaaaagtacattgtttctagttaattcagctactcacaagtgccaaattcatttgaaggtaaaactattcccactagagaaagatataataccaaaaaaataaaaaagtcactgggtcaccaaagccaaggaaaatctgcacacttttctgggggtacattaagtacaagtggagtacactacactctttatgctaggtaaaaccatcttaaatgtgcttcatcttctaacatttccagagcataactatacaaagagattctgtacaaagaatgaaaatgtgcaccattcccagttggcaatcagttagttgtgcaatcactttaaaaccacatgtaaagactgttttatgtcctaaaattattgtttttcttctttttatgtccattctcttttcctatttttatttctatggaaggtagttcctttaggaaaaccaattgtatatgagttaactttttgagcagactcctctctaggaataccacagtgtttctgctttggtctcctttcattggagaataactggttcatgagtcaaaagagtttggtcctggttttgtaggctaatgaactgtgcagtcctgccacacctacctgcacaatggagagggctgcaatggctgatttctgatatctcttccatctgtatgatgggaaaagagcagagacagtccttgcctgtgtttttcctggtaaatattaatttctaagccatcttttctactttcactgtgaaataatatgcacatttctcctaagagaagacacagaaacaaaacataaaatggatcatttccatttaaattgcttaagaaagatggagattactcacttatttaagtgaatcaacattttcttttggaatccagtgtgtcatcatgcatttcttaagttaatcacttcaagaaaatggctctggaggtgagtaggccaaagtttgcaaaacaaggtactttaaaaaagtaatccctttaatgtatagctgcttaacttagtggtttcttgctgaaatgagctttgtcagcatttcagaacaaatcatctagaaattaagaacttacatgctcttaattctctcctgccccttgttctttttttgacaagcggcctcaatatttttgaatatatgcatctatcattaaaaaactcagtatgcattccccaatacatatgtatatatgtatttatatctatacatgtgctgtgctcagtcacttcagtcatgtctggctttttgtgaacccatggactgtagcctgccaggctcctctgtccatggaattctccaggcaagaatactagaatgggtggctatttccttctccaatatctatacatacaaacatatatatatatatatatatacacatacaagctgtgtagcaacatatatatatatatgtttaaacatatatatatatatatatatatacacattccctaaactat

SEQ ID NO: 25872 - DNA, 1919 bp, Bovine  19866880509394
  misc_feature (1)..(1): n is a, c, g, or t
ncggtaaattcggaaggttagccctctacaaggaaaatatgtatcacatttctccaaggtattgaagggtccctagatttaaggtcagttatgagttctcaaagtttctattaacaaaacaggtcacaacagactaaaactgaaaactatccagaaatccatcaacactaccatgagtaaataagctacaatacattcacacaatggaataagaaagaaacaagaatgaatgacctacaaccacccacaacaatgtaaaagattcctaccagtgtgctgagtgacagaaacaacagtttacataatgtacaaaaacagacaaaactaatttgtgatcccttttttgggagactgtgactgaaatggggtccaagggagacttctgcagtgctgacaaattctgcttttcatctgggtgctggctatgtaaaggtgtatggaaactcattgagctttataattgcatgtgtatcatatttcaataaaatgtttttcttaaaaagttcattaaagtatgcatctttatcttagaggtttgctttcagtgtatcacctaaatgttaaaatgacttaaaagcacatccatatttggaaaatttatcttttagataagagattacatatatatgaaagataattccaaattctatgaacatgatattctaaagtttagctattacaatatatgtattgtatgaaatttcagagggaaaattaatttaaaatatgtaactctttagcaagattgttatcaaactgctgaataaatatgaactaagttaactgacaattttctggatggcaagtaaaaaatacgcactgatggatctctaacaaaatattaatgctgtctattgtttatatgacatgtccaaattgttaattatatgttactaataatcttagtacagaggtaaagagacatcattcacattttatggtatttcagggcttcccaggtggcactagtggtaaagaacccgcctgccaatgcaggagacatgagacatgttccattcctgggtcaagaagatcccctggagaagggaatgacaacccactccagtactcttgtctggagaattccatagacagaggagcctggcaggctactgtccgtggggtcatgaagagtcagacacaactgaagcaacttagcacacatgctagcatgaaaacagtctacttaagtagatctaaattattttcactgttttatatttgaaaaaactgaggcaaagaaaatctatttgttttattaatagaatcacaagttcaactgccaataagatcataaaaatttttagactttcaaatacagaaagatcatgaaataaaaacaagcagttgttttacttatgaattacaaactcctgtccgaagagtagctgcataacataaacacttaacattgcatttaagaaaaccttggtagctattaggcaattcaactaatacactgagatatatcttctattttaaaatggtggaagtatcttaaaagtatagatatgaatactaagagcataacatattacagaagaaaaatgaccatttagtgcaatgcatatcacagaataaatgggtaattactgagtatgtaaaacaccacacacatgataaaaccacaaaaatgtttaaacagaaaaatgaaaggtgtctccttccccatttcagaaggcgtactagtacttttattccaagaaaaaaccagattaaaggtaatcaaaattaccttgacagccactccttttccctcaggaaattctagaagatggaaagtcagttcttcaaccctattaatgcagagccttgggtcagttgttcttcttaatgcttgaactaacgcccgagttctgttatcaatactcactctggcaatgatctgcaaagacatattaaaatatgtagattcaagt

SEQ ID NO: 25873 - DNA, 1696 bp, Bovine  19866880540143
  misc_feature (1)..(1): n is a, c, g, or t
ntcatcctataccaggggacagtgacatcctttcagttgttttcctcaagcatgactacttatccatcttttctctgcgcaaaggctgttatcacttgccaatttgcattccaaaattccctgacataaaactcgactcagaaagcattttatgaagcatgtaggactctctaagcgggcaggtttttttttttcccctggattaaataaaacaagtgtattcactaaaatttgattttcttaaatagttgtgctcaagaaaatcaattttaaatgaaggaggataaaacaagcaaatgattttggatcttttctctacagctatagaaattgatgtcccttgttctttttatactttttatgttggaactacctgtaacatatggggtccagggtattttgtgtgaatgtatccttggctccagtctcaccaaaagactcagaaaaatctttccatgacatattccagaaaattgccacaactggtagcctgacggacagttgtcaactggttgtccaactggcaccagttcattcgagattgagcatgagaggtttaaacactaatacctttgagctgctgaaacactgtgtcatactgagaggaggcttgcttttagctgtaaatctgatcacaaagttacattttcctccaaaaagaatgaacagaatcaaatccttccattatcacaaggtaactgaagaatgcaaaacacaatcgatgacttccctggtggtccagtggttaagaatctgccttctaattcaggggacacaaactaagatcccatatgcctcagggcaactaagccccctgcgctgcaactgaaacccagtgcagccatggagaaggaggtcttaaataggtagggagtaaagtgaagctaagcctggcctctgtctcaagaagaataaaggtatgataggagggaagggcttgtgaaccaaactttgagactgaccttgaaagtactaatgaatttggactaatagcacaatgcaaaaatttactgaagtgaaattttgagcctgaccttgaaagaacgtatgaatttgggtgagtggataatcaaagtttggaggtaatgatgaccaagaagcagaaatctgcagcatttccctttgtgcagatgaagcaatctccattattatggttattgcggttattgctttttggcatctcagatggttttaacttatttttagaaatactgtcacagctttatctttattgtgaccagatgtgagcagattcaaagcatttggaattgtttggaaatattagagtttgtgtaaaaaagacacatcagacagaggtggaccgttttagattttaagcaagaacagaacactttttgcacaaaatgacaaaaagaagaaacaaaaatacttataagaataaatgtaatttatgtatctattaaatacagtattattagcttattaagttgcttcaaatgcctattttctataaaatcatgaacttgtacgttaatgccatctatttttagtcattagttcacccttctctatgagaggtgagagcctcataaagcattagcgttacatggacctaagaagtaattgaattcaagctttgcattctgcaaataacaaagcagagacttaaagaaacaatgatcttcccaaggtcacgcaactggttagaattctgatctgacgcttaggtcatgat

SEQ ID NO: 25874 - DNA, 2557 bp, Bovine  19866880567374
  misc_feature (1)..(1): n is a, c, g, or t
ntattctgggctggagaattccacggactgtacagtctatggggtcacaaagagtcagacatgactgagtgacttgcacttgcactgtctacaaatactgcgggcctataatgtatctagcagggtgttagaaactgtgagagctggaagcagcaatgtgaccagctgggtagggaatgcataatacagatagaaataaagaaagctacattatagcaattatttgttgcccaatgagaattttctttttctctcatgcttcataaagaagcatctatgatagttctatttacaccttttaaacttgtcatcatgacttttcaggggtttcaaaatgagtgcagtgcatataagatggtgaaaattactctaaagattaaagttgaagtcttactctgtgagctgatgattatatttgtgatgggatggatggtagcagtatttttccacacactattacagacacctgggatgctccatcgggagatcaggacatagccactcacccatactcaaaatatgagagtagtataagcctgtatcacaaaattcttaaccaccaaccttcatcaaaacctctgaagtgtgtatttctttgttatacactataggcatatgttagtatatctgcattacatactaagcaaatagtctagagtttcattacttctataatttctgagtgtcagcattggtacttttcacataattcaattcaggaaatggaattcaacatgtttagatgtgcatggattaaccgtatcctgatagcaaacaagttcattcaaaattagcaaaataacagcacccatgatttacaagatatagttttaacatttgagacacagaaaaaatgtggttttaaatggctcttaattctactagtattattttttaaaaacatgcttttaaggccaaatctgaaaggcagggagaggggcaagttaccctagttttatttaactttttaaatttgagggacttttaagaattccttagattgttcataatactactactactaagtcgcttcagtcatgtctgactctgtgcaaccccatagatggcagcccaccaggctccactgtccctgggattctccaggcaagaacactggagtgggttgccatttccttctccaatgcatgaaagtgaaaagtgaaagtgaagtcgctcagtcatgtcccactcttctcgaccccatagactgcagcctaccaggctcctctgtccatgggattttccaggcaagagtactggagtgggctgccattgccttctccgagaaggtacttagggaactgctttcaggaaatacagaggaattaaatcagctatttgaatatgtgagtttctaaaacacaaaacagcagtcctggggacagtgttggcacacacatgtgctttgttggcctttaaataatttgaaagagccccaattaatattatgaaagaaatttaaaatgtgtgcttttcgtgaaagttccaaacatctggcagaacgaggcccccatttggctggagccgcagtgagttatacagcctctcttggtcaatgtctgcattcaagctcggccaccctcccactcccctttctgtccttactggtctacttcacacattgacttttcctgctgccctttcttcttctgaggttgtgaccccctgatgatcccagaaagaagaccccagaaagttgaaagaaagggagtgggtataatacagggaggtatgaagtggatcgagaccgaatcacataagacccagaacacctgccacttctgccttcagcccagagcacaagtggccttcacccttgtgagtttctcctgcatctcagcttggttccaggccagccctgtccctggcccctcccagaaagacccctgctcccagcactccccatacggccactgcctggacagctgttctcaggctcttgaattgcagtggagcactaactgcagcctgagattctcagggctcttagaagggaacatgtatatatatgcaatctagaaaaatggtaccgatgaacctatttgcggggcaggaatagagacgcagatgtagagaaaggacttgcggacacagggagggaaggggatagtggggatgaattgagaaagtagcattgatatatatattcaatggtatacatggtagtgtatttatatataaatcagttcagttcagtcgctcagttgtgtccaactctttgcgaccccatggactgcagtacgccaggcttccctgtctatcaccaactcctggagtttactcagactcatgtccattgagtcggtgatgccatccaaccatcgcatcctctgtcgtccccttctcctcctgccttcaacctttcccagtatcaggggcttttcaaatgagtcagctcttcacatcaggtggccaaagtattagagtttcagcttcaacatcggtccttccaatgtacattcaggactgatttcctttaggatggactggttggatctccttgcagtccaagggactctcaagaccttctccaacaccacagttcaaaagcatcaat

SEQ ID NO: 25875 - DNA, 1216 bp, Bovine  19866880585615
  misc_feature (1)..(1): n is a, c, g, or t
naaatgaaaagctgaatcagctgcagttggaagggttgaagtacatagaaagaaatgaagaaaaaatgaaaaaacttgcaaaaatattaagtcaagaaaaaacaactctgcagaaaattaatgattggataaaactaaaaactgacatgtatgaaggccttccattcttttcaaaattgtgatgagtgtgtgcgtgtagtctcctaactgaatgcctgttagagaagatccacagaattcaataaggaatcgtggggttcagcatgacttatcatcaaaatgctcttgaattctggggaatcctgaaaagacagtgtttggaccagcttgcacagtacagagagagtgtacttggttacacaattcatatggaaattaggtttttatgatgttaataattaactgtgctttaggaatcttactgtattagttggttttagtacatatcgatgttgtattgtttgatgtttgaaaatttattaatatatgtgccaaacaagaactgaaaactatcacattatacttggtatttttactttagtcaccataatcatgttaaatttatttaatcattgattttctttcatgtggaaaaactaatttcttcttcattactttaaacattacttaggtttttgatagctacattctatgatccaaatattgcctcccacgattgtcatgtgatctaaacagatgcagaaaaaaaatgaaattctctctatcaaaggacttttacatttgaaatatgaaagagccagataccgttttctattccaaatatgtttatttcaacgttgtttggttccgaaagatagggtgaagttccagtcaaccacttttcccccctaaaatttcaagataatgctgtgtgtcaattttctagctctagcttatcattcactcatataaaattaattatttgaatttactgaggaaataccccatcattagcaaaaactaaactgttgaaataatctgttaaaaggctgatgtcatttttaaattatttattatttataatgtagcctgtcatctctttgtagctttgtcaacagtatgctttaaaaaaatgtcaggcttggtttatcttaactcctttaaccatctagacttcacagagattaataacatatacagcaacttgcatcattgtttatgctaaccaaattcatctttggtgggttatctatgtgccatgtaaatcctttaccat

SEQ ID NO: 25876 - DNA, 3143 bp, Bovine  19866880626272
  misc_feature (1)..(1): n is a, c, g, or t
nttctttagtggctcgtggtaaacaatacacatgctggtgcaggagacgtgtgttcgatccctgggtccagaagatcccctggagaagaaaatggcaacccactccagtattcttgcctgggaaatcccatggacagaggagcctggagggctacagttcatggggttaccaaagaattggacacaactgagcaactaaacaaaaacaactattactggattaccccttaggtagtttacatggaaaaatcattaaagaacagtaaattattttaaattttgtgaatttctaataacagaaatgatcagtagtagtgtgtatttatcaatagaatttcaaaattttgattctgctaaaacactgtcttattcactttgcttcttaactaaatcttttttttttttttcaaatcagaaaaatctcaacatgcttgcaaatcttcaaaggttcttccttattaaggcaaagaaattcacagcattgcagttcttcatatctcagtaggtattttctagtgacatctcatcaaatgatacttcatgactattccattgtcccacctgatcaataggaattctctttactttttaaacaacaagtttagattgtaggatctttggctcaccaacagtattttatattaaggaagcaagaaattcattatttttcctgacccattttttgactggtatctctcatgtgtaatttaatctgtttaacacatttttatggagacacttcaaagacagttcatgtcaccttaagaaaaaaagaaatgaaaatttagtgtcctagaatttgtttcttagggaaaatcagcaaactataaaacaatgaaacaccatgatgtcagaatccgtagatagatggtagcaacagtgactttcaggtagcaaggagatgtaggatcagactattcactgatattttctctaaagaaaaaccaaaattaagtacctttgaattatgaagtaaaatttgattgtttcatgagttaaaggactcaatttaattccatttaaatatatagtgacccatgatagctgataatcacagaatatcacatgagaaaatcttaaaattgtgctttttatttcaacattgaaatggagctgcagttgatatttggcttaaatatttgatctaagtatgttgtaaaataatgattgtcaaaataaaaattaccagttttttaaaaacataaacttgcaaaatattttcatttctatgtactaatcaatgcttagaggcacaaatatgaatctcagagagtctggtttttcttcttttcctaagcaaaataagatttcacgtaacttttcctccattacatttgcatctgttttctcctctcttgtcactcatacccaaactacatacaacgtagcctctacctctgtcgtcttttggccaggatctccaaaaccgtcttaattgcccaatttagaggattcagtttttttgatatcttctaagatttctcagctatatttcgtattgttgacattatgctccttattacaattctgttttctgggagagaatactttgcttgtaatcttgccacctctgtgagatttttatgtttggctttcctatcgtctacatcctcttcctgagtcattttagccatctctttgtcttcagattctctgtagaagcagattgctactaagtccatatttccattacagacatatggagttggccaaaaagttcattcatctttttccataagatataaaaaacccaaatgaactttttgaccaactcaatattatattatggacttttattttcatctccagtcctaggtgtcatacacagcacgtgctgaactgaaaggctttgtttcataagcatttcttcagaaatgttcttcatttctgacctctgtcaattaaaagaaccattattcatttacattctaaagtctgaaaactgcgtatttcatgtatctttcaccaccaagttctgtttttctggattttatctcatctttttgccccttatttctcttttgtcatgtttcatttagtctgcttattagtctcccaacttgtggttttctatagttttgcccagtcctttctccacattttccctaactgaatctttcaaatatcaagagagtaattcatcttaaattgaatttgatgtatgaaataaaacatctattgattttcttaaaattgcaagctagttgtttcagatttgcttacaaaaatattcctcatttgatttgtggtgtctatattactgtaataaattctaacacacagttgcatctctttctgggcaatcttttccaatccgtattgttcatgtagttgcttgtccgggaacagctgtcctatatgacatattatgtctttataatgtactgagattttttttaaataactagattcttcatattagtctattctttctgaattatctttgatatagtcacctattgattttttcaaaccacttttttagtgattcccaaagaagtccatttaaattgcattgaattatggcatactatgagagagaattaacgtttttatatatacagttgcatttgaatgacatgatatatcagcccacttattctctcaaagtgttatatccttgaataaaaatttgtagtttctttatagatttcacacaaagaattaaacaaaaagattaaaaagccctcttttgtcacttttttccccaagggaatagtgtagcaaaaaatgttctcatctaagaattttatgtaatttaggattgtccctggaaagttattcattttcacccctcctcccaatagctcaatcacattatttgtgaacttgtcagatcatcactcccatacatctaaagagaatgattaaatcccaaaatgggcagagatagctgaaagagcattacaatttggtattcaatagaaatgtggccatattttgtagtaacaataagtggggttgggatagtataattgcagtttaatttatttaaagatggtgctgtaaatcattattttctatattcttctttatgtttttgtgttccaagaaatgataaaattcactaaagactaatctgtaaaccaaatactaaattattgtttaaaacactatatataccaggctttcctggcaactca

SEQ ID NO: 25877 - DNA, 791 bp, Bovine  19866880627002
  misc_feature (1)..(1): n is a, c, g, or t
natttataattcttgattatttccattagcaaatttataaattcatcaagatattatatagaaagaattactgataatatattctgaagcagttttaaagtattttatgaagcagagttcatgtaagtctctgaaagcactttcctttaaaaaattttttaacaaaattttaaactgatttatttaaattctgttcctaaagagaaatcaataggtattatttttctcctcttcagatgtttttttgtccctaaatagttccttagatattttttcatactatatttataggctttttttttctttcctgaaggtaattttacttatggacaagtattctttcccctagtagcctaagaagtcctaaaaagcaaaacattactgtgccttacctaaaatgtctgttaagatgtattatccatctttgatttctcccataccaatgaacttattttcttaaaataaatgtttgctggttcactttaacatatagacttgtactaaattttccctgtgaagccataatgtttcagacgttcaggggaaaaaaattttaaagagggtatataacttttcaaagtcttgaacttgacctatggcatcttttggagaacatgctatctgataaataagcaatcttacttgacaattttatagcaatgaaaagtaagttgggtttttttaagatttcctaacagactgttaagatttaaaaattcattccagctgtctgaaaatattcagaaatagaatcattcattctgatgggactgtgacccttgttttctaga

SEQ ID NO: 25878 - DNA, 1747 bp, Bovine  19866880695166
  misc_feature (1)..(1): n is a, c, g, or t
ntgctagtggtaaagaacctgcctgccaatgcaggagacataagagacacaggttcaatccttggattgggaagatcccctggaggagggcatggcaacccactccagtattcttgcctggagaattgcatggacagaagagcctggcaggctacaatccattgagtcacagagagtcagacatgactagtatgcatgcaaactataacactttaaccatttatctcaagtcagttcttcaaatcatgttttttctctcttcagaaccttcacacagctctctaccaccactctagcaccctctgatatttgatacaccaattcttgcatgattgggtccttctcactttccatgcctcatcctgaatatcaccttctcagggaggtcttaactaattattctttttaaattaggttcctcttcccttattctctaacacagcatcttatactatagcaatttgcaagtgtgcatttgtgtatttatttatttttccttcacactgcattatcaggactgtgaggtcaggaccacgaagacttactcatctttggatccagaacctagcacagtacttgacacttcagtaccttctgagtgaatgaacaagccaatgaatgaataacacatcaagatatttgggaaatgaaatcaacagaattccaccagatggcatggtgaattgagtgtgatgatttagggagcatgacacctacaatcctatatcatacattagggtgtcaccttttgagatgcttcataaagagaagtggcttgaggggagtagaaagaacgtcatctaagcctgattcttagtgattaataaatatataccttatcccctacaattctgagaacaagagatgtgccagacatgcctctttataccttaaagccaacttctcttttaataggcaactcccataacttttggtatcagcaaataccaatccaccccctttgctgcttgctttctttctctgcattttacagttcttgagaactcctcaacctctgaaagaaagtaaagtgaaagcgttatttgcttaatcatatctgactctttgtgactccacggactctagcccatcaggctcctctgtccataggatttcccaggcaagaatagtggagtgggttaccatttcctcctctaaggaacttcccgacacagggattgaacctgggtctcctacattgcaggcaaattctttaccatctgagtcatgagggaagccccttcagcctctaccacatacacacaccaaactatggctgctcttaaggaagaagcatgagaataagaaatacagaattagaaagagaatgaaggaagctgaatatggaaagggacaaataaaagagaagtgctgcctaggaggaaaataaacccttgccccatgaaaagcaaaagacgaagacccaaatctaatctgagagtgtagaccacatggaaaacagtcaatggctttaccattattatctttgaccttcagtggatgctaatctgcaggcatatattctaagggaaacaaaaataaaaaacatagccatctctgcagtattggaattccagcattctctcatgtttcagcttttcattggttccaaatacttgcatttaatttcatatcacaaagctatagcaggctttgtacaaaggacatctgtgtttatgtcagcttccaactaaccttgctgtgatattatggataatcccaaatggtgataaaactaaaatcacat

SEQ ID NO: 25879 - DNA, 1447 bp, Bovine  19866880695167
  misc_feature (1)..(1): n is a, c, g, or t
natgagtaagtcttcgtggtcctgacctcacagtcctgataatgcagtgtgaaggaaaaataaataaatacacaaatgcacacttgcaaattgctatagtataagatgctgtgttagagaataagggaagaggaacctaatttaaaaagaataattagttaagacctccctgagaaggtgatattcaggatgaggcatggaaagtgagaaggacccaatcatgcaagaattggtgtatcaaatatcagagggtgctagagtggtggtagagagctgtgtgaaggttctgaagagagaaaaaacatgatttgaagaactgacttgagataaatggttaaagtgttatagtttgcatgcatactagtcatgtctgactctctgtgactcaatggattgtagcctgccaggctcttctgtccatgcaattctccaggcaagaatactggagtgggttgccatgccctcctccaggggatcttcccaatccaaggattgaacctgtgtctcttatgtctcctgcattggcaggcaggttctttaccactagcaccttctgggaagccgtgattaaatgtgtcctcccaaattcgaatgttaaaatcctaaccccaatatgctggtatttggaagtaagatttgggggcaatggttagttcttgagaataggccttcataaatgggattagtgctcttatagaagagaccccagagaacttccttgctgcttttacactgtgaggacacagtgaaaagatgataatccatgaaccagtaagtgtgctctcctagagactgcatctgccagcactttgatcttaaacttcccatcctccagaactgtgagaaatacatgtctgttgtttatcagccattcactctacaagttctgttagagcagcctgaattgactgagacacaaaggctcagaaagtagtaaacccaagcaggattaggagttggttttttattttcattgcagtggaaagtcattgaaaattggggagtgacataatcagcttcacatttcaaaaagatatttctggttatttggtagagagtggatttgagggtatcaggagtaaggacagggaaatccagttcagagctaacacactgtcaaggtgaaagaggtcaaggtcaccatcgttacttgtaataatgctgggagcagtaaaaaaggaactaaatcgctttgatatggagtaccctgtgccatggcacccagatgccccttccaggactgaggtgctctcccagtgctacaagtattggctgctgacagcttagagcttagtcaatctccaggacttgtcctttgcccaacagaaatgcctcactcaagatcatgcctctgagttagtgaacatccagtatctggtcagtgagcggggaggataaggttcttgctttaaattgggataactctgaaaggccattctgagtttcc

SEQ ID NO: 25880 - DNA, 1124 bp, Bovine  19866880713339
  misc_feature (1)..(1): n is a, c, g, or t
natgaaattcaagtcactttgccaatctaaatccaatttacttttcaaatgttaaatctaagagcatctttataaccattgattataaacagttttgtcacctccatgtccctgtacaaactagcttcattttcatttggcctgcattgaaaatgccttcttttcacttctatccattcaaatattacctttcaagatcaatttcttattatacctcatcacaacattttcctaatgatgaatttgtggcatttatttacttaaccattcatctggatcttgacattgttctcactcctgattgatatgtcatataccttcttagtatattagtaccaagattttttcaggtaaataatgaattcctaaaagtgaggagatgagttgtgtctagaacctgtaatattttgcattcttgtacatttattgaaggaatgaacattaataaaataataaatcaattcatatgatgaaatcaaagcattaacttggactgagaggccaaagcagattttgacacagtagcataagttcactgaaaactctgaagtattaattattataatacctaagatttctatatattgagcagtaacttgggtctttaacataattctccaatttttccttatattttatttcattctatctctttataaaatttgtgatggctgtgtatgctctgagtttttttctggagtgaagaaacttaggcaagaatcctgtctgaattcagcagtgacattagggtttacactgagggtcaggctattgatctgtgacaatttacagggttcgtggcttgggtgacattgaaagatgagtcattatgattctcctggatgatgaccaatggtgaagtcaacaaggttcagatgaagcaacccaagtgaagctgttgattttcaaatagtgtattcttatatcttatacaggaggtggaataaagaatgggacatatttggaagctcagaaagtcacaaaataatttccctgccactctaaatgactgccatcttcttgcatgctgtgacaattttctattctaaacacatagttcactaaccattcatactacattcctgagggatttgttttgagggttcccttttttcttttctttt

SEQ ID NO: 25881 - DNA, 2524 bp, Bovine  19866880785756
  misc_feature (1)..(1): n is a, c, g, or t
naatgttctatacctggaggtccttagacaccagacacataagaaagaccagcaccctcatggagcagaaatattattaataggtgagggagtgaagacttctcacagccagagtcattgttaaagactcagggaaattctgcaatgaatacatggttctttatagtgtctatcaccatgttctccaagtttattgaacacatcgaaacattgtggaaacagctatggcacatcagtttggaaaatcttttagcaaattacagtgccagaatagctaacagccatctggctgagagatggccgataacctttgccctcatagaattttggtgagaatgagatgaaatggttggtgtgaaagtttctagcacagaaggaacagtgagtaggaacaatgagtacagtattagaagaaccaaaatatgaatcaaaatccttatgaagaaacaagacactgaaaaggtgtcttgataaatatatcaggaatgccaaaggaagtgaggcctcgtgtatcctgtgtgtccaaaagcagggtagtggatactgatgagcaaaatgggaggaaataaaggaatacctcagcttcctcacagtgcaacttgtggtagaaccagttttaacctctgattttcctgctctccctgcttctgacttaatcctctcattctcttatggcccactccaaaggccaaaagcttgcacaaggcacagatgatagctaacaattaaaatagagcaatggaacacagaaggaaaaagaaaagcccgtaggatgttattcatttttacaacacactgcagcacccaggcggtccacggcttcaaagcaaagcaaggcctccatctagtggaaaagtggaggtgtctgacattgcaaatgttacttgcaaatgttatgaaaccctcctccaccctccatattaaatttggcagctgttaaagctatatgccaactaaatcatgcttgacaatcatatttgtttctggctacttaattcattcatttagtccagtaatagatattaacaacattatattccctacagcaaagcaaacaattacaaacatttgtaatgttccagcttctgctgtatcacaaatactaatgcatcagagaaaataaatgaaaaaaatttctccttcaggcagtaggttaagtagaataaaggtaattttttcctcgtttctaataatagtgggaaaaaatgaaacatacaatcattttgaagaaagtcttttcacctttggatgaaatatattttttaatccatctaattaaaacaaagactacattttaaactacaattcaatcaatatatttaaattgctttttataagaaataatagcaagaataaagactgcagttactctatatgttacagtttaatgtggaaaatattgaatactttaaaatatatgaaaaatagcacctgatcacccaagacacagtcaataagtaaaattaaatgtctgagagttcctatcattactcaaagtatttgggaaaagaaaaaagatgtgacctggtatcaccaatatatgagcttatcaacccaattggtaatatgtttccatttgaaatgacattgaattgcttttgcattttaattatataacagaaactgcagaagctgtttcaaatagatttaaaaatttgagaaactgatagacaaatgatgcatacatgcttggtcgcttaacagaagaaaattaagtaaaggtcagagaatgggtgggctttaaagaatatgaagactagttagaatcctaagagaggataaattcatgatctttcatgatgattagtgccttttaagataacaacaggatgtcttcagaaatgaggatggaagagggagggtttgggcctaagagcattcactgaggtgggagagacaggccaagaatagaagaaatgagggaattccctgctggtccaccctgcttctggttaagacctagcacatctactgcatggggtgaggggttggatccctgggtggggaactaataacccaaatgcttcaaggcaaaaaaaaaaaaaaatagaagagatgagatttgtaactagtaggctactgctcaaagtgggtgcaagttgaaaaaggaaaagaaggaaaatgaagtcactcagttatgtccgattctttgcaaccccacggactatagcctgccaggctcctccgtgcatgggattttccaggcaagagtactggagtgggttgccatttccttctccaggggatcttcctgacccaggtatcgaatctgggtctcctgcattgcaggctgactcttcaccatctgagccaccagggaaaaaacgaactcataaaagtttggctatgattatcaacaaagatggaatagtgctgctgccgctgctgctaagtcactcagtcgtgtccgactctgtgcgaccccatagacggcagcccaccaggctcccccgtccctgggattctccaggcaagaacactggagtgggttgccatttccttctccaatgcatgaaagtgaaaa

SEQ ID NO: 25882 - DNA, 1452 bp, Bovine  19866880816025
  misc_feature (1)..(1): n is a, c, g, or t
natgaaccagcagagcaaatatgatctggtggccatggcaacatacatttctgctttgaacttgtcaatccaccacaaggaaatcacattaacgggatgtttttctgctacacgtagcttttgtcttcacattttaattatagaaagagatttttttgatttctaaattcttcaaagacctgggcaaaaaggaaataataataacaataataatgttgtttcaaaaatattttttgcaattccaattagccttttagttgaggaaggaaaggtagagaaagagaaaccatctatttgtccctgtttttttccccaccatataacttggaaaatcagagatatagtcagatactctctaagcaatttgcttcttggtctttttaaggtcatttcctcatctgtaaaaatagagtaaacaatatctgcctcacaaaagtgtataaggtctagttaatgcttgcaaagtgctaaggataattgctaggattatgaattaatgttgctggttaatgctggatagggaacccttggtttcacctggggcccttagctacttcattcagttattaatgccagaaaatgctcatttcatctaagttttattgcttaaatgtggaccatggctgtagaagtttatcaacacattttatgagaagttagtaagctcataaaaagggctaatttaggactaatttctaccattgataaagctgaggaaataggagatggcacctatgtgccactgtgctcgataggaagacaaaattggacaatgaaaggaaaagaatccatgaacatttatgttgcaggtttcagtagtcttcattctgaccacaaaactagccatatgataaaagaagacaaaaactaactgcttgcaaatgaggattgataatttctgagttgtgaaggtctggctctgtaactcttcccatcttttcatactgatttttgagaagaataagaaggacaaatctgtacaaaataaataactcatttgcaggccttggttttactcactttgctcacctgtaggcacagaagataaaaaatggtggaatatggcccagagctctggccctctgcattctcagttgttttttttttttttttccctaatatttatttttattcatttatttgactattagttacagcacatagaatcttccatcttcattgaggcatgcaggatctttaaattacagcataggaactcttgcagcatctgggatttatttccctgaccaaggctgaaaccctttgaattgggctcttggagcctaagccactggaccaacagggaaatcctttgttcttagtttttaaggagaaaagccagtgcctcaggattttgttgatggaggaaactgaaccagcttcagctacttcctgattgtcagtgccatctgactgcttccaaaccaggccccatagggtacagagagcagt

SEQ ID NO: 25883 - DNA, 4395 bp, Bovine  19866880836652
  misc_feature (1)..(1): n is a, c, g, or t
natataatattaatttcaagaatttaacattttaacattttattatctataattttgcagaaaaatataaaaatcatagctctctttttaaaatgtttttcttaatgtccaagtgcatagctaatttttcacaatcttctaaacaaacataataaatcaatattctaaacataataatctttatttaagacaaagctctccctgtctctctctttatatatggctctaaaaatcttataataatgacagactacactagtcatacttaatatgtgtgcatgtacaattctattcatccaagccttttggcctattacaatagtctaattctgacagtaacatgaaatctattattatacttgtgatttatttttaatcattttctctatgctcttcaaagagattttttttcttgcacgtatttagttcctggtttttgatttgttcttggtttgtgtgtttgtgtgtgtgtgtgcactactctttgttacatttttattataaattgtacctttttgtctttttttcattatgcaatgcccctctatattatgtttagtgctttaattcttcctcaatataatatccccatacctattttcctactgttagtgtttttccagtgtttctctacccccacaccctattttcaacttttattaaatatttggtttttgcagaaatatactttttacattaatctaatctcagtttatttacatgtaacataatggctgacatatttcttgatgtccatcttatttatacctatcacatattttgcatttactctttcttctcttacaacttttttactgatttggcagagttaataccggttacttattaacttttagttttgccccactttttgatgccatgagtgaatacctttctattattgttgctatatgcgtgctaagctgcctcagtcatgtctgactctttgtgatcctatggaccgtagcccaccaggcccctctgtctatgggattctctaggctagaatactagagtgggttgccattccctcttccaggggttcttcccgacccagggatggaacccacatctctttcttggcaggcagtttctttaccactaaaccaccaggaaagcccttttactagtggatagacatataaataaagattatacctatatatagtaaaataataataatatattctaattcatgtgatgtggtttatatgaaaggaggcatagatgacacagaagtgaaagtcgcttagtcatgtccaactctttgaaactccatggactatacagtccttggaattcaccaagccagaatactggagtgggtggccattcctttctgcaggggatctttccaacccagggatggaacacaggtctcccacattgcaggtggattctttaccaggtaagccaccagggaagcccagatggcatagggctaaatctgaactcaagtgatagaattagtttcattaacttctgctttatttttctgttgagatgatctcttagaaaaactcatgaaatcatgctgaagttcagactaggagcaatgtggaagagataaagttaagtgaaacactgatttataacgaaatctgatttatagagttcacacctgccatccaagcagaaaatgttaagtgctctatgttgaaaaggaagaatattttaattctctatcccctgaaggcatcagtttttcatttttattactctttggattaacattcagatttgagttgttctatgtttgctttgatatactcaaaacattgtctaataaataaatatatcatattgtggtgatatatggttagtgatatagtatataagtattatatttgttttataatcatttttcacaagctttaaattttatcatattctcttatagcaataaagacatttccattgcaaacttgtaacaataatggatagcaaccttcaggggatacatttctgagaaatttattttccctcatgttgctcagccacccaaagaatgaatttgtttccatgacagataaggactacactgatcatttttaaaatggtcttggggcaccacaaatcaataacagaaaagaaaaatgcaagataataatatttcttttcattaggttgattgatggcattctagattcatgcatcgaaattgtctctttaacagttattaaataacctaaagcatacatcttggctgtgtgggtcctcttttatactgaataatcaagacaaagataaattctatttgattgcaatgtggttactctacagaaatataataaccaaaaagcatatgaaatttaaaagacagaatatacttaccacaaagcataatattctacactaaaatctaaaacagccacatgacataattttaaattattttttagtataagatagttctgcaataataatacatttcatagtaatattgtgttgtgttgttttgttttttaaattctcacttgagcaatatgtaataagaacgttgttctaccaaattgtcatggaagaagacacacatttcataggctatttaattcagtgatggtaaaaaaaaaattctgttgcaaaagtgtgcctttaaaagtaacttgagataaactgaaattatagcattttaagggattttttccccctgattgctctcatttttctctgagagtgtgatatatgcacgaattacatataataaatagaaaagtgcttcttttagagaaagttccaaaacatttctttagaaatatgatttcaacattttctttatttgaatttgctatattccttcctatcattcaaatatcaagtcaaaatgtcttttgaaaaagtattacttttgggaaaattaccaatgactttgctgaaaagtgaaaaatttaagtaatttagtaaagaaaaaaaaaatctatttgatgtaaactccatttgattgtctgaattttttccccttcactggttttggtagatgcatgcgaacatatgtcttctgttttgaagagtttgatatagcacccatgaaatatgtcagtttttaacatccatatgccaaagtctcagaaaaagtttttctattaatttgagttctaataatatttgtatttctatacactagaaattaacaatccaagagaaaattaaggagaaaaatcatttacaagattatttttttaaaaaggaataaaatactggacttagaaataaattaacaaaagtggttctagccctgcatactgtaccatgctaatattttgaaaacggtaaaatattattgaaagaaattaaattaaaaattaatgtctgtgttgatgaattagaagccttaattttgttaaggtggcagtaatattcaaaatgtttaataaatttaatgcattccatattaaacttcctactgccattttgcagaaatgtaaaggctaatcctaaagtccatatggaatttcagaagactctgaacaccaaaaacaatattgaaaaggaagaacaagcttgaaggacttatacatcttgatttcaaaacttattatacagctgctacaatcaaaacaatagcatactggcataacaatacacatacagattaatggaataagattgagaatccagaaatgaacacataatatattctcaattgatcttttcaaggtaccaagaccattcaatgaaggagagcatttaacacatgctgaaaatacagtatatccacatggaaaagtatgaagttggacactcatatcatacacaaaagttaactcaaaatggataaaaatatttatatttaagagttcaaattgtacaaatcataaaagaaaatataggaataaatcttcatgactatgggtacttagatatgacaccaaaaaaacaagcaaaaataaataaataaattgaactttattaaatcaaaattaaattttattgtgcttcaaaggacactaacaacagagtgaaaaaaaaaaatccacaaaatgggagaaaatatttgaaaatcttaaatctgataagagcctaagatctagaatacatgaagaactaaaaacttaacagctaaaagataaacaatggaattttaaaatgggcaaaggattcgaacagacatttcttcagagtatagacacatgaccataacagtgagatgttcactgtcattggccactgactccatatcaaaacccatgagataccatttcatacccactgctgctgctgctaagtcgcttcagtcatgtctgactctgtgcaaccccataggcagcagcccaccaggctctcccgtccctggcattctccaggcaagaacactggagtgggttgccatttccttctccaatgcatgaaaagaaaagtgaaaggtgaagtcgctcagtcgtgtctgactcttag

SEQ ID NO: 25884 - DNA, 1988 bp, Bovine  19866880973277
  misc_feature (1)..(1): n is a, c, g, or t
ntgaggatgaatggcataggctgggcctagattgtcagtttttccagtcctgttcagagataaagtttatctgtcaagctgataggaattatggagtaagcctccttttctacccactgacagaagttctgtgtagtgctaaagggacaagaacttgggggacaaccttcctgggtttgaattccagaatcaccatttattaaaatgtatgactttgggatatttcattaagctctgcaccctggtttccccatccaacaaggagaacaattgtacctatttggagggttatgaggatttagttaaatatgtatagtgcttacaacaatgcctggtatttagtaactgctattattcttacatagttccttaagttctgaaaattataggttggtatattcaaatttctgttaaattgtttgactagaagtgatagaatcagaacagttctggcctcgtgtacatattcacatgacccccagtgcactctgtactgtgaacaaggttcatttggtcagctgtgtagtgaagatctcactctgttagtaaagagggacataagctcctttgtcaatgcttcataatgagacacctctgcattaaaaaccccaagagggaactctcaccttttggagctgttgtaatactttgcaattctgatagtatttgctacctgctttcactccacatccaggctttacacaggttttctccaaataggtatctttacttaagattttgttccccaggtgtgtgtgtgttcacttttctcagttgtatcctgaatttttttcctgtttttttggttcaagcctctgagctcccttaagcctttgtaaactatctcagtctgtagtgttctcagcatcattatttggtgctagattgtaagccttattggaacatctctctgccggatcattgatgatgttttaaaatttacatcccagttcttcttggtctttttcttacatcccacaagcctttctctacaaaatgccactggctgacctggttctctttctctgttccctctcattcattctctttctcccctttcttttgtccttttaagaatgaagggaaaatttgttacccaagtaggtttcattccaagatgacttgtctcttagtgtatttgacgcaggtatataattagtatagaacatatttgtatgggatcttttgttttataaattacagccacaggctcatccgtttttctctatgttccctttttttccctggtacctaaggtaaccagatttatgctgctgtttatgttgactccctattgttcttgtgatgtgtgacatctgttattttacagcacttcactcatgtgcactggcagccaggaacctactggaaataacaattaagggcataaataacacacatctgcatgagtttggctccctctcaggtattaactctgcttaccaccttccagagtttttctcttctgcattgtgataaccatttgatttttaagactttagttttcctccctgtggagattttggcgtacattttatgtaattgtctgtttttgtggattgggacttgtgtgtactgtgtgctctctgataattgaacattcaggaaaaaaagacactccccatcatgttctcgtattgcagtgttagccttcccacctgaatagtttatacaacaacatcaagcatgactcactggtaatccctgctcacataaaattcatatgcctgtgtgctttcttctgaaggcagcgatttgcatttctgtaggggtctgaaagaataggagagagttattatcagttattatttgctgaccacccagagcactcacaatggggtacaagagacagaaaggggagaggtcagttctttaaaatgtatgtgtaaccagctcagagccaatgcaagcatcttggtggcactttaattagcagtttccagggtgagaggactccaaaaattttcctaacatctactttgagtcca

SEQ ID NO: 25885 - DNA, 1206 bp, Bovine  19866880994806
  misc_feature (1)..(1): n is a, c, g, or t
nttgtgcttttgcaccttcaaaatatatccagaatgcaactaattctcatcaccttcattgcttcactgctatcaccaccttcaagccaccgtctctctctcctggataattgcattacccctaataggtctccttacatttatgatgcccaccccatcactgtcattctccacacagcaagttgtatgaaccttttaaaatataagccagatcccattacccctctgctcaaaacccttccatggtggcccgtgtcagttgagtaaatgcaaaagtccatataattgcttacaatgctcctcatcatcttgcttctctttgacatcatttattatcccctctcatgttctctccattttagtcacactggtctatttatctcagccaagcacatcaagtgctgacctgcttcaaagtctttgcattgctgccccctctgcctacgtatctgtaggactcattcgatcacctctcttgggtatctatacaaatatcagtgaggtcttcccagacaactctaagtaaaaagtatagcacttactgcactgcctatgcccatccttgcttaatttccccccccacaaatttatcaccaaatgacacagtatatattttccttttttccccattctcctcatcgaatgtaagctctatgagagcaaggttatttgttttgttcgctgctatagcaaagcgcctcacacatagaggcagtcaatgaatactattaaataggtatgtcaatgtataaataaatggctatcatgttaatactctaattatttgtttgataaaaggcactgggtgatatcatgttgcacaatgaggaagagtcagatgtatttcttacaaaattttaaattggtgatgataatgagtcacaatttttgaaatatggacatatttcgatctatgttagatgtttaaaatatactgggttacatattttgatctttagacaatttctatggatacgctttttcaaccaaacaactagttaccgaaataaatatagaatcatgagaactctaagctttttctttatttgtggctatttagttcaattaaaaaagggtctcagtagcacatatgctttagaaattcctggaggctggaaatcagcttattgatacatacgttaaatattttctcagctcctaaagaggataatcaatgagaataaaatatggggacttgggggtttt

SEQ ID NO: 25886 - DNA, 1122 bp, Bovine  19866881053348
  misc_feature (1)..(1): n is a, c, g, or t
nataaaaagtaaaaacaaaacccagaattagcaatagaatgagttttccatgtacaccataagtgaacaacagtggaacccaagaagattcctgttactcaggtgtgcggtgcttctttgggttgaagcattctgttgtacaggtttcatcatcatcacagtcttcagctcctctcataacacctacatacagctgagtactgccctgggcctctcagcatctgccatgcatgcatcactgatcagagccaggctttcattgcctttcagttcctactcctcagttcagcttgggaagggaggcactgtgcacagaggcagcgagtaaacagtgtttggaggaaatgctggatcaaaagtcctgtcatcctttgtcttcacagagtatgaatgacaagggcaggctcacccaggggttacctgaatttcccagtccatgagtaagctggcatgcactcccagagatgaactgtgcttcttttgcagagcctgcacccatcactctgtgctgtcagcgatgacaccaattagtgtcacttttaatggtggctcttgagacccaaaggagaccagtattttggctactgaaatatgtctgattttctattcaaatattaagaaaaacagacattcttattgagtttgctgatgtggatggagagtgagtgagtcacttgactaccataaacaatatttttgtccatacatggttaatactttatttttttgggaggggtagttttataggcttgtagacttctatggtctgtatctgcatatgagctaaagtgcattctctcactttttggtgcaaatgatggcactcatttggaatacgtttccaggagtggtactggattatgctgagcagttaactcattttagaccgatcattttccatattatctggacagaatctatatgaaacctgtaaccactggaaaagaggctttatatttctgtgcctccttagaaagctattctaaattacagttagctgatgtgttcttaatatggcctgattctctttggtaaaggaggtccttggcctgcacgtgtttttttttcatgtttcctttcctttaattatccttctgtttaaggaaggaactgagctgccca

SEQ ID NO: 25887 - DNA, 848 bp, Bovine  19866881066619
  misc_feature (1)..(1): n is a, c, g, or t
ntcttctggtagcaaaatatacattttataatagtatttatttttacattacagttaattggtttattatgccaaattataacattacattgaagttctaagaactgcccaaaattccatgcctaattgacttagacaaaaaaagttaacgtttttgcacacttaattttattttattttatattttctatttcttgagtttatttgtgtctttgttttaaaaagacacccaatccactgacaagattaagtacaaacatttttgttacgtgtaaaattaaaaattttagttaatttgggatgggaaaggacagaataaatctctgtgcctgattatgagagtctaatctatggattagcacctcattcagtgcttcttggaaatctaacagcatcttcaacaacacatcatcaaaaatatttaatatttcttaaaggaaacaaattaagactttagaattttagaactgccttatgtctactttaaaagtatattacgatgttgactcactgaaagctaacttcgatttgctaagtgggtaatatttactttgtagtgacagcagtctaaatttcaatcaatttttactactagaaatgacttactgattgggcttagatatcatcatgctgctgctgctgctaagtcacttcagtcatgtccaactctgtgcggaccccatagatggcagcccaccaggctcccccgtccctgggattctccaggcaagaacactggagtggcttgccatttccttctccaatgcatgaaaggaaaagtgaaagtgaaatcgctcagtcctgtccaactcttcgcgaccccaggactgcagattaccaggctcctc

SEQ ID NO: 25888 - DNA, 735 bp, Bovine  19866881076249
  misc_feature (1)..(1): n is a, c, g, or t
ncaagaggaattctttgtgcattcattgccccttgttccttgttctttttttttttttgccaagtttaaatacaactgaactgttcacttaatcttactttttggaccaaatctgtggcggttactctgtcgtgacaggaaggagggagatcacattaaaaagcagtttgttctgttcctggcagagctatccaccatgcgaaataggattcatagagtacagatggccctgaacgaaagtgttttcatgtgctggtccaggggtttgataaatgtgtgtctcgcaagagtcagactgattgccttattcattataacctttattcaactgatgcaagtcaattcacatattcattatactccacagatacatattattaattgagtcttttgaagtattgactgtaatgttgattcacattcatgatgaaaaattataataaggattaattccttacctctagacaatatatatggtgagttgtattttaaagatttcagtttgattgattgtaaacagattacatggtccaaaatggttgagacccagtaatagtcgtagctaacatttattgctatgtaatcttcagaccaaggtactgtcattatccttattttatattagtactgagatgatgatggtggtgatgagaaaagtcttacatttcttgcctgctattaagtttgggctctgtatctttccccaaagagaaaacaaataaccttttcattata

SEQ ID NO: 25889 - DNA, 731 bp, Bovine  19866881095167
  misc_feature (1)..(1): n is a, c, g, or t
nttcttaatatttgagaacttgctttattgagctaaacatgaaatcatttcattctgattgccaaaacagcctttgaaacaaagttcaagggtgacatatgaatgctcacttttctaagtcccttaggagcacaaatgctaaatttcaagattctaatatataaaccttggttgcttgtagagtaccagtgttacttgaagtacgcgcttcattgtggtctgtttacacttcattttgcttatacgaaatcctctttgtagactgatgtggcttatcctccaataatgctgaggtgggcctaagaaatacagttgcttgcttctctacttcttcaaaagaccatttgcattatgggatgcaggctgaaactgcttttgtaacagtggcaattctcctcttcctggcatcgacatcggactggagctggcttgcaacagctgagctttcaacgcaaacagaagagcagcaccctaagcaccaccagcccctcagtttccccttgtcaccagtggaagttaagttaaggttatttacctttcaatgtttccaaaggtatacactaagaactaagaaattacaccttgaaaatgcaattggacaggtatttctatgactggagtatgggaaaatggagtcatcatttttggaatctgttcatttttctttagtggctgggttactaccaattggagaaggaaatggcaacccactccagtattcatgcctggaa

SEQ ID NO: 25890 - DNA, 1152 bp, Bovine  19866881105249
  misc_feature (1)..(1): n is a, c, g, or t
nactgtagcccgccgggtctcctctgtccatgggattctccaggcaagaatactgggttgggttgccacgtccttcatccagggaatcttcctgacccaggagtagcgcccatatctcttatgtctcctgcatttaccactagtgccacctgagaagcccatattctttcttttttgtcagtattaagaggcatgcagtgcttgcctgggtccctagtttctatctcacattgcatgaatgtacaagctacagtgaaccctgagagtgatttagggacttaacttcaagcatgtgcttcatatttcttctgataaaactgtttttaaatatataatctttagtgccaggaaatcaattaactttaaaaattgccagcgctgccaataaccagtaatatggatgtaacccttttgcatcaagagcatgaagaaattaagtgatctaacacatttagctaaatccagccctgaaagaaggttgcttctctgcagtgaagctcttttgaaatgagagatggaaacagcaatgaaggaaaaagcatctgagtaattgtacaaagtcttccaagtggcactcagcccagaagacatttttgttctgtccaaatgcacagaaatctgcagagacccatctgaccccagcatttcagggtatatatcagggctttttccacaaaagagcccttcttctgaaaagccaaggtttgcgtgtatttgtaataacagttagaaataaatatgatcaagatatgttgttgttggattctaaaacagatataatcttgtaatataagatctaaagaaagaaatgttgcaaatacaggaattaagaaatttatgtcatttctatactaattctgatactgaataggaccaaaccagatgcagcacagagagataattgcatttttaaatttttttttgaagtctttctttgtgatctagactagtggtcagcaaactgctgtctgtgagccatagctgctctgccacctgttcttgttaaaaaaaaaaaaaaaaaaatttacactatcctttaaatctcatccatggagctttcacactatagcacctcactaaataagtgcaacagagatgatgtagctcacaaaccctaaaatatttcttcctatccaacctttcacagaaaaa

SEQ ID NO: 25891 - DNA, 1111 bp, Bovine  19866881126825
  misc_feature (1)..(1): n is a, c, g, or t
nccagtttattctagtcacttttgaagcatctttcatttccttaaatctgctaaatctccaaggcaaaataatgtagaacagaatagataactaaatcttgctaggcattaactagggtaaatacatttggagaactgcctctcagtttaaaccagttgaactgtgactataccatgcttttagagagactgtctcatcatgtcatggtctgtcttattagagtatggtttcagtcccttgacaacttaaaaataaccacagtcaaacagaagctaagctgctgggatatgtgttaattgctccattgtcgtacagagagataacaggaactgaggttcccttgagatcaagaagaattgtgaagtgtcaatttcaaaatgagttttattcagttggttaaaaatagctcttttcttgagcaatataaatatatttagcattgtttgaacatcattaagtatgctaaatgtgctaatcattagtaagaaatgcttttgagtatatgatttctactcattcctttttttttttcccttccctgggaacttttattgtataaagtcccttttatacatagatttctctatgaaatagagggtacacattcagcatactgatcctgtgatgacctatatgagatgaactgatgattatcaatggcttacttgatgtttttctcaatgcctgtctgtggctatgatcttccataaaattccagaacggtattttaagataaagaatttaactcaaatttttaatctttattaattataatttttttactgttttcataaacaaggatcaaatgcacatttcacatgaaaactcttaatagtatacacataaatagtaccaaaatagatacaagaaaaatgagagatgtcaaagctgaatttatgatctgtgagatcaaacgtattcactggattaacattataaatgcaagattataaatgactcacttcattttccgataactaaagtggcagattaccaacgtgaacaaatgaatgttgttagtttggatttaggtatttatttttgaataaagtttttcctttcattcaaaatgggctaaaactgctgtacactttctagaagggcattttt

SEQ ID NO: 25892 - DNA, 923 bp, Bovine  19866881193229
  misc_feature (1)..(1): n is a, c, g, or t
nactattttttttttatgtaattgcctcatatatccttaagagacatcatatagaaaactaatgaaacatatttaccccagatggcaatgctaaattttttaagtgaaattcaggaatcagattttacatgacacagttatataaagtggaaagaacattctatgttggtttctccctcatgggaaatgtccattttagatttttatctcatgttctcttccatctaagattccacttagatgtaaggcagtaaagaaaataaataataatagattactgaacaatgtctaatccttggtctgatggaacagagccttttcacaaacatctggctgcttcattctgtgtaggtgatcagacacttcatgtatggtcaattgctcagtcgtgtccatttcttttaagaacccatggactgcagcctgccaagctcctctgttcatgggagtttccaggcaagaatgctggactggttgccatttcctcctccaggggatctaccctcttccaggtagatcttccaggtaccctcttccctggatcctcccgacccagggattgaatctatatctcctatatctcctgcaagtagattcttttaccactgaaccacctgggaagccctatggacacttcaattattagaaaacaaaaaggtaacatttcctctgatgattaatcatttgggcctttgcaagcatcagagaaggcctttgagacattttttctctaagagctcctgacattggctctaatattgtattaatacaatagtcccaatgttcttggacttcccttgtggctcagacggtaaagtgtctgcctacaatgtgggagacctgggttcaatccctgggttgggaagatctactggagaaggaaatggcaacccactccagtattcctgccggagaatcccagg

SEQ ID NO: 25893 - DNA, 1307 bp, Bovine  19866881221279
  misc_feature (1)..(1): n is a, c, g, or t
nttgctttatttcatacttaacatcaaaatccatcaggatattctgtcacccttatctccaaaacaaagcaaaaattgaatcacttttcacatcctctattgctgttgccctgatccaaaccattatcccccattgtctggatatgaactagcttactacagcatttctgcattttggcaccttgacagtttttcttatagcatccagactaatccctttaaaaggaaataagatcacttctcacgattatgactttctattcactttcatctcactcaaagtaaaagccaaagttatataacggcctccaaggccctagaagatctgactcttcccacttgcttgctgatatctgttactttcctggcagtaaaggtctccttgctatctctggagcatactcctaactcaggacatttgatcttactcttccttctgccaggaacactctgccaacaaatacaaatatggcccatttgtcccttttttaggtctccagggtggcttccccaactgcaatatgtaaaatgctactaccatccacattccccattctgttctgttttctttttccatagtacttactgctacttgacacactacatcattgtttattgtatctgttcctcctctagaatccaaactccactaagggaagggctttgctttgttctctagtgtgaccccagaacctaggacaacaacagccttattggaggtgatcactgtatatttgttgaatgaataactacataaatattaaaattattaacacgttaaaccatgttcctttatatttcaatcacatcatgactaaaaatataattatgtaatatgccaatgaaaggcttatttttgtcatgtgagattttattctgagatggctgattaaacatttcatttctgaaatgaaatctctatccttgggtcacttattttcaaacaacctttcagctcttttgaaagaacctcacatagattattatttactctttttattttttcatgacattctcaaagatcaagtgaaaaacacatgtcaaagcaatttctccctgctctttctgattaaaatcaatattctccctgcttttagcagcagtaaaaaccaacacaacagtttccgttaactcaatagaatgtcaagtgatatcttagtgtattgttaccagcaaggatatcaacagagaactaccaacagcctataatcactgctgttttattatctacaaaatgtcatctgtgcatatggcattttacaaaacaacacagtgaaaacaaagctcctgtctcaagtaaaccttat

SEQ ID NO: 25894 - DNA, 1070 bp, Bovine  19866881288064
  misc_feature (1)..(1): n is a, c, g, or t
ntgcagaataacccagcctatcctgactgatacatagatgcagaaaggaaactgatgcaaataattaaagtgtctccctcatcatgcatcaccagaggaacagttgctctttggtccaaagattgccttaatagaagagagctgatcactgagtcaacctcccatatacccagaagagtcttttgttaagattttcaaagataaagacgatagaataagtcccaaggtgtttttgactttgaccttttcctaaaagctccgattattagaattcaagtcattatgtaaattcagatcattgaagaactaggttcttttaccagaaaaagtcattcaaaggatttctcagctttctttcctttccaatggtaataaaaactttttccttgacctatttatttcatatagttgccagaagacttatatgagaagagtactttgaagtagaagaaagcttcatacaaatgcaaggtgctaaaaaaatgtatcttttatttatgatgaaattaaccctcataggatacttcattttctaaaatatattcattcaaggaatattggagcatttaataaagtaaattcaaactattagcatttaaatttgttagctgaatagtttcatcctgcccttacctaaaacagcagcatttcctcctttataattaaaggaagtcacagagtcaaaaacccaaaaaattacctaatgccctcactggcagtaacttggttgaagtcctctattatctcacatggaaccctggccttgcccaaaatgaagctctggttttatgcgtagattttataaccctagaaactgacttcccattaaaataaacctgtgacagaaatcatatcacagaaaataggaagaaagaaaattctacctcatatgatgaggtgttaccttatgaatgagactgcagtttaaattaagaatacctttagtggctttgaaaatcttttctgttttttaacttttgaagtgacccgttaaattgatctgtgaaggtcatagatacccctggaaagtggtgcttaaattctttttcagtagcagaaagtccctggtt

SEQ ID NO: 25895 - DNA, 714 bp, Bovine  19866881322644
  misc_feature (1)..(1): n is a, c, g, or t
ntttttactaagtgtatggcacttatatgataggtcagtactgccatatttttagaaaaacttactactcttcagaatatatttaaccatttgataggttaaagaacatgtgctttaattttgagagaagagcattaaaaaaaaaccctattgactgcttgctctatgaatttctgtgctcattcaaaaagtaggctccatgttgttgttttttacctcttactatagtctttatttcttttcataacttttgttggtccttcttttcttttgtccttcctacccctctctctctttctctaagacaaatagatatcactggaaatactttttaaaatttgtaaaattgtgcttctgagataaagactttctgttgactttgatttacaatttggaggaggtttatagtgcatgtcccccttaagttacaaaatatttcctcttcaatgtgtaaaagaaagaaaaagattgaaactcaacagtggcttaatatttttctttcaaaacacctggtttcttgttccctgatattagacctaagtagttcttatgatggaaagatttgttttttccctttcttttctgcctgctttgatttatgctgaattaatacagtacttggattcagtagtgcctgcattaatgaatgcactaaaagcaatgacacttaacactccataacgtaagatagaagacacagaaattcagtccagt

SEQ ID NO: 25896 - DNA, 887 bp, Bovine  19866881518541
  misc_feature (1)..(1): n is a, c, g, or t
nctttcctctctctatcgggttttgacacaatgttttaaaacagagtaaagaaataatgatagtctgagatcaacttcctgggcataattaggccaatatatagcttctgaatgttgagaaaaaggattctgataagccaattaattattaagttgcctttaatcatccttggcaattttcctagtaacatgaaattgctttgcattgtgactgataataaaacacatgctcttaagttatgcttctcatatgaaatacagtttgaggaaatgataattcagttgtttctaagctaacagagtctgaaatgtatgtccagaatttggtctataattttgaagtcataaagtgactgcttcctgaaagaagcataaaactagaactaatttaagagtttgactattagaggtagggctcatcactcaggaaagattttgtgtggtttttctgccatgtgattctctcttggggttttgttcaacttgacctgtgagaaatcctaagggaaatgaggctgaactagcttaactatggtgaaggtgctgaggatggcatgtgaagagagaaacctgtcatgtgtatatgttagcagaacgctcaaggttttctggagaatttatcaacaactaaaatggttttctttgatggtggtcatctcaaaacaaaacaaacaaacaaattccagcctaacttctctactacttgccagataattattttactgaaaaaatgcaaaaatgttttttctcggattaactatagttattgttgttgtttaattaccctcacccctctctctcttttaatcttgattttttcctttgtttcttggctcagtctaccaagtctccccaacatttgagtgtacaattttccttccaaatga

SEQ ID NO: 25897 - DNA, 1583 bp, Bovine  19866881592372
  misc_feature (1)..(1): n is a, c, g, or t
ncccagggaatgaactcgggtctccagagcaatgtaggcagacgctttaccatctaagccaccagggaagtccctgttatttacctggggccaaactatggtggaggtaatggagataatggcaacctccttcaaaactgctacactcaggttgtccccaacctgcagcaggccacggccaaccacacctccaccggagactcctgaacactcacaggcaagtctgggtcagtctcttttgggctcactgctcctttctcctgggtcctggtgagcacaaggttctgtttaagcaaagaaataaacaaataattaatagttaatagttctctacatgtaatagattatcaactaatatttgagtgactaaataaaattgacctgaaaacagcttctatctaaaagtaatgtcaaggttctgtttagatgcttcttgcctgttataacaagaaaacactgtggtactccttttaggtcatttattatcttctaattagctaaagcagctaatttaaccaatattttatctcagggcatgcaccatatactgatgaacctagaatacataagatagaattttctgcatccaaagacatgataaatacagttttgtctcttagcttttctgatatttcttcctaaagtgtgttaaaccttgtaaagtggttcagtttttagagccatcagagccttaccattgtttgtatgtaaggcagttctatatcatgtgtgatatttctagcaccagttacactattctccaactttaaaatctacaaccttaaaaaaagactgtggtgcttactgtttatagtcactttgctcaatcgtgtccaactctctgtggccccatggactatagccagctaggctcctctgtccatggaattttctaggcaagagtactggagtaagttgtcatttcctacttcaagagatcttcttgacccaaggatcaaaccaagccctctcatgtctcctgaactggcaggcagattctttaccaccagtgccacctgggaagcccttgagatttcatttgatccacaccctgagtcagtcaatcaaaatctgatggataagtcaatcctaattgttaaggtagctagaaaagcaaatttcacagtgtcccatgacaagttattctattttaaggctttcactacctagaaaagacatacctaatcaatgacaatgcagaggaaatgaggagggaaagaaactattctttaataattgcattcagtattcaaggcagagtgctaatggttttacatgtgtacattaagcaacccttgaaaaaaccaatgtgcttaaaattgtcactgttatgcttatttagaaatgagagaattaagaactgaagaatgcatgcatcatgctcaaaactgcacagcaaataaagaacaacttaaattatctaaataagagtattagattcaaagaaaggaatagggtagaggccctcacttcacttacatttttcagaaacgacttgagagttctctcttctgtaccaaaaagcaagtttagacaagcattattccctcatattctctacttttccttagaaaacctatagc

SEQ ID NO: 25898 - DNA, 1076 bp, Bovine  19866881730061
  misc_feature (1)..(1): n is a, c, g, or t
ngacagcgtaaggactcttataaaacggtgctttaaaaggcaattgtgttctgaacagtcagggctgaaaggaggagagacaagtgtgattatgcggcttgactgaccgagcctaatcaggattatttcggcacactgcttccctacagccgtggacccattaaatgctaaacgcttctgcgggcccacttcccgctctgtctcccactgtgacccgctacttttccacactggttactcactgggcttctcaaaacattttttggtaaacggaggtaccaggtttaataggctcctccaaagtcatcatcaaatctgtcatttttatgacaagagtgggtactgtccccattttaaaacagcaccatttggactgttacacagaagggtgcccttggaagtaattctgttaccttccaatatatttttattaagcaaagtggaagttgacaactacaactctttccataaaagctgctctggctttgaaaacgtcattttggaatatctcattttaaactcatgaggcgatgaactcttaccaccctgtggaccacatcattctcaaaatggtggctccaatttggggaccaggcgttggtaactttgggcatcaaaatctacactctgctttctgtttccctatcctgtcctccatggacagacaggagatcaaaccagtcagtcttaaaggaaatcaaccctgaatcaaacctgaatcctcatactcattggaagaattgatgctgaaggtgaagctccagtattttggtcacctgatgtgagaagccgacttattggaaaagtccctggatgctgggaaagattgagggcagaaagagaagagggcatcagaggatgagatggcttggatggcatcactgatgcaacggacatgaacttgagcaaactccgggagacggtgagggatggggaatcccagtgtgctgcagtcccaggggtcgcaaagaataggacacaactggatgaccgaacaacaacatcctgcaggtggtccagactcggccattcctggtgtataactgattttctacacgtatgacgtggtacccatt

SEQ ID NO: 25899 - DNA, 668 bp, Bovine  19866881789382
  misc_feature (1)..(1): n is a, c, g, or t
nagatttgagaaaagacttgaaggagatgagagattgaacaaagagactttctagggaagagcattccaggagaggagacatcaggagctaaggctccaagggcaagacaagagcccttctctgttccacagactgtagtctgccaggctcctctgtccatgggattctccaggcaagaatactggagtgggttgccatttccttctccaaaacagaatagcttcatttaaaaaaaaacaaaaccttaaaataagcaaacaatatcttatctaaatgcaaaaatgcattatttatgattggctttcatctatgtaaagctttcaaaatttagttttatatagtatcctttgaatccatcaagaatattaggaagtaagataatcctgaaggcactatcatttataggagaaatatagcattgagaccttgaatattaacaatttatatacctggcattttctttattaaaaatttcttcttagtagctgactagtataatccagtactagttggttgaattaaaatttgtatatattcatgataaactaagtgaagacactttatacctaagcttacattggttcttgaaataaacatgtccaaatatgaatctccaggacaatagttttcacatttggaagaggaattatgttaggcttttcatata

SEQ ID NO: 25900 - DNA, 1291 bp, Bovine  19866882119227
  misc_feature (1)..(1): n is a, c, g, or t
ntagaactatttggtgacaaatggagagaggtttttatgtagaatgtgattctgattccctttctcattttattcctttcttttgctctggaagtagaagcttatttattttccccttccattaccacaagtgtggcaagttcaaaatagatggtagcttcttttcccaggattaatttatctttctgaaaatcacccagattgatgcctctggatgtatttgggatgtccatggaaaaatcagatatcaaaatgaaaaaggcataaaatgaacgagcttcttttcatgttgtgacttttaagaatgcaactatgatcagccagttttagaggtagaatcttctaggaatggcagaggagaaaaatatcacagcagaaatgccagtgctctaagtgtatgtattggtagagtgagcagacatcaagggaaaagaagtaaagaatgacaaagtattctgagatttggtttctgtagcgctgaaactgcaaacagatgaaaggacaaaatttcattttttttttctgggtgaatcatgttctctaccgtggctctgtaacaaatcctgcatccaatttctatttgaaataaccacctagtgaggactttgctggtatggtcacttgcttaaggctctcttacatgtagcctgcaggctggtaggaacaagacaggagcagaaaacacaggcagaggggtctctgagacagaaggggcagagccagacagagtgggtagagaatgaagcatttttctgttatcaccttataagaacttacattgctgtaattctgcttttgttgtatctttgaactttattttttatattctgagaaaaatacagtatattttatgtggtatctacaatgattgcaatatgataaatgcactaagaagcagctgttaatatttaatttgggacaaggctaaaaatgtctggcagccaggcttgcctgtctatttagtagtccttttcattatcaaaaatgcttcagtatgggacttccttggtggtccagtggtgaagacttctacttccaatgcagggggtataggttcaatccttggtcaggtagctaagatcccacctgcctcatggccaaaaaaaaaacaaaaaaccataaaacagaaacaatattggaataaattcaataaaacctttaaaaatggtccatgtttaaaaacatctttaaaaaagccctggtttgtacagtaaattatatggtcaccctaggtcaaccttattgattttcaatatggacttgggactcaatgggtgattgttctgctaaa

SEQ ID NO: 25901 - DNA, 700 bp, Bovine  19866882186250
  misc_feature (1)..(1): n is a, c, g, or t
ngtaacagataattattacccaagcagatactgccattttaaacagttggatcaatgataatacatgtgtcctctgaaggaaagatgttaaaaggatgaataaactctattagtgattctgcatcctcaataatgtttctatccttaatctttcctcatagaatttattgtctaaactatattaaaaagacataattgcctcaggatggttcttgccaaaagaaaactacaaatacgtatactaccggggattgaagaggaagttctgtctcatttctcactttataatgagaacaatcaaacatgtttttaaagtttaaaatcaaaattatgtattatgtattgttctctatttgcccattatggagaagcttttaaaaagctagaaagccaacaactagctggaatggcttactagggcatgaatttgaaatagatccccaggggataacgaatccagcttatattgtggggaaatgtgaagagtattaattcatattatgctgctttgctattctattaataaatgcaaaaagaaattctcgcggcaacgttctcattttaacatgagcagcaagatattagtacagaagtcagagttcaaaaagttaataataaatctgagtcaagaatgattctgaaaggattcagatgacaaaaggcagtggagagtgaaaattcaaatgtagcaggacattat

SEQ ID NO: 25902 - DNA, 1016 bp, Bovine  19866880395334
  misc_feature (1)..(1): n is a, c, g, or t
natttaagcatctaatctagtaggtgtaccttaggagtctaatgttacttaacaggttgtgggttattcctaattttatttccaaatgccagctcaattgctgaataatccatctttccctctctggatggaaatgcaacctttaaagaaacatgcaattcacacaaacatgaggtaaatcttggaaatttctattattttctaatgatctatctgttgattattatacctgcaatatgctactttaattactatagctttcagtaaatttttatatctggcagaccaagtcctttctcattattcttacaattttcttgcctatcttcatgtatttattcttccaagttaaaagttattatcaagttgtcaaggttttagaaaaaaagtgattttgatgtgagtggcaccatgtttacaagatgatttagtagaaattgacatctttacaatttttagttatcccatccaggaaggcagtattttgtcagcaattcaggttctatattatgcccttcaggaaggttttattgtttatgagccttacatatctctagttatgtctagatattttacagcttggttgctatcctagacatgaactttcaaaattacccctcttaactggttattaatttaaaaaaagaaacctaatgcattatatctggctaccttatgatactcttttggtagtaataattttaacaaattttcagttctcttggaaatttctggtatgtgaatgtaaggtatgtaattactaatcactttatcttttcctgtttaatatatatttcctgtttttcttaacttatcacatttttcaaaaatctgaatgctgaatggctaaaaaagaaagtttaagtgaaaaataaaaatcaaatctcacaaacacatgtggttctccaccaatgcattataacaaaagtattccatggtttaataagatgaatgagtgttggcctccataatctgtgtttaggcagtgccatgcactgctcgggtagggatttctt

SEQ ID NO: 25903 - DNA, 1065 bp, Bovine  19866880449964
  misc_feature (1)..(1): n is a, c, g, or t
nttaaatttccaagcagaaaacatcatgaactgggaactccagggtaccctccagatagtgcattgggtattgcttatcttatcaaagttaaatttgctttcattggggataattcccatttaaatgggtgacctagacaagctggtttaagctgctacaaatgaaaatgcaaataaaacatctgcttctaactaattttcactcattattttaacttccgaagaggaaaggttaggaagtttttagaatcatttgaatgccaattgctttgatcatctatgctgctaggatcccatgaggcaataggctgagtttttaagaggtaaaatacttcagagctttaagacaagtagaatacaaacaagataacaagcttaagagactggacagtccaggtagaaatgtctagaaagcaaatgagaaattggggagatgtgatatattgcagcagagggaggaacgaatgtgaggcataactcaatgtgagagaggcctgaggaggcagaatctcactcgtgtcgaatatatcttctttagagactcagcagtcatgttgaaataagtgagtcaatgcaagaaagcccgttgatttggagggtgcttgacaggtaccagaagccaaggaaatatggaaggacagcccaacctaacgatacgtacatagagaaagcacagcactgttctgatgaggtgggtcacgtcagacactcactgttacttcttggtccttttggcccaggtttccaaaattttcaagtgacatatgaaagtttggaacaatatgtcatctctggaactggcaactctttcatccagtgtagttattccaccaaaataagattggatggagcagagaatcagatatatacgcgctccaatctcaggcctgacatttttgtccatatgactctgggcaacttacttaaaggctctaaagaatattcgtcccattccttagaaagaagcaagtgtctgagaggggagttgttctatgcaaagtgcgtgaaacatagcagttaatcattaaacatggctattggccttattattaattcttctacaaa

SEQ ID NO: 25904 - DNA, 3771 bp, Bovine  19866880509018
  misc_feature (1)..(1): n is a, c, g, or t
nttacatgtaaagtaatgctagacataagctttcatattccaccaacatatcacttaaaacatgacccctttagtagattaaacagaatactaaattgggtactaggagacaaatatagtaactattatacatggggtcattttaatgactgaggaatgaaggagagacacacattattcacatacatccctgggcaagtgaagtttgtttggtcaaataatttaagagacaagattttatgctattgaccctaaagactttagataattacagtctgtttcaacacattagatcaccaatattggcttaattttttaaaagctgtccacagaggaaatattggcagtaactagtagctaatgggctttttctttgcaaaataactagtattggctctattttgtttggcattataaatgttcagtttcagggcaacaattacagacactgagttctgtttttttcattcaaatatgtttttagcttaaaagtgttggttttaccttccaggacgccaaatacaaaaacaccttatagtactgttaagttctttcaagtatttttttcagaattaaatcatagatctcaactcaggagatctacaggacaaggcacacactgactgtcatgattttatcgttcacctagctttacttcttctgtaacttaaaggggaagtctttcccgtcaaccagacaagaaagaaagtgaaagtcgttcagctgtgcccgactctttgagacttcatggactatacgatccatgggattctccaggccagaatactggagtgggtagcctttcccttctctagggaatcttcccaacccagggatcaaacccaggtctccagtgttgcaggtggattctttaccagctgagccacaagggaagccctcaaccagacaaatgtgtcttaaaatataatgggttttagaaaacagagttcttgctcttatagaatattttaaattatgtggaaattctattttaggattgatatacataccgcagacacatatgaataagaaccaatgtatttggtaagaaaactagcatgtccaaattaatactcatcacattgagcgccagtcttgttggggtaccagcagacccttactggagaaaggatagagttcaggatggcaagaatattactataacatcccctagagtttcacagagataacgaagggaagatgacaaatagcctttcaaaactaccaggaaaattaaagaaaaaggacccaatttttaaagaaacataagttctgtgggagtgagaccagatatgaacatgtacaactcacctagaatatgccccaagcttcagctgatggtgaatttatttttaaatcattagattaatacccattttgatcggtataaaaaaaatcagcaaataaacctgttaatgtaatagaggttcacagaattcatctgcttgctacagaagaaaaagaaaagaaattggagcaaaggaggtttttgtctgagattcacttgctagtctacggcttagtagaccagcttcctacaccaaagtaaaattaaatgtgtgtgtgtgtgtgaccacatcgagtgacaaaatggtagctgtcataatgtgccagttaacatgtccaatacgagctgatcgttgagtgtcccctgggaaaagaaagacagaaacatgacaaagaacaaagaacgtggatcaataatgcttggggaaataagacagagaaggttatttacttgcattgatccgtggctgccgccgcgtaaacttggcctgtttttcttttgttaacctttaagcctgagtctactcagaggcaaccagggagccaactaacaggtgtagattaaggatcgaaggaggtcaccgtacctctgtcaccaccaggcacccgtgtaacaacatccctgaagaaatttaaacatcaatagccataataagggcaaatttatcaagcccagccagctctagctgggagcccgcctgcgtccagccggtttgcccttgctaaaagctcaattgatttggacattcttttactagagttgattatcaattgtgacatagcaaatttgttaccttccaagtgctgagcgtatgggggctagtggagtctctgaagtgaaaacacctggagttaagtcacccttcactactgaaaagagggaagctggggatagccttgctctcagaggggccagaaggatccgccttccctttgcatgcagtgcaggctggtcttggagaagaaggtcctcagaagagttgggaagattttttgaccagacagtgtgagtatcgagttgaaaatcagatcatcaagctcttactcatgctcttccctctacctggaaaactcttaaccatccatcctcatttaccaaaaccagacctgtctccaaggtatcatttagaagctctgtcctttgaaatccacaatgtaaaggtcgttactctctacactgataccctggtggattacactaatttctctagtgtctcttctcttcccaatgagatagcaaattccttgaagtcagaaggttggtttacattatttctagatctcctcaatcaccaaccaccacaccacagtttaggaaaacttgctagcaagtgagtaaagaaatgaatgaagaaatgcaatcgttcaaatttagatagtaattttaaactgagtaattaaataaggacctttcagaggcaaaactgctcacttagcccgccatgtcctatagctcgattttctatcaggggctattttccatatctgctacctcttttccttcctctctccagctgtaactatgacctctcctgggcattgggactctcctgaccactgctggtagtcacattgagccatcaataatttatatttcagtgtaatttcagtatcctgtctcttgtgtgtgcatgctaagtcacttcagtcatgtcccaactctttgagactgtccgattctttgagcctgtgtccaactctttgagatgctgtggaccatagcccaccaggctcctctgtccatgggattctccaagcaagaatactggaatgggttgccgtgccctcctccagggggtcttcccaaaccagggattgaacctgcgactcttttgtcttctgcattggcaggcaggttccttaccactagggtcacctgagaagcccagtaatcacagcaatcatgtgatataagaagaccaagtattattacctctcagggaaactgaggctcacagtggttaatgaggagccccaggtcacccagctaagaaatagatatctggggctaaggcatagcctgacgccaaaccctctgctcttacatatcctcttttttttttttcccccttgttgtttgcttaaacaattttattgagatataattcaactcccttcagaatgtacaattcagtggttcttagtaaggtatcctctgtttctaatccatatcctcttcatgctatttcaggcaaaatagaaattacacaaggaaaagtaacacttatccctgcgaaagagtgtagatggaaaaagcaggggaacacacatgcattaaagaaagaacaattgctcactgttccagaacagtgcttctcacctgctttcccacaagacccataagacagactcaaccgagttcaggaaactcactccgacccttccctcctacggtatccataaaggataagtcgtttaaacaatgtgtagccatcccagctttacaaccagccgtcagctgtttcttaccactggctgcggggg

SEQ ID NO: 25905 - DNA, 1309 bp, Bovine  19866880531308
  misc_feature (1)..(1): n is a, c, g, or t
ncacgactacgccaggacctttgcatttcctttacccacaactggggagattattaaggagaagaatgattttattttctctaacatattatccccagaattttaccatcgcagatttacagtatctaactttctaaccccttcacaaaagaaatttgagccactgaaatactaacacgtaaggtgctaaggtggaaatcagaacatttttctaccaagaaaggggttcttcaatgccatttggtctgaattgtttgtgcaaggggactagcccatttgtaattgactggttggaaaacaatctgaaattaatgtagaattatgattctaattcatgtctgattaaatcaaattttaggagcaaagaaagataatcatttccgatgggggatctttgaaattcagtctgtcctcctcagtcaagattcagctctgatctcataattaacatctttctcagaagttcagcattcctggtgccaggagaaacaaactgtgtactcttcagaaaaaaaatgcattctcttcctggatatagctctctgtctgtctctgtttctctctatttcacctttaaattttaaagtgaccatagtgtatggaataggacacattctgattttatatgtagactggctcatttgtcactaccaactgtaatctgccagtgccactgataataattgtgaacatttaaatgacaagaaatttggtcaaaaatagaaactccctattaaacacatttaattgaggaaaatcctgcttaatctactccattttatttttaagttgctgtttcctttccttttccctcataaataagaaaactttggctcggaaacttggctcatgagattgtgaagagagtttatcctacacggaactcaacacacgctgatcagggaatctcttttgtctgaggactttctttaggaaagaagaattggcttcttaactgctttcaaagtagccttgacaagcttctttgtgtcactgtatctttctttttgagctgaaggtttttcaccagcccttattatagatgacctaacatttcactccggggctgataccagaatccttttcctttagttccaggcaaggttactgccatttcctctgtctctccttcctgaatttacctaaactgaagttccagccttttgttgaaatgcttttctcccttccgctcttgtgtgccctgtgtcacagtatcagcaaaagtttgcaaccagcttcccttcgctgtggacacaggaaggggaagggaagaggagagaagttactgatctgcttctagaggtcaagg

SEQ ID NO: 25906 - DNA, 1162 bp, Bovine  19866880540233
  misc_feature (1)..(1): n is a, c, g, or t
ntcttaactctttctgtacatatgaagctgaagaaatattagggaaagcacaatacaacgtgttatctatggatgcactataatgagagcaaggtaagaaaagatgatgctgtgagatagtgtcaggatcgtcgaacattgccataggaaccacagagtagtaggaagaacttgaaatagttcaaggacctgctttttctgttgataacttccccaagtcatccaggagttactgcaaatatttacaggggagaaagggctgcccaggtggctcagacagtaaagaatctgcctgtaatccaagagaccctggagaagggaatggctacccactccagtattcttgcctggaaaattccggaagagattctcatgggcagaggagccaggggggctatatatagtccatggggtcacaaagcgtcagacacaactgagtgactaagaacgaacagggaagaaaatggagacagaatattatcttctctaccatattggcccttgatccttgatgaatagaaccaccagctagtcaataatgacctgtgtctaggatttctacttttgttaaaacacacactcatccacatcatggtttaattcagcagaggtgatgaagagaagttgattttctttcattctaacttctaagtctcaaaaaaaaaaaaaaaaacctgtgttttcctaaaagttcataacagctctgaaatggactttattttctatacaaatttccccctttggggtttttctgtccttaagcatttcataagcagaatgctgatcttgctattggcctgtaaccctggcatttggccagtgattgctatttaggggacagaggacaaaattctgacctcacaggtctcccaaggtgtgagatttcttgccctctgagttccaaggtgaaactgttaggaagagtcattgtaaaaaggagacaatcgtactcacatccaggtgagttcatttttcttgtgaacttttcacctaggccccaattagtatcctattaacctccttaaatatggaattgctaggatcttagaatactacaaaatggactattagcgagcccatttcctggctccgtcagatgaaaatgccaaagtaggtcatacaacagaattaccttgattaatttcagctctctcccatgggg

SEQ ID NO: 25907 - DNA, 1396 bp, Bovine  19866880599274
  misc_feature (1)..(1): n is a, c, g, or t
natggggatttagagatgaataatgtacccaaggtgtctgtctcatgattctgctcactcattaagtatgatatactgaaattctcagagaaatgctaaaatccccttatttatgtttttatattcctcagccaaacaatgttctcaaattaagatcactagatcggtttctttaattaaaggttaaaaacctgtttcaatttaggtgcagtcgattagagacagaatatgaggaaaatgcatggctccatatccacgaaaagactttccccaagtacttttaatacatcttacttggaacctagaattccttttcctctgggaataataccagaatgagagcagctaatacactgagtgtgtttggtgttcataggaacctatcgcttatgtattttttattggcaataatcacgtgtgtatatttggacatgcaaatgtattcaaatcatgctttgtgtcaaaaaaaattaatagtatagtcaattagggtagtttaagtttttcttttcttacttatttctaaaggcacatagagcactaaaaatacagatgtgtgcccagaggttccaggcagcttatgtttcagcatgaaattcgatatttgatggtatattattttctcattcccatcaacattttttgcatgaactgcattatgcatagcctaggatttggggaggaggtgtacaaattaaatctcattgctgtgaacaatttgcttccaggtacaatgccaaaaaaagaaaaaaaaaaggacttttgcagtaaagtcatttcaatgtaaatctattaaaatctattgtagtaaagagctttgaaaaactaaacttttttaaaacattattttgaatcaaatacaatattttaaaataaacaaatatggacaagctctgtcttggacatattactgcatatgtaggattttcttatttcaaaagaatgggaccttttttgtaaatgctcttttctaaaatgtgggagaacaatgtccgttccaaagtagattttgcacagtctctgcattctcaaaattattaacttggtgaatcagtgcatcccttcacagatattgtgaggaagactggtcccactccctgtccaaagtttcacacaagattcattagtaaattttttattttttagatgaaatcaataaacccagtcaatgctcaattgtcttatgtaagatgtatgatacaaacaattataacccccccaaaaaaagtggtatatttcattacagtttacacaaaggagtttggtccatacttctaccacatatacacgatacgcattttgtaactgaacagttctcctctccaaaatcaccataataattttttagatgtataattagagcacctgcctcaaattcttgaaaggtttttagttc

SEQ ID NO: 25908 - DNA, 1202 bp, Bovine  19866880606524
  misc_feature (1)..(1): n is a, c, g, or t
naaatagtcctttctccctgctactcagatcaatgattaaccacttaaatgacaaggataatgacagcattttggaaggcaggttaaagcttatcattttgatacaaagcaagagagagattgttgattgtacaaaaacaggttagtggtttctcttcaagtatttctactcagatttgcatttaaacttgactctagaaatggatcgtgaatgaactgaaaatgcaatttgctcttagaagttcttcatttgggtctttgttttaaaagcagaaggggccctattctgtccctttttgggggaggtacttggactctttcaatgggaatcttctcatttctcctgaggctatagtttattgactttaaagagcagtagtttaattaacagaagaaatgaagcctattgcataattaactagacatttacctaaaatcaataatctaattgccacacctacagaggggataatgtttatcctattgaaaacaattcatttgtatctacatgttaacaaggtgattggtggtttgtttaacagactaacctgatctgtaaagtgataatttattgaacaatcaattaatctttttagtactacaaatataaacaagcaaggaagagccacagtgtgtctgcttatgaaaggtcaagtttaacagacccccaccttgagctctttctcaatcagcacaaagatgtaaaggcaatgaatataaattttagtttcacactatccccttggacctgacactttcacagggagacagtaacatgcaaaatatttgcaaatacataaagtagtttagacctgtatcctgtctttacaatgaattcttactctaaattacatttaccttacgacagatacacatcagcctgtcccaatgattctggtatacccagctgtatattcttacatattctctagacttatagctcaacagaaggaagaattgtttcctatctagaaaaacagattattacatttatctaagactatgggtcaatgtcaaaaagttttaagttgaattaagtagctcacagtctgcatgcttgtccaaagtttatttcagttttttcatcctgaataattgaatggtgaggtttcccaagatgtaaggtactccttgttttataactgttttcaaagcatttcatttcttaaaatagtcatagcctagtatgaattctcttgcaa

SEQ ID NO: 25909 - DNA, 1307 bp, Bovine  19866880625794
  misc_feature (1)..(1): n is a, c, g, or t
ntagacttcggagcttttgttttttcctttgaagatttagatcctgttccctgtaaactgccaacaatacacagtatgggatctctgaatactcagagaagacacatgaattgtactcttactgagcgatccctgcacttatttatctgtcagtatgtcactgcgcgtttgaaacatcagctctgagccaaagtttcagaggctcccgcatgcttcccaatggttttattaaaccatcagtgcatgttctttctctactttctgtgtagctcccttttaaaaatgtcactgtcgtgattaattttctgttccctttcacgttcagatgacatttggaaaacaattctctctggagaaccaacttccccgattcctgaccactccatggcacttgaagtcaagatgaaaattagactcccttcagaatctccagactcagaaaagggtaagatgctttaattaccgtgttgtgagtaccttgtaatcacatgactagcactatggtcatgtgttaacaaagtgagagaacattgaaaacaacgctaaatggtatgttcgtggctctttacaagaagaatcactctcctctccctattgtgggagctatagaattgaatgcaatttcttctttgaatgtaaaatagaattgtactgtaaatatgcatatctggtgaaatattttggaattttcactggttgcccttactcctacctcccacccctctcaaggttatgatttaaccctgaggctggaatctgaatagaggagaaaatttcatgagggatattaaagaaaagtgtgatcctgtaaggcaagggagggaagataggagagatcagaaggaaaggggattgggcattgatatcctaatcttccttttcctaaaaaaaacaaaaaaaaacaatggtaaaagtgttagtcaatcagtcgtgtccacgtctgactctttgtgaccccatggactatagcctgccagacgcctttacacttaagccagaaatggaagtttatatgataaattgagcagaatatcaaggatggaggtccttttcccagctcagtgtctggacctggtgagaggttattcagagccttcacacacagcatctcagggctgtcatttcacagtgaactcggtggtagcagagttagagaggaggagggcacggtttacttttcccaccctaccttcccacacacctggaatggacctaatctagagaagcacccacacgcccccggagataaactgagggacagtcagcctgctgtgcggtgctctgggactccaaggccatgctgcaac

SEQ ID NO: 25910 - DNA, 2107 bp, Bovine  19866880649614
  misc_feature (1)..(1): n is a, c, g, or t
naatagttctcaaaatatcatgaatcttttggagagaagatcatgcatggtggatttaaaagacatttgagacagaccctagaaagggtcatactgagtgaaggaagccagacagagaaggagaaatatcaagtaacatcccttatatgtggaatctaaaagaaatgatatggatgaacttacgaaacagaaagagattcatagacttagaaaaacgaacctgtggctgctgaggggaagagatagtgggggacattggctaggtcatggtcacattgctgcatttaaaatggataaccaacaaagaccttttgtacagcacaggaaactctgctcagtgttacgtgccagcctggatgggagaggggtttggaggagaatggatacatgtatgtgtatggctgagtccctttgctgttcactcaaaactaccacaatattgttcattggctagaccccagtacaaaatgattttggtgttaaaaaataggaataaagacatttgaaagcattctgggtgttccataatgaggagctatttggaccagagcatatatctcagggaggttacttgttcagttactactcctacgtgggaagtttgacttagtatcttgttcctgcttctcttgaggttacctggaaaaagagacttcacttcgcttttaaaaattttatttaacaagctttctccatgtgccagcctgttttctaagcatgttcaagcattaactcttttaattgtcgtgacttagggacccttaccatctcagtgtaacaggtggggaaactgagaaattgaacgatgcggccaagactgcaaggcttatgaaaaccacagccagagtttaaaccttcactgtgcagctccagatatgtacctgccttccatgccgtgttccttcccctctgctcctgggtcttcaaatcagaaactcatatggcataggtctctctagatgggagtttaaaaactcagaagctagaagacaggagtgtagagtggaagcctaaattaggaacagaaactccaaaactacagggcaataaagactatggtgaaatggagaaaaactgacctatctacacagggaatcgctgtttttctctagatacacttccactggaatggaagctccatgaggacagtgactttttgtttgtagttgtttcctccactgatttatgcccatcacctaaatggattatccaggaaacagcatcactcaagaaatatttgctgaataaataaatgtagaatgaaagaatgttaatcaagtataactaggttcttcattttttaaaaaaataaaattctgggtatccagaatttatatgaaatttctgtatttatgtattaatccattaaaaacaaacagctctgtggaaaatcatagtatgctcgtggactgggtttgaacaatgagaaggatttggcccttgggtggctaatttgagacctaatcctgcagtaaaaacccattaactctttgcaaatggcagacacttgaaatggtgggatactgatttaagcattgttctggaattcgatttaacactggagaaaatctccagataccaatttaaaaaatccatgcagagtgcatgattgggtggaaaaaaatattgaagctgtgtagctgcatttccaagttataattccagttcttgtacggctctgcttaactttaatttgtttggcatagaaaactacttccatgcctttgattatataagtagtttagaagatatatttaaagagtactaatatcccttgagctgtatcatcctctttttaatttcaaatgccagtggcaagggaaggaagccagtttctgcctgaaacaccaagttctagaagcagaactggaatgtttggtgcaatttatcaccccaatccaaccagcaggagactgcacagccttgactatttttctaggtcaagtattttgacagtgtccacagccttgaactttagagttgcagaggaacaaaacaaaaaattccctagaagctgtgggtttacttcatataaaagtaatggcaattgactaataaaccaaataagcatgaaagggaaaaaagaacatccaacttcagatgaacg

SEQ ID NO: 25911 - DNA, 1604 bp, Bovine  19866880686501
  misc_feature (1)..(1): n is a, c, g, or t
natgttggtttttttaaggtatattttcaagattctttatcatggctatccctattttaaaacaactctcatctaaacacagagaatagccatactattcaaagaaatagggactgggtgaagttttcctggaaaggatgtgtcagtttaagcaataaatagaattttagcctgtttgttactgtttgttcagcacagctgactaacaatggaagatttagaattagccattcatatgaaataattgattttggcatacatgttaagcacagggagaaggaaacaatcaagatagaacgtcttctaagaagacattccttagaaaattgttttgcaaattttgaaagaggtgttggcagctttttaatgggtgctaaagataggagtgtcagaatccacttctcctaggctcagaacattattatctgcaaaaacctgggttaatattaagaaactcacagtgaaaattttgtttctctgatcatagaactgtgtacctttcgctctggtttcattttcttacttcaatgccaagagcagaggagagaacccgatatgcaaattgaaaccaaaacataaacaaggattcagtcccagggtacaatcctcagaggaaaaaaggaagtttatgaactctacgttcagtggaagcaggctacaaaagagtttagttgtccttctagaaaacaaaaattaatttgctttggccaaattaaaattaattaaaattatgcaatgttgcccttgtgttaattttaacggtgaggttgttgtgatttaaggctacaattagttctagtgtttgaaagagaagctctgtaatcgagacaggacattttaataatcctggttataaacatttaatacatcatctttagggactcacaaacacattgtaattaacttttacaactgaaataaatcagattgcattagcatattgcaaaggaaaaaatcatttacatgattgaaaacagcttcagaaaattatgtataacaggcttcatgcaaacaccagcataacttttaccaggtttcttatatggggattctttttaacaagtacaggttaggattcttcaactaattataactttcaccataaaaggaaatatcctggttttgaagaagcagcaagagtcattctctggtcagtagaactatgtccagctttattgtaaactaattaggaactactcaaataaaaatatgatgacttggtctgtagctacttctatgctacaagcaagtaatttggtcaggagaaaagaaattttattcatgtgttattcacctgtctaatgctaaaatctttagcaggaagagagatgctgatattggacaaatagagtgttcctttgtccagcactcaatctgcttcatagaattaccaatgccttcctgactggttgagctgtgactgacatgcaagctgtgagagtttgcatgttcactttggaactgagccaatagaacaagttcttattaaatattggctattatttttaccagagatttcaggtcagttgtaccagttggatgccccattcatccttgggctttggtcaattattttgtctactaagtgatcactggggcctggt

SEQ ID NO: 25912 - DNA, 1089 bp, Bovine  19866880743284
  misc_feature (1)..(1): n is a, c, g, or t
ncgagtcctgagtacatttttagcataaaggcctcagtgtgcttgggaaggggcagggctgcctcacccagaggcccggtacacgctgacctgctcactagccttggccagttggctgcttggcacttttcccagcagtcattgctctccaagcacgacatctatcacttctgcagtcagaaagatggcacttacctgatgggtgggcagaagcatcttctcgtaccatatgctgggaattgtcaggagctattcatgccaagactggcaactttgaatgccaggaaatgggcctttcccaaagcctgccagaaaaatacaaataaaaattttaaaagaaccaattttcacatatcaaattttgtgttggggagttgtgtaacaagctttgcagaccaggaaagtatggacatttttctggcgtaggcacactgaacacaaaaaaagaagagcagttctcatttgtgaaacgaaaagagatttaaaaaaaaatctctgacctacacaaacattaggttagaccttgcccagtacagaggacttccctggtggcttagatggtaaagaatcttcttgcaatgaagagacctaggttcaatccctggggcgggaagattccctggatctggcaacccactccagtattcttgcctggaaaatcccatggacagaggaagcctggtgggctaaagtccatggggtctcaaagagtcagacacaactgagcgattaacacatacacaccatcccatgcagagtgagaagagaggcttacctatccaatgtcacttaatgaacattgaaagccccacctgcggtgaaagtggaatggtcatcactggagtccttttggggaggttaaggcattacctaatgaacggtcctgcagacttcctatctgatcctttgcaggacagaacaacagtaagtcattgtctccagttatcatatttgtgtagatgagctgattagatgtagcaggtaggtatgttttgatgacatcacacataatagggaaatatttggggcctcaagtatcacttggagaagaaaatggcaacccactccagtactattgcctggagaatc

SEQ ID NO: 25913 - DNA, 1376 bp, Bovine  19866880824774
  misc_feature (1)..(1): n is a, c, g, or t
nttgtttgcacatgcattcacagacacacacatatactcttgctcagatacaccaactgcaatagcatttttaattgaagtgcataaatttggactgctaaatctattaacgatttgttttaattaggaacccagctgcttcctgagattttgcagtctgggtttcagaacttttgccatctgaaaatgagtctcaagtgggttgcttcagtctttcagatcagcatttttaaagacttgttggaagagggaaactgcaaatgctctctgctgtaaaattacagctccctttgtccttgggtgaggacgggactgctttgttcgtgtagccagcgccctgcccctgacctctcacgtgggcatgttaagtctagcaggctgcctgatccttggaccgccttgctttcagatcttgccaacttggctcacagagaagcagcatcatggtgattttgaggttccctacttgtcccactatcagtagggggagctgtgacttaattgaggttgaaagcattgattattattttttttttcaatacttcactagttgaaaagatagattctgtggtatttcagttcagtgaagtagggtctgaggagcattcactttttttttttacctcttttctggtgttcagctaatgtcagcagcatgtcttgttatttgggtaacattaaatggagtataatgctttctgttcttcagtcagtatggaagccattcattagtctcttcgctcactcattcatttgttcacgtgtttgtttaatccttattgattgccgactatgtaaaaatgcaccgtgctagaaataggaagattaccaagacagcacttatgcctttcaggagtttatagtctaacacatgaaactcagaaataataattactgcagagcataatcagcactaatagaagtatgtacaaagtgccctggggcaacagaatcactggtgtgcaaggaagcaggtcaggaaagactttgtgtcagtggtaccaggaatgctgtcactaaatacgtgttccatgaatattgataaaatgatggatgaaataaaggaatggatggagaggaaaatgagtggattggaaagtggagtggagaaaaccaagttgtcccagcaaagtggtgttaaaaaaaaaaaaagcttaatggaagagtgtgatgaagctggaaactatgagaaacctgatatgtttagagtggagaaccatggaaagaggcttgccaagagaaaaaaaaaaaaaaggaaagttttggtggtattctaaagaatttgcattgacccccaagaagtcactggatcagaggagagatgaagtcagcatctgtattataagaaggtaatttgggcaatgatctacatgatg

SEQ ID NO: 25914 - DNA, 972 bp, Bovine  19866880850012
  misc_feature (1)..(1): n is a, c, g, or t
naaaataagttgtagttcctaatacacattcaatattaaataagcatattcttgtttagtagaagaacaaagatgtggtaaaactaaacagatagcatcattaaatacattgcataacacttaatctctcctttcctgctatgtatttgagttaatatgaacatttgtcaattgcaccacgttttgaaatggaattggtatcttctttcccacatgggaacagaatttctaggtcaataggcccttaaatgtcatgaattgcaatatagatggcagatgacacttgtcaaagactcggtgatcagttcagatacaaatctgacttgaggactgaggagcccaaatcaaatcgatgtacgagataaagtccagatttagcatggtgacatggtgagtggtacctttcatgggacaaagccgcaggagctccactgagactgacactcttaggctttctcatttctcatcaagccagggttggatcacttctctttttctagcactgtgtctgctagactttccattaggcagctgggcagggggaaaaaaggaaggagccaacataaactacctctcaaaattctgtgacttttgctttctgatacaatttttcacacaaagggatgttggatgccggtggagaccaagcagtgagaaacctacagaaacaaatctctggtatatctataagcaaaatgggttcaaatgcagatgtagaggaacaactctagtgagccatcaatcactgagaacaccacggtaggtgacgtgttaagttatgaaaggagggctggataaaaaggtatgagcctgcagaacacaggagccatctttcccaagtgataataactatgtttagggagcactcactagatgtcatacataagactttatatcattaataagacttttatatttattatctcaaaacatatttacatagactccctaagttaggcattgttactattt

SEQ ID NO: 25915 - DNA, 1170 bp, Bovine  19866880856132
  misc_feature (1)..(1): n is a, c, g, or t
ntccattgtaaaggagatcagccctgggatttctttggagggaatgatgctaaagctgaaactccaggtactttggccccctcatgtgaagagttgactcattggagaagactctgatgctgggagggattgggggcaggaggagaaggggacgatagaggatgagatggctggatggcatcactgactcgatggacgtgagtttcagtgagctccaggagttggtgatggacagggaggcctggtgtgctgtgattcatggagtcggacacgactgagcgactgaactgaactgaactagatagtatttagggtttccctggtggctcaggtaataaagaatctgcctgcaatgtaggagacccacgttcaatccctgggtctggaagatcccctggggaagggaatggcaactcactccagtattcttgcctggagaatccgatggacagagaagcttggtgggctaaagtccatgggatcaaaagtgtaagacacaactgagcgactaagcacacacacacaatctaggtagtatttattttgttatgcattgatatttatgtcaaaaacatttgtaatgcatacatgctaaataaataaaacatgcttgttattagatcaaaactgtcctcagtaaggaaacatgctttcacttgaccaaagatgtttaatgatacttcagaactgaattaatgattcacgaaatccttaaaccctgagacgttctccagtgagcaagtttccttagtttcacgtcttttgtcactgaaagatccacatatacacaccaagactatacgtgagacaaaacacacgggagggtctttttcacaccgtgttgtattcataaaatcataagatttgtgaaaccaagttttcaaatgattgctgttaatttcaaattgcctttcccattacccatttgcctcatttgtgactctgctgcaaacttgccagaataagaacagtaggaacaactacaataaaaagaattttgatggcccagcagaaggctcagtcaattctaacaggtatctgggcaatttcaaatataatcagtgaattaaaatctaggaaacattttgttcagaaactagaagattgcttttatttattggtaaatcaaaatgaacttctgatttttccaacacattcaactatggatat

SEQ ID NO: 25916 - DNA, 1481 bp, Bovine  19866880879484
  misc_feature (1)..(1): n is a, c, g, or t
nacatttttacaggcgtttctgtttataatgtatttctggggttgttaataaaggaatccccatgctgactctaaaaagaatatcaggattatgcatttctccaaaaagagaggaaaggaaaccttagagactttaatttgtccaggttagaatttagacttcctgactgtccactctgtgctcaggatggatctgtcagtgttcaccaacttctgcccagaaatgtgtggaaccgtcttactgaggacaggctctgggtgttgaaatgagttcatttaggaatttgacatcaaatgcccttcagttcatgcacggggcagccatggcatcatcttttgtttccgtaaggaaaacaacaacaaaaaaggctgtctctgtgtgtaattattaatacttggggaaggtgtactggacagagacaaatattctgatgcatagtatagttttttctgtatctcaataaaatggaagaaaacatgatctagtggaattgtgacctggatttagggctgggttcaaattccagacaaattacttaaaagctgtgtgacctcgaacaatctatggaacctctttgaacatccatttctttagaggtaaaatagagattttaaaagatatccctatctcggtcagcatgctccatggattagagataataaatgggaagtgcgtggtccttcacagtttgggtgctcaaccaatagaatcacacagcatcattcaccactcgagtgatggtagaccagttgctgagcaaagaagttgattgaccctccttgctaagccaggagatgtaaggtatgtttaactcaccgctcctgtggaatgtcaggagcctctgcttgaaataagcaaattcaatgatcttgtgaggtagtggtccagggcaattcacttgatacggagagctatgtagtgaacacattagaaccgtttgcctatccagggacacagttagggcgagagatgaagaatgcacaacaaactccacaggtttcatcaatatatcacctctgagagcaaaccacaaagccagcctgaaagcacagggtggggatgggcagagagagagccctgggcatctacggctgactctggaggtcacgtggccctgacacataacttctactgagttgactatatctcacttcctttaagtgcctgtctctcatgctcactttcaaggacttggccaatctccttttgtaaatagaacaatgctttatatttctctattactctggagtgactctatcaataatgcaggaaacgcatctgtccagcacaatgagattatttttctgatttcggttgacagttatggtaatagtttggcaaacaatctactccaccatcaatggccgcagattacagctgtttttaaaaacctcagccccttctggaaacttggaagatggattgcacgttgagagggagacggaaagacatgccatgagcctttagggcagggaaaagt

SEQ ID NO: 25917 - DNA, 1166 bp, Bovine  19866880890167
  misc_feature (1)..(1): n is a, c, g, or t
naaatttaaatacctcgaccacgttagggctcacacacaatcccatcagcgcttaagttgaaattcacaactattccttctcttgctcaatcagtaatgagtacatttgatgaagcattccagggtcagggaacacacgttagtgatctaacttaacccgttgattgctgggccacaacggatcaaggcagaatttgattaaattgtaacaataatttccagtagcaccaaagtaaaagctttttctttttttatttaactattgcaattcccacaagctacgggaaagggatgacaataaaatagttttagattaggttcagcattctttgggaattgctactatacgtctctatgtcctacaaaataacctgtttaattctcctccaactatggccacgtttactctgttattaagaattgttgtgttctctaatttgagggacaccgaacgcattatttttgtttgagcaactaccttaattatgttatactttcctgacttgtgaacatattcccggcaaagaggcatccccaggtagtgatctgactgtctatagtatattctattgtagttgttggctgcccccggagtctcttggatattgactgtgtatgcgtgtgtgtgtttgtgcactttgatgctcggttgtgtctgactcattgcaaccccatggatggtatccccccagcctttctgtccatggggattctccaggcaaaagtgcttgtgacgcccttctccaggggatctttccaacccagggatcaaacccaggtctcccccattgcaggtggattctttaccatctgagccaacagggaagcccaagaatactggagtggttggcctgtcccttcttcagtgaatcttcctggctcaggtatcaaaccatggtctcctgcattgcaagcggattctttagcagctgagctaccagggcagcccaagaatactggagtggttggcctgtcccttcttcagtgaatcttcctgtcccttcttcagtgaattcttcaggaatcaaatcagggtctcctgcattgcaagcggattctttagcagctgagctaccagggcagccccatttatttttgtacgttaaagcaatgcaacacacgttaccatctgacataacagtaaaagcctcaaaaatccaattcag

SEQ ID NO: 25918 - DNA, 743 bp, Bovine  19866880909569
  misc_feature (1)..(1): n is a, c, g, or t
nccctttgatgtattaaaatatttaatcaaaatcaaatgctgctgcccctatttatacaagtgctttattatcctgtacattataccacaacctgcctggttcttaatgtgacctaaagagctagtcggcatttattacaaatgcgaggcagtaagcttctggctgagcaattaatcactgacagcaaggaatttcttctcttcaggtggggaacccatccaaaaacgaagaaaaataatcgggctaattaattcttatctgcaaagagcaattagataaatgacctcaaagaaagacttgtcacccctagtgagacactgactttctaaatagaatgtgtctgagcctcttttcactgagcaagtgatactgtgaaatggagatgacagaaaggagagggagggaaatgataggggagcaggttaattagaagaaaggctgaggagagagaggcagagacagagacagcaatggagagagacggagagatccggcttgatcccgtgtcctgtctctgcagactgatagatggttaacaagatgaagggaatgttcctgttgccaaacgcaggggacctcctgaggccaggccttgcttcctgccagtgagctgcacttccttcctgtacatactgctgctcgtggaagctacaaaatgctgttagcgctgacctttggtttcttcctttctagtttcttggttgggttttgattctctggtcatatccatgcctggcaatgg

SEQ ID NO: 25919 - DNA, 1426 bp, Bovine  19866880951045
  misc_feature (1)..(1): n is a, c, g, or t
naaaaagtgtgcaatgattttgagtcaaattgctcacttctgtcagatcatttttaaagcactgttttgtcaccttgaaaatataattacaattacttagtgaaaaggaaacaaacgccaggacttccctagtggtccagtggttaagactggtgtgtccactgcaggggcaggggttctgtccctaattggagaattattaataagatccagcatgccatgcgatgtggccatggcatgagataaaaataactgtacattttttaaaaggaaagcaaatgcctcttagaagcttaataaaaagaaaaaaaaaaaaaacaccctctttaatgaactaaaaaaaggggaggaaaaagaataattggaacctacattactttggatacaacgaatattactggcacaaaagggacaaggcaggaatcagcacaaaaccctacacatactaaaaaataccaaaatttccagccttgttcatgtaccatgttctctcattctgaaattctccaactcagttgtaatcaatttcagcttgtaatgatccagcagcttaagatctccataacagtttagcctactgctgttcagctgcctgtaacttctggaaaggaagacgttccagtaagacacaaagtaaggagggagtggatggcaggaggtcctcaggataggggagaagagtggggagaaacaatcagactctggaaatgctccaagtaataggtgatttcattagtttctaactcaggggtgactttaaaaatatttaacaactaatgggtgtctcagacagtaaagcatctgcctacaatgtgggagacccgggttggatccctgggttgggaagatcctttggagaaggaacccactccagtactcttgcctacaaaatcccatggacagaggagcgtggtaggctacagtccatggggttgtaaagagtcggacacaactgaacgacttcactttcactttcactttcaacaactagtcgggtacagttcagtttagttcagttcagttgctcagtcatgtccgattctttgcaaccccatgaactgtagcacgccaggcctccctgtccatcaccaactcccagagttcacccaaactcatgtgcatcgaatcggtgatgccattcagccatctcatcctctgtcgtcgccttctcctcctgcccccaatccctcccagcatcagtcttttccaatgagtgaactcttcgcatgaggtggccaaagtattagagtttcagcctcagcatcagtccttccaattaacacccatgactggtctcctttaggatggattggttggatctccttgcagtccaagggactctcaagagtcttctccaacactacagttcaaaagcaccaattctttggcactcaactttcttcacagtccaactctcacaaccata

SEQ ID NO: 25920 - DNA, 960 bp, Bovine  19866880965624
  misc_feature (1)..(1): n is a, c, g, or t
nccttgaagtttcccataaaatgttttatcttatgaaaaaagttcttaaccttgtggcggggcgaggggaactttcatgcttttaagatcatccctctcatgattggaattctaatacaaataaaactgtttttaaaatactagttcttgatacaaaaataaaaatagaaataactagaggcttttatggaagtgtctatcttttaaaatctggagacaatttcaagttcaaattcctctcctaaatctcaatcaacataatacatttgttggtctaattatttgatgtactattctgagaagaacttagaaaaagaactgcagggccgatatccaaaattctctggaataatctttaaaagttaaagtcagatattattgaaaccaactagattaaatgttaaagcaaacaaaatttcatctacctgtccattgatttacgctacgtgtattgttttctttcttttcaccaacaatgaaaactttgattgtgctccataatgttgcaagaaaaacttcgctgctgccaacagtttcttctaagtcagagaacctctattgtctttgctctggtaataaatgataataattaaaggcaaatacacaataattagtcacactaggtttatccatctggtctacctgtatcctatcactgtgtctttgaaacagatgacaagcaacatattgcagcacatcccactaatgggtctaagtggaaaatgaggaggtaaagaggtcattggaaaaaaaggtcagcagcaaagactaagagcattattcctttttaaaaatttaaagtggtcattgttcatttagctctgtatcctcccaaaacacatatgattccacaagatgatagtgaactattaagatacttagcaagcctagggaggtctatagattctattgatttcattgttgtttaatgttaaatttcattgtgcttaatcacaagaa

SEQ ID NO: 25921 - DNA, 1106 bp, Bovine  19866880973392
  misc_feature (1)..(1): n is a, c, g, or t
naatgcaggagacaagagacgtgggttcaatccgtggattgggaagattccttggagaagggcacagcaacccactccaggattcttgcctggagaatcccatggacagaggagcctgggggactacagttcataggacacgagtcagacacgactgaagcgatttagcacacacacacaattttccattttgcattactccatatatcttatatatgggcttcccagatggctcagtggtaaagaatccaacgcaggagactcaggttcgatccctgagtcaagaagatcctctggagtagaaaatggcaacccactctaatattcttgcttggaaaataccatggatagaggagtctggtgggctacagtccatggggtcgcaaaagtgtcagacacgtctgagtgacggagcatgcacacacactaaaatgaaccgtctgaactaacaaaattaagaaaaactgttttcattctccaaagcctggcataacccaggctctatctgaagagactgagccactgaacttccatcatcatggtttttgcaacctccagaatggccaaactccaaatatggagggaaaaaaaaatactcccttctgtgtgtgactaaattttccacatatctctatctggcttataaatatcacaggcagtcagtgagttactgccaggctgaatgatcctctttacaagcctctttctaggtttttgagtaaaggtttcccttattaattttccagcccgcattcacttagcatttgctttgaggcataattgacaggcagggtgacacccgcctaagagaaagccataaatcagaaataatttccaaaattggctgaggggctgaagtgttgaataggcaaatacaggtaaaaatctctttattagggctgacaaggacagcaaatgtcagcgaagtgtttcctaatgtaccgggcgagattaatttgggggcccttcctgagccgatggtgtgttgcgcgttctctaacaagtcacctcttggggctctgaaggaggagagttgttggggctgtaatgaagaaagagccaagtccggaaggctgggagagccactcccgctgcatcgccctcct

SEQ ID NO: 25922 - DNA, 1508 bp, Bovine  19866881053549
  misc_feature (1)..(1): n is a, c, g, or t
nttctattcctgggttggaaagatttccctagagaaggaaatggcaacccactccagtgttcttgcctggatgatcccagggacgggggagcctcgtgggctgccgtctatggggtcacacagagtcggacacgactgagcaactgacacaactgagcgactgagcatgcgccagctgcatcactgctgcttttacacgtgcttccagacatcctgggcctgaaataaagataccgaatactgtatggatgcagtcctgtagggtacacagaagcacagccacttgcagaggatgcacacatgtgacaatgtacgccacgcatgtgaactagcttacgtgactggaaatgcaaacacattcacatctttgaaattcacagcttgtagggaacttactgtttactatctgatattttaccaaacttttttttttccccaagcctgaatttaactacattctatacattgagactggaaaaggcaatggcaccccactccagtactcttgcctggaaaatcccatggacggaggagcctggaaggctgcagtccatggggtcgctgatggttgaacacaactgagcaacttccctttcacttttcactttgatgaattggagaaggaaatggcaacccactccagtgttcttgcctggagaatcccagggacagggaagcctggtgggctgccgtctatgaggtcgcacagagtcggacacgactgaagtgacttagcagaagcagcagcagcatacattgagacagtagttctgataagttttggaataatgttgtttaatatgtatccttattttaagatttccaaaacaatagtatttggaaaatctggatataaagtctacatttctaccatctataaggctgctatatacaagcagtcattcaagttctctgagtcacaatttccttacagtgaacctaggatagtagcagcatctaattctcagacttacagtcagggctctaagtatgccctagtctatttcactacaacctatgaaatttgagctgtcctaattttaacaatgaaaactcaagggtaatctcacagttccccaaatatattctctgattcttgagacaatcacttctacccatttttgctaaaatcctagatgttgttatctccaaatttaaataatatgctatttctatttcttcactgagcaacttgaatttatctattgaattcctgttttgatagataagaatttcatgcttcccactttcagtttatctttctgtaattctattggacacaattaaacctttacatcttgttctagctgctttttctttctccttttcacctatcaactcagtcagatcactattattttaaatttattaatattaataatgtcatgatgttataaaaatcattacagattattttttcaaatgaaaagttttttcatagggaatggactaattcaaatatattcatttatatgtcataaaatagtcacagattactatatttaatt

SEQ ID NO: 25923 - DNA, 764 bp, Bovine  19866881081370
  misc_feature (1)..(1): n is a, c, g, or t
ngttgcatctatatttttgctgataactgacctgtgtaaaatattcccttgaagcctccattggttttgcagaatatttcaagtaaatagaaatgaaagcacacatttttgttcacttacccatattagaggttacaggcattagtaccgctttacaaacgagaaaactgcagtgagaaaccagtaagaggctatcccataatcaagacagggacgtgctggattagaggcttagaatttacagttctgatttcatgtcaaaggattaattccatcttcttgcactaaaccaggaaagaaggaaaaggtcagttccttgctttcaaagtaataattacgtaggaggagaatcaaaatggaagcgaaaaggagatgaacttgatgtaatgtcaatgccacttaaatattctctaaatgatgtcgactttagcaaactccattcccctgggctaaatctgaaaacagacttaagaaagaaggttactgtgagaactttaatgagtagaaacctctttgatcctataaaagcaaaagaatctatcacgttctaatcgagtttcagtcattggaccataaagacatctctgggtgtaaatgtgagcatgaaacagaaatactccagaataactctaagtagaaaaatacacccattttgactcagacatgatcctctctctgccccacattttcacattgtgaaattgcctacctttcatagtgaaacaataaaacaaagagttaaatgactacaacttgctggtaat

SEQ ID NO: 25924 - DNA, 1923 bp, Bovine  19866881085767
  misc_feature (1)..(1): n is a, c, g, or t
nattaagtaatgactgcctggacttttaactgccctgcatttgcagctaaatttgatgctaagttggatacaggcagctctagttatctattcccactcatttgtccctccggatgcctcatttagaaaatatcaatgaacagttaccatctggtttcataaagaaaatgtctgcaaattcttagttgattctcttttacttagaattattttgttgttgttgttccttaaatctaaggagctagaggacatttaaaaacattaacgcttctatcctattccaggaatagttttcttcggagaagtctctaaatcaccaatggcttttgggaatttaccacatcaaagagaaggaagggatgctttcagttatccaatgggaactgcaggtgtgtgggatgggccccctcaagctacaaatttgatgagtcaattacaagtttataatctacctcatgaaaaaaaaaatgtatcttggggacttaacagaggttttgctttccattatattagaaagttgaactcagaagaataactaatggaatttgattttcttaattcagtcactcttactaatacacattttatttgtcctctcactttcgattttgtaggtagattccatcaaaatattactgaatgatgcttacaatatcagacttagaatatcacttaacatattttcttacatggacttctcatcaatcccttgatatctgtattggtaatataaaatccccacagggaaagtcatatttggaggaggtaaactcaatatcctcagtgaaacccactctaaactcaaaaagttcattttctggcctgcacagagtccccaaaagtgaattctgatgtcagtttctcctgggccaattctcttaatggttcaccctctctaatcaccttctttgaggcatctacttactttttatttcccaagtcatccctagcctgaccttgttgactaaaatagcaaaactctgaattattaccatatgccatcatttttgacagttctgtttcccattctctgtcctcgcccttcttataagatgataaaaatctaaaaacttgattgcacaaatattaccatatgataataccataattacccaactcatgttttatttgttttaagttctgtctagttctcctaaataaaaatcttaatctaatgattttactggtgagaacggaaaatacaggggtttgataacctagatgaaatggattaatttcttgaaagacacagtataccaaaactcacttaagaagaaacagatgatacaaatagacctgtatttgctaaagaaattaaatcaataatcaatagctttctaaatcagaaagcactatgacaagatgggtttgctagtgaattctaccaattaaggaagatgttttaccaggtttaaaaactcttaagactggtaaaatttcttaaaactcaacagtaagaaagcaagtaactaattaaaaagtgagccagaggccataacagttacttcaccaaagaaagtatgcagatgacaaataagcatataaaaggatgcttcacatcatgctatcagggaaatgcaaattaataagaaaaaatgactacacaccagtcagaatggccaaaatccagagaactgacaagagcaattggtggtgaggatgagaagcaacaggactgtgcatgcattgctgatgggactgtaaaaatagaacagccacttgggaagacattgtagaaatttcttataaaactaagtatactcttaccatataatccagcaattgcactccttgctgtttacctaaagaagcaaaaattttatgtccatgaaaaaacctgaaaacagatgtttagaagcagtttccttcatcaatgccaaaacttggaaggaaccaagatgccctttagtaggtaaattctgg

SEQ ID NO: 25925 - DNA, 922 bp, Bovine  19866881092455
  misc_feature (1)..(1): n is a, c, g, or t
naattcaaaaatgttatttgaataatttgtgttcttaaattaagcacatagatttttttctttgcaagtaggctgtaaattacattttccactacattgacagtaaatgggtaattaatatctcaacttttctttctcaatgttgatttcaaaaataaaattaaaaataagcacagaacataaatcagcacagctaccccagattagatgtgattgcccatctcctgtttatcttactttttctgaagtgtgttcatccgttttggagagctgcctgaccaaagagagcatgttacacaggagacaaaagttaatattatcagagaggtggcaactgaaacttgagtagcataataaaatctattaaatgattattagatttttttctactccaaatacataaataattgtcaaatcaatatggtactttatatttaatatgttatttccattgtgactcacttaaccattaagagaagataatttactgagaaactacaagtttcatctttaggttatactttctacaggttccattattttgatagagggaaacatgaagtgctattttaaaatagttctaggcaccccactccagtactcttgcctggaaaatcccatggacggaggagcctggtaggttgcagtccatggggtcgctaagagtcggacacgactaagcgacttcactttcacttttcactttcatgcattggagaaggcaatggcaacccactccagtgttcttgcctggagaatcccagggatgggggagcctggtgggctgccgtctgtggggtcacacagagttagatatgattgaagtgacttagtagtagcaggaggattttgtgtgttccaataagtgttgcaaatgctttaaacatactaattcatttaagtttgacatgaatcctggaag

SEQ ID NO: 25926 - DNA, 2283 bp, Bovine  19866881096774
  misc_feature (1)..(1): n is a, c, g, or t
nctttcaacctattcttcatatatcaacccaagtgatatcttaagagtctcttcctgtacttagaatacagctagtgcctcttagccaccgtgctctacaaagtttttatcaaggtggcaggatttggggctctcactcatctttggcctctctttcctttgcccatcacattccatcagtgacttttcaaactcgtgagagtgtcaaggtcccttccacttcaggaacttcgtatgagctattccctgtacttggagcacactttaatttgtgcgtgactccatccttatttccatcctatcaccacttaagcatctttaccagtgcacttaaaactatacctttgcccttccttttaatagaactatccctattttcttcatagcacttatcaaaactcaaaattatgttttatttgtgtctactttccatcttcccagctagactataagcgaaaagaggttatgcttcataaccattttattctccactgtgtccttgggcacaatgctgtccctagcatatattcatccatttgttctttcactcaacaacaacaaaaaatggccagcttctatatactagtcacgttctaatgccaactttttctttcttcttgtaccaggaattctggaatttatttatcagtccatatttcaatcatcttaagtgcaagtgataaagatttcttttgaagataagatttagcaactatattaaaaatatttttccatatacgtattgcattcaaggacacttaagtttatccatagcattaggtttttaatatcctaggttatataaaaaatgtaagtggaatctgaggaaaatgaatataagattataagattctttatttcaccgatgaacagaattatccatgccagaaatttgaaatgtgtataattttcagatgttcttttttctttttatcctgctctctaatttgtcatttcaagaatggatgtcctaactctactgatgaaagagaacttgcatagcccgtaaactcaatgagccattaaataggtgacaataatcttgatagaagtttggaatatttaattagtgcaaaaaatactcttagccatgcgctcaattacttccatggatactccccaaaatatcaaccaactattttgcatgtccatgaaatgctttggaagacatttaagactgaaaaaggagataatatttcatctattaattgaggctttgacatggttgtgcatgtccagtaataaagtttcaaagtgaattcagtttagatccttgagatatttttaaaggtgacatttttatccttaaggttacatgaaagtaactgagaggctataaaaacctcttaggctcaaaatgggaagcgtatcatctgtgtactcaattctacctttttttttttttttgcatattatatacattggccaaacaccagtaaaacaaataaaggaaacaagaaaattataatcttgtaaatcacaatcatgatggaaaaaacaacttttcagagttggtgtattagcacaagaacaaacagcttagagggataatacaatggaaagaaggtaataagaaggaggaagaaaggaggaggagggagtggatgctctaagaaagtgaacacatggacacattgacttatttttaaaagacatgatcagtatccctgttagtttattcaataggaaaaacgtgttatggtctcaagaagtggagcttccaaattggttatgtagttcatttcccctcattcaaattctaaaagatgatgctgtgaaagtgctgcattcaatatgccaggaaatttggaaaactcagcagtggccactggactggaaaatgtcagtttttattccaattccaaagcgaggcaatgccaaagaatgttcaaactactgcacagttggactcatctcacatgctagcaaagtaatgttcaacattctcaaagcaaggattcaacagaacatgaagcaaaaacttccagatgttcaagctggatttccgaaaggcagtggagccagagatcaaactaccaacatccattggatcataaagaaagcaatagagttccagaaaaacatctacttctattttattaactacaccaaagcctttgactgtgtggattctgtggattcaaactgtggaaaattctaaaagaagtgggaataccagatcacattacctatctcctgagaaacctggatgcaggaaagaagcaacatttagaactggacatggaaaaatggactggttccaagttgggaaaggagtacatg

SEQ ID NO: 25927 - DNA, 954 bp, Bovine  19866881145531
  misc_feature (1)..(1): n is a, c, g, or t
naaaattctgtgtggttggtactgtgattaacccattgactactctagactcaaacaagttttgagctggaaggaaatatggaagtcatttattccaataacttgatattaaaatttggaaattatgacctacataagttatgtgacctactcgaagtgtgtatgatggcccgcagagtatatgatgtctacaccagtacacccaacaacagaacccaaacttccccaatttcttttttaaagtacaatattagaggcagcacgtgtcaatggaaaacgtacctcttcaacccatacatgccaggcctaagggaatgctgacaaattaattttattgcaggaggctaaactcgctgttctaaattggtctgtccagaggaaaagtgagcaaagtatgcagttttatgcagatagattttatttttgttattattgcagctgctcattgatattttaatgcaagtttttattgagctatgccccaaggctttttaaattgagggttcaattatttctaaaatctaataattaagtaaattaatgagcctagtcagaaatctggcaacctgattataaggattaaacccaagaaatattaacaggagggagtttttttcccgctttacaggaagatcttttaaaacccttcagactgtgtttcatggatgtaaatgaagtctgacactgagatccatgaacaagtcagggcacaaacttggattatgaatatagcttaacagcagatgggggtggtcagggcagaccttgttatcaaagttttccctcccttacaagaataaattttgagtttcagtaagtatagcctctaaaaacacagaagaacattactgtgttcatgtcccttcatgtgaagatagcatttggtaaatcatgatattttcagaagaaagtgaccataatagaactcaaaaaccataaaataagccaagttaa

SEQ ID NO: 25928 - DNA, 2919 bp, Bovine  19866881148737
  misc_feature (1)..(1): n is a, c, g, or t
ncagcagcgggctgcctgcccttcctattaggagatgacttggggagagggggcagtaaagagctaattagtggaaaatttgtttattcttggtggatttcattttcctatctagggcttactaatgaataataagccttcttcttcttcttcttctttttttttttttttttggctttctggcttatcaagtcctgtgagtcaagactggggctgaatctggtagcagagcagaagaaaaagccatacccctgcaaagggatgttgtaactgagaaagaaaaatgaggattctggcagaagaagcagtttctaaagcttgaaatgaactgaaaactttgcctaaactctgactctgggcccagtcactatcagtattaacagcagaatatttctgcagcttctccaggaatagaagaaggcaggacagtaacaggagggggtagggtgagttgctgtgcttcatgaacaaatcagggtctggtggtccaggactggatacaccatggaggtggttaggcaaaggttagctgggatttaagaaaagggtccattgctttaaaggccaagaaagtcatttgtgttttgctgctagctgctcagtcatgtccgactctttgcaatcccatgaactagatagcccaccaggctcctctgtccatgggattctccaggtaagattactggagtgggttgccattcccttctccgggggatcttcctgatgcaggtattgaacccaggtgttctgcattgcaggcaacttatgccttaattatacagtgtaggtccccagagaagggtgtgtaggttggtaagactatgatgtcttctgtcagctgcctggagaggaaggcagtgatcttcgaagcatggaaaactgagttcaggtggtaatgaaagtagacaattcttttgggttttacattgttcagcagagcaaaagttgtactcgaatacagccatccaaagatgtaaagtactgctctcaatcttgtagaaatgtgaagaagccctgaacttttctaaatcaaatgtccatgcctatcccaactgtacaccaatagaaaccaaccaatctttcagtgagtaggacttggacaactatggatttgcttgtttgttttaaactttcccaagtgattttaattgtaatcaggcttaagaaccattgacttaagagtctcaagagaaaaacttgcaaggagatgctattctattcaaaacacctttcccattcttactcgactgacagttatccaagaggatgtatcaaatggtaatttttaggagggaattattctggcaggtagaaacataccgtcttcttgggccttataaagtcaccacttgcttcctaaggttcgtggtctgttccacattaagaacgaggaggtagtggtttaagaacccagtatggtctgtttcatgggcacatgctgttgagttttatttctttgattatacaaagatggtcttctcccctctcctgataactgtcaattcccagacttaagtggctgcctccttttgaaattaacctgccaacctttctcactgatggctacagatggctactgacattgcataagctgcattgatgttccttctttgaatccacaggttgtaaatattttctgctggatttaggttatattggaatgctggacacaaaatttcaatagtgttggtggacacagtaactagtgttgaaagtggatactggacagttacaaagggatcaagaatctagaagatattcagatatttgaaggtaattaggacaagggagccatgtaatgatgacttgggaagattcctgttgctatcttttcattttctttatgttctgtgctaggaattctaacctctccccagtttcaaaagttaggagagacaccagtcaaagcagaattggccagaacctggcgttctgacagagtaccagacgctgatctggggaagaaacacacctctaaaaagtttagacctctagaaaggcccaagagtatttgactggagcctgtcaaagcaggaaggcacagtagtgcttcatgaaggtcttgcattgggtgtggagaaatgtctaagacagagagcaaacagcatctggtaagcacagcaaagccaatgggagccctagtcgggagcacaagagttatgaaaaagcttgccaggctccaggagaatttattctatggcataccaagtgggcgtaccatgaagtgagaaaggcaatgagttgaaattggactcctaggcaggaggaagtacattgaagagactgacagttcaaggcttgtcctgtgcaagaggcctggagtctggcctctagaaatggggaatagattttgtccggcagccaaggggacctcatgttggctaatgaacttctcgtctatggctccctgaattcccccagcccagggtaatgggataatttccagagtcatctcaggcctggctggacctgtaggttggggttaagtggttccagcttctaaggttagaaagatatagaggcaggaaaccaaggggatcctcaccatgggtttttttttttttaactcaattcttctttcctcccccaactacagtttagtgaagtgggcatgttctaagagtatgttcagaggaagaagactgacaactattcaagtcaaagaggggctaccgcactgtggccaaaacatttactgctcgaagcagtcaaatgcatttcttgttcttttatgttccagagtatctgatactatgtgggacacacatactttaagtgcatattgacacataccagaaagacatagctatagaagaggtatgtgtgtgtgtttagttactcagttgtgtccaactctttgccaccccatggactatagcccaccagactcttctgtcggggaattctccaggcgagagt

SEQ ID NO: 25929 - DNA, 706 bp, Bovine  19866881162349
  misc_feature (1)..(1): n is a, c, g, or t
nctctctttgcaagtaaagctttattacttttgagttcttgacaggcacttaaagaaaggtcacataataaaactgtgcttatttctcattgcagaaaaacaataagtcatgtctccatccattatttaccaaattgtcttcatttttcttcacctgctgggtttataggaagaaagataaataatattataaaactagcctagatattttcacaattatccagttatgtgatagtgagctagtcttccagagttgatgagagtaaagggaagaatttgttatccaagtaatttaccagaaatatgttaaaggtagttttcacagaaagatatatctggaatcacaaatgtatatgttgggggaaaaaaaaaacttttaaatagaaagtggtgcaaaaaatttcattataccattttctttcaaagaaattatattttttataggcaaatcttctgtttcaacttttttctcctttccctctcggtcatcgatagttactgtcctgtttaaactcctcattaaagcaaagaaaaattttaaaatctgttgtcaaagaaagcagggtatttaaatgtgcttccttaactattagaatatcttagtggttaagagcctatcctcaagcgccagagtacaaatctgtgctctagtccatgcatgcactgaactggtcatttaatttttctatgcctcagtggccttgca

SEQ ID NO: 25930 - DNA, 1003 bp, Bovine  19866881168755
  misc_feature (1)..(1): n is a, c, g, or t
ntaccaccaattaaaaaagagagcgagggaataagggggaaacaatctccagtcagttaactaacaagagcagtccagtgttggacacagataaaacaggggccaccaggaacgctgctgttaccgctgcttgctttatgcctaggtgcggaaagcctgcaacatttgtgagccaactgtctgtggatttcttctcatctgctttaaaatatttggttttgccgtatttccataataaccacaaccacactctcccctccgaaaagcccccacaacaacagatgtgtgttctaagaggaaatggagacactgatataatcagacactagttagaatgctttcatactaaattctccagcaaattcccaacaacaaaaaactctccaccactgatggaattaatctaagatccttgattatttgaagttctagaagtttgcattttgcattttgtttgtgaatgtatagggctttatttatcaaactgccgcgtaattttcccttcagtttgaggctgtgattgtgaaacaaataaattgaaacctaccagtctgttctctccaaatttagttccattatcactttaagaatgcacgctacttaatgatacaaaaggggtgtacttagctgtttatttagttgctaactcagcaatatgttggttcttttattgttgtgtgtgtgtgtgcctgtgaattatatggtagcaatatatcttccaagtatttaagattttgtattttaaagtgagaagataagaatgaggttttgcaacgacttaaataaaaataagacattttagataagggcacacttgaaaataaattgggatgggatagtagtggtttgggaaataccatattttatcagtattatacctcttttatgggcttccctaatggctcaaacagtaaagaatcttcctgcaatgtgggagacctgggtttgatccctgggctgggaagatcccctggagaagggaatgactacccattccagtact

SEQ ID NO: 25931 - DNA, 2249 bp, Bovine  19866881255077
  misc_feature (1)..(1): n is a, c, g, or t
nctgtgctctgtcagatcccaggcacttggatggagcaactcaacatggcacatgaactttctatcatctttccctttgcttccaacaaagtcaaacttccaccaaattaatctgttttggtgacctgattgcaccaaatcattttgtgtctctgtggagtattatctgtaattcccttgcccaccagaagataaggactttgcctttcatctctgtgttctcagaatctaatacagtgtctgctcttcacagaggatcaataactatttgtgggcggacacttgaaggattcacacttctatttgctacataaatacatatttgacaacaccttggcccaagaagtaaaggaagagagtctgggagtgtgtagctaaatgattctgcaattataactcaactgactactgtcatctttctgagatggggaggagatgctcatgactggtttggtataatttgtaatagatggtgatgtgggagtcgttacatgggtaacatagcttcttctccttgctggggggacatagagcagaggagaaattagtagtcatattttttattatcattaggactaaattattcaatattaatttatggttgaattaacaagacctgataaacataaaaaaatagacaactttggctaacaacaaaattgatatcaaaaaaagatttcaaggatctgctgttatatatagacttgaggtttatctaagatgtgagcagagcatggagcatcatatatctcctctgaaaatatcttaaatgctatgacattagccacttgcttataattaaagtatgttgccatttcaccaagctttcatttacagaagaaagtgcaaattccattccccttgaactttagctacttccaacttttttctttgttcttttctttaaagctttgcaacaaatgcatccccatatgcttatattagttaatctagtattaaacatattggctgtgcaaaatgttggcacccattaataaatgttttcattttttcattctctctcttttttttaactttagattcttcctttgactacataagcaacagctgtctagctgcctgcacaagactggatctaatgcctctatagaaatctaggtcaaaacacttggaatgcatgaatatcaaacagagttttcaaaacagcaaatgaatacatctttaactggtgacattttcctgtagcatatggttgcaagctcaggggactggatgcttttttgatgaatatgttccatcaaaaactaagggatggcagtaggcttttgccaccttctgttttgccttatgaaatgataatgcaaacgcatagataaagatacaatgatcgcaaggcttttaccttcagacctattctaaagatgcattttttcccttttggatgagttgctttgtctttggttgggtttgggtttatacatagctgtcaaaggtgacaaccagtgggagcagttgtctttcctgggcagaatttgatgggtagaaatcttcaaaaagttgaactcaaaggaaaattcactaaagagaggaactgaagagtttggtcacatgagtaacttatagtcacaggagcaagatgttgatccaaattctttgtcaaatgtcagcatggagaggctggataatcatttaccaatgaggaatgcagaaagaaaccctgagaaattgaaggttggtttctgaatcttggacctgtcagcaatgatgccaagtgtgaccttgaacatgcacctttatctctgtgacatcactgtcctactgtgtcagataagtggatagctgtattatctgtaaggtctttcccagtcctaaatttctaggtttgtaaaagtttacaaggctgtgttatggttaattgcatcctgttgattgaaatggcagaacagagaagattaggcttttatttcttttttaattgactggaagatgtgtttctcaaaaattatccagaatcttcgcttcccctcatctataagggagtgaataaagtaactgtgaagctgttctagttgagcagaagagggcaggaagaatgccgccatagcttcttttgtgttccacctctcaaggcagcgtctgaaacctatgtgtgaaatatctgagtcgccaacaaacctggtttggaaaccactagctaagaaaatgaatgtgcttggatgttttgttagtaatggtggggaaggtggaaagaagtgttggaaaggcactttttctttttgcgttgagca

SEQ ID NO: 25932 - DNA, 901 bp, Bovine  19866881263578
  misc_feature (1)..(1): n is a, c, g, or t
ntttctacaaaactagttactgaatcaaaggctgatgttatcttccctagcattttttctataatgacatacaggcgctcctcattttatcgtactttgctttactgcacctcaaagatactgcatgtttgcaaactgaacgtttgtgcaactccacattgagcagatccaggggcactgtttgtccacttttcactttgtgtctctgtcacgtttctctagttctcacaatatttcaaactttttcattattatcgtatctgttgtattaatctgtgatcagtgatcattgatgtgactactaaactcactaagggcttagatgatggttagcacgttttttagcaataaagtattttttaattaaagtgtgtacgctgtggttttagacacaatgctactgcacatctaagagaccatagcatagtgtacataacttttagatgtgctgggaaattacgaaagtcgtgtgacctgccttattgaactattccactgatggcagggtgtggaacccagtccacagtatctctgaggtctccctgtataaaacgccctctgacatttggacagtctttaagatatttcgtttggcagacatcaatgaccccttcagtatcctaccctcaagctcttcctcttcccaactcaatttgctaatatatctcttaaagctgctttaaacatgaagacaaattaaatctgcccattgtaaagaaattgcaccaatatatgagatatgaaaacatacaatgaaatcactctatgccatttttaactgcatctctttacctgcagatctcacaaggtatttgtcagaggaaaaagagaatgaggaaagaaagaacaaagagacaaagaacaaagaataaaaggagcaacacggctatgttcactacat

SEQ ID NO: 25933 - DNA, 1098 bp, Bovine  19866881289935
  misc_feature (1)..(1): n is a, c, g, or t
nagcctggcaggctggctataccatggtgtcaagagtcagacagaacacttcacttcacactttggataaaaaatgtaggacctgaattccacatttgatttcaatgaggatacaggagaagtttgagaaatgcccgagagtcacagatttgaattcaaacatcttgttccaggattgaatgatgttcagtaaatgtgcatttgagagaatgaagagaaaaaaaaaaaaaaaaaatcagcagctcagttaactcctgagatattctgaaacattctcatttctcctagaattgagccacttttttttttttttaaatcaccattttgcactttcccagtgaggttatgaaccagctgtctattgagcaaaaatatcaccatccaattaatattttggaagcaatgacagattctcataaccccctggctcagcagtctgttcagagtctgatcagacaggaagtggcataaatgggtggccagccagttcaccaggtctgtacagagagagcagaggccacggactgaagtctgtgactcatgggagactgcagcaggggattctgcatttgaattatgaatatttaaataggcttattaaaacagtgtccacagagaacgaaactgcatttgcttttaaaacaattaaaaatataagggacagtgcggaacagtcactaaaggcataaaatttggagtcggaagactcagagggcatccatagctatagcccatctctgctatctggtgtggggaagtaaatttgacccctctaccttttatctagactcccaccccttcacttatcctcagatgtttcatcaagaatcaacattaagagcatggtctctgtagccagactgtctgtatctgaatcttgggtctgttacttattagctgtttgtacatgtcacttagcttctctgtggctgtttacccttccctaagtggggataatactggactcttcaagggctagttgtgagattaaatgagtaaatttacatagtatgtttagaagagcatcaggtacataatccgtacaaaataaatgtcagatctgacatcaaatactatgtcattagtgtgcactagaaa

SEQ ID NO: 25934 - DNA, 812 bp, Bovine  19866881330407
  misc_feature (1)..(1): n is a, c, g, or t
nttcatgcactattcagtgcatttctgtttcagctttttaagaaaagaatcaatctcaattgccagtacaacacggtaattcctatccatatatttattcctatttatattgtagacatcacccaggaagaggaaaacacgacttgcttttttctgaatatgtaaaaataagactttgaaaggaccgttaaaaagaacaccatattaaagatatataattaagtgatggttttaaatgatcaaatactgaaatagctttatttatgattttcactgcttagaagataagtaaatctatgagaacaaaagaaccagtgacatcttagaagtaagataaagacttttaaggcatttgggcctaaagcttggaatttaatcattagacttggcatgtcaataattttagactgaaaagcacttatagaaacatacctgagagagatactattgtgtgtctctgtctttctctctcttttttctgcttccatcccatggaaaccgagctcccaagcaatctacttgactgacggacttgtaaggaaagaaattatagctgtaggacccgactactttacttcaccttatcaaatgcactcaccaatttatgctctttttccacagtctgacaagaatcaggactgttccagggcttttggagccctcttgtctctccggatggtgacattctatcttgacaactcagatccagccaccaggtaccacccaccagccactgatagcttttcaggctgttccaggtgaaacaagaggaggcatgatccagactgcagttttaactattctatgttaga

SEQ ID NO: 25935 - DNA, 1417 bp, Bovine  19866881333060
  misc_feature (1)..(1): n is a, c, g, or t
nggaaagaaatatgagattttaatttgtaatttcataaccagatacctttcttttaccatgtggagctcccttgattccttcacaaggaataaaagcaggcatgtggtgtttccttaaccaagatgttagacagaatagagaggaggccattcctggatgtagggagcccagcacaaggaaggcatgccgggtgtcagcatagttagcacataatacaggctgcttcatagaacttgtgagatgataatagatgtctgtcagcatcctgggagattctcagggctctgtacagtgttaaagctataggaaataattacttctcagtacaaatcctacagccttgcatgaggaccagctgccataggagcgaaaacgcttttctgcaaatcagactcaccaacagtggcttcaagatgaagtgcggagaagctagaataaattgatgttgaacatatagaaaagtaaaacactttcctctgggtgaaacttctcttcttatgaactttttgaaacttctcactagataatgctgtaattcatggactacccaactggaaaatgtagtagtcactaattccttctgtagctaagggggtggaagaaaatatacttgtaatttctggaattaaaaaaaaaaacaccagaagaagaattgctttctcattctctaaagctaaattttgattattaaaaaacaaaaaaaatcagctttcaaaaatgtgtaaaatggagcattgcggaattgcagactcagagaaattagtcaattcctgtccgtttgtttaaactggttgagattgaaatgttccaggtttgcctgtggtatcagttcttcagtgttttgtttcatttcgatttgtagtaagtggaaagagaaacaaataatgagggccatatcctattgcttctttcccagtgaccaccagaaaatccagcaaaacaaaaatgaagaaaatacctgctttgcctgctcagtttcttctgaactgagaggttccgagggaactggtgggattctggtctgttaagactctttcctaccctaatctcactcccactttctgatcttccttatcctcagaaataggtgttggcgttcagcaacccccatacatcacagctttacctaatatatgatgtgtttattcttcccaggcctcaggctgtatcactctcaaatgactgacaacaactctgaaatgaagtgggcccaaagtggcctctaataggtatgggatgcctctctagtcaaacataaagcaaattaatgtgcgcccctcctgcaccttcagtctggaaatgtcataaagtaataagcaaggagccctttgcgatgtggaaggctggatttcagtcgatttacatattaaagggacaagccacatttcattgctctaatatcaaaggtataagttt

SEQ ID NO: 25936 - DNA, 366 bp, Bovine  19866881712876
  misc_feature (1)..(1): n is a, c, g, or t
ntttaggacatctttgatgctctactgaccttgccccaaagaatggacacatgtgctttatggatcagcatttcctcctgactaatgaacaaaaacctccctgagaggttgataagcaaacagacatcaacaggagaatggcagctaattccccacagaggctgacggaagtcatacttcccaagccaggaaaagaaaggcaggacgtgggtaatatagagaaaggtgcagagttccaggacagacaggaaacactgacatatggcaaccgaatcaaaggggccacccagcccctttgcaattgtctgagacacaaagtccgtgatccttaagccatctaatactttgaccattactttgagaaaa

SEQ ID NO: 25937 - DNA, 1387 bp, Bovine  19866880087338
  misc_feature (1)..(1): n is a, c, g, or t
ntggcaatttgatctctggttcctctgccttttctaaaaccagcttgaacatcaggaagttcatggttcacatattgctgaagcctagcttggagaattttgagcattactttactagcgtgtgagatgagtgcaattgtgcagtagtttcagcattctttgtcattgactttctttgggattggaatgaaaactgaccttttccagtcctgtggccactgctgagttttccaaatttgctggcatattgagtgcagcactttcacagcatcatctttcaggatttggaatagctcaactagaattccatcacctccactagctttgttcgtagtgatgctttctaaggcccacttgacttcacattccaggatgtctggctctaggtcagtgatcacaccattgtgattatctggatcgtgaagatcttttttgtacagttcttctgtgtattcttgccatctcttcttaatatcttctgcttctgttaggtccataccatttctgtcctttatcgagctcatctttgcatgaaatgttcctttggtatctctgattttcttataatgaactctaatagaaggaatgggtcttccctggtggctcagcggtaaaaaatctgcctgcaagcagaagacccgggtttgatctctgggatggaaagatctcctggagaaggaaatggcaacctactccagtattcttgcctgggaggtcccatggacagaggagcctggtgagccacagtccatgggatctcaaagagtcagacatgactcagcgactaaaaaataacaacaacaagagaaggaatacaaggatggaccgttaccatttttgtatcttgttctagttaaggccttagtgaatagaagaactgctatctaagtaagtttacattggatttaaaggaagtcaaggaaacttcatcatagaaattagagtatcatgataaaaatgaccaaaggtctaagacagtacgtgtgtgcacaggtacacatctgtgtgtatacagattcagccacttaaaaccacagccaatatgagggaggaactttgatctacatcctgtacttaagtcaagttttcctaattgcattggctttcctggagatctctgctgttttatcactagagtagatggtagaggaattctcgctggtttaatggcatgggttcagttcagttcagttcagtcactgagtcgtgtctgactctttgagaccctatgaaccacagcacgccaggcttcgagagttgtatttgcctttcagatattgaaaactggatacgaattgttgtttaggctttaagacccagattgaatagcatcattctgggccccagtggggacacatcactgtggtcattcctcacttaactgcaa

SEQ ID NO: 25938 - DNA, 920 bp, Bovine  19866880394266
  misc_feature (1)..(1): n is a, c, g, or t
nacccagcacagccaaaaataaataaataaaataattttttttattttaaaaaggaagcactgacttgccaaggggacagggggttgtatgtaaggatgcatttttcttttttggggaacaggggaggctatttattgtacagagagtggtgtccagatatagtacttttgtcttcatcactttctggaaataaacgcaaaactgtcaagcgtgtcctgctttggtacctggatggggggacacaggtggggactctactgggaactgcagctgtatccgaactgttctctctgctctagaacagaacttgaaattccgaagaccctcctagaaactagaggtgatttcattcaggggataaactgaattagagcaattctacatgtcctgccttggtgctcaggttgacggctgatgccacctcttaaggtaccttgggataccctgactgtagagcagggtgcgagggcaagaccagaggatgggggctctgcagaaaaaggtgacacttgatttttccgtgcatttctggcagcttgggatctccatcttcatcttgggattgttcaaagattgaggagtaaacgtaaataggaccacatgaaattgctgttttcgcaggtcaagaacagccaaatattggcagtttcattttatacaacctagtatatgtaatgagtttagaacagtgccagaaaaatagtaagccctcaaggcatggacagaggagcctggtgggctgcagtccatggggtcgctaagttggacacggctgagcaacttcactttcacttttcactttcatgcattggagaaggaaagggcaacccactccagtgttcttgcctggagagtcccagggacaggggagccctggtgggcttccatctatggggtcgcacagagttggacacgactg

SEQ ID NO: 25939 - DNA, 1544 bp, Bovine  19866880394315
  misc_feature (1)..(1): n is a, c, g, or t
ntggaggggagtgagcatcatggggtacgaggcctggggaaagatcccggcctgggagtaaagagacacaggttccacaataactgcctgcacttcccggcactggctctgagcccagctctacgcccttggcatgtgtcaactcagtcccgacactcactctgcaaggtaggtgccattataacccccactctgtacattaagagactcagggtcacgaggccggcatgcagtacagccaaattcaaacccatatagtacaggagcctgggcccatcattagatccattaaggctcagtttccttatctgtgaacttgagggtaagaatcgacttcctcacgaggtcctgacttaaaagcgctctacacattattaagaaatgatctggatacggctgctgcctgtgttctgcaaaaggggctggagtttcaggtctgaaagcgaaccctgccttcactcctgctgagaaaggagggccccaccgtccacccagctcccacctcctcgggattgagggagctgaaggagtctgcagtggtgtcggaggagatggacaacgagtggaggcgcctcgggccggctgaagtctcagagacctgcggggagagagtgagggagccagtacaggatggggataggggaagccccccacacacacactgaaggtctgtcaggcagggcctgcctcaaccaacccccttcctggtccagccctgcgaccaccccgaggcctgcccaggcctgccatcttcaggccgctcctcccactgaccaccccatccccaggctcacccccagcctggatggctccgaacccgggtgcaggtccctcagtcggtcccgttcagcagtgagggcggccaggacactgctgagcgagctgtgcactgtgggggcagggccggccatcagactcccttcctctctctccccctcccccaacctgctccagctcacactcacccttctgggccagggcccagaagctgcgctgcaggtgggcatagtctgggggcggcagccctcgggggcccgaggggtctcgggactccaggtagcgagacaggttaggaactgagccatggagacgacccacctgtgggtgaaggggaagggtggaagggcccagcctccttcagtgcctcccacccagcgtctcagggaccaccctcacccgcccaatggtgtcgtccttggcaaagctctgtgtgcaccacatgcggctggtccgcttccccttcttgggtctctccgtcgtcaccgaggcctggcaagttgaggtgggtgagtttcggtctcagggtggagaagacccccgaagccaagagagaggtggacggccaaggaggaggaagcagaagaccgacagcctggcagctgcctgggcacagggggaaggggtcgctccaaaggggcagagagacagcccggaggcagtctggacacagtggggaggggcaactgggagacggtgctctccagtaagtggcagcatgtaagggggccaggggaccttctgggaggtatgagataatgcggcaa

SEQ ID NO: 25940 - DNA, 2045 bp, Bovine  19866880405609
  misc_feature (1)..(1): n is a, c, g, or t
ncctaccaggctcctcagtccatggaattttccaggcaagagtactggagtgggttgccatttgcttctccaggggatcttcccaacccggggattgaacctgggtctcccaccttgcaggcaaacgctttaccatctgagccaccagggaagacacaagtataaatacatgcaaagtaacaacttaatttatggcttatatcaaacccagggcaagacagcatatacctatagagtcgctgtggggcctctgctcttgctgaaaacagtgctgccttcttatctgactcttggtctcaagaaatgctcctgagtgagaaaaccaggattaaaatcaaggatcctgtcttcctgtcctatatcatcgaaacaaaccaactgggtcactcataagtgtgttgttctttttgtttctctctctctctccctctttctctctccctttctttcttcgatcctctcttacatacattatttactctagagtctgtaccaaccctttgggggctgttagaatctattttatagtttgttggtcactgacctgataagtcataatcgctgagaaagaatcatcacaattttatcaggtaagagcagctgctgcacaggcacagtaaattcttgggcttaagatctgtgcagttatttttttgcagagaaaatggtaaatgaacgctttatgaatgcagtgaagaaggaatgtgtgctcttgtttaaaatttagcaatggtgttttggaagaaaaaaattatcaagtgtttagggaaagaattaaaaacagaatcttgaaattttacatagtcctaccctatttgactttgaaaccctaactttcccttttcttgcatttgcaacaaaaaaaaaaatgtgagggttgggggaagactatttgtgctttttgtgtgtgtggcagaaagtgggaagatggtacaatggaatttctaatatttaaattctttagaaaatacaagcacatagatgatttaatgttttaatcaattagctggaatatctttgaaagcttaaaaaaagacaacaacaagaaaattccaaccaaatgtcttaaattgctaaaatgtctttatcttttgaccaagatggacctttaaaagtctttaaacataagtaaaacttcatttccatgccaagctcctctatattaaaattttgggggggttccccaattttctccttgtcccttccaagttataaacttgtgactacaggctttgcataaaaatgctgagagacccttaactataacaatgtgaatggtactatttttgctttaatttaacttgatttaaatgaaaagaatgtggaataaaagagggtatacatttggaggtgattctgtatacttggttttaaccaacaggctttataagtgttcattaagaaactccactaggcatgtttcctgctgcagaatagactttaacggaagaaataaagctgtgaagattccgttttcactttgtttctcgtaaagacagtcaggatccaacataaacaacaatttacacccagcatttattctggaaattacagtatcgtgcagttaacgcgcacagataaataatgttttatgggattctgtggagccctttcagggtagcggagtgtttaaccaaattaaaggattttgagaactcaaagctctcattttaagcaggtttaaacagttaatattacaaaatgccagcacagaggagctggtccaaatatatttttaatacagttatattattttcatgatttcccattttgtttttattactatttggcaccttccgtttatactaagtcacttgtcgcccaggccatctccctcaggactttgcttgctttatgatgacatttcttcatccactttttaatctcctgtatatctgcaggtgtggaaatatcagaaatagaactataattcctgatagatgaacttatatcacagagatgattataaaaagagaattgtgattttaaataatgataccacaaaatcttttttttttttttaaggagagaatcacttattttgg

SEQ ID NO: 25941 - DNA, 2542 bp, Bovine  19866880435290
  misc_feature (1)..(1): n is a, c, g, or t
ngggatcttccccgacccaggaattgaacccctggtctcctgcattacaggcagattctttaccaactgagctatgagggaagtcccaataaagcagaagtagatgtttctctggaattcttgctttttcgatgatccagcggatgttggcaatttgatctctggttcctctgccttttctaaaaccagcttgaacatctggaagttcacagttcacgtactgttgaagcctggcttgagaattttgagcattactttgctagcatgtgagatgagtgcacttgtgcagtagtttgagcattctttggcattgcctttctttgggattggaatgaaaactgaccttttctagtcctgtggccactgctgagttgtccaaatttgctggcatattgagtacagtactttcacagcatcatccttcaggatttgaaatagttcaactggaattctaccacctctactagctttgttcgtagtgatgcttcctaaggcccactcaacttcacattccaggatgtctgactctaggtgagtgatcataccatcgtgattatctgggttgtgaagatcttttttgtacagttctgtgtattcttgccacctcttcttaatatcttctggttcttttaggtccataccatttctgtcctttattgagcccatctttgcatgagatgttccaatagtgccatcattattctaaccacctaacaacacacaaaccaaatcttatcatccctctgcttgaaatcctttaatggcttaccccagtctggccctcccctccacagctcacactcctgttcttacacatgacagctctctctctgccggcacacttttctcttcaggtccctccctctactagcaaacgcccgatggccctttgaggctcagtccagtctcctgagttaggtgctcccccatgtacccccccttagcagcacctatatactggtccacaagcttcttgtctctttatgttcctgagccctcaaggggcagtagcacagaccttgctaaataagtgaatggaggtgagaagcagaagagctgtctgtgttaagcatgagtacagcactgagtatatttcagggcgcagtggagacaagtctgaagaggcaggcagaaggcaaggctttctaagcaacggtacagagtgtgaatttattccaaataagatagagagaagtgccctccttttcctctaaattactcatacaaaggtaggaggggaaaaaagagaaatcaaaagaaggaaagaaaatgaagaagagaaagataaaaataagtaagctttgttaaactaatggagaaggcaatggcaccccactccagtactccttgcctggaaaatcccatggatggaggagcctggtagtctgcagtccatggggttcctgagggtcggacacgactgagcgacttcactttcaattttcactgtcaagcattggagaaggaaatggcaacccactccagtattcttgcttggagaatcccagggacgggggagcctggtgggctgtcgtcaatggggtcacacagagtcggacacgactgaagtgacttagcagtagcagttgttaaactaaaacatccaaatgaagaagtttttcacctaaagcctggcttcaaagactaactacaaaatgaccagcaaaaatagacttcaaaagacacaaccaaatatacatcacagtggcaagaatccaatatataaatacaatcaatttgtttcctcattaaacgccttcatgaagaaaatgatttagtacaaatgctaaagctactgacacagattaatcaaaaaataacaacagaattctaattaaagacttaatatttcactcattcacactaaaacaaaatttggataaatatataaaaacataatctagaatgcatccttccatggtaaccactctaacagctacagtgaattgccgaaattaaaaaaacaactcttatccttaagtgtacactttcttccaattaagaactgagatgtacacaaaaattcagaaatcattttaaaattattgcacagtttgaccctcaacttgacttttttctaattgtacaagagtctatactaaaatatcattcttccccatttatttcttggtacagtgcctatagcagtcacagttaaacccttatatgaggtactctgttatccaaatcataaaagtagggaactggattagagctaaaggctaatgactatgtgaccagttctactgctgtatcaatacaggtcaagggtcaccagcagttcagccacaacaaccagtcaatctcaggacttacctgacccatcctggggccaggacttctggttctgtcccacatcaagggattccccagcatcaaaaatgtctccagatgttgccaggccatgcggaagcacttaagacagcaggcaaacatcaggacaaggaaagaaccaagactatttattctgaccatatctccatccctcatcctagaagctaattaggttgaaatgctgtcagctactggctggccctaagcc

SEQ ID NO: 25942 - DNA, 1437 bp, Bovine  19866880525838
  misc_feature (1)..(1): n is a, c, g, or t
ntctgtctgcagtgcaggagacccaggtttcatccctgggtcaggaacatcccctggagtaggaaatggcaacccacttcagtattcttgcaggaataatccctacgcacagaggagcctggcaggctacagtccgtgcggttgcaaagggtcggacactgagtgactaacacttgcacttacttgcttctaaccttgggccagagagccctgaaagccaggagggtcagtgagaccccaggatgggagatcctctgctgtagaggctgtgttccgctccccacagccctctctcccacggcccaccttgcctctcctgaccttcagcaggaaagctattcctctcttcctacctctgattctaggaagggcagagccaagcacaggctcctcacattcctggcaaacctgccgcccaggctgcgtcttctccccctgggagtctttgaacagactgttccctcctctgaaaaacaccctgcacactctgcagctctcatctggtccttcctgagcccctcctgtaccggacaccagcccatcccttccttgcctgtccctgccctgagactccccagggcctgcaacctgagaccctgtctctcccctcggtccagggtgagtgtccagcctcccccatcaggctacgaagctgcgacctgtgtcttacttctgatccccctggaccatgcaggtcatccctctgggtctcagccatgataaccttttcccattcttcaggctccccatttttgatccaggagagcggcatagtcactgggctgcctgccacctctgactgcacctgggggcttggcagacagacagccacctgtctcaggaggctcaggtggatgccggcaggcagtggaggccaggggctccccatcagggactccccagaagcctgtccagcgctggaagctgctgcaacagatcacccagtgacagggtcaggacccagctaggctgcagcaagagcagaaaacccctctcccaactgttgtgccctgctcagaactttttctgccccctccccatcccctgtggctgctctgtgtctgctgtctcttgggtggggggatgcttgtgggtagggggtggagtgggaaaaaacgctgctagcctctggggggcagctgagatttatgggactggatttttacaggctggggagaggccccaggcgggagctgtggagcctgactgaggagcaaatgcataaaacctccaaacatgaaagtctcagctgcagcctccccccaccccccaggcctgtgggtggtgagagatttacagctcttgcacaaggcctggaggggacctggggaagttgtgaggacacttcagagccagggtaactccccaccaaagccttcacctttctcctactaggaaaaaaaaattactcaccacgagaacaggtggagctgccag

SEQ ID NO: 25943 - DNA, 1173 bp, Bovine  19866880540251
  misc_feature (1)..(1): n is a, c, g, or t
nttgatgcttgtagtactaagtccattatcaggaatattcaggaaacacattcttggggaattcaggatgtgtcaggggcctggatatcttgacatcacttcacaaagcaaccaccagagtcccaaaagcaggagagtccgtgcttaggggacaggtaactggaaagtagaaaaaaatttcccaccctgacccagctgggttggttttgaatagaagcagtttagaggataatacctcttactgctggattcagaaatactttggaaagacatcaatattaaacatatttagatttgctttattaatcatgtataatttctactactaagatattttatagtgaaaagaatgttaaaatatttccttggctagcaaaagttacaggcaagattttagatgtgttttgttttgctttgttcagccttccccagagagaaagggtgttaaatatagactcatccacatgatccctctgaggcgtgtgggtctgctttctgtgtcagctgtggcacaaatgtgcatgatttacccatacaactattgaaccagcattggcctattaagacttcatgatctgttcatgagctgtcaacccaaattgagcttgaagcctgctgtaaaagatctaattttcataattatccagaaccttcacaccctccttccttttagtaccacccacctccacacacagtacgcgaaggagtaaacacatacatacagacacagaggcacagagcagcactgtccctggagattcatcaggcctcttgcccgaaaatgcaccgagttcatccaggggtcaggcctggctttgacttcctgtttgaggagccccatgtgtggtgttccagcattgctagaggctagtgatgactaagtaacctttcacactatagcctcccactaagaaacaaggtcccttatgattctagacctggagtgattagggcacacaaatacctttttaatatataaggtggaattaatgcctgtagaaatagcacttcactgtctcatggccttgcatttatataaagaggagagagctgttgtctttgaggatgaagaattttaaacgccacctgatttagtctcagagtacaccagggactctgatcatttagctgtgcttaaggctgcctgtagctttaccgacccggtctccaaag

SEQ ID NO: 25944 - DNA, 1400 bp, Bovine  19866880545629
  misc_feature (1)..(1): n is a, c, g, or t
ncactagcctctgagggttcaggagttgggttggcactcagttgtgggggtgtaagcatttaaattccaagaggaaatagtctgattttggatgagatggtacccattattatctgaaatcagtttatgattgcttgttgtcactcacttttacatcagtacacagagaaccacaaactgtcagctcaaaagggaagatcgtttagcccaagccctcccctccacacatgtgatctggctttagggatggggaaaactgaggcccagtgaagtctctgcttcagattacacagccaatctggacctagaatccaagcctcctgactcccaaacctttcctttatgtacgactttaggcaagccacttcctggctctggacctcagtttctctatctttggcagtggcagcattggacaggacactccctgagttcttcccaattctgaccttgagtaactctttagtgcttgggagcaactcctttttgttgcttctggggttctgtgggcatctgagtatagaagtcgctatgtgcatgcatatttgcagtatacatgaagtttgtatatgtccagagaagtgcatggttattcagactgactcgaggaaatccactggaatctggactattcctcctcctgaaggtgttcttattctcagcagaggagaagcccaagcctagagcactggagatagaacgcagtgggtggggctagctagctgggttgggccgtgattggcatttggaggggagctagggaaggaggggctcagcctcaaagagcagagcactttctctgccaggattcggagctgaggctggagttgttgggaacagcttttgaagtccctccaacaccagcccagggaccaaattatggtttcagaatttagatctgagacaggagaccaccatcaccactgccagcctcactttgcccccctgagcctttggacgcagggggccatggcattacaccaggtctcctcccagggaagccaggacagaagtcctgcaaggtggatgatccctgtcttcttgctcttattttccatttcttctcctaactgagaaaaaaaaaagataaaattcaaaagaggtgggggcttctcagaagtggcctggatgtgagaagggagatttcttgtaggatcagggctacggggaggctagcagaggaggggcggcttccagactgccttaggaagtgttgtcagggatatgaattctggtggaagaagtgggaagagaggagaaacaaattcattttggggggattctagaaatcagagctcctggaaatcagataatcctgagaggaaatagtctgtttttgcctgagacttcttaaagtctcaccccaaaccctatttagagaaagaaaaaaacgaaagggc

SEQ ID NO: 25945 - DNA, 1741 bp, Bovine  19866880555609
  misc_feature (1)..(1): n is a, c, g, or t
ntgggtttaagctacttagggcctaacataaaaaagcctgtcactcaaagtcagaaaggcagtgtagagcataagtgtaattatagtttatgaattcaacaatcttcccatagtagacaataatattctagattaacatgtttcagcatcgttttaaacagcattactaacatttactttttacttgaaaagccagagttctatgacaaagcaaaagaatttatggctagaagaacaaagatcaccaaagcatgaagaaatcactctaaatatacacttacatatatatacaacaaaaatatataaaacataatgtatattaagtataaataaaatttatgcctatataaattaagtatatgtatctacatacttggcctgaaagttttatgcttaaacaaaattctttcacatttaagtgaatattaaactttgagataaaaatggtcaatggctttgcagcttgaagaagaatggtctgcctttgactcagttttatatatatatatatatatcagataactatattacattagcaaccaaaacactgtatatcattttgccaccactgtaatgaccacactaacaacttcaataataacatactaggactttcatattaccactacactcattgactcatttagaatttggagagaaacaaaaaatatttgaggcaatataaaaaagcttaatctcatcagccaaatcactcacttaaaaatcaactatttacattttaaaatggccactgttacttcactactaattatagtagaagctcaataaatgttgacctttcaaagaatgggcttttgctcatattgccagtgtggaaaaaatttctaaaatcacgttggctacagcaaaggccaaatcttatcctgactgtctttcaaactactgtaagtccaaccaactgtttttttttgtttttttcctgaaaactcagtccttcaaaatcagcacttgattatgtaccatataccttattgtgggggtgttcagtcttctctcttcaactagatgatttacttactaaccaaaggaatcgcaccttatttctttttgtatcctccacgcatcatctaaattcataactgaataagggcattcaatataggaattcaataactaactcttcattggcagtctattaaaatctataacatggacaaaaaagccaaaaaagataatgaattagttctctgtcaagtcaattcagaaactaattgtatgcttttcacaattgtaattgtccgaatttatggagccctttgaaattctttataaaatactgcttccaaatcattctgggaagataacatacataggccagagagacacacatgtctgaagaacttgactaaaacttctggaaaatagcttaatgcccatggtcaggcaaagctatctgggtccgcactgaaaagcatgctgagatcaggcaggtgaggaaagtacacggtatgggtcaggggaggctgtgcccaggtcttggttttcttactgattctgtcttgctgaccataggaccaggcacttcacctttttaaaatgtagtttccattttggtaaaacagagattagattgggtgattaccaagtctcttccatgtctaaactgccatggttttaatgttaaaatgtgggttaagtttgcaaggagtttttcctagtgaaagaggcattatggaagctatccaacaatcaacacatgcgagagtgctttactaaagca

SEQ ID NO: 25946 - DNA, 940 bp, Bovine  19866880575243
  misc_feature (1)..(1): n is a, c, g, or t
ntattggagccttagcttcgcatcatcccttccatgaatattcagggttgatttcctttagaattgactagtttgacctccttgctgtccaagggactctcaagagtcttcaccagtaccataatttgaaaacatcaattcttcagtgctcagcctgctttatggtccacctcactttccacacatgactaatggaaaaaccatagcaagtctactcatagtacccctgatagattttatattcagtgaggataaaaaaatgtttgttcacaagccagtttgagacctcattgctgtgagttgtgtgtaaggcctgattttactatataaattatattgtttcacataataaataaactgcacttcttatagtacttatgggatgtgtgaattaatgatgcagtgattagtggtaagtgacccctctgattaggtaaaccttaggctgaatactgctgacagctttggaggaaaatgtgtgtgttttatggctgcttgacttggaatgttagaaagctattgcaagttcagtcattggtacctagtaggttgaaagagttaatggcctaaaaacagcaagccatttgcttccttctcactgatggggtcaagcacattacattcttcgtgtgtatttttcttaaattacataaactatatgaacatatttagggttgttagtacctttttattctattatatgatgataatagaaatgactcaaatagtccctttccatatatgattatataaataaacatacatacattcaaacaagcatttatctcattttatttttattcttcagttatttgcttttatctttattgcttgcaggtatatttttctttaataagacatatgactcctgtcaaacctaacagaagttatgtctgtgtatttagagtgtacactgcggaagagcacaaaactggtttct

SEQ ID NO: 25947 - DNA, 4447 bp, Bovine  19866880609678
  misc_feature (1)..(1): n is a, c, g, or t
natgtgccactgtgggaggggaaagagttagactaggagccctaaaatctggtctctggtctcagctctgcccctaacttgctgggttatcttgttcaagtcacttctctaggttcaagcccttctctagggcttggttcctctgaatgtcaaaggaccacctctggaataaagttcttccatatatctcagggccatctggtgttgttgctcagagacctctgagaccaccatccccatcttcatccccatcagctcccacccttccctgctccagttccacggagagtgaacccctaacccctgactttctcttcaaaatctcgctcagaatctgcttcaggaagcctcccctgattaagcctgctgaactgattgctcccttatgttggggcccctccgtctgtgaaaggcattgtttgtcccctaagtttggctgtgttgttattgttgctgaaagaactcctaagtaattttgagaatgtgtgtaatatccccttctgcccccgccccctgcccccagcacaggctgcaggcaaggactgtgtctcttccattggactagggccttcctaagggcctggacggtgtccttgggacagaggcccccacctgggtggaactgtgtctctaccatcagattaggaccttcccctagggctgaggactctgcctccctgacttgcctagagccttgttcaggaggggcccttctcaggggaggagggacccagacagtctgactctcccagctcttcactggctgatttctcaacttctccttcaacttcgtgccatggccaggtggctgattttgccatctccctctcctgcctgggggtcgttctgcttcttcctcaggaaactggcctggaatctgcctcataccctccctcctcctctcctagcctcctgcctccgtcatccctctctaagacctcagggcaaatatttgccatctgccttgttagtgggatcctggggctggctctcagtctctctgctgccctggggggtctgagaacacttctcattagaactgccctcaccactgccaaaatgcttggaggtcccttgttcactgccctcctaggcttcctggggccggcagtgtctgggatccgaaagtcctagtctatcctctctactccggggctggaaaacctgtcagagtaagcctgaggcggtgggggggccactgacgctgcatgcatcttcctgagtgtcgctcattcacagcttctctgccttcacctcagagagactccttacctgggaacctgccacttggtattaattcgtatactacatttatttgtccagcccaagaaaattaatgcaaatgcaatgcaaacctgatacaaagaggctccacatctgaaggagacttgcctctctttccagaggtggtgatttgcaattcagagaaaccgaggcttagatagaatgctttcctggctgggatgctggggcctttggaagattccagaggccactgacctgagatgtgcaacaggtatgctctcttcttccttggacctcatctagcctatggggcttctttcacagtttctattaatctgcttttccttctctatgacttgctccttctctggctcctgccactccttgccctctgcacaggagccccaaaccccaccatactccctgtagttgagtgacagaggatggttccccacgtcaactctgcggggcctcacctgccccagtgggtccttcccaccagtctgcccatgaacctaaaatccctgctattagagtgtttctgtgagtgccagtaataaatgcaggcgacatctatttaaagacctgtgaccctgaggggtccggctgacaggttaccacctcagcagaaagcaggaagtgtaggtttggattgttggagagggccagggaagaaagctggagtgaaagaaggagtaatcgctagaaatacattcacttgacgggcgtttattgaacatttaccgtgtcccaagaactgagctgggcctgcaggtgtggtaaggagtgcccgccctcatttagcacaagggggttgttctcaagcttgaattagaccagcatcacctgggatgcttattaaaacaaaaggtcccaagcccctcttgatttaggcagtctctgaggtcctgggaatgtgcatttagacaagcatttctcctccccttgctcaatgatatccatgcaagtggtctggggatagaaaaccctggtagggacttccctggtagcccaatggttaagactctacccttccaattcagggagtacaggttcaatccctggttggggaagttccacaggatgtggccaaaaatatataaataaaatttaaaaaaaggggagtgggggtttccctggtggtccagtggtgaagaatctgccttgcaatgcaggagatactggctcccacatgcctcagggcagctaagcctgtgtgccacaactactgaacccgtgtacaactactgaagcccgaggtcctagagctcatcctccacaacaaaagcagccacagctagagagtagcccccagtctccacaactagagaaacctgtgcaacgaagaccaattgcagccatcaaataaataaataaatacttaaagaattaaaaagaagaagaagaagaatctgccttgcaatgcgggggacgtgggctcgatccctggttggggaactaaatcctacgcactgcaactactgaacctgtgcgccataactaagaccccatgcagccaaataagtaaataagtattaaaaaaaaaaaaaagattaatgtttcaaaagtcttttataaatccctggtggtatgttttgaattctaagaacatcctggagtttcgaggcccctgggaggcagagagaggggaggaaggtgctgagaggaagaatgagcagggggtctgagccgaggtgcagggtctccttagggcggctcgctggtccctcacggtccctgtctcctaaggagcaggcctggctccctctcctgaggagggccttgctccaccacagcctgttgattcctgcccttcccctcccatggggagcagggcaccttctctggagtccaaggagggtcagcaccaaccgggtgggatggcagagccatctggcagagaccccaggccatactccccaccccacctgttccttcctcctgctctcagaggtcctcctggagtcagtgaccaggctaaagagaaaggggctgagaggaagggcttgaggaagcagaaacggtagaggtagagagcagagggaagaagctgcccccctcccctctgcgcctggcgtttgatgctgggggtgcggagacatctcctctcccggaaactcaaggccagacagataaacacagatggagggagagactcagctgctttatttatgggcccggtgacaggccctctcctgtctcagagtcactaatctaccaggcggaagagacatccccaccccctcgccaccgtcttccctccctcctaagactggggctcagccaggctccaagcctcccccgccagtcgggcgcaggcctgcggtgccagctcctggagcctgggggagaagcgtccagagctcagggtctacctccaacaaagtggaggacttcatgtcctgctcccctatgccccaccctgctctgaatggggcatagagaacctttgactctgccaaggagacccactcctatgaatgtgcctggggacagggggatggtttagacaccaccctcaggaggtccttcccatggagaggccacacagttcaagtgtctgaatttggaagtgtctggggagccccctgggctggcctggcttaggcctccctagagcagggacttatgggagattcctaatgtccccaaggggccagactcagagccaaagggtctggttccctgcagtatttcttcctccttctccttcttttttttttttttcctccttttttccacactgcttgtggggtcttagttcccctaccagggatcttacccaggcccctgcagtggaagcgcagaggcctggatggcctaaccactggaccgtcaggaaagtccctgcagtgtttgtttctaatgatctccctctaatggtaattaacacccacagataggggctctggggacccctgtgaactcttccctctctcccgtgacatactcccacccctggcactctcttaaatagagtaaattccactggaagttactggagtgggatccagcagtcaccaggtttctcagcagctggacaacacggctttttctggcctcccctgccctgtgcccatctgcatggcctcttcatcctgacattttgatccaggtctaccccaaatctggtcaggggggagaagtaactcagccttccagagagaacaggtccctcaggccccaggcttggaggtcagag

SEQ ID NO: 25948 - DNA, 1142 bp, Bovine  19866880625962
  misc_feature (1)..(1): n is a, c, g, or t
ntcttactaaatcatatatatataaagacagatgtactgaacattaggatgaagaatacagtaatagatgaaaaagtcatgactatttctgaagcaccatgtattattaaattcaaaacaattcccctaaaatggataattatgtaatctggcagaaactaaccttccagtcaaaaagctggatactaaaattttccctaatgtaaccaaaatgtggtcagagattatagtttttattttacaactattccatgttattcaaacattccagtccctgtttctcaaaatatacaccctaagagctacctgggaggtttgtgatatcaacccccataatttttcctttgaagagatcttcagcctcagcttaaggctgagaaatgcagtcagttcactctaggagagtataagtcataacgtttgttttggaaacctattttaccctatatttctcaatgaaataaactgtataaatgaaataaaactgacaacacaatatttactaaattgctactgtctgctctcagtttaacaccctgactaccactagtttcccttgttgagtttagtaggcaaaagagcaaatgaaaaaagtcttcagcaaagaatgtatttttaaatcaacataaataagattataaaatagacttagcatagtttcccccttacttgttactcctatacatttgtcactttcttcatacccatgtatattcttccatttaccagactttgtgtgtgtgtatgtgtgtgttaggaattcacacatggacctagggcaataaagttcagagagtagaggaagagagaaatattcaaataaatcagtctcatttaaacaatggtctgatattacatgatgaaattaaaataaaactataaaaattaactttcagagttgaaaatgactatcaatgagaactgaatatttaaagatgaaaacacagcaaaaaaccaaaaatttaagtatcatgtttatacataaaaggaaataaaaatattttaaggtcccatgacagtgtatttttctttcagtctgtggtattacacagtcatacatttttgcactggagatgcaggccactagacctccatcagcataccagggctcctgctttctcaggagagctgtaaggcagtgc

SEQ ID NO: 25949 - DNA, 1228 bp, Bovine  19866880634380
  misc_feature (1)..(1): n is a, c, g, or t
naaacaagccaagatcatactgttgtctatgaggttgcacccaagtactgcattttgggctctttgtagactatgagggctactctgtttcttctaaggaattggttatctgaattaaattcactcattcccatccattttagttcactgattcctaagatgtcgatgttcagtcttgcaatctcctagacattttctcattaactaacttaattgccatacgactcgatgcgaacagtactatgattttgcccattttctgaggcatggagcgggcgcagggtcacatagccagtgactggtggagctggttcagcccaggccctctggctcccagctttcctactgttatttaacaaatgattttccttaaatcatttcactatttttactcttttatgtccagtgaaggattaacttttcacatcacagacttgagaccataactaagtgttttaatgtactgacaaataaatacaaaactataaagtagaaaaatgttcatccatctaccacttaaaacctggctgcctccagtggtccacagcacatgctttgagaactgctattctggcagatgctcccagtgagcagacacgtggcctgggcctgggacgcgaggccagtaggaggggcaggtctcacccaccctctgtagcctcagagtcaatactcagaacagtagctaacccagcccggttggtgggtgtgattcgggctgttagtgctcaggctggcaggtcagaggggagagggctttgagccggggttaggcagagggacacatatctgtgagtgacaggcatctcctcttcccaggggacaaacgcttcgagtgtgcccagtgtcagaagcgcttcatgaggagtgaccacctcaccaagcattacaagacccacctggtcacgaagaacttgtaaggccaactgaggcagaggccccacagatgcagacctgcctgggcctctggcagaaaggaggcccacgctgtcatgggcccgcctcaacccccgttcctattgtgcgactgtccccacaggaaggggctctgctgccccatatgcacctccttttgaagccccttggctccgccctggccctcccctctcaccacaagctcctggcctgcccaaaccatggacactggccatgcccaatgagacgttctaaatcaggacgagtgggaacccttatttccaaaggaaaaacataatttcactccgtcgag

SEQ ID NO: 25950 - DNA, 2521 bp, Bovine  19866880636505
  misc_feature (1)..(1): n is a, c, g, or t
ncagaataggtttctggaaggagacttggggagggccaggaaggagggtcagggtgcttgcttggcctatgggtgccccagtcaccacctggtctggggcaaagcccacaacccccccacggcccatctgggactgctaaggaacttggggaatggaggattcagctcctgaaacaacagtaaccaccaaactgccttgctccatgagagtacccactgcttgtgccacttaaaatatatcactttaacaggtctctgaacttggcattcatgggtcttaactctccttggagtaaagggagccacttgtcagaaaaccacagaaagaggtcagagtagcccttgggccctgccctggagcctccaccatggcaccaaagtattggtgcctttggctcctggccttgaattctggtctctccaaaatactctctgctaggccttgctgtcccttctgtccaggaggacatgacacaccagtaagcaggtgtttagccctttaagcaaggcaaatctatggaaatctgaatgtgcagaacagatacattagaggactattctttgtttttcaaaacaagggggctacaagattcttttaaatagtgagctacctcaagattgtgtaaaatctgatttgttttaggaaaaaaatgtgacacaacagtcaaacttccccgatatccaaagttggaaaaagccagaggccaacagtcgcatgcccacgcgtagtcacaggaggctagagggacctgggggaggggatgtacttggaattttgaacagactcagcagctggtgatatacctgcttttgcagggcctgagcaggcacactgagggcaaggcccttgccccggggacttgcaatccatcggatgatagaaatcagccctgaagatgcaagttacacctccactgtttgcacagctcgggaatccacacggcctcacaggatagcctaccaccctgtgcctatggtggttagcaccctggcatgcatgtgggcaccccaggacagctcccaccatgccagctgggttctgtgaactgccctaagggccttgccagacagggttgggctccttctgagctggaacaagttaaccattgactggggtggaggtggaaggctggaggcatgggtggggggtgggggtggggttgaaggggtgagtcgccttcctgcagtaagacaaaactcagaacctctattccttgcatctctgcatggcccctgtggtacttctccactctgtgtgacactcaggtaccgtggagaggacagggatatatattcctaccagacagccagaaacatcctccagcgggggagggggtagcaggtggtaagctcctgtccagcaagagttaacagatcactgctctggagtaaaacttttccagaaggagctctgttggaggcctggattgactccaagaagccagtgggatgagtcgagctctgcctgcccatctagagatgggagtcggcatgcccggtcccccttcccagctgggcgtatcagccatggaagcagaactgagcccccagacagaggtccatgccttgttttcccctcccgcccaccctctgccggtacctgtgagcccgactgctgggaggctggaggcgagagcttccctagagaaggagctgagtgcaggagctgcgccccgggagactgggggaggtgggggtgcctccggactgccgcgccaggcaaggctcaggctgggagagctgggtaggagcagctgtgcagcaggtgcggagaaacaggtgcaggatggtacctgctccgctgtggctccgggagtcaaggtgaacctgaaacccagcccctcccggctaagtaaacagaggctggctcagctgatgaatattcattaccccagaaatccaatcccagcgcccctgcacccacccagaagacagggtcctccaaggaccgcctggccaggaagaagaaaccccaagggaagtcaggggtgaggagaacccgggagcctctcgcctcattctgccactctcaggggcctgtttgcaccccagccataactgaggtcatccctacctgttccatgccccaaagaggccagacccctctccagcatgaactgccacctagactttaccccaggcacaatccagaaagggttaagggccgctgctccggcggctggcgggagaaacgggagcacccagctgctttgaactcaagagtcgaaaccagtccctggtcaaactggttggcagaccggttcccaggctgcctgcttccaccccaagcctcaggcgggtgctgggtgggaggctgtggttccctcctgacctgaaggcttttcctcaagttctccctagaagggggttgagtggcaccagctcctccttaggccaggttctccagacccaccgcaacctcccgtgtctacatcccctcctccctcgcttagaagcagtcttcacagaccttgaaattctgccttccaccatggactgtgtggcccattccaggaacgag

SEQ ID NO: 25951 - DNA, 1037 bp, Bovine  19866880656589
  misc_feature (1)..(1): n is a, c, g, or t
ncagcagggcccctcttgcctcccccaacacatctatccattcgtaagtcccaaagctgcatgcccacataatgcactgagttccaatttgggttgcaaatatattaaaaggagactttaacaacagagagctgtgcatccattccttttggacccagatatttctgaacagctcttttggtgcggggactgaactccacttctgcccatgcagggatgcagctcaggccacagcggggtgttcagcgctcttcagtggctccagattgtggtgctggtgcttgcctcctcatacgtaaccgatggctcctgagagcctgcctcccgtaaattacttcccacgatgcctgcgaccactgcagaattcaagtttgaatagagcaggaaaaaggtgtttgaaaggcctgttcactcagctgcattttaatttccttttcaatcttgtcccaattaatttcacagaattaatctcacagaagcaaacgcggcagcactgaagctgtggttttagtgtggcggtcgctctgcctgaacatgaaataggagctaatataaaaatccatctgctgtgtttgaaatacacaccggctgctgctcagtcctgtctgacattccaaacatcaacagcggggaaaagtgatttgggggttagtggccatcagtacttggcaggggttcaacaacaggtgtactccaaaaatccattcagcttgggcaccaggcatgacagggcaggtgctgaatcaccctccgtgcagtaacacaacgccctggcttgattccttttatctgagcatcttaaggcccttctggggaccagcagtgctctgggcatttattgtaagtgggagaaagggcagtaagaagtctctgttgagtcaagccacagtttgcagcttacagagaagtgactctgtcttcttggcttcaaggtctctcactagagaaccttcttctaaataataaaggtgtttgttctactattcgagataacttaaataaacacccatttaaaatttaagcctcctgttccagaa

SEQ ID NO: 25952 - DNA, 1736 bp, Bovine  19866880665718
  misc_feature (1)..(1): n is a, c, g, or t
ngctgggtgggggaggggtgcactgcaaaccacttgaaaggggccggtgagcatcgtgggacaggtggagatccagagcctttgaactgggagggggtggggctgctgccagaagatggaaatcctgggccaggctggcagcgccacagggagagggacggggaggaagccccataaaaggctgacccacccctctctccagcctagccttccgttccacgccccttagtccagcctcccaagacaagagctggcgctgagacagctaaactgagtaatgtctcgggtgcccagccaggtggacagagactcactgccaggccccaccctgagtggtgggtcagcacccccaggaccaggccggggcacggtggggaggagacggaggcactgccagtccaagcagggcaccacttgaatccagcccaccagggaagaggttggggtggggagccccgtattcaggagaaggtggggtgcagctgtactgtccctcttggcctttctctgactggcaggcaggtgggcagggcagggaaggaggacaaactcaaggtcagcgctccagaagggaggggggagtcaaaggggaaagagggctttctgctcccttggcccctagcccccttcagatgacaggcccaaggaggagtgggtcgggctggtcaggacctgcctccagcctgccttccttcccagcaggtcggcaaaattactctcctggtactgctttttttttttttttttttaattttttgaagccagatcaaaggtgggatccagctgggcactccagtaaaatctcagcaatgcggagcctcggtttcagtcgggaaaccaggagctgggggagtcactgtccctgagggctcggggatgtgaccagagtcaggagtggagctggtgggtgggggccctgtcaggaaggatcagtgactggaaggatccaggccaggctgcggtcacccttgtctccactgctctccaaggagggacccacccacgtgtgactctcccagtcccagcatccaagctaactggaacctgtgttcacattggccacaagtcaccgcgctcatccctgtcactggctccagggcattcctttgtaaaccaggaagctcttagattagataaacttattccctcctgctgcaaaagacagcacattccccctttccattctgagttcagactagaaaaactcatctccttacttctctgtactctcctggtgaagctgagattcagtcagccgtgccagcagcagctctccctgccttctttgctgatgaccacagtgtcttcctatgtaggccaaataactgccattcttgtttgggagactttttccttcccctcaaggactaccacatctcttcttcctggagccgcactgccatccttaatattgtgactggatggggttaatggaatcctgcaaccatcctggttttccgagtgaacacgtccttggcactgtcagcggggcacttgttgtgcaagcagcccacccttctttcctcacgagtcctgaagcctgggaaggcctggttgtgactggcatgctgctagacacagatgtgtccaacaggacagaggcagatttccccagaaccttggctgaccctgagacaccctccttggtcatgacaaggatggccctccttgttgccctaggcaacaagcctttactcaggttccggtgtctcccagacgttgaggtcccggcaagg

SEQ ID NO: 25953 - DNA, 1745 bp, Bovine  19866880671549
  misc_feature (1)..(1): n is a, c, g, or t
nttgatttttgcaagctgtttggtgacaagatgtgcaatcaagctggatggcactgtttagataaagaatggaaagggaccataatgaaatgactgccttctgtgggtcttatgctgaccctaaattcttatttcccttttcgatgagcattccatattgctggcagagttctttgcttaaaatactgagctggtatcacttaactgcttcaaagtctttaatggctccccatcaccttcggggagaaggcagtggcaccccactccagtactgttgcccgggaaatcccatggacagagaaagcctggtgggctgcagtccatggggtcacacagagtcggacacgactgaagcgacttagcagcagcatcaccttcagaatacaaaccagactctgtggtccaagagcagtgggcagtggagtcagtcagaccagcctgggtttaaatctcacctgtgccctgaggcaaactatcccaaatcctgggccctcagttgtaaaaataaatctaacagcatctacttggtaagcctgttttgaagacagtaggatttctaaggaacacagattagtcaactcagtaaatggcagtaattagttagcatgccattcaacgctgcccttgatcccgtcacaacctgtttagtgaggagtttcaagtctgaacatatccaggcctccccacagagatttgcatcctccatttcagctacatgtgcctacccgcagttccctagacagattctcttccgctttgctttgcttacactatttctccctttacggtgtctctttctccaacttctttctgccaaatactacaaaacatagtctcttgtgtcaacgtttctaattgctttcaagatgaactggaacagccaattagtaaatgtctattgaaatgacttatttcaaaagaaacgttattttacttttattattattatttgtgttaatactgcttttcttactgaagagcctgttctgagggatagcccactggtctgtatgtacaatataaggttcacacatgtttcacaataactctcatttctgtggctcctcatggaagatattttccagttttagttgatagagatgaggaagagattaggaaacagatgaggaccatacaaatgttgatgacagggtacagtatggcagccatttgattaatttttcttttgtcatgaagtacgacttacctacaggaaagaacaagtcttaagcacaaactgaatttttaacaccattcagatcaaaataaagaacacaatttgattgcaaaaggtatttctaccttgaaatatctgtcatcccttttctcctttcaaacctccaccccaccccactgccacctctgggcccagtcacttgcctatcagtctctgtcctcttctttccctactgcctggctcctggcaaacactcaaatatttgagtgaacgaaaggaatgcgcgaatatcgttaaatgatggaggcccatggagtgaaagtgaggtccgtagggttgtgcccaaaatgctttgggtaaatgattcaattttgcctacatcaggttccggaattagagagtatctatgagaaatcaggggtaagatttttttttttttctctctctgtagagtttaaagggagattaagagcacagaaagtttgatcctttaacgcgatctccagctcattgaccaacccactcccaggcctgtctggtcctgcttttgccaaactgagccacgaag

SEQ ID NO: 25954 - DNA, 1355 bp, Bovine  19866880675406
  misc_feature (1)..(1): n is a, c, g, or t
naccaagggtaaagttgacctaaaccactatagactatttcatttgaaatgattaggaaagtacagtatatggaacaaaagaaattaaactgaaaaatgtaaactgtaagttaggagacctcataattatagcaacatcaccttttctgcttcctaattcttccttaaaatgtgctttctggtatagactctgaagatataaagatgaataagacccagtccctgccttcaaggaactaataatccagtggaaaacagatgtgcacagcacaccctaattattgagatatattagtgttttcagcaaggtgctaagtagagggagaacaaaataaattttacctaagggaatccaggaagacttcaaagaggaggtgacatttagttgaatcttaaaggatgagtaaactttaacccaaggaagaaggaaagcagggataccttgaaatggggaaatatcaagaaacaaaagcaaattgtatagaaatactcagcagattggagaatatacaagaagaatgactggggaggtaacttagggttaattgtgaaaaatatgaatattcctcttcccttaacccactctcatcacctcctgttaatagtttagactttattttgtgagacattagggaaccaaaaaaccttttagtattttctggtcgggatgttttattgtttggtcatctgcaaccagctcttcacccttcctataaactcccttatcctttttgtgttaccacctattatatgtggtattaataagaatagtttcttccactatcaaatttttcttcaacaaaatctggtgttgtcagggtccaaccacctgatttaaggttgaccaaatgaacactcctctttgaatactttgaattttaatcaagtgacgcaaagatgcgaggacatctggcggtcatatacacaacagcagcagcagctacagttggtgcattgtgggtttttgttgtggtttctgtcccttgacccttgggagctcccctgattctaaccttgagtcattttctgccttgccagtaagagctatgtccaaacaatgtccaaaagcaaattaatcattcaaattcaaggagttatgcaactgggaaattagaactataggttcagaaatttaaatgaaagacttttaagagatagagataggttttattaaaacctgtatttctcttgttttaaagctaaaacttaaagcccaagagatagatcaccctgggagaaactacagaggaagaaaacaagaggatcagaaataatactctgggagatgccaatatgtgaagaagcagacagaggcgatagtaaagaaaagggtatcagagagttaggagaactca

SEQ ID NO: 25955 - DNA, 1626 bp, Bovine  19866880683297
  misc_feature (1)..(1): n is a, c, g, or t
ntaaatacagggttttagctttcttattttctcttcttaacataaaatcaaggaagggaaaaggtgtcccacctgtaccctcttcccctctcaagttccgtttgctcgtgcagttggtggctgttcagaagccgtcctacatataatgtggttagttaagtgttctaatgccccagttatccagttagtcacaggccgtaaggtggggatttggttagtggagtcaaacagagaagcggtaatctgattaaccagttgctttctgagactgttggctaagatggtggctgtggaatggagcagatctgctagatgaggtttagcttcaggcagactgtaggaatccactgctttctccttcacagagaatgccctttgtagatggtcttgaacttgctgtatcttttccagcatgtaacaaggtcagaaaaggccagctggctatggaccagattcccaattagtccatttgtttcttttagggccagtctactttctttttcctcttttacagctaggatgtgagtgtggggcagtagatggaggtgccaaaagacccttgtagtttggcagatgatttcctcaggtctgcaggtacagaaaggactattgcagtaagggggctttgttttaaaggtcatgccactgagtgtcctactatgtagagtggagaagtacctgaccttgcttctctttcatacctcttctgaccctgccctagatacctcctcttcctcttctggtttctccttttctgtctttcatcatggagcagtggtggtgcaacggtattctcttcttttagccaccagccttccagacttgggactctgaggattctccacagaggaagcaattgggtatagagtggtttctgtttgctccttctgttaaccactttagaacaatgcccattgtctttacctgtaggctgggattggtgcgaatgttcctaaaacggaaggcaattggttccctttggttcatctgcgcatctgctgccacctagcggttgcttctcctttggcacactgtgtaaggttgaggggctgtcatggacacttccgtagtgccttttatctctgtctctattttttcctctcccagacctaattgtcctcttttttttacatcttttccttttgttttactcctgggtcagaaaaatctggaaatgaatagttgacgtaggaccttttcagaaacctggaatccactaacaacagccctgtttgttcccagtttctctctccggtggcatgaagtggtatcttactgcagggctgtgagatggcgggatgaaggatactgccaatccaggacagctctgaacaggagaagctttgaagatgagatttccttagctgctcagttggccatctctcaatatttcttgtgtagagggtcaggtattagtaactaaaccttattgagcagttactatgtgtcagatggtgttccaggtatgctacacttattaactcctttaatctcttaatgacccagtgaggtggagtacaccccttctaaggtgaggaatttgtttccaggctgatcccagagtttctttctttcttttttttttttggccacctcacatggcttgcgggatcctagttcccacga

SEQ ID NO: 25956 - DNA, 1563 bp, Bovine  19866880697084
  misc_feature (1)..(1): n is a, c, g, or t
nccctggagaaggaaatggcagcccactccagtattcttgcctggaaaatcccatggcatggaggagcccggtaggctatagtccatggggtcgcaaagagtcggacacgactgagcgacttcacttacttacttacttacttaaatcattatagattacttttagtacaaaatactgtatattgctacaaacttgccttccagaataatctttcatcactgttgctcttacccctaacctttgtgttgttgcttccaagttagaattctttcagtttctccagctgaactaagatctgtcaccttaggacctgtgcacacggtgtttccatgctggtgccattcttttcctcattctaccagctcctccccaccccaacatacatactcgacctgctgatcttggggtttcagatgaaaggttaggtctctgggagatctccctaacttacttccctctagactaggcgcatctactatgggtgtgtgcctccctcacttttcttattataactcgtatcacagtttattctaattgtctacttaagtctttattctttggtagactgtaaacttttagtttggatctgtcttgttcacattttcagtatacagcatataataagtgctcaatgacaatatttatggtacatttctgattttgtcttttctccttggtgtgaggacatttatacccagtgtggtagtgctcactcattagtcatagatcttgtaccatcgggtattatgtgcggtgagggatgtgatgtcagaggcacctctggaatgttgtcactcagtggtggttttcactctgggctttgtagttacagatgcctaaggcattctgatttgataagacatgatatttatattagaagagtttttatttgcacaaggctgattgcttaatagaaaacccacctagagagaatggtgaacttggttaaaatacaggaggtggaaatctctttcttattcagtggtgagccgtgcatttctgagcagccttactgaggcaccttcaggtcataatcactgtaagtaacatcatcttctaaattgaaaggcaaatgtattatatgttggtctgtagttttctttccttagtatttttaaagatattttccttaatatctttaagttttgatatcagggttattctggcttataaaatgaattgggaagtgtgtaaaatactagatgcataatccctcctatagctcttgcttttgacttatttacattttattataaatttgttcatctagtgagttgtgggagtatttttagatcaggttaaaaaaaaagatgagacaggtggaagaggttgtctttgtgccatgttattcctctgagtagatgacacttgcagatgaaggaacaagtacttaaataaacacatggccctctaaagtgttttgcaatgaagcctgcaaaaaagtaattttaaaggtgaaacttaacaagtaaagtcataataaaatatcaaagtatcaaatatcccccaatgagttgggggataattagatcctgttgattcccttttaacaattttagtat

SEQ ID NO: 25957 - DNA, 803 bp, Bovine  19866880753770
  misc_feature (1)..(1): n is a, c, g, or t
ntgaggaagtgcacgcagggctgggtggtgtcccggggcagcacagacaccatgctggccgtggtgcggaagcccccagagtccatacagatgccgctctccttgtccctgaggatgcccatcatcacctctgctgtgataccccctgccaaggaggacacagtgagggccccgagggcagaagggggccctcccgggcctcagagtaagcccccgaggctgtgggagggaagagagctgggccccacgctgtctactcactgaccttgttgttgctgcagcagctcctgcccggcccggaagcgggccttggcagcctccatgcgcacaggctgctggctcagggagaagacctgggcaaagtcaaaggtgccctgcccgtcccaccagccctggacctgggcgtggggccggagctcagggtgttctgccgagatgtccgagccgatgctcagctggttggagatgttgtggaccccctctacagaggagatgaggggtcgctcatatattgttgagcccctgtcctgtgccaggcactcagctaggtgctgagaacacagtggtgaagagaacaagacaacccttgtggaggggacagttaaaccgatcacatgaataaacgagagccggcaactgcagggagcatcatcatgaagggaccccggcttgtgtataagggagaagcctggccaccaggaagtccaggaaggctccccagaggaagatgcaggctgaagcacaaaaggactcaagcaagtgaagggggaggtgaggtactcgagagggctcatctcccgtgt

SEQ ID NO: 25958 - DNA, 1217 bp, Bovine  19866880765757
  misc_feature (1)..(1): n is a, c, g, or t
nccctattttgggtgcagggaggcttcactgaaaatctggtaaaaatgactattgtcttcagtgtgcgaagggaaaggaaattcacttttcaaacggatgcagaggtcgcctttccgtttgggtgcagaacaagatgccctggaaacacgcgattaccaaagggtgttattgtgtggggatcacccagactcctatccttagcatcacgaggatgtgagatttctgctcgctgctgaggcgcggcattaacggcaattagaacatctcgccgctgcggttaggcttgctccggtgtttctggaattagcaaattgctattcaacgtgctctcagaagttggaggttttttactccagtgttcatgttccgtgtgggaaaccaactcgtttctcccggcttgggccgcgtgggataatgggaggagtggagaggagaggggaacagacggactgactgacacagccaaactaatagcgcagctaaatgcgatttggaaggcgaggtctccccgaattagtgcatgaatttcctatcgatccgcccgtggttccattcatctctgacaagtccctccgtacacccgcctggttgctccgacgcctcttctttcactcactacccctccccgtgcggctgcagagaaaaggcccacgcttgatgcctcgttcccctgtgtgtgggttctcctctccaggcggagcccctagtccgcccctcacttaacttccctgcttagacgctgggtgcagatgctccatacccccatcgataagaggggccaagaccctaagggaggcctgggggagggaggcaggacgggaggggccacattcagagccccaacttctgaggggatccagggattgcgctccgcccagcgccccaacaggcccttaggtggcaacctgctcactctctctctctccctccctttccgcgatcccggagaggcgaggcgaggcgaggacgcggtggccccgcaggagccctatgtaaatcctggtgttgggtgggtagggagggggggtggagaagaaggggaaataaacctctttggctggagtagggtccgggtgagcagatttccttatccgggaatcgcaggcggggcggccattggctccgaggatcacgtgggcccctaactttgttcacttgacagtaagtaggagggctttcggaaacaggaaaacgagtcaggggtcggaataaattt

SEQ ID NO: 25959 - DNA, 1728 bp, Bovine  19866880780857
  misc_feature (1)..(1): n is a, c, g, or t
ntgtgcagctgccctgtggggtccgggagaagctaagacacggggtgtctggggaggtggtcccagggccagaatagtccttcccaacctgccttgtctcctcccttctagggatggtaggggagagtttgcttctgccaagcccggggctctatccaccacccaccatcccacccctcacaggcttcctcaaggagctggagcagggaatgagcaggcaccgggagctcaggcagcagacagccctgctggagcaccagctgagggtggagactcagcccaccctcacagacctgcccccgctgccgggggcgcccatggctggggacagcagcccttccgtcacccccacacaagagaaagagacaaccccggagcccgcttccttgccagaggcctcctctaccaccaagagactgtgccctctggctcccaggggccagcaaagcactatgcaggcaaggaagggggccagagcggccacagcccccaaggcctctctggctggggcccccagcacaaccaaaactgtgaccaaaaaaatcaagaagtgaaatgcagcctactgctatcagcgaagccccaggcacacggaggaacaaggagtgggcctcccctcggcctgagagccctggcctgtggcaggagcctgtccccaataaagcatctctaggccctgcgtgtgtcttctgcatcacttggggcatctcaggggaagctgtcagtaaaaagcacccagaaacaatagcaggaatacagagcctgattctaaagaacaggatctttcaggaactgcccaagggactggtgccccacctcagggcccccacctggcttctgagctggcaggaggtgggcactgcctggtggagatgccatctcacagtagacacatcacataccaccggccccccaccagggactgcccttccaaggttcaagccaagaaccaaaaacgtgtggttgtaattctccccatgagcagccacctgctgtaccagccatgcccctccatgttcccacacccacatgttgggggccccttctcttcccaggttcctccaccacctaagtcagaagaatgtgctgcccagcaaggctcccagaggccctgcagccactgcagggctgccctttgtcctctcttggccctcccacccccactggagctggacactgaacaagaaaataaaacacatttattagagcaaaggccaacctggccactcagaacaaggctggggtgggggatgaggtgaggggatttctctagcctctaccccaggggtcctgtgcccactgcagccccctgcaccccaggccaagtcaggaggggtcaggctcaggcatatgcctgggtctccttctccacaaaggcctggaagaggccgcccagctcctgggcgggtggagcacactccctggtcagcagccgccgcacagccaccaggccttcctgctccaggtcccgctgcttctgccgaagctgcttcccccgagcctgcccgggaaagggggcgatgaatccccgggacaggcttccctctggattacggagtaggggcagatggctgccatctcacataagcaggagaaaggatatacacccaacattttccagggttgactttgaagggagagattcctctccttagctctagagtctcctttgctcccagttcccctcatatttccagagtcccagttggggtgggggaagtgcgtcat

SEQ ID NO: 25960 - DNA, 1336 bp, Bovine  19866880829435
  misc_feature (1)..(1): n is a, c, g, or t
nacctacagctagatgggccttgatttcaccagataagcaatgaaatgggcccgataccccctgagagaagtcccttagccacactgcttaccaaggtgaccaaaatctgctgagaaaacctatcaaacccacttcttgtctcctgcagccaaacagcacctccaacatcccctattggccccgtgcagggtggagaaggccagtgaggtgctcccgagggcaggagcaagagcttagcaggcctgaacctagcctgccgtggtcacatgaccacagggttctccccaaagcccagtgcctgtgagcaaagagcctgtgtaacagctggtgactggatgagggacattagtgggcaagggtagcatgcctcagtgagctgatggcggccgcaaggggtaggtcagaaggccaggggagccagcagccaaacaggtggggcaggaggtagccgacattctctcagagagaaaagaccccagagccgcaggcagctccccagccgaggcttcacagtgcctgagggtgggacacgcccgctcaggccccaaagcccttctattccaaggacagttgtacctggacattccacaccaatgtctttcctttttcaattcctagacttccaatccccccaaaaggaggtgaacaggcaaagattggggggaagcgatgggctgacattaattgataggagcggcttcgagcagttcatgcggccttatctctctctcctctggatagcgtgtgtccgccggagtccgcggggtcggtgattaataggggccatcactcactgtccaggacggctgaaaggcagcagggagggggcggccctccccagaactgagataacaagcagcaggaataatgagtggtgtcactccacttttcattttgatggaaagtcattacgggagtcaacgccagcgacaaagagccatgaatcaactgctctgctatgaaattaaaatcgaattgctggccacccccaacccctaccttcctgggaaatggggatgggtaggtggccggggagaggggtgctggcctagtgtgggctgtacccaatcacagagcaggcagttatgggtgggaagtgggcaggcagctagcaaaggtgacagctcctgtctccaccttgttgaccagacccttccttcccaaactgcattttccctctgcctggaggtaagctgtgattaaaaggaaaatacagctttgctggctccaacgaggctgccacttgactgctccccttgggcttctggcctgagtggggcagtctgggccggccgtggagagaaagggccccggctgacagctaccccagagccc

SEQ ID NO: 25961 - DNA, 2660 bp, Bovine  19866880838849
  misc_feature (1)..(1): n is a, c, g, or t
nccccacacccccagatctatcaagaatggtctagggtgtgcctggtgatgggagaagcaggtccccagagaaaagacaagtggaagggcagtggaggaggggagacatttatttgacttcaaggaaagctacaaacaaataccaaaagcgaatcactgagacaggcccggcaaagacagatttcacacgtagcacagcatccactcgctcactacaaatggtcttggaatcgaaatgggtagggaagaggggataggtctgacccagactatccccatatttacaagctttgggccctctataccagacccatggattcacagagaaatacacaagacattttacactgaggattatttttgttttctgaggctcccagaccaggccttgtggggcctacccaggcggcaggaacttaaatctcactatgtacctttcctcttttcaacatcacccctttggtcccccttagctccctcccacctcaggaccaagcctcaggaaacttgggcctgggagtggggagagaggaggaagaggaaggaggaaagagacacagtcatggactcccggtctccgaggccagctcagctgggccccgcgctgcggcactatcccacctcaactgctgccccttttagagaagtttccagctgaaactcaaaatacagcgatcatccttttataaataagttataacacagatggggaggggaaagttcacattaaacatgcgagtttctttttttcctgggggaaggagtgcaaccacagacacgaacattcagaaacactggcggattgggggtgaacgcaggggagtggggagcatggagggaaaataataattatcattattattacaataataacaagattaaccagtccaggagagagggagccacaggaagacctaagaccaaacgaaaaatcgtaacacaaggcccgggctgaggcaggctcgtgggaaccggttcccagcgggcggcggcagcgcgaggaggcttggaggggccagggctgggggcggcatgaactcttgggccgcccgggctcctcccggcgggctcagggctggaaggcgctgccggctgtagccaggctcatacttttcagtttgttgtctttcttccacttcatgcgccggttctggaaccagatcttgatctggcgctcggacaggcagagcgcgtgggcgatctcgatgcgccgccgccgcgtcaggtagcggttgaagtggaactccttttccagctccagggtctggtagcgggtgtacgcggttcgggcccttttcccgtccggcccggtcatgtctggagcagacagagcagagcggcgaggccgcgttattctggttaagggagggggcactgggtgggaggggggcgtggagcaggacccaggcgtccccggcacccagctcaccgcagctccgatcctccccactccagatgcccgcatccgagcctgtttcctgatgcccccttctcctacagcccccacttctgcccgcagcgaatgcgcccggctttgtctcttgctccctccctgtgcctcacccttcgctgggctcaggcggccgctcaccccgggagggaggagaacggttgcacttttgccctggaaagctcgttttactgctcgcccctcctctgctaaaagcagtctcaaaatttcgggggcaagcaggacccttccccatgttacataaaccccatccttcatcctaaagctagtacagctgggcaaataaaacctaaggcgaatctgtgaacaaattattaaaaatactcctcttcaaccccccagctaagccctcttttggctctgtccctccgagctttttctccccctccgaaaaagagaaatctatatttgaggaaaagccaagctctcctcgccgactccccccacccacaaacgtggagaaggaaaagccgagaagacaaaaaggggagcgagagcgagaattaccatggcttgatgtgaagcttcctcatccaggggaatatctgcggagtctgcccctcgggcgcggctgtggaggtggccatgggctctggctgcgcccgagctaggcttgggctgcttagctggctcgccgcttcctcaggctccgaggacgcgctggcctcgtctatttcggtgaaattggcgctggagctggccggggtcgcctggtcggagggggacgaagcagagggcttggcgcccgtggctgtcgccgttggtgcagggcaaggactcgggcgaggacagggagcagctcgacgccgcttgcctgaagcggggctcctgggcgggcgcagggaaggcgcgcgagctctcgcccaccgccccaaagtggctggaggaggccgagggagcggttgacgctgaggtccatcccattgtaattgtagccgtaagagccggtgtgcatggcagcgggatccctgtaagagccgctcagagagctgccactgccataatttagcaactgatagtccgggccatttggataacgccccgagaaggagtttacaaagtacgagctcatttgggtgattttggagggcttgatttgtggatcgtggtcgttataaccctgtgcttcacgatttatgatgtattaatgaattatagcgatgcactgtacttcgttttgctatgtatg

SEQ ID NO: 25962 - DNA, 1291 bp, Bovine  19866880864035
  misc_feature (1)..(1): n is a, c, g, or t
ntgaaggagtcttaaacacgaagtcagttatttggactctcttaatctggttggagaggctcttggcctggatgagcagattattgggggaacctgaaataggcacagcctttaccatcagcaacaatcaaaagtgtttatggaggcttgcacaccacaataaaaggatttatgctgctaatctccatcaacaaggaaaaaaaaagccctaccaaacctgccataaaaagaacagcaaattctataaacaaaaagcagtatggccaccaaccacgggcacaccgcacagcttgactctgctccagtggtttcctatcgctgtttatggtttcaagactatcacggccctcctcatgctcctcccgtcacagggccctgagtccctgtgtggtgctgcaaataccctgtcagtaggtgtcaggggatgtcagggggaaaaccagcgggcgcctatcataagccttaaaagagattaaatgcccctaccccatgattgctacattttaatttctctcctccctgctggttcctatttgtatacgctcttccatggctcccctggagtagcacagacatgacctggaatgaccatcctgtcttgggatgagaattcaatttctaggctcagtgaatcctaggctgttccagcaaaaggaaatcaccattctctagggcacagattcttaaactggagtctgtgaacccctggcatgtctggatggacgtgaagggatctttgacttccttgaaactggtgtaaaatctgtgtgcatgtgtacatgtgtcttgtcccttgggtgaggtcccggacctttcatcacgttctcaaagggttatgaaccctctgtttcatcagtcagcactttagcgggaacatgcatgatctttttggcctggatcggcactttggcccagtgtggccatcttcccgctacttccctcttttaaaacacaaaaggaaaggaaatcaagaatctcgccatgctgggttttcaaggcttcagccttccagttgccaagtctgttcctgcttaaaaggctgaccacgcttgcttatcctttctaaggccccatctctttaatgtgacttaaaagttgtggtgtcttctcgtagcttctgttcaaatccacatgatggcttttggagcaagctgcttgacaccctcttttcccctgagaatgttcctaatggaaacgttctcttttcacattgaattgagcttcaataagcctctgggaacaagattcccagaaaatgtctcatacttttgttcttttaaccatcaaagtt

SEQ ID NO: 25963 - DNA, 1274 bp, Bovine  19866880868127
  misc_feature (1)..(1): n is a, c, g, or t
nagacctcttgtccccgtccttgcagttgggacacgtgcaggcaatgcggcgccgcttttccccaggctgggtctctccagccagggcctgttccatctgcagctggatctgggtggggctcagcccactgatggtcaggttgtttccagatacattctgcacagtcagctgctgctgtccgccagtgttggtgacgggcacgccctggacctggacaccgttgatgttgatggtctgcatggcctgggccgccgctgccagctgtgctgcgttcaggctgatgatgctcccagcaggagcgatctttggcaggggtcgttcttttcggagaattgcagccgagtgctttttgctggtcccactcagatgggcagcacgggacgcggggctgctacaagtggtggtggaggcagtcgcagctgttgctgaggggctgtcctggacaaggaccgtctgtacctcaccagaaggcgtacggatatagacctgagtaggtgacggctcagcagcctggatctggaagttctgggagggcttctgggggatggtggggagtgtggcggacgctgcctgtaccacccgcagggcctgctgtggaatctgcaccacctgctgctgctcggccttggggggcaccacctggacctgctggaccacggctggctggcccccgccggggctctgaacaatgagcaggttgtttcctgcttggataatgttgtctgcggtggtctcgatcagcaccgtctccacctgctcggccacagccacagggggctgggcggcaggaagactcttcttcctggctttcttgttagtcttagacagtggggcaggggggctctccgtgaggagctgagtggcggccccggggtcgctggtgttcacgaggttgttgacaggcagagtaagggtcacattgccaccgccacctgtcagcttcaccacattggccccgctctgtgccggagtggtggtcgtacttgacttctggacaggggctggcttgatggggacgggcttgtgactggacggggacggggtgatgatggcttggttggtgccagggatgatctggatctggttggtcagactgggctgcacctggatggtctgaggactgctggcctggatctgagggaccgcctggtactggatactggtgttcgatcgggtccctttgttgaccacggtgggattctggatggcaaacaccagctgccccccagggtaggacgtgctcagctgtgacccctgaatctgaagtatgttt

SEQ ID NO: 25964 - DNA, 1385 bp, Bovine  19866880870116
  misc_feature (1)..(1): n is a, c, g, or t
nctggatcctctggaggggtagtgtgttaggtgtccgactctttgctatccatgaattgtagcctaccaggcttctctgcccatggaattttcccccataaccaagttatgatttctgccctttctgagccatttctcaggagatactgtactctaactttctgaacacagggctggatcctctgaaggggtagtgtgttaggtgtccgactctttgctatccatgaattgtagcctaccaggcttctctgcccatggaatttttcaggaaagaatcctggaatgggttgccattcctttctccaggggatcttcccaacccagggattgaactgggtctcgtgcattgcaggcagattctttaccagctgagccaccagggaagctggagggatagggatgatccctaatccatcgagactcagagcagctgaggccggtctctttcaatcattctgtcagtgaacccatgtctctacatatgtccccatatgtccccaacatacccaccccaggaatccctgtcaatcactaagaagcttttcccagaggcagggacattgcccccatgactttcagagttttcttctatcctcaggtttccctggatgagggctcattgcacccaggagaataagatgtgtattttcaatgccttaaaaatcaggtgtctggacaaagaagcagaagcattatatgacatgacgttatatgtggaatctaaaaagacttgatgcaaacgaacttatttacaaaacagaaacagtctcacagacttcgagaatgaacttaaaaggttgccagagagaaggatgaggggaagggatagttagggagtttgggatggacaggtacagactgacactgctacatttaaaatcaataaccatcaaggacctactgtgtagtacagggaactccgctcaatgttttgtggaagcctggatgggagggagtttgggtgagaatggacacatgtatatgtatggctgagtcccttttctgctcatctgaaaccctcacatcctggttaatcgactatgctccaatacaaaataaaaagtttaattaaaaagtcagatgttgggataaagagaaattgtgggcctggtcaaaaggaatcagatctctcgtgccatttctttttctttcatttgatgtatgtctgtttttagagtggatgtaggtgagggtgataagggggcaccaaatacataagctataaagtggatttattatttttaaatttttttattgaggcataggtgatgtgtaatgttacagaagtttcgggtgtacaacatagtgattcacaactttgaaagattatactccatttatacttatgataaaacattggctgtattccctgtgctgtacaatat

SEQ ID NO: 25965 - DNA, 1878 bp, Bovine  19866880879791
  misc_feature (1)..(1): n is a, c, g, or t
ncaccccagggaggttactcaggacatttaccaaaacaaacagacctgtacaaagggggcctttgttagctggcctcacccaggccagaggcaactctgaagaagagggagggagcccagggactggagggagggaaggtgggctcaggtgtatggccttcccccaagcctcttcccccatcccgccccaccacatggaactttctagggtccccacaatcattcagtccataaagcctcccatggaggagctgactttccgccgactgcagctctgcccagagttagcacctgatactcagagggtttataatcagccagctctgtggtgagtaccccacgaagttcctcctgtaagcctctcatcataggtgctgtcattaccaccgttttctagttttccagctgcattagctgaggctcaagagatcaagtcaccagacctgggtcaggggttcctagtggcagagctcgggctgaggccagatctgtgcatatggctgctgcaccacacagcccccttccccctgggtttttatctgcttagggaagggaagcctggcatgctgcagtccatggggttgcaaaaaagtcggacaggacagagcaaatgaacaacaacaggggaagggaaactgaggctcagaacaaggaaaggagtacagtcaccttctgcagtgggaaggtggggagagagggtcatgcctgggccttgcggtcctgggaggcgagcatcctctgagggggccgcccagaatctggaaccagtgaggaaaagccaaccagcttcaagggtgagaccccaaaccatagggacctcccgcttcagccatcctgatgttccctgaggcaaggggtggggaggggtgagaggctgggccccaggccactgacctgtgcttctgtctcatacgggcaaccaccaggccactatcttctctcttaggtgagagggtctgtgggttcctcaaccctgtgcatgccactccactccacggccccaaagtgatggccacagaatctcccacgaaaactccacacatatccctaagttaagggatggacggacgggctgggggcaggcaataagagccaaaggagacctggctgcccaggaagtcagtgcccaggcagccgcaagtgttcaccaggccagaggaggaggaagcaagagtgcaaatatgaaaatatgagcaggagcgggagaggccacggttattgaccacagtttcactgggacgggacccaagaggggaaaggggggcaggaggggccaactagaactggcctgtgctgcctagaaggggccaaccctgggcatcgggctccccctgctggacacccaacctccccaagtggagaagcttaaggtacgaggagtcgcttaaattcttcaactcccctcaaacatgggggaggggcgggggacgagaccaggctagattgaatatttacatcatgcatggctgatgaacttttattttagacttggcacagggactgtcagacagaggaaaggaaaggaacagctgagaccaggctcaaagcaggggatatacacagaccccataacataacaggacaaggtagagaagggcactccagcaccctctcctgcaagtggccacaaggctagcactgtgccttcctgcaccctggcttaaggaagcccgtgggggttggggggggtgggtcaacacccagagggccgctcttggaggaggcagtcagtaacagacgccaaagcacacacccatacagtggaatgaagcggtttacagagttgcaagctcaatggccaatgtatgcaaacagtcagttctctgatcctggcttagtcacagcaaacatttgcccagcctggctcctctccgcagc

SEQ ID NO: 25966 - DNA, 1918 bp, Bovine  19866880913868
  misc_feature (1)..(1): n is a, c, g, or t
nctaggaacctgatgccagaacacacccccttccctggcactcctcctcaggccccctccctgtgttggcacccaggatcttctttgtcaggagtcccagccctgtgtccagctctatgtgcttagagcaagagccccaccatctctgtgagcctgaggctctgggggtagggcccaggagacctgatcagcctagaggcagaggctgtcgccccaactagacgggagctcccagagcaggaaaagaggtcacactttctcctccttgtgactgctgatgccaccgagacacaagagcatgggccctccccatgcaggccaggggtccctcaccgtgagagcagcggtccagcccatcactgtccctcagccaggaagacaccttctcccgaggtccaacccctggcagagccgaggcactacccgataccgcaggctgggcaccggtaacctgtggggcgagtcaaaggtcaagaaggcagctcctctttgaatctcaatcctcacgtgagcgggtcctgccctggggcccatcttaccttccagtgggcggtgctgggcagcaagcttcggggcacatccaggtgctgggctgagcggtgggcacgcagctgggccacccagctctggaacaggtcctgggacttgatctgcagaggtgatggagaacgagagggacgcatgaagggaaggattgctttctaggggcaagaagttggggttctggtccccaggcaggcaggatctctccctacagcacacagatggtgcaaaggcccctctctgtgcctgatcacataagaaccaacagggccagtttgccgttggctcttgtacatggtgggaactcccctctggtcaaactcagacggcccctcggcccctgcccctctctcctgcgtgacccagtgcctctgccagggggcaagccaccccctgcctcccacggacgtcacccttgaggtggtagatgttgtcttcagtgtcaaggtcaatgcgctgggcctttttgttgatggacatgaccgacagtcggacatcaatggagccatgggagcttccccttggtgatctgggatggagagaccaaagagggaaagggacgtgagttgaggccaccgggccaactcaaggccaccatccccttgaggtcatgctaggttcgaaggtcaggcagcaggttcaccctcaggctcaagtgacagtgtcagcaggacatgtcagtcgtcctcccctgcactggccagcctgctacatcatgtcacaaccagagctctagggagtcacagggcaaggaacacttcctaccctcgggagtctgcaggcagggctgaggacgatgaacctcctgcagagcccaggtgtctaggcctttagtttctcgttcttgcctgagcacggtacgaggacaaggatgataaagcccctcggtcttgggcactaatctgagcctggcactgtcccaagagccctcacccaacaaagactctacaagtgggtgatcaccctctctccaccttaggggtgaggagttgagacccagggaagtaacctgcccaagaccccacacccagaaaacggcacacctgggatttgggccttgctctaggggattccagaagccccctgcctgcccagggccccctcctctcacacccacagccgaggccccaactcacatcttgccgagttgtcgcgtagtgaagaatcccatcctcgagcacgaagtatctctgtgaggatgtccagagggaacaggaccggggtggggggcacggagaggaaagggtgtggggagagcaaccacacggaagtctctcctcacacacagacagcctgcgctgcccagcggccccacatcccttccggcccctgcatctggcccctccctctgccctgccaccctaccttgtgccag

SEQ ID NO: 25967 - DNA, 1514 bp, Bovine  19866880962666
  misc_feature (1)..(1): n is a, c, g, or t
ntttctttggaggaggagacacttaagaccacaggtgcagtgttgctcagttcaatatctttgtccataaagcaaaagcagtatgaaatgatcccttgcttaaaactagccaaggttaagagagcctgtagataggttgatattcctttgtgaggcaatgcatttctaaagtgccaaaaataagggaatagtcttagaatataatattctgtgcaccactgaaactggtgtttttatacatattgatggtattcattttactgcaaaataagtatttattcttcagttttatttgtacttcccccaggcccattagtatagattaaattttatattaaattgctcaaataatcagcacaatatatgtaaatcaagagctttagcttcattggtactatttgtgtggatatatgtgaccatattcaacatagtcatttttttctttgcaaaaacaaggtttctttcctttttaaagctgtaatcctatttctaaaagacgaattgtttaccaaactacacacttaacgaactcaaaattataaaagaaatgactttgttcttgccactgggtttgccatttaaagaaccgaataaagaacttctgttttggggtgaatcacctcgtgatgtgcttctgtatctccttaaggtcctatcttcatcttcactggttgggaggagcaggggagaagatggcttactcaagcatttttccccagagaattccatagcaatatttttctaatgggagagtcctgtagttaagttgggcaaattagttataatctttgtacctgattacctaaagactggaaggtaatagtgtgtgacaagttacattttccattacagcccaggtacagtcaattcacagagtagaaatattctggtggcaatgtcccttcaagggattagagctatcactgaaataaaacctcatataaacatcaaatatcataaagccaagatttgatctttgatttttacagaagttcctccacaaaacatcctatccttccttctacagtacaggcccaagtcttggcatgttcaaccgactaggaaatccagtcccaaccatatttatccagtgtgatccctgagaataattagataggcctactagggaagatcctatcacaactgcaattttcttttgcgctacaggttaccaggtggcattcgtattaacaaaggttcaaaccacaccatcaaatggttcaaaccatataacctcttgtcttaggagttaagctagcttcctaggcttcccttgcagtggttaactctactgagaagctttctatcagcaataatagcttcaaggtaggaaataaaaaatggaaagtgtttaaattgttaatgggtttcatgttcttgtcactgttgagggtttgttcccttttataaactcatagtttttggttgacattgcttttatgcgagccatcagccagttggtgatggtgttgctgtgttagaccattactgccggcatagtatttgcagtaaag

SEQ ID NO: 25968 - DNA, 1888 bp, Bovine  19866880987078
  misc_feature (1)..(1): n is a, c, g, or t
ncccccgaacctactataggcaacaccccacaaaggctcccactctccggtttctctgtacttggataggagacttggagtctcccaggactgccttagggctgccccagccaggcaactggtctcctatttcctagaaattctttgtgtctgtgtttcttcccagggagcgggggtcacgacgccaaggagaaagaatatgaggtggtggatcctcttttttttcccaggctgtcctcatctctcccgcctcaagtctggttgccagtggaggggagagagggctggggtcggggggaagtggcaacagaatcctgtgccctccaggcctgtattgcagcttctccctccacggttcctccacagaaggagcgcaggtcatatccagcaagggcctttatcaccagcctggccctgccgctgcctgatagagcccagccctccccccacagatctcattaaggggtcgccgcttatgcttcccagccgccccccatccatctttggccacggttgacagactgggccccggggctgatgtccggcaggtgacagggttaatggcagaagagggcagagggcagaggccagccagctcacaggggtgggagggcagcctggggaggccctgggtccattccagctgggcagcccctcaaattacagcacctgggggagggatgagtcctggaccatccatccccggggaagcaaggtggacggtgtcgaccatctagggagcagatggtgggaggagagccccttagcttgggaagaggaggagaaagaagcttattaatagaaaggggagacgggctagcaggagaggaaagagaatctctatctatgtgggcccagtgagaaaattgcttcctggatcccaggtggctccttggtgagaaacgcttatcttgctgacgtgaatggagtcaggtgagtgtttggagtggctgcctgtgacccatcttgctttccctctcagccgcctagtactgtggcccagcgctgtggttaggagcaggcttctagagtcaaacagagtgagtccaaaccctgtttagatcctccctctgggaggccaggtaagttacttaacctctctgagcctgatttcctcctgctgtgtaatgtatccagctcctgtgaggatgaaataacgtgatgcatggaaaacacagaacctggtccaccctgagtgttcaaaaaaattttagttgcccttggtagtaagtaagagtattgttagagtattgctatcacttctgtggcctcctccatccccaggcttttcccaggccttctgcctttgggagctcccctcgcgtgacctcctgcatgcccaggatcacctcctggcctgctctactcactcccagggagctcctgaatgctgctttgggggcagctgccccgctcacagctcccagaggagaggccctgcaggggcaagggttcgtccctccaggcctttgaagcctggggaggggaggggttgccctgtgctcctgacctggggggccaggatcagcccccccatacctcccaccgtgggaggagagtcaaggaacaatgggccgtggagcattggctccaacgccggccagctggcattcaggcgaggggtggggtgggtgtgggagcttgccctccccacagcaagcggaaagtccttcaggagagctggtggtggctggggtctccccacgggggccccggatgtcaagggtatggtagagagaggaagacaggggttatcgcagcactatgtcctgggttgaaattgtctagagtcctcccagagggggtgctgcaagcccctcctcagttccaggggccccctcaagtacacccagatctcagggtggcaaaggcaccaaccagcacgtct

SEQ ID NO: 25969 - DNA, 758 bp, Bovine  19866881009112
  misc_feature (1)..(1): n is a, c, g, or t
ntattagaaaaatgaaagatcagtcctaaaatttttcagcttggttgccttccagctctagccagatcagtatcctaaacgtacagttatgcaaggacacagtctgatccatttggccataacttcagtgatgagaagcaatagccatggtgcgtgtcgtgtttgggtcatgcttttgcgaaaactacaaagagatctagaagaatatagaaacctgaccaggtgcgacagcataaaatgaaaaccaaggttacatgctaaaccatgcataaaaatgagagcatgttgctacctaatcacaattccttcccctcttcctttgtaaactgccctcagtctgagaatgtcaggctatagcctatggagagatacctacaaacaagagcataaccccataatcaggaatgaaaacttgctaacaagtaataaaatttagatttatagacttaggaagacatagtttctactgtattgaaggaaaaattttttagtatgaagcattcaatacagtaactacaaaagccagccaactatgaagctcaaaatctgattgctctcattgtgcaaaatatacaatggatatataattacaaagaacccccgtgtatatatgggacttcgcaggtggctcaggggtaaagactctgcctgccaaggcaggagatgctggttcagtccctgcatgggggaagatcttttgcagaagcaaatggcaacccactccagtattcttgcctggaaatctcatgacagaggag

SEQ ID NO: 25970 - DNA, 2205 bp, Bovine  19866881037341
  misc_feature (1)..(1): n is a, c, g, or t
ncctgggcaaagtggggttgcccgactagcctgtgccggccgccgctggggccgcccccagcgcccgtggtgggtctcccaatggaagcggcggcccccgggggagggggtctgattggaaagcggagttgggaagtttcccagcgtgagttgagcgctgacggatttgtgatcggccataaaaccggcgcgttcagattcgtaaatcaatctcgcctttctcacagtataaacgttcgctttatcggcagcaagaaagctctctgcttgcgccccggcgcttgtttatttgaacatggacattcccaggatccgaaaagagtgtgggcatttgaacagaacctgcctggcgtgcctccgtgttaccggcttttctttagctcgttcttaaaatgaatttaccagttttgagattggtgtcttaccatgctcccgcatattctctcctctcttctctgctacccccgcccccgccctctattttccttttagactttagtggcctgcttttcttggggggagggcagttttaatggatttctctggccaggaccttgcagggagttgccctcgctggagccgggcgcgcggctgaattcaataccagtctgggttttgtatctgcacaatcaaagccgatcacccccctacagagcccgggcccgccggcgccccacccgagcgttaagagcggtattcttaggggaccaggccggcccagtgctctgcccgggggcccgcgccgccgctcccgctggacccagacaccacctgggttggtggtttcttcaggggtggtgagggcacctgggtcttcaaccttctccccctcgagtcgcttttggttgagacccctccagataaaccgctggcggctcctcggccccctacccccgccccaaaccacatctgttcttccttgtccgccggcccctgcggctgccccagagctgctgaagataaggctggaagtgtgggctggacgaggggctccttcaggaatgtcttttctgcttccctttgcaaccccatcccacaccgtggccaaagactccgattcgattctgggactctggtcgtatctggtctgctccttctggcgccaagctgtatgtgaaggtttggagggatgttttgttttgtttatatctgagatgaagaaatctgtgtgtgtttctctctctaggcagaggggatggatttcttctatcagcactggtgtttaacccctcaatatgaaacccctcatctttttcctattgatctgtctccattgtgtgctgattggaagctggggggccgggtactaacacctggaaaataggaactgggctgtcaggccaacttcaaagcctctttcttccctctgctcccctccagttcaaacctctagctgtcttcactggtgtgttgtgggtggggagtgactgaggcagggtgtgacataagtatccagagattaagcgcccacttcttttgtgtaggaatcttcttactccaggtctttgtctctagagcgtattctcaatagaatttggttccctctaacagtaacaacacaaggaaaaaaagtcccccttgtggttactctcaactctggaagctcctaagtcatctcttcaccctgtcccctttctgccctttcaaaaggtaccacaaaagatttttttaaaaagagaatcaaagccagaaacccccttctttatacacatataatctggatctatgaaatgtttcttttgaagctggtccctttagaaattttgttggtcatttaaggaagagggggagtatgccccactaaaatatcctaggagtaagggtaaaatagagttggggagaatgttaatgttaaaaggatgtagagagaggaactggatgctgagaaatccaggggcttggagaaggccttctgtggcccatcccaccccaccccccgagacgcccctgcagactatttctgcaccttcacaaactaagcagaagcaggaggagaagggagagaggagaggtgggctgtgggtaagtgtgtgtctgggggggatgctggttaggaagtgttagaaacatgctgttagaaacagcagatacagatatgaatgtgggaaagagaactggctactattccattggtgggttggggggaacctatttcgcaggaaaatttctcctcctgaaggggaaggtcatagtggtcctttgagc

SEQ ID NO: 25971 - DNA, 1335 bp, Bovine  19866881037477
  misc_feature (1)..(1): n is a, c, g, or t
ngtgctctcttacctcttacagtgtcactcctgtgacctctaccatttgaaatgctttgattccaccttgcccaagggacctgtgagcaacggaaaaagggatgaaggatgcctatgtctgacctcacctttacattgtccaatgactgaaggtataaatcagctttccccttgaagactcgagtgtcagaagctcatgtgaaatgctggaaatattaaatgatgtccctgagggttttaccgttactcagttttctcctgtaactgggagagctgttcacatgaaggatactctcccccaggacctcaatttgtatacaaaatgaagtatgaaactccaacaacttcttgccactttggaaagaaaataaacaattagtggaggttgcccttagcctactggtcctgcttatatttcaatgatctctgtctattcccagagaacagttcacaccaacaaaggtgtgataccctcattataaatccttgtttccagggtaataaatcagtgatggttaaaaaaatctctgcagacaattcaatgcatttttgtaatgaggaaaaagaaaacctcttcgctttgtcctagttagcacaggaagtgtactaattataattagaatagaggatcaactgccccagggccaagtttccagtgctcgctcatcactgtgatcttgggctgtatctaaaactcccttccaagattctttctgcaaaattttaaaatctatggactgttaaatctcccaacacactttgattcattaatcctcactgctgctgctgctaagttgcttcagtcgtgtccgactctgtgcgaccccatagacggcagcccaccaggctcccccatccctggaattctccaggcaagaacactggagtgggttgccatttccttctccaatgcatgaaagtgaaaagggaaagtgaagttgctcagttgtgtccgactcctagtgaccccatggactgcgggcctaccaggtcctctgtccgtgggattttccaggcaagagtactgaagtggggtgccattgccttctccattaatcctcactactatctctataataggcatgtgtgttagtcactcagtcgtgtccaactctttgtgaccccatgtactctagccaccaggcttctttgtccatggaattttccaggcgagaatactggagtgggttgccatttccttctccagggatcttcctgacccagggatcaaatccaggtctcccgcatggcaggcagactctgtactctgagccaccagggaagcccataatataataggcataattatctgtaataagaaaaattatcattttt

SEQ ID NO: 25972 - DNA, 4143 bp, Bovine  19866881051752
  misc_feature (1)..(1): n is a, c, g, or t
nctgttggaaatggattctcattggctggggtgattggtaagttttctaattctggttcttccactaggttatacagaggcttaacctctttgtttaaaagcagcaacaatgagaaaaaaaaaaaaaagctggtctgacataattatgaaccctctgggctaggcttgtaaagacatggtctctttgtcaaggagacccaagtagagttagttcatcattggagcatcacttcacagctctgcagggagaactgatgccaggagaaagagtttggcctcactatttggcttcttatagaccgataggctcttttctctcagattctattaagtttgggcctctgcaggcctgtcagaggagagaagaagcgttaagaagattctggcaaatgtctgggtaaaggagcctcctggcataacagcagagaggacaattcattttgatatctttggccttgaaatttctagttcttctgttggtgaatagtagcgttttggagaagttgcacagtctcttgtagcctaaacagttgctttcgctataggtatatgatcattcacaagcttgctttacgcaaggattgcccaaccaaggcctttttgaaaacatttaagcttgttgcatctaaccagtagaccctagtgttggcttgggtttagcaatcttatagaccttgctcacccacatttctatgatgaaatgtaacatattcttctaagatgtaatgttacctcctttgttttctgtcaacacacaaattggaagctttatgtcgagagattgaaaaatttaggaattattttgcaggagatagacaatggccacagaatgaaaggtgcagagaaaaactgctttaaagggtgcatagagtatcagaaaatgtagagatatgagtacttctgagtttaaatgattacattgtccaatctgaagcttcgtgagctgcagacttagagcaaaatctattcggaggcactctagtattttcttattagtgtattgggtgttatatctggagtttccctttgagcagcttaactggatttgtgaatgtcttcccagcaagttctaaaccagctgggctggaggccaagatgggctaagaagtggatatcattatggaatgcatttgttgatgcttttttgtttttgctttgcttttgttttgaatccacatggatctcctcaagtgacttccttctattgaaggaaggaaaaagaactttttctttattcctttctacacagagtcagcacttagatctttgtatttctgaaacatagttcagagtcacttttctctgttaagaactacttcttcggttatcagatctttccttggctagcagcattctcctggagacctcagggcggggagggtctcactttgctgtcagtttgccagttgtctgttgaagctggttggaaagatgaatgaagaaggtgaaaatgtggggcagtgctaattcaagggcactatctgtttgagtaggaaagaggttagagattgcccttgtgaagatgctcccactggtggatttgttccagttgacaggattccgaaatggaaaacgggtttttgtattgcctcactcaaggtgagaagcgagcccagaagcaagctgaatcagctctggcagcttggcgacgctgccacttccactgctcgtctggcttacactctcctgggtattctgaggcccccactggcctggggggttgcttctcatcagcttggccttcaagctggcgtgctcttgggagatgagtgctgctcaggagcagaggcgtacaaagaacaaagtgctcagttttgctgcttctcagtttaccctctgtgagcaactccaagcaacgttgagacgtcagagctgtttggcacaggaagaaggtgcttgcagacccaacggaatcctccctttgcccatctcattcccctgagctacagtttgtttccgcatcagcactgcatgttgtctctagccagaagccccacctcactggatgcatctgtccccaagccatgattgaggctgttaggtggtctcttcatcccagccacgcagtgaaaacggctcagaaagcagcaggcactggcctgcacactcccaaatgtcctctttctagagcttcctctgtggagtgtttgttatctctcctaggggactcggtggaaccacaaagccgcctttcagagggtgtgaatagggaggaagagacggcaggcagggccgtgtgactggatgtggactctttctgcccccagctagtgtctaactggaagtcttctcagactagcctcagagcagacccaaacatttcccagccatcagaagaataaatggtgactgtctcgtcccaggggaaatgaagtcaccactaactttaaccagttatgtcccagacgaatgtacagagtgactcacaaatgtgtcaaagcagagaaagcatgtacaaaaagtttgtacataatgatattctttagaggggaaaaagtgtgtcttggtttcttctttcctgtttttggcagtgttctgaggcccagtatttttgtaccgttgcctgggactctttctcaccatcccctgctggctgtcccatgtccccactcacttctctagggtcctttccagtctgataggatgcgagctagcaaatgatacggtcccattttcaggagagagctgcagggtggagacagataagaggtcttcagacagcagggacccgcatcgtcttaactcacttgtgaaagaatttctccccagtacctgttcattgaaagaggcattgagatgcggcatctggtgtgtagtgatgaggtgcacgtctgaggtttctgtccaggagaaagactcgactgtgctggtccacacatagactcttgtccccatgtgaggtgaccggcagagttgagttccttctgcgattggatcggctgagctgacctggtgagtggatgccagcacctagtgccaggacatgcagatctgcgggttttccatatatgaagtgtcttccttgccagtaggtaaggaaggtacatctggtagaagacatgaagtaactagtggatatcagacaataagaagtgctaaggggaaaactgaatagaggacaggagaacatgaggggtatggtttacgtagggctgtcagagaagggagtttgagaaaaccctgaaggagggatgggagggattgagccaggcttaatctggggagtccatggggtcgtaaagatttggacatgacctagcgactaaacaacaatctgtggaggggagacggtaagaactcaagcagagagaacagtgagtacaaaggccctgaagaggggccctagctggcatgtactggaatagcagggaggccagcatggcctaagcggtgagtgagagagagtgacagctaagtcagagaggtcacatggaccccttatgtgttgtggtgtggactttgactcttaatttgactgggtgatagtatgcaatggcaccccactccagtactcttgcctggaaaatcccatggacggaggagcctggtaggctccagcccatggggtcgctaagagtcaggcatgactgagcgacttcactttgacttttcactttcatgcattggagaaggaaatggcaacccactccagtattcttgcctggagaatcccagggacagaggagcctagtgggctgccgtctatggggtcgcacagagtcggacacgactgaagcgacttagcagcaatagcagtagcagggactctgagcagaggagtaacaagattgcatttaagtttgatgggtctcgggatgctggttgagaataaaaccagcagggacaaagtcagaagcccagctaggagactttcacagttatccaagcgagagatgatggggacctgaacctgggtgataaaaagaagtggttgtgaaagcagtcagattctgtatatattttgaagatagagctcaagtgtttcttgacaagtagagagtgggcttccctagtgactaagacagtaaagaatctgcctgcaatgcggagacccgggttcagtccctgggtcgggaagatccccggagaagggaatggctacccattccagtattcttgccggaaaattccaggacagaggag

SEQ ID NO: 25973 - DNA, 690 bp, Bovine  19866881056334
  misc_feature (1)..(1): n is a, c, g, or t
ncctacccctcataagaagggctctcttctacacaaacatatcccctcccccacccccaccccccagattccagccccacttcccaaaaagcacccagtccttggactgggctccagcatccccaaggaaaagatgctatgggccttaggccagaggaccttggctgggttgaacaagacggggtctccctggctggagaccccaggctcagtagagaaacatacatacacacagaaatacacacatacataggtacacacaacatgcacacacatgtcctaatattaaataaaataccctttgcttataacttaaaaaatcaatacacaactaacccttgcatagggctctgggtggagaaagaagggcagggaaaaaggaggtcaggggaaaccttaagaccgctatctggagcctgggaaagcccactagcgccagggtcctatggcccaccagacccttcccccatcagcttccttccaagtgcctggctcagcctctgctggcttcccccggccccacgttccccactccaggatcaccatcaggatgatttttagcatctaaagaagggaacagggatgtttcctggacatcacctcagaaggcagaccctttgcaacgagagaacctcttcatttgggaaggggagcctcctaacacacactacaggaggagcaaggctggta

SEQ ID NO: 25974 - DNA, 921 bp, Bovine  19866881089176
  misc_feature (1)..(1): n is a, c, g, or t
ngagtgggtagcttttcccttctccggggatcttcccaacccagggatcgaacccaggtctcccacactgcaggtggattctttaccagctgaggcaccagggaaaaccctcagaagtctaatctcttgaaatagtcccagtgattttttttttaaaaagtagcaccaaatagaatcaatgctgcttaactagtgtatgtttaaggaaactggaaaagggtccctcttccaaaatatcttctcaactgactcccttaattcctgaaatactaccattagaagtccattcccttagttgaaagcattattctctactgaaatccaaatgcctctgggagaggcattcccatccacagtatgataacaaacaagtgcatcaaggatactgagagagggaggcccagagagctgtctcccagggacaaagcacggccacttgcaaccatgcatcaggccaccaagcagagataactgatagaagcatgtccagcgctgactcttatccatgggctgtgtgtggctgacgatgctgcattgagctattatcagtcattagtacctcagagcagtggttcttaactccgttgcacatcacaatcacaatcacctgtcagtctttcaaaaatggagatactcggacagtaccctacatttgtggaatcaggatcatgtgggagtatggctgaggcatgtttatttttacaaagctctatggattttcagatgttcttccagagttgaaaaccgcaaccttggagtgaatctgtcaacctgatggcttgctggtgggtcttggtgaggtgggaccccaggttgggggcctgaacactgagtaccagaacaagtggtgagaggcaagggaggttccataaacacagaaaagaaccgagatacttatctatatcacaattttacaaacta

SEQ ID NO: 25975 - DNA, 876 bp, Bovine  19866881098858
  misc_feature (1)..(1): n is a, c, g, or t
ncacggagcttgcttttgtaagagcagcactgtattactgtctcacagtcagccatgcattttacaataattccacattgtctaccctgggttttatttctgcttaacttccctttcagctttctttttaaaagccttgtctctttgctccctttttacttatctctttctttgaagtggaacgtagagaacatgtgggtttcagggaaatctgccatcccaaggggccttctccaatgaaatgcaggtcagcctgagatttggagttgaaagctgattagtctaaatgctcacatcttagaaagtctaaccaatctgcccatcaaggctgctgattccatcctatcgtattcgctgctggggcagagtcagcaccagacagtgatgtgccaggcagaatagcatctttgcacagcgcctcctggaagggagggcagtggggagggggcagatgctgagaggctcatgggagccatgccaacagatgggtctgcctgggtgcccgactaaaccaacgaacccttcccaagccaattcgcatgcggggccagagcccattctttctccgtgagatccccagtaaagcaattggggccacggaggaattcattggtgggtgggagcggggaggtcagcaggggcaggctgggggtgggtctgctcggattagcccgtgggagctgagccagccccggcgggcggggctgctttggcactctcctacagttactgggccttcctgcccgcctggctgctggtgtgtggagctcagccccctccgcaaagagcccctgagaggggccgggaaggggggaaggccacccgtggccttgtgaggctgaagcacaggctccttcctcagctgccagggaagaa

SEQ ID NO: 25976 - DNA, 1676 bp, Bovine  19866881105135
  misc_feature (1)..(1): n is a, c, g, or t
ntttaataaacgaatttttttaattggtagaaatattttagtttcattatgggtatgtcctagatgttagctgggctgcccaggccttttgaactctgctgtgtgtgtttagtcgctcagtcgtgtccaactcttgtgacctcatagactgaggcctgccaggctcctctgtccatggtattctccaagcaagaatactggagtgggttttcacttctgtctccaggagatcttcccgacccagggattgaacgcaggtctcctgcacagaagtcagactctttaccgactgagctatgagggagttcagaactctaggcaagatctattcctcattgtgggaacccaaatatctcctcaaaatctgaagaattctcaaggggtgtgcattctcaaggttacctttccttccaggttcccctgcttccatggttcccaaatggggtggttttgtccctcagggggcatttggcaacacttggagacatttttgttgttgtcacaactagggaaggtgctattggtagctaatgggtagaggccagtgatgctgttcaacttcctacaatgcattggatagccctacagcaaagaattatcaagccccaaatgtcagtagggccagggttgagaaactgtggccgtgacatatatccttgtcttcaatttccacaaagtcctgtccacatgaagtccctgtgagtgtcaaaaacatcactgcagagtcagggggtacagggagagggaggaagggtttccatggcagttatgcaaaatatttcatattgaatattaggcattcctgttcctgaactcccttttgccaatccagtcatgagacaatgccctctggcctttcacctgatgtagttctcagccttatgctttctcactggcactttctccctgtatcctgtctggagcaaaacaaacaaaaaaaaggtttttttctcttgccacacagaaaggtggtttcactgtctgtttattggtttaggctcccactaacacccacacacagaaagaaacaggttactttgccaaacaatggtgattctcttcctaagaggaattctaatgctgttaagagaataacgtttttaactcattatataagtgtaatacttaaacaatttttaatcactttaaatataggaaaaataagataaatttcaagttctaccatcatcggagaatcttaacatattgacataactataatagatctaatttttcacattatgaaccattacactgtacagaaatcctataatttctgctacatttattcatatttatttcccctgtgtttccaagttcactgcttgctttttctggtttaccagtgctgcattataggttaggtgattctaacagatggcttttcaggtttggagtctttgagttccactgtttaattttactatccagtttttacatggaagataggacagatgtaggctcagaaacagagtggtcttagtatccagagagcaagctttcctgaaagcttatggctttgataaaattatttatgaattacttaaatttcatctaggatctccgtctaacattggtgatattctaatattaagtatgttatgggggaaataaaatttttattcacataataggagctttgctaagatgtatccaatggcacatatttatacata

SEQ ID NO: 25977 - DNA, 761 bp, Bovine  19866881278259
  misc_feature (1)..(1): n is a, c, g, or t
ntttcagcaaacatttagaagtaggtggggtgggcggaagaaaactaaaaactctgctgatgatacagtgcagtaagggaaacttgggaacctcagagaaaggtttgatcagaccaggagacaaccaaactgcctagcaaaaagcatgaagatccacttagataaagatactttcacagggaaaatggctcaagtaattagctaaaaattatactcattacaaacaaacagaagagctgaatatggtcagtagcttttgttcttggtcctagaacctctaaaatgctgcacgggttctttccatgtgttcatgcgtctggaacccagaccataatcacacaggagggcaacaggagatctctgggagtagtaattcaatgaaaagtccttgcctagctagaagttggaaaaagaacgtaccccttttacttacagaagttgggcacatggggaaggactgatcttctgacttccttgcattcaagcagtcttatgcttgggaaacaatctgtctgagggactcttagcagttccaaaattgtagaatataaaatggtagaaacctggaagagagtgggtatcttcttcctcaatttggctggagcaattgcctctcttgaatttctgggatatttgtgcttttcaaaagtgactatcatctttatataacgcagcccacaatctgattcttaaaaaaattactattttttaaatatatatatatatttgctgttgtttatttatttgtttggctatgccgg

SEQ ID NO: 25978 - DNA, 1238 bp, Bovine  19866881279263
  misc_feature (1)..(1): n is a, c, g, or t
naccggatcgtctttcgacgaggcctactaaccggagactcccctctggggcccatgacccaccgaggcgaggaagactgggtctatgagagacttgcgccctgactcccaatctgttggcactgagtggagctggagccagtgccccagagagggtatgggatgtggggccagacccttctaaactcaacccatttcccttcctgcctcttatattcagggcccttcagtgtttacccttggaattctccgtagtcagctagtctagtggagtttaacagtggcacagaccatcacaaatggaaaatctcgtgattatcttctcaaccttaactatgatttattggactagctccctgtaggagtggggcctggtgtgacagggggtggggcccagcagtcttgtctgttatcacatgacaagagtctgaccagagcccattggtcccagcagaagcacccgaggcaatctagccagtcggtttttcttttctttcatatttaaaatttggaatctagagactcagagcataggagctgttatagccaagtaaataacggtggcctagaaacagcaacttctggctgctgctcttgcaattctctgaacgatccacggatccctacttcccacacctggggttgtccaattcctccttctacctcagaaaacccattgtctgtaaaaaaaaaaagagagatttattttttcttggcttaaaccaagtcagaattgatgtgcttataacaaaccttaactaactcatttactaataggatatttttaaacctcttacccaactgatagctgccctccattatctgaagaagagcaatatggaaaagagactaaatttattctctgtagctctaaaggacccataggtggaagttagatgaagttagatttcatctcaatatgggaagaaatttcaaacaattggagctgcctaagagggagtaggttagttagtgagtgttctttccctgtcagacaggagttttgtagaagaaactcatgctagtacctgtgggtcaggaagattctcatcaggccttactttccatatttgtttataaaaactgaatgtatgtgagggctttccaggcggtactagtggtaaagaacccacctgccagtgcaggagatgtaagagatgtaggttcaatccctggatctggaagagcccctggaggagggcatggcaaccaactctagtattcttgcctggagaatg

SEQ ID NO: 25979 - DNA, 728 bp, Bovine  19866881291566
  misc_feature (1)..(1): n is a, c, g, or t
ngcctgggtgctgagtccgcgctgaagaagatcctcctcccgcagctttgtgtccttcgccgggtgaaggggcctgcagacggactgggcttggcctggagctggccgccggcgtgtcgcctttggcgccctctgccaagcaaaagaaacacgattaaacgagtgagggctgggaaaggaatccacagctaatcatggctccatctgctcccaacccccctaccccatccccgactctagggagccttccacagcccaaatctcctttgatctctccggaagccggttcaggggcagcgccagaagctttaacccgctcccataacttgcaaaagaagtcactgagtcccgaagaaattaagtggttaaccccaaatcagagcagctatttagaatggtgaaggagggttggaggacatgtcctctactccaaatgtaacgtttttattccaaactatgatggccccagcaaaaatgtctttcttgtaagcaaagttcatctccagaataacagactttggaagttgtctatattggaagtttggtatttcctggatttaagatttggggggacacatagggaattggagacagacataggaatgactcagctagcatcaggagccaagacaggtcctgccccttctcttctaggactggtcagctcaaagctgctgtcacctccctagctgtgtcgatcatgggcaagtgctttaggctttcgaagg

SEQ ID NO: 25980 - DNA, 1386 bp, Bovine  19866881316474
  misc_feature (1)..(1): n is a, c, g, or t
ntgaatggaattcatggttgcctgttttctctcatttctttacagggttagggattatttgtatggaccaatggtctcccttttctttcaatggaagaataatcctgcattataatatagtaactgcaaaagaaagctctttttctatttcattcttttctttcttaattcactgtctagtgagtttctgattgactcacagaccaattaaagtaaaatttaatggaagaatagattaactccctgaggtttccctaccatccatcacatttttatagcaggagctgtgaggaagctcataacttcatgctgtgaatgtgataataaagagggcacggagaggattccgatttacagccgagctgatgttcgccaggacagaatttactgcccaatccccttcccctctttattcaggaggaggtcactagatctgccctcagcccaggtctcagatactgaagggcagattgtcaggttgagattctttccctttaattggggtgggtgaggagagaatgtgaatttcattgtccagagatggatattgtgttaaagtatatccgtccttaggaagctgttgtcactccaaatgttcgtatttttaaagggtgtacttgatttgttactatttactctcatagaaattcagaaatatcaggcatttgtttctgagtcactgagtcattgtcttttatctacaggcttttctgggtaactgaaaatatctctttctgtatctttattgccaacattaataatgtcttcttctgagcatctttcttttgaggatctcaaagcactttgtgatcattgttttagtctttctaataggtcccccaaaaccttccaaacaattcacagtttattaatgtttctctgattcatcttaacaatgaagtgtgacagtgcttacagtatgacacacccatgtctgggattattttgtatacttactaaaatttttacttcatgtagcaatttgggggggtcttgaatatttaataactatatcaaatttcatgaatatattagatattccttttttttttttttcagaagcttggtaagatagaatcagtattttaaaatcgtactcatttgactgtccttgaaatcaaaacatgtctgaactgaacttagtgtgtctcccctcactgacctgctcttctttttgtattaaaaaaaaatcttaaacaggacggtctatccttcaaagtgttgtaggttggaaacttgggaatcttcctagatcctctctctcctgcacaccctgtatctcattggtctccaaggcctgctgagtctaccacttcaatgtctctgaaaccatccccttctctcaattctcttgcttacttctctagtcttactgcaggtttctca

SEQ ID NO: 25981 - DNA, 866 bp, Bovine  19866881333110
  misc_feature (1)..(1): n is a, c, g, or t
ntctgaccctttattttcctccttatcacattcaacatggaacaagtgcccagcccctggactgtgggtggggctgatggttattacatcctagccatgacaaattgaggttcagctgctcatgcaagagtgagagatgtcagcagccccttggagccaccttgaaagatgatccttgactctacattcaaatggatgtttactggcattcatctgccgacaagtctgaatgaaaaaaaaagactcatactggaaatgaatctatgaaaaatcaccaattccttatatgataatagaggaaaaaactagctcaatgttgataaaggaatgacgaacacaagtggagactaaacttatccaaaaacctttttttttagaggtcagtttctaaacagaagtagaaatatcacaaacgtggcattaaaataataatgcttagtacaaataatatattgaataaacttaagaaatcaagttatgcaataggaacaattttaaggatgataaaatgaaagtgctcaaagtttcagactaagcaaagtataatcctatacttagaccagtaggctggttatattaaatgcccataaaaatctccttctgaaggaaactcaaatatacttagacatgaataatttttcatgtaccaaaatttatataaaacttgaaaacaaataatagtaagcaagacacttaaaatttccagatcttattaacagtatcattacccataaattaaaagaactgtaataaataacttctttatatctcttcttatttgaattacaagaattcaagtaagaacctaactgagttttttcagggtgcttatgttaaactctcatgagacagtaacttagaaagta

SEQ ID NO: 25982 - DNA, 1025 bp, Bovine  19866881349109
  misc_feature (1)..(1): n is a, c, g, or t
ntatacatataagtggtctctgtgtggtcactcaggaaatggtgtgccttcccatccctcccttccctccacttatttgtcaatatctattctgtcagtcctcccagcctttgtttgcataatcactctccctgaggaagttcctaaatgtctcccatggctggtacttaagaccaaatgaggaaaggatagaaagagagcaaataattttgtaagcaatctagtattaaattaattacaaatcattttataatagcaaatgaagctaagccagtgttcatacccatcctttagaaaaataagcaaagtttagaaaattaccttctaagttattaatgattaatataggataatattttgggtgtcaagcttaagaactcatttacagaactcctattagtaccaagtggtaattctaaatgtaaattctagtcatgtcaccttcaagccaaaatcattgattaaatgggcatgttcaacattaaagtgtgtgtgtttaattaaaattgattttggaagaattctccaactactttttcttatgttcagagttattttctgattataaaaactaagtaaaattgaggtattatttaggttaagttatgtatgttgagaagtatcttaattttgttttttgttttttttcacaaaggcctaatatcttatatatctactttatgtttgaatttcaacctagggtattcttttcagtgttcaaaattcaaaagttgaaatcttatctaaagaaaatctttgatgttttaggcacattcagagccctgagtatggggagagaggtggaaaacaaatttgagaaaaataattatttgattgctcttcatcacattattttcatggtaaaataatatggaacatgctaattctgtcactgctatattctgtgagggcttttcttagagcaaagcagtgaaagcatatgtttagtgttagtcgtattcacagtagaaagacagtttcgtgtgtattgaatatttccacttcatcccttaagaattctccca

SEQ ID NO: 25983 - DNA, 1779 bp, Bovine  19866881383443
  misc_feature (1)..(1): n is a, c, g, or t
ntgaatttgtgtattgattctctttccttccagctgcgtgagagtcttctacacctttctgagcttcagtttcaactcctaaaggctagactattgaggccattctatctgtatcagaatcaaagagatgttgttaaggaaagcactttacaaacactaaataaagggctatccaaatgtgaagcattagtattatcatcattactattataactggtcagggaagcctgaatttcatgctgcctcccatctgctttgtaacactcaggcaattccatgattagaggtggctttccaaaaagacactgtagttctttttttcctctaaaataaatgattccagaaccaatctaccttagccatccaatatgtgcagcctcttttgttcatgaacaacctgaaggtaataaactggtatgcccctgtgacagagaaagatgttggaaggaaatgggtttccatcttgggtttctaaggtgctataccaaacaataacaagggaaaaattattcagctaaatgtacctgacatgcattggcatccaatatgccaccctcctcaccaggcattattacttatatacctgcctctgagaaaggctgcttggaagagttactctgtttttatcggacatacattttagggagttttaaataaactcatatagccataccgagcagcatgtcttctaaacttcgctatttcatccgtctataccaagcaccgtgaagcaaaatggatgtgccttcagctttctacaatcctggaaaatgaaccagtccacttaacaataaatggtggttggttcaaacacacatgaccggtctagtgaagaagaaaagaaagttgagcttaatgaagtccagtgtctgtgtccctgcacacggacaggaaaggacaagtgttttataactgtttattggagttaatggtaataaattcctcacttgtgatgcattaactttaatgttttcattacttggtgatttaggttttcccttttcacattgtaaatcacgttgtcccagtagcaaagcaggtcgagcgcctgctgtaacgttcagaatactcagtggagaaaggaatgttctctttttctctccagcacagtctgacaaaagatgctttgcctcatcccaacttgctgcttcccacataaacagtaaagacagacagacggatgcatctgacaacagcctaatttagatcctagggaaagacaggtctccacagtaactttccaaatgtatttggtactgaaggttttttcctttatttttttcccatttgctgaatgtgagcccttagttaatgagctgtgcaaatagatattgagatttagtgtttttattttgcaattacagacttggtgatttggttggagacttttgggtctagcaacatcatcctcattttcccctccctaatttttttccttgcaaaattcaacttacttcaaacttgcttgagttgtgtcagatgaaacagaagaaccaaaaaagatcttaaatctcatatgtataacttaaaagaaaaggcggtgatttttgtcctcaaggttccttattgcagccatcatttttctgtcatcaatcccatatggttgcacagagacacccagggagctggctgggagcgaggtctggcttgggagtggccctttgtccagcagctgatacatcccaggtcaaagccacgttgcggagatcactgcgttcccatcaagttcttcatgatggggtatgagagttctcattagatcacccaccctgaaatacc

SEQ ID NO: 25984 - DNA, 923 bp, Bovine  19866881402022
  misc_feature (1)..(1): n is a, c, g, or t
nctgccattcccctctccaggggatcttcccaacccagggatcaaacccccgtctcctgttgcaagaggattctttacctgctgagcttttgagggagcccccacacactcatgagctgggggccaagctaaaacccctgagggatttacctcccttctcagaccatggcagggactctgaatcaggggccacctctagccaaaacaagttcaggtcaacaatgtcacctgaggcggccagaacgggcaggctgagctgtaaaacctttctgcctgagaattgctggacccacacagcacagctctctaactgagcctaacaccgccccctcctggctgtctagagaaaaccaaaaccccacaaacgccgaggctcctgtctccctttgtcttgcttaagcacactcaggaccccagaggcagatctgagttggagagttccgggggcacctgagtgggttgcccagttgtgaccttctcttagctaattccatttccagaacccaagccaatggttctaatcatttcctctcgacatgcggtttgtacctctgcccaagcaccccagagctgcacaggtcgattcaggatgttttccactcctttgcaaagattcattaaagcctaagccactgatttcccccaatgtggcagtttacatgcgcagcaacatcgcccactccaacaaggggaccatgaaggctgaggcacagggttactcaagtccaaaggggcccatgatgtcaccttctgttaaaatacagcactaatcttgttactcctagaaccacttcaacagcatccactctggctgctgcctccacccccttctcctctcttaagagcggaacaataaggtttaatttccctttccaatttaccttgaaatgaaaactgacttcagccaatatgtactgccaaca

SEQ ID NO: 25985 - DNA, 924 bp, Bovine  19866881405329
  misc_feature (1)..(1): n is a, c, g, or t
ncttgggataaacgtgtgaccttggtctattagcaccatgccctatctaactgagctaactggctatacaattcaatcgccagacgagtgagaaacacagagaaaggaaacaagtctatcagatgatatagggagatctgatgggaaaacaaagcagcactttacttttaaaccatcctagaagtaatgtaaacacagttacagagttaaacagatttcttgtattttagactgcatgcttctagaccagtatagttctgctttgtattctcagatctgtcacagactgggaggtactgacatacctggaaccctagagtcaggggaaagtacgtcttttcattgatcagaatcttttaaagctcatctcagcagaatttgtatgtgaaataagtatttctcctacttattgatagctagtgtggaaatccatgaccaggtatgctgttctgctcctgacagattacagaagttgactccagggacttgggaagaaagactgaattcagatctttcattaggcaagaggtggactttttggatcgcataactccaagaggaatcgtaagctttcagaagacaaaccaagcacttcatttatttgaggcctctgttatgatgcctgggccacagataactactttcaacaaattctcactcttcattagtggaaaacagtttcctctaatcaccacaaattactcaacacctggcattaagcagtctttgcttaccacactcatttgctctctttccggtgggatagtctaggttcataaggtgaccgcctgtacttgtttcgctgcatgcacagttcctggtgtggcttagccatctccccttctctgtctttctagatgggctcatagctgccctgaacagctccctgcctccttaactccctaacaactagactcacccggg

SEQ ID NO: 25986 - DNA, 1091 bp, Bovine  19866881507702
  misc_feature (1)..(1): n is a, c, g, or t
nggttttacagtccattaacctggaaaataaaccaataccaccctggactgtgtgttgttggattttacggactcttcagtgattgtagttacctgaatttatgtcccttactgctcttctgtttagatcatagtttctttggatcagagtggcagaagcgatggtgtgttgtcagcagaggcctcttctactactatgctaatgagaaaagtaagtgttcttcatttgcacagcagcacctcactcctggatgcaagcacttcgtaaattctcaagcacttagatctaaacttagtagtccttaactaacacccagaaagagacatgcttaggaaagaagcttggctaaataataccttgctcatcaccaaaaactcataccagtttagaaataatagcccctttaagcactaggatagtgtggtcagcatatcaaaaggctaccttatgactaataacatattatcgaggtcaaatgccttggcatttgttaaaaaagaacctcaaacactttataggcatcaataatataggttaaatattgaaaaataataattctgagaaggattttagcagcttaccaacagcccagaaatataacctttgagtacgaactctctaagagcgtgcttcaaactttatcctactgactcctgggatgtaatccaatggacatccctagagccatggagtgttgagaccccaatagttgatgtgcccgagagacacccttcagccagatggcagcagcagcaaagtgttgacccaagccagaagcagcttcttatgaaccacctctgactcaatcaatcacaacactcatgagctatccctaaaagacctcccatcctggcttaacactcttgcttagttcatgagaaggaatagaggatataagcacaaactggaggagctacaaataactacaagctaaaagttatcactgtaggtgaatgcaaactttgaaacagggaattccttcctgctggatagactgctgcaggagtaatgctgccatgcaagaggaagataaagtagcaatcttgcggggatttcttttgggttctaccaccttacagaggccagtggt

SEQ ID NO: 25987 - DNA, 2543 bp, Bovine  19866881533633
  misc_feature (1)..(1): n is a, c, g, or t
nctgcctagtatagcctgggcacagagaatgcattccctaggctggccctctttttcctcatttccattctcttcttggaatgttctgagatctgggggtctaatcagtacctttgcttttcttctctaagtatccttgcttgatgatattatcaagctcttgagctcctctttcgatgtcttccattcctaaaaggaataagagcaaaatgttttgttgaaatctgacagaattttcattgatttgggctacttgagataatctacattaatgaaaagaggcagacgggttattgcttaaatatgatacagaataaaacaatctccaggtgactggaggggagtaaattttctttctttctaactatatctaatgctgaaactgcttaaaatgacttaaacataatattagtctgtacaagggaggttgtttaaatgtgcactgattggtaagaaaaggactccaaaaacctaagaatttgcttaactaaacacacactcacctttttctaacaaacagaaagtcaccttagtaaatatatttttattaagttcacacaaagaaaggctatgcatagctgaacttggcaataattgccaaatcccggttttgtcaatgtcaagggaaaagtctaggaatggtagaagcctttacacagagaagatctggtctgacatcagtttttaattgtatgctgctaacactcttggctttcaattagcctcgttaggtacaaatttattgagaagtcaagatcctaatttgtcttccaccactagggtttatactcattttacagaagggaggggtaaaggtcagagacaaagaggaaggaatttagttctcaaaaaaataacagcaaaaacaattaaaaactctgtacttcttaattaggagaaatgaagggagtgggctagcatagtcctaatattcattctttttaggttcggggactaaactttttgcttctacgctgtttccagcttagtttcaaaaatgtagatcagaagagctctttcttttttagctgagtgcctgactctttttcctatttgttcttattttcaacttcttgttcatgggctgtttccatttgtgtgttttgcagttagcaaactccgtggctgctataaatctcctggatgggtctcagggtgcacacatgagatgaacagcagcaaaggaaagttcatctgtctaggattctttcatttctcccacccttctgaaaattctaatgtctctttgaaaatgctctccaagaaaagagaagcagatcatgctaagggtgaggacctggtgcagctaagcaggcccttgaaggagaacctatcctctctgcctgctgtcaaaaaataaattgctcctagaggcctaaaaattaaatgaaagacacaagggataagaaaaacagggtcctttaagcctggagtttccatcttttcttcccaccatttttttccccctttttttaaggtcttgttaaacttagagacacaatttcttgttaaggatgccaagagtctgaatcataaaagacatgttaaacgttctattagaattcaaacctccttttttaatgcaaatctaaatgccattttatggaacatctataattatgaaaatgggaagacattgcctcgtgttcggggagagtctgtcagtatgaatattacattaatgggcccacaccagctcactgatcctgctggcaggagcataaaaaatgcttgagtgaaacttttatttagatgttaagactccaggccccagcggggtgacagagacagtccctgtgagttgccatccgagagagagcttgaattgaattacccaggggggaaggaagtagtgatgagcactgcttcgcttatttaatttcatttactttcagtacattatcagcatgaggcttttctctccccaccaactgaaacccaagaatgccaccaccaagaaaacaaagacataatgcagcagagatgtttgaattcaaagttactaattttaggagactagggacagcaccggagaaggcgatggcaccccactccagtactcttgcctggaaaatcccatggacggaggagcctggtgggctgcagtccatggggtcgcgaagagtcagacacaactgggcgacttcactttcacttttcgctttcatgcattggagaaggaaatggcaacccactccagtgttcttgcctggagagtcccagggacgggggagcctggtgggctgctgtctgtggggtcacacagagtcggacacgactgaagcgacttagcagcagcagcagggacagcaccatcactgccttcttaccttaaaagtcacacttggtttgctaaaattgggcactgaatgagttgctgaatttcctctcttggtcatctatcaacaagattctgaagaggaagagagctggaaatacagtattttatatgctgtgtttttgtaagatgtgtatgttgctttcttattagagggaatctgtactgatgaactctcttgcctgcattcccttatgggcagtgg

SEQ ID NO: 25988 - DNA, 903 bp, Bovine  19866881540278
  misc_feature (1)..(1): n is a, c, g, or t
nccacatgtgcacctcagctcagtacacaccccacacatgttctggggctccccaggccctgctacattttctaaaaccagaaagcacttctgaactgcctcccctatcttttctgggggctttctggggccctaacacctcagtcccagtcagatcaaacactctccaggtgtcagtccctgacccaagcatctgtcatcataaaaggcatcaaaaccggaccaagcatccaccataaaaaccctgtgaagatagttgaaaaagaaaaagaaggaggcgagagagtatttcttctttcccttgtaaaaagagctcataaaacgattaaaaaaaaaaagccaacccaggcgggggctttattacctttgcgcctctcgcctcctctcgcctgaactccacggatcccattcatgacgaacagcttcttccaaactgagagaaaaaagttttcaactttatggttccaaattttttcccccttgcagatccgggagtggcggctaacacttttttcccccaacagccggtctgcggagatttgctgttgaataataacaaaggagagaggatacgtatttaaagaaaagaagtgattaatggttttctgtataattctcacatttttcttagctcttgtctacacagaatggctgtgaactttaagctccatagaaatcttttttttattctattcataccttcctaagggcagctttgatttggttctatagagacattcctggggggggaggtggaatatgctttttaggaactattttccccctctagaagggaaggccggctgcatccctgggcagctaaacatcacaccagcgattctacgaaaacaaagctccgctctcaacctccaggtccaggcgattgctagagtctccccacag

SEQ ID NO: 25989 - DNA, 2410 bp, Bovine  19866880540323
  misc_feature (1)..(1): n is a, c, g, or t
ntttctatgtctgtgagcctatttctgttttgtagataggttcattttgccatattttagattccacatataagtgatatgatatggaatttgtctttttctgacttacttcacttagtgtgataatctctagttgcaaccatgttgctgggaatgacattatttcattccttttatggctaagtaatattccattttgtatatgtaccacatcttctttatccattcatctgatgatagccatttatattgtttccctgatttggatattataaatagtgccgctgtgaacactgggggtgcatgtatctttctgatcctgaattatatttttgtctgggtatatttccaggaatggaattactggatcatatgataattctattatcataattctattctgttagaattagttttctgggaacctccatactgttttccatagtggctataccaacttacacttaaggtaggatccagtcttaataagttgtctctaccactggttggtcaacctcctcaaagttcttctctgaatctagccatagctccatggcccttattctgacattctctgtctttctgtttccaaaactaagtaagctctacagaagcattctatttataattgaaggggagagcagatatacataacagatcaatgctactgaatacactggctcttaaaggacatagaacatatatccctgacccctttaacggcaccagaacttaacttgcactgtttttgcaactacaattgaagaattgtaagttatcataaactcagaatcccagagaatcaaatgctggatcttatcctttacatattcacattcaccttcactcaagagactctcttccccccaagtctggggttagcaggtgcaaactattatacaaagactggataaactgtacagctcagggaactatactcaatatcctgggataaaccataattgaaaagaatatttaaaataatatagggactaccctggtggtcctgtggttaagatttctgcaagaggtgcagatttaatccctggtggggaagctaagatcccacatgccttgcagtcaaaaaaccaaaacattaacaacagaaacagtactgtaacatttcaatacttttaaaaaatgatccacatcagaaaaaaatttttttgaatattaaaaagtatatatacatatgtataactgaatcactttactgtacaggagaaattaacagagcattgtaagtcaactacacttcaattaaaaaaaaaaaatcagctacagctaatcccaccatcagtccaggccctgaacatttagtgcaaaggtcagtcatgtaaaagagccagacagttaatccttcaggctttgcagaccatgtatctctatcacgactactggactctgccattggagcataaaagcagccagagacagtacctcagtgaatgagcatggctgtgtaccaataaaactttatttacaaagtcaggcaagaggttgactttgacctaagaactgttggttgcccacctctgatgggaagcatcacaaacctcaccttctgctgcagctcctcgatgatgcggaagtggctctgatagtccggacacacggtggactcagggcatttgctcagctctcggatctggctctccagctccgcgttgtcccgctccagccggcgcaccctctccaggtagctggccagccggtcattcaagaactgcatggtctccttctcatggctgttgaagaagccttcgccgaaggtcccgcagattccgatgttgcctggaatgtcgcaggtgcccggcagagggcaggcagcgttgcagctgtggggcagacagaggctgggtcggccgaggggggttgtgcccactcggactcggttggcgtgtgccagggtggccgagaggcccaggggggcggccccggcctgtgagagcggcccactgaggagagaactgcagctgatgaaagtcatggccaagactcttgctttgtccacggttggatttgctcgagtttgaaacctccctctttcctagaccttatataggcctatcgtgggcgctggtacaagaaaactggcgttttcctcatgaatatgtatatggattcttaaacaaccgctattactcagttgagcttgtcccctgtaaagagttaataagctcatgaaagaggccatgacccacacagcctcccctgaccgcagggtcctagaaaacagggaaaatgaggtcgtctttgagctgccacctcctgcggcttttgtctctcacccctctgtccactgatccctgtgaaggcacggagaaccagagcctccaacaatgtcctcaaaattgctctcacttccatactcttttcctgccactgaatgttcccatcaggcaagttt

SEQ ID NO: 25990 - DNA, 3444 bp, Bovine  19866880422314
  misc_feature (1)..(1): n is a, c, g, or t
nctttgcattctccttgtctgaaatgcctttaaaaacagtttgctcttaactgttatcagttgtttaacagattgtcccgaacctttcattataaaatccctttatttcatgtttgtttccactggttgctcagatttcttctcactaagatccatttgtaaattaaacataaaaatctccaactccaagctaacatcctattcaaagacaggatggcgtcccattgtttgcccagcatggggaacaccaacttctgttgtacaaatggtgtgtggtcatctccgtaggctgtgaaaaaaaaaaaaaaactgtttaattcaaggattacctccctgcatgcttttctgcagaactgaatcagataatagttagtttccatgacttccaaattgaatctcccagaaaacttgcagggaaagaaaaaaaaaaaaaacaaaaactaatagcaaatatgaataaatgcaaaatcaaaattctttttttcggtaaacttagagttgagtcaaaagagtcagccatttgcctctttgcagtaaacataaaaaaaaaacaaaaaacaaaaaagcttgagtagttttacattccagaaaatataattaatacacaaatactaacttctgaaaattccttaactctgtttgccttgagtgatgccacagatgattagaaaccctggtaaagtatgccaaatgtatgcacactttattcactgggagggttatttgagtagctaagttatacttaacaagctagcttccttaatacccatcttttaatctctgtaagggtatagtgtgaaatgcattaacaataccaaacaaatcttggttggagcagaaaataccaataatgattcagttttaatttaatgtttaatcatcctaattggcacaggattcctctgcacattcaaggtgctgttttaagctctgtctctcgccttacttaaaaataatgtaaacaaaatattaaacgaaattcgctaaagttatgttgcttaactggggacgaaaataatgtgacaaaaattctgtttaaagcttcttattttgacaaccaattttaaatgatgcatccatttcagatgcttattttaaactaggaaatgcaattcctaatatattcaaccgaaatgttatttctttctctttgcacatttccatatgtaatggttatgtttccatctacttttacagccaattatgaaggaacaaaagctattctgtttgttcacacattttcaacaaaatgcattaaaactattatgtcagcatgttctattaagctctgcattcagtggaaaatacttttcaaccagctcacatttatcaaaacataaagccactttaaaacacagttttgcttggtcagctgggcttagacaaataatgacagattcagaactaaataactagcaagggaaatcagaaaactgacttcatcaattgtacacattacaatgtagttgcttcaaatatttagcacatctgtgctcacgattaaagggcatttttaattctttataacttgcaaacatctgatattctcataatatagagaaaattttaaaaaggttactttactggatttagctgattattactttcctgtgctccaattctgcatttgtgctgcttcaagactcacttgagaattttcaagtttttcgacctgaacatttttatatttagggttgtgctaactggaaggaaaatatagacacttaaaaataagtgcctgcttgcttctaagaaagagactgtgttaaaaaagctgcccatattttagcttagattttcgcaacattttaataagctgacatttgatctcactgtagagtcaactaatttaatttcctgatgtttatgaacaccaaaaaaaaaaaattctgatacctattttgatttatttcaaaagcaggtgtcgctacattataatagttcttaactttaaatccatctgccttctgaacagaattccaatgaaacagctttatatgaaaaaaaagaaaaggacaaaacatgaggtctagtttgaatctttaactaccaaagggaatattttaagttgtaataagatgcacacacacacacatagcaaactaacatattctaattcatttttttgaccggctggctatcttgtatctctctcaataatctgttacacaagattgcaactggtgaccccattatagtaaatacagttgccttgttccctgtactatagtgaaaacaatattctagttcctctttatggattatgcatacaaattaattttgtcatcataggtcgtacaggaaaatttaagaagaggtggttttctaagtatgtacacacaaaaagatttttggacttttctgggtttcttttaccccctgtgggccagaggaagaggtgatcttctggctttatccaatttatatgaaaatcccagatgttttagttctcattgtactatttaggttcttgatgcccaattcaaatatgtcagcttttcgtcatctgaactaaacactgcagaataggaggcagaaaattgaagtgttccagtatatctgtctgctgagaaaacaaaaataaaactatgccccatgctgaaaggtttagccagccaggaaaacaaaacaaaacaacagccctactgcaccacactgagttttctttttttggagcttctcagaaagacccttcgcttgacttcccagtaccttcaggtcacattaatgtttttaagaaaaccccgcaagattatgattttggagcctatagttttaactggctgttccttttggtagaccagtttcgaaaggctatcacaaacatttctgattgattgatttttctctttttcttgcacagacctgggaaaaacctgcatctgaatgttcagcttgagattccaccgcaatttaaacaccgccacatatgctctgcatgttttctgtaatgtcttaagtttcttctgtgagatctgtagccagatgacacattttactggctcccttcaagtcccctcagtgttctgactgggattagcgtgttctcgagtggaagaatacaaggggaaatctctgacaaaataacaacacggacaagacagtcctttgaaaatcgtgataccagcccacctaatgtacacaataaaggaaagggggaaaatatcttccccttggatgaatcaaactgaacactagatggggttccagttgcaagggtttgttcaaaaacttctttgtggctctcctcttccagtgacgcgtaaaagagactgcttaaggcgagatctaaactttgactacataaacattggcaaaggcacaagaaactaaatccctgttgtttgagggtaaaactgagctatgggaactacctgtcaatcttcccctttgggggtctggcatctcagggtgacaggggaataaggttaggaaaagaagcca

SEQ ID NO: 25991 - DNA, 3196 bp, Bovine  19866880446367
  misc_feature (1)..(1): n is a, c, g, or t
nctgtcatccccttcttccccgtcttcaatctttcccagcatcggggtcttttccaaaaagttggctttttgcatcaggtggccaaagtattggagattcagcatcagtctttccaatgaatattcatgactgatttcctttaggattgactgctttgatctccttgctgtccaagggactctcaagattcttttccagcagcatagtttagaagcatcaattccttggctttcagccttccttatggtccaactctcacatccgtacctgactattggaaaaaccatagctttgactagacagacctttcttggcaaagtgatgtctctgcttttgaatatgctgtctaggtttgtcatagctttccttccaaggagcaaacatcctttaattttatggctgcagtcagtccccacagtgatcttggagcccaagaaaataaaatctgttactgtttccactttttccccatctatttgccatgaagtgatgggactgaatgccatgatctttgttttttgaatgttgagttttaagccagcttttcactctcttctctttcatcaagaggccctttagttcctcttcactttctgctgtttgtagttttatttgtttatttattttttttagcaaggaacaggatttattagcgagaaggaaagtacaaagttctcagcatagacactgagagcgggtagagtccctcaaacgtcgatatacaattgctgtaatcctcgatgtttgtagttttagtaccacgaaatatccaacaaaacgaaactgactcaacatttatttactttttctatatcaaagtgcatcctgggatcatcctgacaaacttcaactatcttctttttaaggagttcagagggactagattatcaacataactgtttaaatcaaaccaaaccagaaccagtgaagatgaagctctcctttcagtagaatcctgaacagagaagaatgaaaaaaaagccggggcaaggatgcctgactcacaggctcaatgcctgggtgaagccagactgagttccctggtctggataatgggggcaccactcaggctctgggaagccaagatttggggagtgcagcttgggatggagctcttgtctgagacttgagttaaggctctcgggatgggtccccatttctcatcttgtcttgctgaggagatacatgccctgtgtcatctaattcaccagggtttcttcttaaatgtctttcattaacacacagtacccttctctgctttagaaagacattctccatccatatctaaattaaggagcaccttgccactctgagacctcaggtgtttgcttttatcctgccctgacaacctacagttttattttgaagctagaggagaatctggcttttatttctttattttgaacctcacagctcctctaactgactctcttccccaggcagacagagccgatcttgccctgcccattgggaaacaccaggccacttctttgtttagtccttacggtacacagcatcgtgcccatccacctgtgttctccctggagcccctgaggtctcacagtctcatggcccatccactttgccttaggaaacaaaggacacactttattgaaatgtcatatgtcagcccgcgtccttcaattctattaaaaccccttcttttttcctctttcttcttttttatttaaaaaagaaaacattatggggaaaagggagagaaaagattggggagagcagttcacaaaaacgtagcaaacccaagcctactttggggagttgtaacatctgcacgttctcagcagtttgaaaggaaacaaaaaattgccaagtggtataaaatttgaagaaaaattacccaaaggagaaatggacgttaaccacgcttcaattccccactatgggttgaccatttgaagtactttcttctctcctctttctttctgattcacagtgtgtctaaagaggtgaattgggcgcacaaaacccaacctcctcttgccagggtgggtatgaaatatgaaggcgagacgattgtctgggctcagtgcattggaataacattggttaaattatggatagtttttgaatagtgtcacttttttttttctctgcagatggttgttcacacaaggagccgggtctgcataattgtatcactaatcagcagtaaggcaattagttgtgtaagtgtgctataatcattctaacagaagagatgacgaaaagacaaaaaaaaggaggggggggaccaaaatgtcttttctgaatccatcaactgacagccataattagatatatataattgaaaattccacagtaggggggcaagcttatacaaatgaattttctctgctgcccttacgcatttttgtctttggctgaacatccccctaggaaaaggcagaaaactcgtcattccaagagagtgcatactgtaccgggtattcagtctgaccaatgatgtcagaattacaattttttgggggggagtgtggggagggcacaggctgggagactgggaggttaggctgctgtaaagacaagtgctcagcgtgggctaatatgaattgcgttgctgtgaattatgtcaccgtcactgttattctgaacctgtacttagctggcaccctaatgtccctcttctggttcatgatgggaaattccaagcagatgactaactcactgggcacagtgtctagggtccagtgcacttttagggactcatgagaatgtttgaattttcatttctttttggtttggaatgaacgtaggcacactactgtatataaaataggttaacaacaaggacctactgtatacacatggaactatactcaatatcttgtaataacctagaattgaaaagaatctaaacaagaatatatgtatgtaaaactgacacactttgctgcacacttgaaattaatgcaacatggtaattaactatatatcaataaaaaaggaaaatcaaatgaatgtgataataaagagtgtgtacaaatgaatccagcccggattataattacctccataccaacacagttgtaaaatataagttttaatatctttttagggaggaagaataccacaaaagcaaaagtactcagagtccaaaaaacttataatgtggcacgatcatgggctagatggtattttctaggaagaggaaaaaagtaggattgaaggcacttc

SEQ ID NO: 25992 - DNA, 2209 bp, Bovine  19866880490919
  misc_feature (1)..(1): n is a, c, g, or t
nttcatcaggaggtgatcattaaccaacatggagaactgctgtgataagatggctaaatattggggggtgtgtgtgtgagaagggaatccctgaatggcaagtcagggcacctgtgacctggaaggaatcttgctactttcctggaccctaggctcccttgcgtccatgaaggtggtgctgggtgactgctcggctccataatgctaagttaggggccctttgaaggtctgtgggcagcacaggtagaaatgctacttgtggcagagaaagcagatggtttatgctgacagccccaactcggcaaaccacccacctaggaggtcagcctgcagacactgttcctccaatattataggcctgtgtgtcttgcccttagtcatccaaataaagcatccccgccgtccacttccagaagcctccacgcaccctgccccaacacactgtcactggctcgcagctgtgagtccattttctaacatgcttttctggtcagagacaagggacaaaagcaaagacctccctgaaaaagtagtcaaacccttggtctgacgtgttctctgaatttttttttttcatcctcctttgcaagttcccaactgcaatgtctcccattgctcacatttttccgatttgaaagaaggaggaagtaaaggaaaaccccaaccctaagtcacaaatagcccccttcaagtcatcttgtgtgtatttataggctgagtgacttgggcaaattcttcaatcgcctgtaaaaaatggagacacctgccctactcatcactggtaggatctgattagatggaaatgttttgctatgtgcaagacactctatgggcttcccaggtggcgatagtggtaaagaacctgagcatgcctgccaatgcaggagatataagagacacaggttcgatccttggattgggaagatcccctggaggagggcatggcaattcattccagtattcttgcctggagaattccatggacagaggagcctggagggctacagttcatggggttgcaaagagtcagacacaactgaagtgacttagcatgcatgcaagacaccttataaatgtaatgggatagggaagagtggaccacaattaattctgctttgatttttctgaatcagcatgtgtgttttttatcactaaatcatgagtgaatttccacaaacagtgacttaaaacaagaatcatttattatcatacagttctgtggagcagaaactggggtggattcacctggcattctcaatgccaaaatcaaagtgtcagccaagctggactcttgtctgggagctctggctggaagaatctgcttttagtgccactcaggttgttggcacagtcccattccttgtagctacaggtgtgatgtccccatgtatcagctggctgtcagctggggatcactctcagcttctccaggtcattcacattcctccccatgtggtccccttcaacttcaaagccagggagtgatggaacttcaagccttctcaatctttcagggctcaactgattaggtcaggcccacccaggtcatctccctgccatgaggtcagtgtaggtaggacttgaattacacctgtgaaatcccttcacagcactatctgcattagggtttgattgaataaccagaagaagaaagtcttggcaaagggagagcatttttagaattctgcccatcacacagtgattctgaaactaggtttcataagagtaagatgatgctagtcattctgtgaagaaaggaatgcatagccaaataattttgggaaacactaattgagcagagtgaaacccattttgttggctagcttttcacttcagaacgtatccgagcgattgatagaccatgtgactcttcatgatatatagttcccagatatgtcaggttatggtaccctttcctgccagaatacctgttattcctcataaacaagattgggatatgattatatgatttttaaaatgaattttagctatttgggtagccattgacccaggaattccctatatccgtattcatcaatttttagagacttgtgacctcatgattctcagtttactcattacctcttaagtgtccttcaagtcacagtctggaatgaccgcttaccagaaggggttaattatttgtgatcatccaaagggcctccaccccccttgcctcgaagggtgaggtccacagtgttatgcctca

SEQ ID NO: 25993 - DNA, 1601 bp, Bovine  19866880516447
  misc_feature (1)..(1): n is a, c, g, or t
natatatagactggaggcctagctcagtctcactaacttacccccaggtaatgataaatctattgctgagcctgggtttgatgtcttctggttcagaatctgacttctgtaagctcagaggcaagataaaccaattggtttctgatctgcagcctcagtagacagacaggcatccatcctggccaaatctgcccttctgcactttggccatgttgtgaaaactcacgaattctggctggttggcagtgaggtacaggaccaccttggtcccacagctcccagtatctatcacaccacccaggctgggtgcagagctcccaagagtgcacagagtgagagggaggtgggcagtgggctggctgagcccgtgtgtaatgagcacagatcagagtccctcaccctgagcttggccaaaatcacaatgcatttggccctgggcccgtttccccttaaaattttaagcccatgagtgttttcaggtggatttaatctaccttttttgtattcattgttatttatttgcatttagctcataaaaatgttgtttctaaagagatggtgggtggccaagaatactttattattatttttaattcttttccttcctcttctttataaatcttctttcttaggaaaagaaattatcctctcctcctttttatttatctgaatatttaagaccaaatgtctcagcttgcttggaggttggtatccattgatcttactatccactaagtgacttctttcagggcaaaacctgaagcaattgttctatttcaacatttgttctgttgatgccttcacagggtacatttaggataatgttacttatcagagtgtaatattagtcatctggatgactcacactgagggtggggtagagcagatggctggaagggtgctctttaacatagagtttctggaaatttggggttagagtgcatgtcttcagactctggagatcctaagaggctttcctacagacttcatagccctggactcaaaatgcaaactggcccttgtgactgtcttctggaccactgcctggtaagagcacctggaaactgatcaaggctctcctgtatgcatgtagagggtaagaattaagagaagactgcaccccctcctagccccaccctgcccactgcaaggagtggaagggaaggcaaggctgagcaaagtccaatggctaacatggtaatcacatcctccaataaatggcatccttcaattgccttaaaacaaacaaacaacttctctctccactgggaaggagctaggaaggaagagaaagacaactaaatgaaggatgcccatgaccttggcacagagtgtggggagagctctcctctcccttgtgtctaatcttctaatgtgttttcttttccccagtgaagacaagactatactttttttcctcttctatcctcacagcacatagatccaggtcccataaatgagatgctcaatcaaaatttgattatattgactatcacttgagtccagggatttggactggtaccggtccatggcctgttaggaaacaggctgcacagtaagaggtgggcgagagaagcttcatctgtatttacaggttcttc

SEQ ID NO: 25994 - DNA, 881 bp, Bovine  19866880525245
  misc_feature (1)..(1): n is a, c, g, or t
nctgttgcttctgacctgcatataggttaatcaagaggcaagtagggtgggctggtattcccatctctttcagaattttccacagtttattgtgatccacacagtcaaaggctttggcatagtcaataaagcagaaatagatggtcagagagggcttctttgagggacagcattcaagttgatagttgaatgatcagaaggaattaggcataaaaaagactggggaaatgctgtaggtagagggacaaaaaaatgcagaaccactgtcatgggaataaacttagcatattctaggaactgtcagcacattagtaagagctgtgcatagtaagtgagaggcaatgggctccccaggtggcccaaatgataaagaacccacctgccaatgcaggagacacaagagtcatggattcagtcactggattgggaaaattccctgaagaaggacatggcaacccactccagtactcttgcctggaaaattccttggacagaggatcctgaaagccaatagtccatgggattgcaaagtttgacacaactgaacacacaggcacaataccaaataaagttagaaagtcaaacaatagcctgattttactgagtcttaaaactagaattgcaagataattctatttaagatgcccagttatatttgaatttcacatgactaatgtctttgtatctatatctcaaaaattgcacaagacatacttgtactaaaataattcattgtttatctgaaagtcaaatttagatgagtgtcctctattattatttgctaattctagcagccctacttataattcatgataaccagggtggaatttcaacataagtagtacaagaagctacttttttaagtaaaacattttaaaaag

SEQ ID NO: 25995 - DNA, 1428 bp, Bovine  19866880540067
  misc_feature (1)..(1): n is a, c, g, or t
ntttgttgaacaaataaatggaatactcagaattatggaatgttagcaaagtgcaatgacggcatagaaggggaaattaaaaattctgctaggatgaggaactgtgaaggtttgggaaaccaggggctgggggttgtatgtgagctgtcttgaaggatgtgtaagtgttaagtgggtagaaagagaaggcaggatgggagtccagaggcaagtgcatatgtaaatgtggggggcataaaagggcatggtgagttctggaaaccagagtagttttataagatcagatgagggtattagagaaggctgggagaagaggctggtgagatagactgggctgagtaatgcaaatagagaagattaaatatttacataagctcattagtgatactgtgcgcgtgtgacaagtatgatttagtttaaacctccaaggtttaaatactctaagtgcaactgtgtctttttgaaattgattacatgacattaataggctctttctcagcttcagtgatgatcatattcatgatttactcccatctctcatccctggggtcaggaacagtccatcctgacctccatccttccttttacaccttccttaggaactaaagattaactgctagaaacctcctgggttttgtcctctaaaaaggtaagcaattttgcttccaaagttttaacaggcaaattcctcttattatgaggaatagtaaataaaaggattctgtgtcacaaagttatattcttgatcctctgcatcatccgttacacacaattcaacaagaattatttaagaacttgtaaggtgccctatgggctccccaggtggctcagcgataaacaatcagcctgccaagcaggagacatgaggttgatccctggatcgggaagataccctggagaaggaaatggcaacccactccagtattctttccagagaaattccatggacatagaagcctggtgggctacagtctatggagttgcaagcagttgtcagtctctctcccacacgtcttcacgtttgaccttggacaggatcacctgacctatttcagccaatgagatcggatcagaaaggaggtagtagaaatagaatgggtctatgtggttgagaatatacacttgcacccaccatcactctaaataagtcatgcccaggcaagcacctttgggccaggaggagaatgagattggccaacccacaggcacttgagctgaataagtgcttactgctctatgccaccaagattctgtggttttgggttacacagatcaacaagtaggatagctaaagggtacagcagtgtgtgctaagactatgtcaagggttggagaagcccaccagaatcaggccaaactctctttcctattttgttccaaggtagcctagagattggccatgggccataatgttctcttaagaatgaa

SEQ ID NO: 25996 - DNA, 1136 bp, Bovine  19866880541201
  misc_feature (1)..(1): n is a, c, g, or t
nggacacccctaaagcctatacctatctgtgatggacccagggctagacccacaaactgccttctcgtgaaaatgagtttttgttttagatttgagaaggtcaaatctctgattcaaaaacccaggaaaagaaccagcctctcttgactgagttattatggagtaaaggaagagggaacaaatccccaagaactccaaagccatcaagttgtgctttttcccagcctttccattagatgtggtggtgtggaggcagccagcttgctgcaacaagtctgtacaacaagttttaaagcagtgtgaatgccagaaatgttgagtaatatcatgttttcaactttctatatgtttaatcaagacatgaagtagggttcaaactcatttcccccaaaagaggactttcttggcaatccaaccaagtcaagaaaaatgttagaggcccatttgagcctcagagatgactggacatcagaaagcacatggccaggatgcctttgagccaacttggcatgacaattctatcagagtagtttttccatagtctttgactccttctaatctcacatctcaaggcttcatcgctgaagacttaggtttccttccctagaaccagattaaaaagtccccggtaggcctgcccaacatgggtcacttgcctatgtcatttctttgatgagtcttttttggaccagttccgggcgaaggggagttgttgattagggagcttcaaccatttctcacagtccctcagtgttctcatgcttccagagcccttcatttctgaggaagccttcattcatatttaaacattagaacaggagtgtggaaacgtttctcacaggtctattttggagagttctatgaacgggaggaggttgagtgcagtgattgattagtaatgtcttccacatcctgggaaggtggagcaacaacaggcatgccacccatgtgtcatctttgtgtaaaggaccttaaaggatcccaacccaaaccagggacacaaggtgcatcagatagagccttgccttcagagtcaagtgaaaaaggcagataattaagagatttattacaacagagtgacaagagccgacactattgatacatacaggaagggagcaaacacagggagaatgaac

SEQ ID NO: 25997 - DNA, 957 bp, Bovine  19866880546924
  misc_feature (1)..(1): n is a, c, g, or t
nttaagagaatgttacaaagcacattctaaaagttgaaaaggcaactaactacaaagacaaatccttagtattttatgacctgggtggtacactgtccttgggcaatgggtgtgcatacactaaaatggtaagcctgggggatactgcaggcattgaaacttctgcaatactcaagtcataaaagagattacattccatgaaatagaaacacagagtataaaaaggaacatccaaagaacaagagaaagggcaaaaatgtggagaagagcagataaaggatgaaaaacaggtgcattgctacaagtctgctatctgaataacagaccttctagagtcaaaagaagcaggatacagaggggaggaaattatgaaagaaataatacaagaaaatttcctagaaacggaaggctttcattttcagattcaatgggccccactgaggatccaacaggatgaacaaccgactaccccaaaggatatcatcatgaaatttcagtgacaggaataggaaaaaaacctaggatattgaatcatacgcctttgaatcactcaatatcctatgataaaccatgatggaaaagaaaattaaaataatgtgtatattgtataactgacactttgctgtacaacagaaattgacacggcattgtgaaccaactatacttcaatttaaaagaaaagaaaaagaaacaaagaaaagcctaaactcttccacagaggggaaaaaaggaaacaaaacaaaacaaaacaatagcaaaaccaggtcccatatattaaggaattgggaatggatgaggcaatggacttttcctcagcaacactagaagccactggaataatacttttagaattccgaaagaaaattacttcagtgcttgaattttatacacagccaaactatcaatccaagggaagggaataataaacactttttttttaaagggatgtcagatcag

SEQ ID NO: 25998 - DNA, 1374 bp, Bovine  19866880573933
  misc_feature (1)..(1): n is a, c, g, or t
nccttttctccttactacacaacttcctttttctgggtttataaggaagaagtgagtagtaaatggtgggtttctctcttctgtcccactgcaagtaagtgtcaagaggatgagacccccacacagggcacgggaggacactggtgtccagaggggcaggacagattcacagactcaggataaatgtgtcgtaaaagtgtgcatgacatgggtgatgcctggttcagacacaccccctttgtttctgcttctcctttctcagatatatatatttttttcatttatctctttctccccaatcttaccacctcctataaaatatgattttaggcctctctgtgggcatatgcgtgctaggccctctacatggagcaagcacccccaaccagccagctctgagccaggagacacgtggctgatgcccaggtgtagacgtctgggtggggggcggggggcagggggaggcagctggcagatgagctccaggtgatccccagagaagggctgtctcaaaagagagggtgtcatcttcatttccaggatgggaagcctcttttgtgttttgagtatgaggtgaagccccaaagaccccttaccatgcgcgaccagcagggagacccatcaactacatcaacagagagagatcataaacctttctgatctgagatagtttgtattacctgagttttcccctaaaatcctacaggagggcaattgccagcttctaaatttaggcgctcgtgggtgcctgttggcagggagaagaaaggcttgcttcagtgctgtggtttgccttgaaatccagtcaagccccaaattctaaacacaaagcagctgtttgcccagaaagtgagccgggatgtttcgtatcgatggctcttcccatcaccgcctccccctgccccaaccccacaaccccttctctttcttccctctctagtttttaattacgatagtgccaaaaaaactcagtgtgaatgaaaatggggaaaggatgcacattcaagccagcattatctgccatagacgatcacggatttgggggcgggccgtgggcaagccatccaggcagacctgcctcagcgccactgtttacagaagaaaggaaaaaatagaaattgatcttcagcgttggtacaggggccgggtcaggcagggcaaaggattcagttgccactctttcagccacacgaaatgccagctgatctctatcgggccccaaccggatatctttaaggtaaatcttctgttccacactcggagccagggttctactttccgatgcctcgggcggagcggtccaccactgaatccgcccgatcgggtgacagctcgggtacccgagcaaggcgggcattctacaccccctctccc

SEQ ID NO: 25999 - DNA, 3887 bp, Bovine  19866880607589
  misc_feature (1)..(1): n is a, c, g, or t
ntttgtggtgagcaggggttactctcccttgtggtcccagggcttctaactgcagtggcttttcttgtggagcatgggctctagagcgcaggctcagtagttgtggctcacgggcttaattgccctgtgtggtggaatcttcctggtcaagggactgaacccatgtccgctactctggcaggcagttccttaactactgggcaacctggcaagtccctgcaaagtacttcttgcaggacaagtagtatttataaacaggtataggatcctcttctgtcacagagatgataacttcttagaaacacaccaggcaccttttaaatgcagtctggctatacttggaagagaatccccaaagaacagccttttcagttacagaagctttttctctctggtataagaatttgtgtaggcagttcagggccagtgtgatggctgcttgggtctctccttggagatgaaatcttgtaaggaaactttctggaagtttcttccacacttctactccagttaagttctgctcattagacagacttaactggagggccacacttagctacaagttaagccaaggaaattgtgctttgaagtaaactaaaaatcaagttttgttaataaggaaaagggaaagaatgcctagttgttaggtagctagctatttctacctaagtcctctttcaaggccagagtcaacagagaaattatgagaacttaaaatttgaaaatattagagtctttgatactaaaatgctatttttggtttcttaaaatgaaattaaactaacaagtgttatttcaaacagctaagtcaaatttggctatttgaatttagggaggaacagaaaagttggaaacttttaatgcattcagaggtcatatacttataatatgcatgcttttctgtgtgtgtatttacctcaataaaaaacttcaaaaatttttaataaataaaagtcttttttgaaaaaaaaataacagataatacagataataacagaaaaggcattatttagctcctggcagattttagagtgattatgtcatgcaagaattattaatatcagtattatgagtaaagtaactatcttttgtatgcaacataactatttccattttcccaagcatagattgttttttctgtccttttggatcatatttgtcatatatataacaatttattttgtgcttagaaaataaataatgcagagattgatattatttcattttgaatacaataatagtaacagtgcatattattcttcagtaacattatagttttccctgggaaatggtctctccctctagttttttaaacttgtagattttaacgttatcctaagatataatttcaaacgattttctatttttagtaatatcttccattttcttcaaagaggatttcctatttgggagaagaaagaaaggcctggagaatgagatgaaacgtcaacagtcagatcagataagcttcaatacattataagtctttattttgttttatgaacaatttatgtgaaagaagcaggccctgaaatatgacctggttatgaactgaggttggaatcacgttgctaggagacttctgattgactttggatgacgtcatgggcacagccaggatgcccataatacctagttaatacattgtgtctagcgtttcttctaatttttatgtatacatttcattttgtaaatgtaataaaacaccccaagcaacacttttctgggtaattactacacttttagagccccttgggatcagaggtgtactagatatgaattaggaaagtatttcaactcgtaaagaatttctcttgttgataaatctctgttgagaccagcaattcagataaataagatataggttggatctgaaattacttgtggttcttttagagactcactacgaagagagggaaaggggacaattttgaagatactccagaacatcccctgggtcaagatagtgctgaaaaatgagtggatatttgaaagcatggaactgactcaggtgtccatttcacttctttgtgggtaacagtcaaagactgatctcaaagagaggtgagcagagtcatctgtgggttgcaggagctcatctccttccactgcatttaaagatggctgaatcctgagattaaagtgaatcaaaattcctttggtatgtactaaacctttccaactcaatccagagaaagtctaactctgcaatactgttttgttgttgttttttttaataagaaataaaatgttccttactgttaactttttgaattcaccgagacaatctcctaaactcttgaggtctcaattttcttgatggctgtcatcacccccctcccttatcccccattcctttgctttcacttatttgtttgacctatctatgtgttaagttgttcaggaagaaacatttaacatctaaaatccatttcaccttctttttttaaaaaaaaaagaaaaaatcttgaaacatcatttgttttttcttcattagaaagaggaagtggtgttttatcaaatgtaaatagttttgaacgctgatgggttagagttcttctcaccactcaaagaccgtgaagtttgattaggtactaaacttggcaccaagaatcctacattcatcccgtcagccaagtcacgccactggtctccacgttctgaaagctaattacctgcaagttgcttgtgaagcctgtgggcagttgctttatttgatcgtggcttaagcaaataataatcaactcttcatcaaattcagtcaaaagtaacttggaagcaaaacctatcaactgccattttaaaactggatttgaagaagaatgtcttaaatagggggcttcccaggtggcacagtggtaacagatgtgagatgaagtcttatggttagaaaattagaagaatgcttttcgtattagacccatgtatttgtatcaattaaatccttaagtccccatactctggttgttttgggaactcaactgaggaggagaattcaaatcaaattcacctataactatagattgcaaagtaatagtatttcagtgtgtaggtcaccataacagagattctatagacaacacataatttccaaatgataagcccctgatttacaagggagcttcccaggtggggcagttgataaagaatctgctggccaatgcgggatattcaaaggacacaggtttgatccctgggttgggaagatcccctgaaggaggaaatggcaatccactccagtattcttgcctaaaaaattccatagacggaggagcctggcaggctccagtctactgggttgcaaagagttggacataactgagcatacacaaccagccaacttaaaaagacaccaaggtactcattctgattatactgtacgtgcataaattgttcacatctgaaagcagaagtgcaactacactgtcctgggccgatcctggcacctggtggctgggcaaggtaacgccttttcttaatacattgccttccaacctagctccttgtcattactcctttgattcccccaatcagagatattgcacttgtgacctcatgctacttttcctctgccttcacagctcagttagctaccatatcctagcatctttttctgacacatgcacacttaactttccttcttctcactcaatttcttcatctctgctgccttccaatgtttgcccatgatcaaatctttctcttccttttctatcactctgtttttcaaaactttctattttatattggagtataacctattaacattgggtgatagtttcagatggacagcagagggactcagccttatctatacatctatccattctccctcaaactcccctcccatccagccgagcagagttccctgtcctgttcagtaggat

SEQ ID NO: 26000 - DNA, 1245 bp, Bovine  19866880636058
  misc_feature (1)..(1): n is a, c, g, or t
nacgctgtctgccctttaccgtacttggggtcagagaagccagcctttgacaaaggaccccccggaagagccacttccgtccctgccacgcccccatcccttgcctgtggtctggaacctctgtggttgctgcccctacctcctgcatcttccatctccctagtccccctcctctgccctcaacccccatccccaccattaatgagaatcagaaggagggagaggtggggacttgaaagagtcattcctttcttatttataggtctccaccagaggaccaggggcgaggagtgtggtctctaccctaaagcgaggagcaaagctctcataggggccagggtcctggctgggcttggcctgtgacccctagtgccttaatctccccagctgtacaattaggtaaaagttgggctacaatgaaaaccagatgttacatcaggagcaaagtctcctgggcaaacaaattaaataataaataaatgctttcggttttactagcgactggccattctgtctttcctcccaggctccaattagagtactcccgttgtcttgtggagttttaaaacccaagtgtaaataagaacgggtcctgcaatggcagaaatgcttgctagttttgatttttatttttgtcgatggtttgcctttggtttggttttctgcaatgttgtgagcctgtttttgcaaatcctcctgagtatgactttacattcaggtttaagttgggggtggggggcagcaattaaccaggttgtacttttttttggtcatttggggatcactgatcttgggacagtctcatgcatgaaggactctgaggatcacggagacatagcgtgcatttctcttctctgccaaaaacccacaccaaacccaaatctgcaggactccagctctaggaaaagcaacactgagcttgccggtttaactacagccagccgttcacttgagagtctctctacagtgtttgtatctgcttctctgccttggcatttagagaaccatacttggctgaatatagaacttaagaggtctcagacacattacgctcattcattctttgccttgtgaactcattcattcatttaggaaatatttattgagcacctgttacgtgctcaacacttttcctggagctgagcatacagctgcaaaccagcagagtccctgccaacagaaggactaaaagaaaaagatgctgattgtaccaccgatttcagcattagggctcggtcattccta

SEQ ID NO: 26001 - DNA, 1481 bp, Bovine  19866880653866
  misc_feature (1)..(1): n is a, c, g, or t
ntggcagtgggagaggaaggctcttgtgaaattagaagctgtaagttcaacaaagaccatcctccccatcacttggaacaagcctccttggtattttaactgccacagaggagagcagaactgagacctggagagagacacaggttctaaaggatagaacctctggatccagccatgcctgaagatcgcatcaggctcccagttagataagccaatcaacttatccttttcatctgagccagattggattagattctgtgactcagcccaaagagtcccaattagcatagagtcacacttggtgccccttcctcctccatccatacaccagtcatcctccagggtcatctccctccttaatcttgcttctctccatcccctggtctttcagtgtagtttaagcttttaacctacttctttccaatgatccctcaaagtaggggatgaaatgagagaaaggaagacacagtggaaggagaaaatggaacagaggcagcaatataccatttgagtcaagagagccgaaggaatgaggatccacctgcagcaaccccacagatttccacacccccttggatttgtgaagctaacaagccactttgatacctactggatccctgtggtgactctgcaattaccctgcttatttctttatttttggcttcaccggatcttcactgtgggatgccagcacttcgctgcagtgcgcaggattctccagttgtggtgcatgggctccctacttgcagtgcttgggcttagttgccctgtggcatgtgggatcatagttccctgactagggatggaacctgtgtcccctgcactggaaggcgaattctttttttaaccactggactacaagggaagtccctagcctgcttgttttaagagaggagaaaaacctgacacagagagggtgagtgtcttgttcaaaggtcacacaggtagaaagtggcagaaccgggatgcaactgggtcttctggctttaaacttcatccttacaaaacctcagagcatcagaaaggaaaggcttccaaagatgtagataagagagactgagatgcagataagaaagagactgggtggatgtctgcctaggagagtggtgatttacgtgatgcatggaacgggtgcgaacgtgtattgtgtgtgcacacacacacacacacacacaggcaacggcccctctcatttacgtgcccagggagtgactacaaccactcagggtgatggtgatgaagcagagccactgccaggagcataaacaacagacatttaagacaatatttcaaacaatgaaatagtgctggtcggcttcctacgcaaagcccagtctccctcctttcctggtggcgcaggccttcttcccagagcctccaggctcactcccagcctggcctcctgagcactgcccatatctctcaataatgtacgtctgccactatttcctgattcatcagttttagacattatctatcga

SEQ ID NO: 26002 - DNA, 953 bp, Bovine  19866880694561
  misc_feature (1)..(1): n is a, c, g, or t
nagcctggcacaagagcatctacattccatggtgtcagctctgtaacactgagactttgtgttctagggactagaaccttccagattcctcaagttgaaagtcagtagctcaccgatattccagtctccatgaatatctaataatttacactgttaatccaccaaaggggtctcctattacatttacaaaaataaaggctgacacctgtgacctacatttttttttactcttttacatctgagtgtggaaaaaaaaaatatttttgaactctgctcttgagtaagacttcattacagctgatgaatgacaaagcagttcatcttatctggaaagcttttccacgaaataccaagggagaaaaaagccagaataaagatgtgaataaatatattgacagaattcaaagacaagataacggatttgatcatgttcccggcatcatggctgtgtggggggcagggggaaggttgccagagctgtgtttggttatagattaataatccaaggtacaaatggttcggaacacattagagaaaacataaactacaatattcaacaaactggggttcaaaggttcctggaatttgcaaaatgttcttggtcatacatttttgaaaagtgatgacacaatatggagtttttgaactttgccacacaaacaacaagtggatttttgcttgaatcacattaaaaagtagtgcagttattaacacacacacataaaaaaaaaaaaaagagagggaggaagctaaatggaaaagtttgaaagagccaactatcaagttgctaataattgaagaataatctgataattctattgtagaaaatgtctcttagcttatgttcctcactgcacagtgattaagaacctggcttcgggttcagtgtgtggaccttgtttgtctctgatacttattggctctacagtcccaggcaagtgactgagctcatt

SEQ ID NO: 26003 - DNA, 1154 bp, Bovine  19866880718774
  misc_feature (1)..(1): n is a, c, g, or t
nccatggaattctccaggcaagaatattggagtaggtagccattcccttctccaggggatcttccccaatccagggatcaaacctgggtgtcctgcattaaaggcaaattctttacaatctgagccaccaggggagcccctttaatgatctgctgctgctgctaagtcccttcagttgtgtccgactcttagcgactccacggactacagcccaccaggctcctccgtccatgggattttccaggcaagagtactggagtgggttgccattcccctttccgctttagtggtctaatacatagtaaatactcaacaaatatttgttaaccaagtgcatgagtgattgttgaatgaatcctgttagggagactggacacataggtaaaacaaagaaaaatgtcacccaatagttgcaataggacagaagagattgcaatactctggatggtcagatggatctgaaggtgagggaaggtcatgagtgagggggaactggagaagccttgcatagagtgtatctgtgtgtctggagctgaactgaacaggagggagaggcaggtcttggcctttctctggaaactccaatgaaggagaaacttagtgaaaaaagtacggggccgctttgtgtacagggcgttctatatttcttctcttgccatctagaaaagaatgactccctgttttcattgggaaatacagagacttttcctacgatgagagcagaggctttgtgtgattaattttagcttggattatggatatgtaataataaaggccatttaaaaactgattatagatgtttatttttaaagcactaaaatgctgaaaccccatgctcaactagagtaaaaagcttaattaaaagcagaacctttctaaagggcaatcggacctagtatccatataaaacccccacactgggcataggagacaccaacaacccaaaggccaacaataaatgcaccccataaaaccagaaataaaatgagctctgtctgaggcatgcagcaaggggaggggcggccccgcggctgtataattgtccagccctcacctcattgaggccaattacctaggggaggattagaaactgacctggaggtgaccacttgtgctttaaagtgaaatccaaagtgaaagagctcgcccaaggg

SEQ ID NO: 26004 - DNA, 1186 bp, Bovine  19866880736417
  misc_feature (1)..(1): n is a, c, g, or t
nctctgatagcagatttaattgaaatatgacgggggaggataatggagattaaattaagctctcagataatcatctgacacagagataattgagccagcctctgccacgttgatgaacgcttcggagatgctgtgcggggtggcatttcgagtatcttatccttcaggcaaaatggaattcttctccctccacccccccttcctctctctctcttgtcattcaacatttgtatcctccaaatcgataatgtgaacagcagcataattggaaataaaagatgatctgaaatccacaggaaattaggttgaggtgcgcagaggagtacagttgtgtcctagacacaaggggggcttttataagctgtccataagaagaatgtgcctcctccctgaagtctcactgggactgtttgtccaatacctctgtcctcaacggaaagaacttctcatgtttgagacagggaggggaccagacagaagtgacttcgtgctctcttgactccacagggaacattgccatgcttttcagggcaaattcagaatgtagtgtgcgctgaagatctggtacccagtactggagggcatggagtcatcctatagaggcagctagctcacggtggttattagtgaatgtcaggggttacatgtgatgaacagttaaaagcaagaagtggggaacagagttctggttgttgtcatcacaagggtcagccttcaacagtcctagagagtagggacccaccctctttaacccaggaactcctgcctctccaagggttgtgagtggcaagccaagtatagacaataagatggcatgcaaaagggggtcttcaccctttctccacccaaccagtgccccagctactcagagtttcaggtctgggattttagaccaatgtgatttacctgctttactgatgtggagctgggagaatgtggtcacatcttctcaagagtccaccgaaacatctgtatcacatttctctcttattcttctcttccttgccatcaccctgcccatgaacacaccaagaattccctgccctggccactccctgtactgtaacataattcaggggcacccctttggggctggaggaagccactgacacaagtacccctgggaagtggattgcctagcagacaaccaacctcccagagcaaagctaggcccctaaacttaata

SEQ ID NO: 26005 - DNA, 1273 bp, Bovine  19866880764575
  misc_feature (1)..(1): n is a, c, g, or t
ntggtgggaacaacatttcaagagggtaagccttgattgcaatacctgtgattgcttatcaattctctgcttgcaacatttttgctgatgtccaatgggccagaaggagaaggaaatggcaacccactccagtattcttgtctggagaatcccagggacagaggagcctggtgggctgctgtctatggggttacacagtcggacacgactgaagcgacttagcagcagcagcagcagcattggccaaagcaggtcaccggccaaaatcagtgttcatgtgagaggaagctatgtgaggatgtgggtactgggagatgtaaaccattgattgcttcatgcatgggggcattagactatcaatctacgacaacgtttctccttttctcatctagtctggtcatatggttggcctccatgtagtataaatggaataagtatccaaagagctgattatagatattatttttttagatgaatcaatacttattatattcttggcatatattatgttatgtacatgtgctatttacataccatttcccaaaggactaaaggatggttgcaataaaaaacagatacaattttaagcattagaaatgttcgaaatccttgaaagctaagtttgttgttttaattaaatattcaatttaacatggagcttcctaggaatcaaggcaaaagtgtagaaacacagtaggtcaattgttcttcattacttactaaaagaaagcacattgtctttatgagtgaccattttttcttgtctctaaatacacagagtatcatagagaatggggtattccacagagcatagctgagtttgaagaagcattattttggtaataaacaccaatggactttttaaaaaataatttatattggagtataattgataacaatgttgtgttagtttcacgtgtacagcagagtgattcacctataccaaaaaatgcataaaagtttccagttataaaaagaacaaaacaaagcaacaaaggtctatcattaaagtgagcttcagtgaagatgtttctgacatgggattaaactttaggagaaaggaaggtttctggtatgtttacataggacaaatttagagctctgaacactcaaagttatcaatgcaacctttgaccatgggggacaccaccagagacacctgggctgtatgcatccactgtgggaccccaatccttcctgtccactcattctagaatgttctgccaaaacctttcatagttttctcttcttccctcattcaggtctctactca

SEQ ID NO: 26006 - DNA, 1069 bp, Bovine  19866880785218
  misc_feature (1)..(1): n is a, c, g, or t
nggataaatcgagtctaatgcagcctaaccgcagcaaatatccatcaggggctacacacaatcacatctctgggcagttttaatacataaaccataacagcctggagctgggcgtccagggcagacgctcagaaaattcccgctggcacctcatgcctcttgcattgtctattgagggtgatcgccctctgctaaagtgaacatatttcactacaataaagctgtagcaaaggagataaaaatgggatctgattgtgtttcaaggctagccagtccatcttcttcccctgcaccctcagaggatattaatgggaattaacataatgccagccttttcttgttaactgcctgcacggtcccagagagaaacattttcacactcatgaattcaccccttcgacactcagaagtatctgtttttatttttatccaatgctttctggacatttgttatggaacagtcatggggcatggcattttgattccctatttgatttggtacttagatatgggtttccttggtggctcagactataaagaatctgcttgcaatgtgggagacctgggtttgatctctgggctgggaagatctcctggagaagggaatggcaactcactccagtattcttgcctggagaatccccatggacagaggagtcgggtgggttacagtccatgggatttcgaagagtgactaagcacacagcacacacttcgacataccctaggaggatgttagtcctattgtacagaagaggaagtaagggctcaggtgaattcagcagctggtcccagatcacgtggctggataagtaggaaagctgggtctttgggctgcacaccacagccaggtgctcaatgcagggcatccaggagaaggcaaagggaccagattcaaaccctggatgagcttacatctagttgggaggcaagcctgtacacagttcatagtgagacaaagcagcatgacataagtgctattatcctgcgggccaggagttattacggcacacaaaggaggcagagagaataaactttaacttagggaatggagagtcagaaacatcag

SEQ ID NO: 26007 - DNA, 1076 bp, Bovine  19866880799801
  misc_feature (1)..(1): n is a, c, g, or t
nttatcattctccattttcataaatcggggtgttaatcccttaatggcttttctcagtgcttaaaaaaaaggggggggggcggggccggtgggtgtagggggaagagaagaaacagggggaaaaaaaaaaaaaaacgcccagccttgctaatcctccagtagacaatgcatgtttacataggcggccctgcagcgtgtttactcaaaaaagcgggtctggttgcagattcagccccttctgtttgttggctaaatgggaggcccttcgctcccagggatctgccttttccccaggtagagcccgcctctgctccggctccaggttccttgctgtatcttggatgaggcctctgacctttgccctgaaggcccaggaaggccttgcatgtgaggcacaggatgggaaaagatgaagtagggagatggtccttcctcgacttcccaattcacaatcccagtgacttcttattctcctttcacgggagcagcagttcttaacatggggttcctagacagcagggttagcatcaccagggaacttgttaaaaatgcagatcatcagatccccctcaacctgctgaatctgaaactctcggtaagggttcagcaactgtgttttaacaaatcctctgggggatttctgatgcacctttgaaatgtgagaaccactgtacttgggaatttaattcaaaggttaaaaggtaaataagtgaaaataaagatcattttatacaacaaacattggctgacttatggtgccggtttggtaagactttggagtccaagcattgattgaatcagagtgggaacaagtctccaagaagattgcagtctactgagtgggctccctatatgttagagccctgcccagtcttccttttaaattctcaggtccttgcactggcataaagttctgggtcatcaaaatcattaccattatcatcatcattctcatcatcaaggggggcaggagtgagttaagagccttgcctcagtttcctctgcaggaatcaggatttcatcagaatctcatgttccatcatcctgtctgagctcttgttctaggcaaggccttt

SEQ ID NO: 26008 - DNA, 1311 bp, Bovine  19866880841142
  misc_feature (1)..(1): n is a, c, g, or t
natttattacttgtcttttgctctaactctgaggtgcctctgggcctaggctgtgttgattcatttctgaagcacatagtaggtatatggagttcaggtgacacagtaggtttctgggatggatggacgttttgtgctttttataccattgtcaccctcggattaataaagactccatcactggtaggcgtcaggtgctcgttctaggggtaatctgaagaacatggcagtcaagggaagggcctcgcaggacttaacattctagtgggagcaagctggtcagggtaggtgtgccataaataaatggataggtgaatgagagaatttccaggaatgatcagccctaagaagaaaatatttaaaaggccaggaaacagtgatgggagttggggtgcctgagactgggtggtagggaatgcctctcttacttagatggtgacatttgagctgtcacttagggaagaaagcaaaggtacttatgtaaagtatttgaaagacaacgaattagtgaatgtagcaaaaaagagacagactcacagagagatcaaactagtggttaccagtggggagaggcaagacactgttaggagagtgggtggaacaaactattatagataaaataagctacaaggatacattgtatagtacagaatatagccaatattttctagtaactcttaaatggagtacaacctttaaaaaagtattcttctttgtgttttcacccatggctcctgcttgatactttacaggtcctcagtcaatatttgttggtagccctcatgccccctctggactctgcttgtggagtccgcgctgcaaatcctcattgccctttgaattctagcgtcagttctagaattatcagccagtggggtgtgagtgtacactgtttgcgggcaaagtctgaatcgagccctgaatcctcctgtctccactcggttctgttttgacaaagagagtttctttaaaatagacgggacagtaatcgcttcagatcaatcatttaatcgcacatcaatcatcgtcgtcgtcatttaaaacctgaaaccgcatctgggcactcgggccatttcccggtccaggtgtgaacccaggaccggcgagggggaaatatgtgagcttcccacccaggatctaccttgagatcaaatgccccaggaagggaggatggggtaatgttaccattgtgcccggataagaaggtccccattccggcctccaccccacagcaggcaggcggagaggtggaggagaaaaagagcttaatcattaataacactaacttgcattttctagagccttgaaaat

SEQ ID NO: 26009 - DNA, 2682 bp, Bovine  19866880847191
  misc_feature (1)..(1): n is a, c, g, or t
ntgaggtggccaagtactggagtttcagctttagcatcattccttccaagaaatcccagggctgatctccttcagaatggactggttggatctccttgcagtccaagggactctcaagagtcttcttcaacaccacagttcaaaagcatcaattcttcggtgctcagccttcttcacagtccaactcccacatccatacatgaccacaggaaaaaccatagccttgactagatgaacctttgttggcaaagtaatgtctctgcttttgaatatgctatttaggttggtcataactttccttccaataggattggtttttctatgggaattttatgggaataaaatgagacaaagtgtttactgcatattgagtgtccaataagaatggtaactactatgattttttccattattcttaatcttactctccctagtatgagtgctcactgtccctagggagacagggtggaatggtgtggtaatctctggaggtgagccataggtcacgctcatctgtgctaggacccaggtggagtttcaaagtgctttcctagcaaagttgaccatgcttttggatgtccccctacacttctgacgggcaggggctttcactccaacctggaaggcaagcatgagggctactgtgtgtaattccagacaccattcatttgtgtgtgtgcgtgctaagttgcttcagtcatgtcagactctgtgactccatggaccacaagcccaccaggctcttttgtccatgtgattctccaggcaagaatactggagtgggttgccatttcccctctcaggggatcttccaatccaggggttgaacccaggtctcttatgtctcctgcaccggcaggcaggttctttactactagtgccacctgggaagcccattcatttatgccagtggttttcagacttcagcattgcttggaatcacctggagggcttcccaaagccgagattgcttggccgtgtcctcagcatctcagaattgtgtttctaccatgtttcccagtgatgttgaggtggccggtccagcactttgggaactgttagcttagactatctaccatgtggcaaggaaattatgctgaggaggggtggttagaaagatggatcctcgggatgtagggaccagagagggtcttgctctccactgtctgtgccaatgggctacacagataggtgaaggtgcaaatgcccctgattctgcacttagaaccccaggctcctctattcccccagttggtttccctgagtgaggctggtgcaggcattaaggaatacagtctcataccaaggactgatggctgatgactagggtcgggggcaggggtggggagcagggatagagacgtctccatggggcaggatctgttcctgcgacagcagagcatggtggggatacaatagggatggtggctgtagatgtgatcttcttatctacccaaatgagcacatagctagcacccagcctgcgtatggaggcgggggggggggggggtccctgcccctctaggttggtcctgcagaaaactgttagcagggtcttcttttctgggtctaaggatgctccccatccttggttagaaagggaaagatctatagatcagacacccctcatgccccacttcaaaaccttcattcccacctcccactcaagccactgcttcaggagccaggtccataaaggcagcaataactttgcacaggtgcagcctaacaacccctcaccttggccagcatcctgtttgtgtccctttctgccaaagctcctctaacaccatcttatgggatgcccagtactcacatatgcccatccaggaagtgaatgcctttgaccacaggggacggaaaccaatgaattattgcttccccatttcatcctctgggtggcagctctgataggtacgccctaaagctctcccaaaagtgccagggtatcaagtccagtcagccatattggtggccagctccacacagtagccttgctttggccttctgaccttctctgtttttcacctcctgccctgcatgccgacttcctggaacctttcttaatgagcttcttgaacacaaacctctgtctcaggctttgcttttgaggggatctctggataaagagcttcctgagaaaagatctgaggtcccaagtttttaagagatcattcaccagccaaccactcaaaaaatgctctgaggttaggactcacacatgctgggtcctagagatgcaacaacagaccagatgatgaataggtcacaggtcttgcgtcaagggctcccagtgcactgggaaagcagtccactagctgccttaagctttgaaggggaataaatgccataatcaggagaaacagagcaggcacccaacccactctgcccagaagagtggcatctaaactgagatcggtcgctagaccaggacaaaacccaaatcggctcttgagttttcaaagtccaccccaggaggacaggagttagatacatgtgatgagtataactttctgtgacatcctttctagaacatactagaaactcctgacttgccctcagctctcccttgagtctaaccagagcctgctgctgctccagtttgtcccttttctcccactctggtctttaaggaggtggagaggaatgttccagtaccaggagaatagaatgcaatcaatc

SEQ ID NO: 26010 - DNA, 1567 bp, Bovine  19866880870997
  misc_feature (1)..(1): n is a, c, g, or t
ntagccacacactatctaagggaagagggttctagctgaagggagcagcaagtaaaaggccctaggtaggttggggtggggtaggggttctgatatgtttgagaaaagcagctagataatgactgcaaagggtctggtagatcatattcagggctttgagtttgattctgagggtgaagcatgtctgtgtatgtgtgaggtggggtagtgaatggaatgagggtcaaagaagaagccaagtaggaaagctaaacattcatccaggtggtagatgggccttcatctagcgtgaaagcagagaggagtaagaagagatgagctatattttatctacaaagaggagtagcagcacataccgttcatggttagaatatactaggtcaaaggcagctcagagaggtcaagggtattgtatcattttaggcctctcccttgagattaaggccaacattctggataatcttacatgccttgctttcaaaagataattttttatttttaataaacaatacattattaaccattattttgcctgtatctttataaccctgtcccataatttctatagaaataattattaaaagtagaattattagaacaaatgatataagcaatttaaattccaagtagatgatacccaatcaccctccaaagatgtgaatgatataccatagattttattttgtaggtgtcttcattaaaaaaatttttttttactttttttgcagtactgtggggcatgtgggatcttagttccctgaccagggattgaacttgtgcccgctgcattggaagcgtggagtcctaactgctggaccatcaagaaagtccctttgcaggcatctttagggcagaggaatggcgtggacagagctatgtcattctttcatagagttgtaggggaagtgatttcattaaagatagataggaagtgtttaggggatgtgctggcaagacggcaggggaagtgccagcttttaaagctgatgcaaagtctgaatctgcctgtagctgggcaccgggagcacagagacgccagacaagcagataaagtggaaaggattcttcaagacgtgcacccacacacacattgctccggaagaggcccatattgctagaagcagcagcgggaagccattatgagagcttgcacaatctattctagctgagaatgtttcccaatataatttacaaaatttcagttggaaatgcattagcagctgagcagtgaggaacttctatggggtaaataggaaaactaaattaaaaccccagcttcgaacacgatcgaaccgtgtgagcagcccctgcagtcttctctaaccttttcaagtccaaagagcccttttgttctacccagtttatgggttggttttcatttgatttggttgcaggaagtttttatggaatccgcgtaaatgactgctgatgagcttgcatgcaaaaccatccattcacacattcctcgtaaaagggtctcggaaggaaagagagagacagacattttaaaacccacagcacaaaagagagatcaagcgtagagtaataagacagacagacagtcagg

SEQ ID NO: 26011 - DNA, 907 bp, Bovine  19866880882537
  misc_feature (1)..(1): n is a, c, g, or t
ncaagatggagaccccctttattcccttcatctctgccttccccgtgtcccttgcaaatggctctgcagaggaaatggctctgctcaagaaatcattccttttggcttaataatagtgggaaggggaaaccagaaacacactcaatgactatctctcccgtccacagggcctctctgttggcctagctccatcctctttccccaaagcctcatctgccaataaggagggcccctgccctccagttctattgggaaggtttgctttcctggacacttttcatggcactctttctacacaagcacgtgtgtgcctgagctgcctgtaagcctgaagaatcaccccttgtggctccctccccaaacaagctccaattagacaccacttaatggcatctccaatttgactgtctgtccaagattccacaatgcatgggaattctcccagagattattcctggatttcccatcctcaaaacaaggaggggggaataatgcatgattgaaaactagccaccaaatggtaaaaaaaaataaataaataaatttgcagttgtgttgctttgaaaacttattgcacagctgggggcatgtaaagaacttaattaacaagctttggccgcaatgtgccccctctttgggaggggaaaaaaatcactgttaagatttgtccaattaaattataggagagttggtgaattcaaagagagagagaggttgggggaatgtgctttcagtttaaaaagaagatatttagtctgctgggagacctatagtctgattaatttcagtgctaagcttttctgcacagtttccacaaattcataggcacttaagaatttttaacccaaatgtaattataggttttgataatcaggcttggttaaatacagtcccctctttcttataa

SEQ ID NO: 26012 - DNA, 820 bp, Bovine  19866880883999
  misc_feature (1)..(1): n is a, c, g, or t
nctgaaatggttaaattgaagatgccaatagctcatttatatcacaattaaagactgcctatctgactctgggtctaaagacttaggtaagcaaaatatttcacattatctgtatttttcattattttaattttgatgctgaacctccatctcctcctcccttagtctctaagaactacgtccttgatttgaggaacttccttgatcttcatgctgttggctactcaatgagccaagattttggatttctgggctctgccagaaataacctcaaagccaaggaagcacagaaactacttcctgcctaatggggaaagagaattactcaataacaaacacaaagctcaagagaaaatacagttcaatacaaagagataccccatgaccactgcttcagaaaattaattttatccaacaaagatcagcttgaatgcagcaagttggccatagattctgcaggaaaaggtgatggtaacaccctgggagaaagacaaagacatttgattcttattctaaccttgggcacaatggtcatgttccatttctgggtgtcagttttgctatctgtaatgcggggataaacagatcaacctctccaaaaacatagcaaagatacaagagctctgttactcacaagtgttatgtaaaaatttgatccaacagccaaatcaaataagtctcccagactggttcctaaagagccatattttgtaaagctttccaggtgattctataaaacaagtaagtctgagaaagacaagaaagtattaatgctttgattaaagtagtagctgtcaaaaagatctaaattcaccagtga

SEQ ID NO: 26013 - DNA, 1153 bp, Bovine  19866880893933
  misc_feature (1)..(1): n is a, c, g, or t
ntgtacaaagtctctttttatttaggaaaatctattttaaattaaatatcataagcccacgagccatagcaaacaatatttttgaccatatgctccgaattaatatgccaaacattgcaacctctattttcttcatagaaaggggccccaccctgatgtggggatggggagcctggagggtaggaattttcaataagggcccgaggataggatgatggcaaggaaccagcaccagccttcccagctttatccttcttctgaattatctcaacacagacccacttcccttttaagaaagaaattcccttcggtccatttttctcccttgtctggaaacctcatacccaggaatcctagcaatgctggccacagtttagatgacttggtaaagttgctataattcctttcatctgttgcttgcttcattcctgggtgatagggtttgaaaaccagttcctttcatcaggtgttgggcagaaatggaaactcggggctgaggtcctagtgtgggctacttcgcccactgcccccaggggacctcccaacttgccctcctccaaattccttctgtaactcttccatgcatgacggtcaaagagtaacaaggcttccttgggagcctgagccccatggccaccaagaacgcgacgagctgtttggtccttgacaaggtagggaaattaagaggattcatgtagaagggggctagctgccttttgtctttgcaaagggagcatctgattgtttggggactggtttcctgggagctatggtgccctaaacccaagcataaaaatctgatcttttataagatcctagggctgggctgcacgtggctggcacctcttctgcaggggtggtcacaccaggagttgcttcaggcactggaattgttttttgtgtggagacttaaaaatcctccagcatgagatttgacttttttgttcctgctgcccatgttccctccttccagtaactccttccccctgtgtccctttctcccatcttaccctgtttcctctgttttttacctgcttttctttcccctcacttttttgagtctctatctatacaactttgggtgttactataattattctcaatatcaagaattattggtgacattttatacccaccaggcaccatcaaattt

SEQ ID NO: 26014 - DNA, 1292 bp, Bovine  19866880899400
  misc_feature (1)..(1): n is a, c, g, or t
naaacacttggcgtattccacacaacacccccctcgcgttttgttactgcagccgtcagctttgaaatataccctatctttcctcccccggcccctcgctttaatgtaccctgcagctgctaaagatggtgttgtaactttagaaggacctcgctatctttctccagctctttaagtaataatcataattttcattgtggttttttttttcttcctcaactttcttttgcattgattaattattcaaggagtattgctgggccagagataacatgtgggaacgtgcaaggtcagcccgtgtttagatcagaagccccaattctccctttgattccaggatgggcagcaactggcaggttggtatggtacatgggaagagagatggttctgtgctgggtgcaggaaatgggaaagggggggtggggttcaggctttcatggttccctgtttatctattgtggggaacaagggagaggcacccaaaaatcaggtcagagggagtggggagcaggctagaaaaccaggcttcagacccagagagtggacagagctggggatgggcaagatggcagcatgagggcagtggagtggtggcgggggggaacccagggagataacattgtaatcactccagctgagagcatttccagacgagaaaactggagttgcaattttcctctcataaagaggtgaagtataatatcaaataaggagagtggggccatggtttgtggaggaggaaggacaatatctccttgtctgcatgacgtagtaataacaggccagattcctttcttctcaaacagaatagaagctccagatcttctgggggcacttacaatatgaacatcttaaggatatatgaagtctggattagcttcaaagtaatccaggctggaaaggggatgggcagggctatagatgaaacaaaaggagccctgcattaataatggttgaagcccagtcatgggtcccgggggaggggggtggtttatcagatgattctctacattttgattatatctaaaaatttccataataaaaaaaatacatgtcaagtttcagaactcctttctgacgtgagccagcgaacaacttaccttctcaggactgaggtctatgggaagaaacccagagtggaagaccagtattgttggttgactaactagtttttgggactctgtactcttatccagcccatgaaaacttcttccataaaatgctgatgaaaataatgtttcatcacgctccctctcaggcgtccacagggcttcctatgccccctgcaccag

SEQ ID NO: 26015 - DNA, 1809 bp, Bovine  19866880936754
  misc_feature (1)..(1): n is a, c, g, or t
nagtcgccaccccagtggggtgtcaggggctcagggtgagggaggaaggggacggatggagaagagatccaagattggaagcagccagtcaataggattttacaaggctgacacattttaatctaagacctggagcacgtgcccagctttgtcccaggggaatgggccttgctacctttggggtttgtcttcagaactgaagatgctgagatgagaggctgcccgtttctcccagaattagggtgggtggaggttagttccaaatagtgcccagatcaatctgactcacattcttggctttgcctcacttttttctttcctcataacatggggagcaagaacattcacctcataaagttataacagcccagtctatcatagatgggaaagtgctttgcccattaaaatgaaatctggtattgcttgctattacactttccaagcttttactctgaaaattgcttttaattatttgcaaatatatctagcattgagtattactcttcactcttatcacatattacctttattatgctttgctgtatcttctcctggaccaaatgtcttgttgacagtcttttttattttttaaaacttctaactttgttatggagtatagctgattagcagtattgagatactttcaggtggacagcaaaggaactcagccatacaaacacatgtatccattctcctcctccaagagagcttctctgatggctcagtggtaaaaaaattcacctgccaatgtaggagagcagattcaatctctgggtagggaagatcccctggtaaaggaaattgcaacctactccagtattcttgctgggaaattccatggatggaggagactggggggccacagtccataggggtagtaaggagtcaagcacaacttaacgactaaacaacagcaattctcccccaaactcgcctcccatccaggctgccacataacactgggcagagttctatgtgctatacagtaggtcgttgttggttatccattttaaatatagcagggagtacctgtccatctcaaactccctaattatcccttccctctgtctttgaccttggcaaccttaagtttgtttcctaagtctttgacagtattctttagaacatcttttaaacattttttacttaaattcctcggctaaatttatgccaaggcaaacatccatgaactcagagatttttatgggctagtagtgtattttctaaaacagatgacaagaaatatctattatcattaaacatactgttcgtgaaatttcaaacccacatgatgatgtttgccaaactagtggtgccggaggagtagtttctcttctttcagctcactttggtggaggcacggtccacttcacgaggctaccatgcagttcccttgccaccagaacaggttttatcttgtttgtagaaatgagtccacagaccaggaacttggatattgtgtcatttccaaagttactgacaattccaaaaacattttctcaatatttaccttcagtttctatacttgacatcaatcaataagaaagagttcatggccctgcagtgatcgttggccacatttggagcagcccaggtgtgcaaatactggaacacactgatcttggggagagagggtccagagaagaatcagcagattcggtcagcagggacttagaatttctcagcctcagcttatctgtctataaaatgggtcaaactgatgtggctcccagactgctgaccttccttctcctgcaccaaagaatttattcatcctgggaacatccctcctctggccccattacaggg

SEQ ID NO: 26016 - DNA, 1415 bp, Bovine  19866880953602
  misc_feature (1)..(1): n is a, c, g, or t
ncagcaacgaagacccagggcagccaaggaagaaaggaaaatgttcacgataatatcaggtagtggcgggtgccacagagaggataagccagggtcatgtgagagaaagtgttggtgaaggaaaaaggctttatattagcaggctgggtgaggctggcctgagctccgtgtgctcctggtctggagaggaggacagaaggtctggaggtgggaatcaaaggcccccgccagacatggtgtcaggaaggaagcatggtgggtcacttaggaccgagactgggagttctacagactcatgtgaggacaaggaagtgtcacaggagggttttcagcagggggattaatctgattttttttaaaaattgaggtataaactggattcagggagtgcatcagtgtgcacacaccctagtgaatgtctcaatgaatgttcacatgcacacctgtaaaaatacagggtagttctagaaccccaagcatttatgtttttaaaagatccttctattgctcagtggagaatgcattgcagtgggggtgagagtcaaaagagggagaccttagaggtgaccatattcatccaggcttggatcaaggtagataacattgaaacagaaaaatgctgcaagagtcaggatgctttttgttagaagaatcaacaacatttgctcttggagggacaagggtgagtcagagcaagaaaggaattgagactgacatctcagttttggatttaagaatgtggataggctgggagtttgggattgacacgtacacactgctgaaataatcaccatgaacctactgtatagcacagggaattctcctccatattctgtaataacctatacaggaaaagaatggatagatgtataactgaatcactttgctgtatacctgaaactaacacaacattgttaatcaactatacacagtatatataaaaaaaagaaaggacatggtagatcatgtggccatggggcagcctggggaaggaaagagaagggggatggcatggggcaatccagtcggatgacataagatggtcccttgaactggttcatgccagatacctttggccaccgtctgcttccccctgagcccagagcagagctccctagaagatgagtcacaggatggggagatctgacagccaaagtccctgatgggcttaaggacagaagaacacagcccctgacttgcctgagggcatcgggagaggtaggggaagggcagctttgggtgaacactgtgttccatggaaacctgggtcactggaaggagaggtgacaagtgggaggtgacatctgcttctcacccaggaaccatctgctcactaatgcaaacagccctgtctgtcaggcgaggtgaggaaaaatgactggggcagccccactgtgtagcccaaggagaggggt

SEQ ID NO: 26017 - DNA, 1000 bp, Bovine  19866880957158
  misc_feature (1)..(1): n is a, c, g, or t
nattgagtgaaatgaatggatgttgattcactaagtgtcctgaggtgaaggtgcttgggagagcctattatgaactttgaatcatgacaaaggtccagatctttataaaggcaccgtgacagccagtggacaatgaaggtctctgtcctcttaaggaaacacacctgcaccagtggtagcttgtgctcttctggtcttgggagattccttgggtgtcacccgtcctgatttccaggtggacccctggtaagggcaaccagtcacaaaccttccatccaagccccgctctggggtaggcacccagtctcccagactgagccagtgagtcccttccagaggagcccccatcaatatcttcttccagggacatcaccaagggcccctgggatgcaatcaagccaatggcccccagcatctctgagggcactatctgccaaatcccccacgtgagcttcatccctccccatacataaaaacctacttttgcagctttcccaggaatctctctgaggcagccagccaattaaacaacaacaacaaaaatataatgtttccaaaacctcatgggtccttcaatacctatgccagggtagggtagtggggaggggaaagactgtgacaggatttatttccaaaggaagaattgatctgtgagggtgatcttcactaagtacaatgaaaaaaatgcaaggtaacaatagtcagagatgttgtaaattaccatggcatcgcactcggaggcaaatactcatgtacaagtgagtgaacataccaaccataaacttagagtcgggcatagaaaaggcagctgctccgggcctctctcctggtagacaaaggctttttcagtctgcttttctccgcctggaggtccctgggcatttgtaccatcagtaacacttcacggagccttcagtcctaacaaataattagctaaaattgaaccagggatttcttacatgcatgtcataggtcctatagaataatgaggcagaaggtt

SEQ ID NO: 26018 - DNA, 1510 bp, Bovine  19866881010179
  misc_feature (1)..(1): n is a, c, g, or t
ngaattggtacattaatctgataagtgataatttgcaaacaattttcaatgtttggccttgattacaaagcagtgaagttttctggcttttgttaattaaaaaaagataaatcaggtggtggtcgataataaaagctaaatccttggtggtgcagtggttaaatcaccttccaatgcagggggtgcaggttctatccctgattggggagctaagataccacatgccttgtgttccaaacaccaaaacataaagcagaagcaacactgtaacaaattcaataaaaactttaaaaatggtccattaaaaaaaaaaatcttaaaaaagaaaatgatggctcatatatcttggaaagaatgttgtaccaccctcctttactttaaagccagaggtagttgagaaaagaaatgcaaattaaatgcaaatatactataagggaccttccctatttcttagagctaaattcagcttctgggacaatgtaggagaaaacttcaagtctgtatttgccaggagttaactttaaaagttcggaaggcctaatagaaattgccacatttcattataaaacaaaatttggatttttcaagttagtcatgaaggaagtatctccatgtgaggatggagggtgaaacttacttagcatgtgtgattctcaggcctaagaaccacctttccctgtggttatccccaggtgctagtgtgacccacccccccacccaggttggcccatggggagttgaaaggggtgacactgatcactactgctgtccttccactgggagcacaaacatttcccttaatccctcatagcattaagattaggtgggaggaatagacacagagaaccataaaataagtttgtttggcttgtttagtttggcaaattctcactttgggcagcaactctgatctgcttccagataccagggaccatcctgggttctagccgcagaagcatcaagaacctcattatgttaggggcagaatactgactgaaaccgcccaccctggccaggccctttagtaaccattcgcatgagttgtttatgacaggagatcctggtaaggaatacggaactaataagccaccaccaaccggaagagttctggaaaggtcaaaagaagacactgcgtgtccgcccacttcccagaatccctctcgctagcatccatcttggctgagtgatgcgtgcgccaccaggaaagactctgaattagaatgattagccaaagacaactcggaaactaatcccatcaccataaaacccaagactgtgagccatgtggcagagaagttctcctgggttcccttattctactgctcttcacccgggtgccctttcccaataaaatctcttgctttgtcagcacatttgtctcctcggacaattcatttcttttctgagtattagacaagagcccagttttgggccctggaaggggtcccccttcctgcaactattagagctctccaaaatagtccataccaatcagattaaaaatagactg

SEQ ID NO: 26019 - DNA, 1150 bp, Bovine  19866881052887
  misc_feature (1)..(1): n is a, c, g, or t
ntattgtaggttctcattctcgatggcacactgggcttagctggagaattctgaaaaataaattctatttatttatccaaattgcaaaataggatttggaaaggcattggggattttcattaaatccactctcttgctggagactctccctagtgcagagataaggtgagttccctagatggtgggagttcgaagtccctacccagagattctgacatcaattgcctggcatcactggcatcagattgtttaaaacttccttagtgggttctaatttgcaaccaagtgtaagaactactgctttttagggtctgtccattccttgtgggttttttccacacacattgggcttccctgatggctcagacagtaaagaatctgcctgcaaggcaggagacccaggttcaatccctaaatcaggaagatcttctgaagaaggcaatagccccccaatccagtattcttgcctggagaattccatgaacaaatgagcctggagaactacagtccatggggtcgcaaagttggacacgactgagtgactaacattgacaattagaattcatgatctatccagacatgtaaaaacttcagtgtattttctttttgaggcttcttagattgggggtgttgatatccatcaaagacctcccctctctcccattccctaagcccagggaagctgggtggggggattaattatgaaaatagtgtaggtgctgagatggaaacggcgaccttactctgaagatccagctcttttaacagaatgtactgtcttctcagattccctgaagcctggatcaaaacccaactcctcaaacgctgtgatgagattttgaatcaacagaagactcccttcccaccatggttcgatgcctcagctctgatatctagtggcgccattgtaagaagtcccagtctttgtcagcctgcaattaaatccgtgccgaggagtcttcgcatttaggacctaagctctacggtgttttgagaaatgactgttcaagcttgatgggagtgggagaattctgaggtttaattgcaggaaatttcacaggaaaggcattcagtgaattcatcaagccctgccttcctgaaagtctcttcttaatgccaggtgcaaagggctttaacactcagaggctaa

SEQ ID NO: 26020 - DNA, 1255 bp, Bovine  19866881177480
  misc_feature (1)..(1): n is a, c, g, or t
ntttccaaagcaggaagtaagggcaaagaagggggaaagaaaatggagggcactttaaaaagaaaaaataataacttcacaatatagtcaacaaagactcaactgccctctgaataacccctctaaatagggcacattttgcattataatacagcattgctttatggaaatcaattaaagacagtttcttcatcagtttccttaatgtatcccaattcccttactttcaaagacatcaaagtcaacatgatgaccttgaagttttgactctaggatgagaattgtctgagacctcatggattttatgtgagactcgaaagtgtgaaagcctccattgagggacggtccctgttaaccaatacgtgtccccaccatcccatggggtggtcttgaggaattcaaaatgataggtaaaaaataatagtatcatctctcacaagttatttaaattctcatggcagtttgccatcaaacgtcaaatttattcaattcacagtgacttcaaagagtgtagaacaacaacccgagggctgcatttctcaaaaaatatgtcagcagtaagaaagggggaaaaatgtttccttaggtagatataaaagaaaatgacactccgtacctacaccctcgtgtttgccagaaggtttgatttacggataagctctttttttaatgtagcatgttcctaattcttattccatcacagttgaaaatttggcatttaggtgtaaaaagaaaagacaggggaaaagaattagagagaaaagtaaattagaaccaaaaggggaccagagtaggtgagaggtgtcagaggctgtgaaagcagccagaaatcttcccttatgtccttagtggaaggatagtcatcttaacctagcaaaatgcaagagaaaattaccttggcttggtacagagttggcactgtcaggatgagaatcagagaagcatgtgctggaatgactgagatagcttcttatgaggcctctcaactacctttttgccccttccagtcaattcccatcaccacatcatgttttcagtacactcaccgggtcagccgcaccccactgctcttcacagaaaccgtgatctagaccctgcctgcctcaccagcctcactaccttgcgctcttcccagcccccagtctacagtctagagtctacagcccagccataggaaactgtccccctggccttcttcttctggtaaacccattcttctaaaacccagttccctaacctctaaaacgaatcaaaa

SEQ ID NO: 26021 - DNA, 2527 bp, Bovine  19866881200418
  misc_feature (1)..(1): n is a, c, g, or t
ngagaagcattagaactatacatatgatttcacatactatgatgcaagcaaggataaatgtatgcacaaagtattacaatcacacagaagagaagggggtagttgaggaaggccttataatggaggtaatggctgagcagatttgaaagatgaagaggagttagggaggtgagggtgggtaagcagagaaaagtatttcatgccaaaggaaactctgtgaaaagacacaaaggcacaaatactcagagtttgtgtgccaaaccgtaagtaaatcagttttggaagattatggcttatcttaatggctaaacattccatatgcacagtgtggaaaacaatgtgaattctgctttggttgcatagttttctataaattgaaaattagatatagttggctaatggttctcttaaagtcttttatgttcttactgactttctctctacttgctatattgattattaagaattattgaaatctccaaatgttactgtggatcttttttttttttttttacagttttatcagtcttgtttcatctattttgaacatctactactaaatgtataaactcttaacatcacaaaaatattcctgatgaaattaacttctttatcattacgaagttactttcttgtgtttagtaatactgtttgctctgaaatctactttggctggcattcctattcttttgcttttagcctatttatgtctattcagtggctcagctagttaagactgcctgcaatgtgggagacttgggtttgatccttgggtagggaagatccctgggttgggaagatcccctgaagaagggaaaggctattcactccggtattctggcctggagaattccatgggctatatagtccatggggtcacaaagaattggacaggactgagcgactttcactttcattttaaagtacagctattgtaggcagcatatagttgggttcttgtttgttcatccaacttgacaacctctgctttttaattagactgtttagaccatttacatttaatataattattggcataattaatataaatatattattttactagttgctttttactgatttcatttattcatattcatttttccttctttttccaagagtttggtattaagtactttttattactccttttttatctccttagctgattttttaactataactgtttagttattttactggctgctttagaatttctgtgcactttaaacttaccactatcttccttcaagtaatatttaccaactcatgtagcctaaaagaacttttgaataattaccttcactcctcctttctcagtcattgtgttattgttaccatacattttatttctatatatgctataaactttacatcacgttattaaccttatatcacatagtatcaattctcatataaagagttagttatactttaaagatacttaaataacaacaacaacaaaaacttacatatatatatccatgtggttatcatttctggaactctgaatttgtgtgtgtgtgtagatccttattcccatttggtaccacttctatctgcctgaaggacttactttaatgtttctcacactgtgagtctcctccaagattttgcttttctggaaaaaaaaaaaaaaactttttttactttacatattaaattttatataacagtttcgattcacagaaaaattgtgaagataggtgggaggtgagatagaaagagagagaaactagcacttagaggataccatttgagttgcactagctatagtccagaaaatacatttcagacccagtacatgggaatgacagtggagaggaaaggtagacttcaaaaatgattaggaagtgcatgtgataggaattgtgggttggcagccaaatgactgtggtggtgatgagcttatccatctatgtcctgtcaggaaaacatgaaccactttggatttttaagccaagaggagtttagctcaaggtattagttataatattttggggaaagctggaacatcaaaacaggaaatagatattatctggaaactgcaaaacccactactgcctccgggatggaacccaaaaaccccaattcactgctcctgttactggaagcataaacttacggtgctaaccagtgatctatgccgttgaccctaatactagtggagctgttgctgagatgctgctggaaacccagatgctgaagctgtgtgagagtcacctctgctactgtttgcagaagtgtcaccaaaagtagacaagcttctagcttgtctctgccttctaccctgtcaagaatgctgcctcctggaaccaagtaggcaaggagatttaagtaaaaagaatttgcagactttcacattaagaggtacagagcaaacagaagaatggatatgagatgagaggccacaatatatgatatatatttggcatagaaagtaatagatgggggtatgctttctatttgtgctgaagaaggagatactggaaagttatcccagggatctatcagttatatcatgttt

SEQ ID NO: 26022 - DNA, 676 bp, Bovine  19866881210046
  misc_feature (1)..(1): n is a, c, g, or t
naatgaatgtgtaaataaacattttaagtgcctaagcccttacagctaggggctggcattcaaacccacatgagtttgactccaaagtctactctcttaacctctatgctgccttctgtaatgaattcatcaaagaaaatcccactttgtcaggtcaggactgcggggccagatcacattccgtttgggaccacagctctgcccctttcgtgccttctttgaatgtctgcacctcagactaaataggaagcctatataagtggttctttccctgtaacctcaagccttgactaatttagaaaaataataacacgaaaacaacccatctttccaactcttccataacagagaacttactgtatgtgaaaagccagctgtccaagctgacactgccagagtctccaagcatacagaaagactgtctgaactgatttatccttgtgaagacattaataccattccatcattgagcagctgaaatccccaatagatctccatttaaaggcaaacttgtaaatgcctaagtgtagtcataataacagtactgaaatttctactgaacatgttcagggcagtgaattatttatagtcatattcaacgttaaacattcagaacacaaattctaagttcttagagttggggagaagtttatagacataaataacaacagaagta

SEQ ID NO: 26023 - DNA, 1676 bp, Bovine  19866881230174
  misc_feature (1)..(1): n is a, c, g, or t
nattttctgtgtcaacttggctaggtcatgatacccagtgtttggtcaactccaactcttccccgaatctccagcctgccagcctgccctgcagatttcacagttgccagctcccacaactgagtgagccaattcctgcaaataagtctctcctcctgtatctatatctgttgttgttgtttagttgcttaagtcacgtctgactctttttgtgtccccccatggactgtatcctgccaggctactctgtccataggatttcccaggcaagaatactggagtgagttgccatttctttctcctgggcatcttcccgacccaaggatcgaacccaggtatcctgcttggcaggtggattctttgccatggaaccaaactggatagcttgtatctatatctgtatctgtatctatctatacccatcctgttggttctgtttctcttgggaacgctgaataatactaatgttaataaacaactctaactcttcattaaacagaaagaggtactaaaactcagagaaggcaataaacttacctaatgccacacagcagatgaataaccaagcttagatccttcaaaaagcctcctaggctataattcttgccctctactgaggggctggggtccaacttccacatttccaagcctctcagtcaggtggagggcaaagatcacaagtgtttgaaaaaaatttagttcctcaccagcggtgggtgggcgaggaatgagaaatcaaaaattcagtgtgaaaatacagaaatctagccgcagagccaattttccatcgcacttagcaactccatttgatgtgatagtttgctaataaaacatgagcattacggtaacataatattttaagtatccattaactaatacgtaaatataatggaaccttatggaaatatacttaagctgtcaccaacacccctaatgtaatatgcatgatttccaaggctatttataactccttgggttcactctctccccagtgacttcacgggctcaatcaaaagaggatcttgttttctctccccagccctgtctccgtacactctctacctgctggcccctctcctcatggtattgcgtggacctggccaatacctatttgccccacaagggccagacacatgagcagggcccagcctgccggcctggagccagtcatctgggggccccacgatacgtgggtgatgagagttgtcaaagaggagtggcaaggggttgtgagagggcaaagcagggaggcttctcggaggaagtggtgcttgggctgaggaatgggggatggacaggagtcagctagatgatgcagggcaaggggaggggagaggagggaggagcatcgtgagggatccaaaagggcagaggcccaggcacgaagagcagggaacattccttctgggaatggcatggagtccggatgctgatgcagagattataagaggcagagacaagaggttggaccagtgagcaggggctgggctgcagaaggccagacgacagtgggggatggtcctgaagagggccagagcacacacccaggtgcaaggaaacactcacaatactgtttccactcacactggccattctgacaccaccaagccaccagctcactgatgattctccagacaccagctgggtgtgtgacaagtcaattctgacactaagta

SEQ ID NO: 26024 - DNA, 1913 bp, Bovine  19866881264407
  misc_feature (1)..(1): n is a, c, g, or t
naaataaataaaatattatatatgtggtagatggaattaataactctgattctttacctttccctcttccaccctctttgctctgtgactttgaagttccttcaacaaaagagacagtacttccccccaactttggctcttggttttgttatgtgacttcttttcttagtttggtcaataaaacaagacagaaaaagatagtgtgtgaagcccaagctcaggctttaagaggactcattgtttctgttttcttcctttcacctctgctaatgccataagaataatatgcctggtgatgctttggagcagaacaacttgcagtcccatagcctcaatcagctgatttctaagcatgagaaataatttctgattattgtttcaagccactaaactttggggtagtttattatatagcaatggacttcctaggcggcgctagtagtaaagaaccctcctgccaatgcaggaaacataagaaacataggttctatccctaagttgggaagatcccctgtaggagagtattcttcaggtattttatactgaattttatactccagaatactctggagtattttatactccagaatactgaaggactgtagcccttcagtattctggagggctacagtccatagagtcgcaaagagtcaaacatgactgaagccacttaacgtggcatggcacgcattacatagcaatactactgaaataaataagacaatcagcagtgacaatcatgcttatgttgacttagatcacctgtatctaggtaacaagcttggttgctggagatcaagtgttcagctttagaattgtgatttctggatactggactttcaagttcaagtcatgaggacatgtattgggttggccaaaaacccaagtttttctgtgaagttgtatggaaagatcagaacgaactttttggcccactcagtaattaggcagtgccactgctaagtgtagagagtcgtcaccactgccctccttccttttctcctctcacatcttcactacatacatccagatgccttagggatgaacattgtgctagctggatccagaaactgagaccattgatgggagactgcattacctatagctgaaaccaaaacctttcccatcaagtgacggaaagaaaacaaatcatgctttggtatttgcatttgttgctgtatttcctaccacttatgagactgaacaaagttaatttgacagacatttatttatcttctctaatgaaattgtaaagaatggtgtgactttcttctcgcaggccttcaagaacatcattttctaaatgtgtgtgtgtttttttaatcacctaaaatgtttatcttccccaaggttttaggaccaaaggacttggcattccaaagcatcatgtagaaaccataataaattcactattaattggagaagcaggaaagtagattacagaaaaatattcaaactttttatccaccttgcaaattatattactcatatttcttatttcacatccaacattttttgaacactaataatatcagcactttgtttactattaggacttcctttttggtcttagtgaattaaaaaaaactctctctggcttgcatttaaaatagggacatttaaacatattaggatatggtgatgtttctgaaatgattttctgatgctttgagttcaagaggcaagacttttaagagtgcagtcgctcaatgaaggggaattagagcaaaacccagacaggtggggctaactgacatttctcccagatagtgacattaacatagataaagagattggaaactggacacagcatgacaaaagaaaggctccttctaagattatctatgatagatacaactgtcaaactttaacatgctatgcacatgtataaagagtgtttttttttttttttt

SEQ ID NO: 26025 - DNA, 802 bp, Bovine  19866881297792
  misc_feature (1)..(1): n is a, c, g, or t
nagacgtgactgggaccctagaggcgcaatcgaagatgctcgttagcgcgctgaaacgtctaggggattctccgcagcgcgccgcagcgcacagcccagtgcctgccctctcaaggtttgggggcgctggtccccatatggcgcccaccttttggcacgcccctcctgggccccagaccatttagcctgcggaggctcgctccaagtggccatggagtggcctgcgccccgatggaaacttcttctggaaggtggcccggacgcttctcccttacctgggcgcggggccactgtctgccgacggtttaccgccgccctgcaagaaaaaattcgccgacccctctagccaccaactaccacccagtccatttgctgaccccaaaatagtgctctggaggaaaacatgttctaggggagaccctataacaaaaggagagaggaagaaatcagactgaattctggtgatgcaatattcaagtcgactcgacatatcctttgtcatggactttttctttcaaatatgcgtgtgtatttaaatgcctaaaagactaattaaataaagaccaagttgacctcgctgggttgaggcccagtttcagattatataaccccagctgccccgggaattctccagcaatgctgctcacagccgcctggaaaatgactgaattaagggaagtgaaaccaccggaacaggagaaataaagccaaagtctccaagggcacggatgtcctgcttaaggaaacttacctgagccgacggaacctcctataccaactgtttatttcacaccattttttt

SEQ ID NO: 26026 - DNA, 1342 bp, Bovine  19866881311465
  misc_feature (1)..(1): n is a, c, g, or t
nccaattccttggtatcccctcaactccatcatgtccaactcttccatcttccattcacacatcagtcatgtaagtcatctaaactgctttgaagcagtttcttagacactgggtctggaagggacgcagaaggtcttcctgccgattctgatactctaatcactctcctatccctggcatccatctttaatgtgaaagcctctcagggccaggttcctttggaagataagttgagaaatttccacccaagcagaaggccatgctgcttgtaaatggcatttctgtttgagacagggtgggttctctccacaggcaactgtagattctgccagcccctagagggcatgcctgtgtgcccactggacaggatctggctgagctgtagtgatagggcttcatctgctttgggcataagtgaccttatccatgggcttccccagtggctcagtggtcaacaatctgcctgcagtgcagaagctataggagacacagatttgatccctcagctgggaagatcccttgaaggagggcatggcaactcgctccagtattgttgcctggagactccccatggacagaagaacctggcaggctacagtccatagggtctcaaagagtcggacacaaccgaagtgacttagcatgcacgcacgcaaccttatccatagaaatcgtttctcaccgtagttttatctggagagggctccagaatcacctttccagatgagtcaggagcaatgtgggctgtgtctgtacctcattcactcctagaaagcagaaagtgttccaacagaagctggtgtaattggcggggaaggtggggtttaggagctaagacttccctagaagaagagtaaaactgtgcccagtgcaggcaagttggaaaacttcagtgtatgacttgttctttcccccagattcctcttttccccgtatttcatttttttccagaaaacgtgtgattttatatgcttttctctgcatgtattaaacaaattgcacagctgaatagcttttcttaaaacctggacattcaccaaaaataagtttgccagcacagacaattaagctttcttctttgaacaatggagtgactgactggcacatttgaaatgcaagcctgttttttttattcaactgttcatccttcaagctgataaacagcaacaatgggaaacagctgggacaggaaaacatttgagtttgtattttcaaagcaagcaagaaagaaacccgtcagtgtgggccagatcccgtcttccgcctgagggcgagccggcatttggggagggaaaaatactatacatatttctaatcaaacattacatatttattaatgtg

SEQ ID NO: 26027 - DNA, 1356 bp, Bovine  19866881346413
  misc_feature (1)..(1): n is a, c, g, or t
ncagagccccattcattctcatccaacttggctctcaggcccaggatggagctgcactgccttttaactccttaggggtgggaggaggggacagtcagctgctgggatgggactagagctttctggaaggagggccatattccaagcagggcagaggatcacagggaacgtcccatcagtgaagctagacaagatctctgctgtagattttcttgcttctgcttcctcaaaccctagaacacctcctgtttgtgttttctatgtctctctgtggtgccaaatgcaaagtcttctatacaggagattctcagtctgtgtatacaggacttctatacaggaggttctcagtccgtataaaaatggggagtctgcctgtcacaattactctgagctctgttcttcctataacagaggaccaagttttggctggctcattcagctgtatcttactcagagaccacagtgattggttcaagagcagacatgtgactccaactgaaccaataggaagtcttccctaggattttaaaaattagcacagggaaggaagtactcctcttctctgatcatgaggttttaagaaagggaggccctggcctctcgagccagtgatgcctggagtatgaagaaagggcctgggcagtgtgatgtgctttggtccaacctgcctacaaatcattccccaaacatgaattggactagaatcacagcaggatcatagtagcagttaccatctattgagcctttagggtgggtcagtctgtgcttaagacaccctcattcttgacttgcatgtaggctatcttttcactgacctctcaggggaccatgcttgcccttctttgatcacaccttgtgttgagtcattggtacacagtcatttgctgagtaatcatttaattagagtgtgagtgcttatcatttctgtattaagcaagtatatgctgaaacaacctgaaggaaacatcctgacatttttaggggattataaccgtaagcatttatttcttgctcacatttcacatccacggtgagggggttgaggactctgctccacatgaccttcactctggctaatgaagagccagttgtggcagaagaggaagaaggcatgacacactgactcttgagtcttctacctgggaaggactcatcgcccatgctcacatttcattggctaaaacaagtcatatggcctgcctgagctcagcagaagaggaaatgacaacacctccaagggagggataccaaagccttgtgagcagtgcattgtctaccagccctccaggatggccagccgggtgctctgcacctagtaagccctcaaggatcatttgcactgtttccttcctgcca

SEQ ID NO: 26028 - DNA, 773 bp, Bovine  19866881492868
  misc_feature (1)..(1): n is a, c, g, or t
ncaactccacacatgatggaaaagactctaggttcccactggctatattggcaaagtgcagaatgagttgccttctgtggggtgttaccattctcatgttggattttcttttctaaagtaggtgagttcatttatcttggacccacattcctccagactgagtagggatctggtatcttcatcaccacaagaggtagtacaatctggacacgccaagtctcatggatgcctgcgagcagttttaaaaggttttggttagctccaattttattagaatgaaagcttttcacaagtaagaggttttatgggagttatttttaaagtaatgtgtttttattggtttctggtaagatcagtgaaatcacatggcattttttaaagaattttaaaccaaaaaaagatgttcaaacaacttgcctgaaacacaaaagccagaagagtaagaataaaatattgaacacaagggggttaatgctaagataaaacaaaaacgttctgaggaagcagaagaaaggggtaaaggaggacgcccaaccagaacaaagatgaactgcgtccagtgtctgaactgttgctcccgtgttgagatgcaagtacttacatctcttttggaatcagttgtccccacaagtatggagattgccattcgttgtccatgaaaattaaattcattagtaaagagaacatacttttagttacctagacctcaaaaataaagtaaatggcacacaaaaatccaactgggggttatactatcaggagagtatcagacg

SEQ ID NO: 26029 - DNA, 1422 bp, Bovine  19866881510580
  misc_feature (1)..(1): n is a, c, g, or t
nctgtgtttgtgtgtgtgcacacacgagtgtatgaaatgccatgtaagccataatgaggaatgtcatttctgatgcgatcactctgaaaacattttaaacgtcccaccaatcaatgtggtgaggcagtggaatggtgggggcattcttacatccctggtgcaggtataagttggtaaaatcatttacaagtgcaattcgctgttctctagaagaaccagagatgcacataccccatgacccagcactcccccacccccagtgtcattcagtcagttccaattctttgtgaccccatagactgtagcccgccagagcccaccggattcctcagtccatgggatttcccaggcaagaatactggcataggtcgccattcccttctccagaggctcctcccaactcaggaattgaacctatacctcctgcactgtaagcagatactttactgtctgagctaccaaggaagccccacctgcatgtatatgctcgagaaatgttttcccttttgcataaagacacgtataagaatatccattgctataaagtttaaaatgcataaaaaagaaaaaaagaaaagctccaagacacagtctggagaactaacaaaaaaaaaaaaaacagctcccagagattatccacagtgaaatgacagtttttgaacagtttaaagccatctaaacatatacaagtgtagtaaaattataaaagcaggtaaggggaagtgtggagcagtagttagccctagaggaaaggagagaaatggtttgggtaagaggctttgactgcatttgcgatgcatcctgtattcatctgagtgttgggtaccctaatgtttatgaatatagtctctggggcttttttttgtcatgcctgacgtgtttcagcagaatacaattttaaaagggggagggggagtaagtgtttcagtttctacaagaaatgacattgggagggtaaggctgagaccgtacatgaaactagaaaaagcttctaatttcccattgcttggccagaggcatcgtgtcattggcaggtggtccagccagacccacagccccacgtggtgatgcctgcaagcagtaagtgtggcaacctcccaggatgtccccgtcagccctctgcaaggcagcgtgcattccctgggaagtcatgtttcctccaggtgaaggatggtatcgctccatctctgtcacctgcacggagaaggaagtgctgcagggagacagatgaggtcatctattatcaagtaggcaaaagagagaccaaagaggcacctgcagcttgccagatgttctatcaatcatcagagtcagaggaagggagcttacttcttcccccctgtcctctcccatccagcctctccagagaagaatcagacaagagatggctcatggacccaggaccagtcccctcaaaaccag

SEQ ID NO: 26030 - DNA, 854 bp, Bovine  19866881562688
  misc_feature (1)..(1): n is a, c, g, or t
ngaaaagctggagaaagagaaatctgaaggggattagaaaagctctgacatattcctgggaatctaggaagactgtgcatatatcctgggctgtgagcttactcaggaaagctttgtgaaggttctaagctctcagctttagctgaccttgaagctctgtgcaagcaggaaaggaaggcaaaggcaacattgagttgaaggagctccttaacacacatatgcagcccctttgcaaaaactgggaggtactgatgcccgggcctttaaggaaacctctgtctaatcactagcagaccaccaagctaactgaatagagagtgcagtggccacataagaagaagatacagactttgtagaattagttcagaaaagtcaccagatgaacagcaatgataacaataatccagggtggaacagaggtggggagaggtttagaattactgtgctgtgctgtgccatgcttagtcgctcagtcatgtccaactctttgtgaccccatgaactgtagccctccaagttcctctgtccatggggattctccagtcaagaatactggagagggtagccatgtcctcctccaggggatcgtcccaactcagggatcgaacccaggtctcccacattgtgggtggatttttttatttttaccatctgagccaccagggaagcctgagaatcctggagtgggtagcctatcccttctccaggagaacttcctgacccagaaattgaaccagggtgtcctgcattgcaggcagattctttatcaactgagctaccctggaggccctcagaattactatattatattattttaaaattctgatttcctacagaaaattatgggacattca

SEQ ID NO: 26031 - DNA, 702 bp, Bovine  19866881622751
  misc_feature (1)..(1): n is a, c, g, or t
ngctgcatttctagcttgatgaagactcttgagggtatgggttgtggaaggactgagcctatacacaatcaacatttcataatcatttacttgtacaatacaactaagtgtggctttgctgctggtttgtgctttctcctagagaaatggctctaggagaaaattctagagaaatttctcaaatatgtaacccacttctaagtgcccttctatcatgggttcttctgacacttattgggagcggggtttctacacagaaccaatcaagtaaattcccaagaacccacctagacaagtaaacatccatccgcccacccagctcaagggcttcccttgtggtgctagtggtaaataacccacctgctgataaaggagacatcagaaacccgggtttgatccctggctcaggaagatcccctggaggaggcatggcaacccaatccagtattctttcctggagaatcccacagacagaggaacctggtgggctacagtccatggtgtcacaaagggtcagacatgaccgaagcgacttagcacagcacacagcagcacttagctcaaatgctagaggccctttttattccttccaagacattgcttttcctttaggggaaagcaggccttggtggtgccagtctatttctcctggctctcttgttgacactccaggcgccatcttcaaagggcagtgtttctttt

SEQ ID NO: 26032 - DNA, 1083 bp, Bovine  19866881626677
  misc_feature (1)..(1): n is a, c, g, or t
nacgaacagcattagaggccgttcccacaaattactatcagttggctgtaatataaatatgcaaattccctgggcttgaactttaacaccctctgtagagaccattcatctctttaaagtattaatttaagttgtaaaagggcccatacatcaccgcgtgtcattttgaaaacaaatattaatcaattttaccctcggaattgcgggcggtggaggcggccccccgttactgcggcaccaggcgacggcggggagagatttacatattcatccgagcttaaggaagccggcgataatgcaagaacaacccccgaaacttgggcttccagaccttatctgcgcgccccgccgcccggcgctgcttgggcattcgcggcaccgccccgccatgcaaatgagccccgagctatctgataaccttgaaagcccgaccgcaagcacgcggggccgctcccgcttctctcctcccagaaacgacaaagtattgggaaaaggttggattcgcccgccctccccaagcagtgcaggaactactttggcttgtgggatgctggttaggactggtaagggcgcgaagttttctcttctgccaatcttagaactagaaacagcaggaggggctgtttctagttgtaagaaacagaacttcggcactgcgttcggcagtggggagcatctcaagggtgggcttcttctggggacagaaaagagctgcggagtcctagagtcctgggtttcagcactgattctgtgtgtccacgctgcataaactttcatgggttgatttggcgtctctgagccgcaattacatcatctgaaaattgaatccggatggatgctaaagataccgactcacagagtggctgtcaagattagaaattatctctcagaagcacctagcacagaaatggatatatagtcagctctcaaattgcattatggacaagtattatccccaaatattgtcatatccccatcagcccctgcttccacttctccatccttgccttggaagtgggtgtagagggacaggagcccccgcatccccaatttccacagtgtgtgtctaagaaaatctccggc

SEQ ID NO: 26033 - DNA, 738 bp, Bovine  19866881816909
  misc_feature (1)..(1): n is a, c, g, or t
nggacaaaggagcctagtgggccgccgtctatggggtctcacagtagtcagacacgactgaagcaacttggcagcagcagcagcagcagggctgctatttctttctgtttcaattttcctcacattacacttgtccatgtgttggttgctgacaacgtttttcaggagctggtcaagaggacactgtgttgaagacactttttgcctgtatttagtgagatatatttttgcccatggagagtaagctattgatggctgccccagggtaagtgtgggttcaggcaagctgtgagttcagctcctgcccctgggccagctcactgcattgtgacaagatggtgcaaagacagacactgtattgagataggagcatgtctgtggtccccagtcctagaattaggaggacagaagaggaaggaagaaacacgtttgaaaagcagtgagtcagaacaaggttatgaaaaactctgtactggtcaaatgtgcaaacttataagcagaaatttctgttcacattaattcctagtcaaaatagaagctctttcctgtcagaatataccaaatagagcagcattttattgacagtataattataaacccaccatcatttatatgaacatctcatgaaatataatttatcagaaatattgtgtttgaagggttcaaacctgtatctttcagtgaggacttctctcgggggaagttacatgtttcacacagcccaaatatcatgtttta

SEQ ID NO: 26034 - DNA, 2841 bp, Bovine  19866880095657
  misc_feature (1)..(1): n is a, c, g, or t
nccagtggtcatgtatggatgtgagagttggactgtgaagaaagctgagcaccaaagaattgatgcttttgaactggtggtgttggagaagactcttgagagtcccttggactgcaaggagatccaatcagtccatcctaaaggagatcagtcctgggtgttctttggaaggactgatgctgaagctgaaactccaaatacattggccacctcatgtgaagagttgactcattggaaaagacccctgatgctggaagggattggaggcaggaagagaaggggacaacagaggatgagatggctggatggcatcaccaactcgatggacatgagtttgagtgaactttggaagttggtgatggacagggaggcctggcgagctgtgattcatggggtcgcaaagagttggacgcgactaagcaactgaactgaactgagtgcgtggaggagcagctgacatttcaactgggctttgaaatatgaacggaagcttgccagagagaaatgtttgggagagtgtgagtgagagggcactccaagcagaggtaacagcctggacaaaggggctgagtatttgtaaataataattttttagagtcaaaggaagagccttgctatgttttagaaattaacatttaaagaaaaaacattgatgacaaggaggaggtccgggcctcagctctgcttcctgattggctgtgcacccttagaccagttatgtcacaagttatatcactttggttttctttttctaagtatatttacttatttgcccataccaggtcttagttgaggcatgtaggatctagttccctgaccagagattgaacttggaccccttgtataaggggcatggagtcttagccactggccaccagggaagatctgggactttggttttctcatctgtaaaggaaggggtttgagtgacctctgaggttctttctaactctgatgacctatggtttagtgtgtgtgtagtattcctctgatcagagagagagaaggaggctcaggtgggtgtgtgcaggggctggcagagagctggacctgcaggctaggaggccttcctcctcatgtcttccttcttccctctccacccctctgggactgactacactacttccctggggtcaccaggcagtgcagacactctgagagttgcagtgacctttgcagaaaattgctcatttcagaagatttaattgtatttaaaatcaacgtgggaggcttttgagcggggactggcaggagtagaaagactggctgagaagtgtcttggagaccccctctgcctgaggaccatgctgagctgagagagtagacttaagacagggcagttacgctttctttctctcaagaactggctgtaggaagtattattaacactcaggagaggaaggcgatgagctgggtggaggaagggcttgtcctgaatctccagggcctcagcgcgtgtgtactaagtcactttggtcgtgtccaactctttgtcactctatgagccatagccccccagactcttctgtccgtgggattctccaggcaggaacactggagtgggttgccatgccctcctccaggggatcttctcgactagggattgaacccgcatctcttatgtctcctgctttggcaggcaggttctttaccactagggccgcctgggaagcccagtctttcctaaatcagcccagcttatgtatcaacagagcagggttctgcctggatgcctcttctgtcccagcaatgagttccttctcttgactacaggagtgtcccagaaagatgagaaaggtcatattattaacactggagggggttaacctcatagcctcttgggaagccactataaaggaaagacagtgagggaccttaaagagagacaagagacccccaagatgggccgctgctgtgttcagaccacttgccctgagacccctgggcagccctctcaccaccaggcagctggcctcgtggaacccactgaccctgcctcagcctcccacgaccatgactttccatgcccttcaaggcctcagggacagggacactcctgctctgacaggagcagggagaggagcgcttgacctgtgccccgtcccccagggtggtcactgcttctgggtccaaggctttacctctccaaagcctatcctttaatgggaaagaagtgtaatttatttgtcaaatcaaaggctccttagctgtgcagaggctgctaagcccagcacccttgccttgggcagagcaggggcttgatgacttgccatgagtgtgcttgtgcatatttaatttaatttgtatttatggagcgctgggttggctgcctatgcaggcctgtgtgcttgactgctttcttttcgggcatttctgtctgcaggcagacaggcgtctgtgtgtgtgtgtgtgtgtgtctggcatatatcctcatactgatggactccagcctgtgttcacccaccttgtatgcacacctggctggctggttctgggcagtgtgcacctgtgtcaggatgcaaaggggatgcaaaggtgggatgagagccattgcagacctgtgtgtgggagggtgtcctgcagagcgcccaaaccacaccaggatctcagagaagctgttgaagcctggggcctcagggcacagagggcaggaaaggcccaggtctattgcaatccagcttccccagtcttgggaaacttcaggagaccagggtgtctctctgccctccatccaccaaaggctttcccattgcaatccctcatgccccgaccataaaccacgccagcacttccagcctcctttccccatttgagcggtgacttgtagctggttggggaggg

SEQ ID NO: 26035 - DNA, 3025 bp, Bovine  19866880346502
  misc_feature (1)..(1): n is a, c, g, or t
ntaatggaatcccttaaaattctggaccccatggtctcggtgaacttccctggttggcattattccaagtgtatcatcacgtccatggcagaaaagtggtgcattgtagggagagcacattggaaggtccaagtgtggtaactttcctggactctgtactttctctcatggctgatttaaatctgtatcctttcctttaaaaagctatcaccttaagcatcacagctttcagtgcattctctgagtttatccaggaaatcatcaaatctgagagtgatttggggacctctcataggcttgaagaagcaagaggagaaagaagttgttagaatctggagagatgtgcttatacttaggagaagtgggagctgtggccttgggcataggaatgcagatcctgccagcctgcagcccagcaggaaggaaaccacgagaatgacagcctcagcctctgtctcctctcacctcttgtctcccacctctgtccattgaccaaacccaatcagaaaggagagggcaggctgtccaggtgatgtggtctacacaagcaagcctgcagggcacagggcagggtggcggaggatggagagtggactggaagcagaaatgaagacattcagcacagcaggaccacgctgtcatgctctctcacccctgggtccttagtatacagcctagttcctagcaccaagttagtacttaaacagtattgctgttgagtgaaggaatgaacccatgaaggaataaattcgtccctcacctagagctcagggatattggaagatcaaatgagaccaggtacatgaaaatattctatgaaccatcaagcggcaaatacatagaaaagcttatcatcttactctgattcttcttccatttatgagatcaatcactgaaagagaatcagagctttcagaagaagccaactggctacatttaccctcatggccagagcatctgcccctgagagccctgttgatctgagcactggaacaactgaggcatctctgcagaacgaattcaccctctgtccaggagtagcttctggggagaaaaccacttcaccacaagggcacttatgtttcctttgctgagctgaaaataaaataatgacattttccagcagcaagatgctccctgtcatacctggggactaaaggtttattgcaactttattaaaatatatgagataaattgaagagccatgctctccagccagctgatggagccactgcctgcctgtagatgttttggtttttgtattaagaaagttgtcacaagcaatttggaccggagcatgtacttatagactgccaaatgttgattaattaagcccatgtttggattagttctgcctgatagtttcattagggaaaaatgactgaaaatgtggaataaaggagcaagggaggaaaagaaagcatcatcccacagtgagacttaatacgaggcaattcaccctgtattcatggatgtgtgcatatggatacacacgggtgtgtcttttcaagtgttccagcaaaggatggatccatgactgcaagaattacaagtagctaatatgaattctacccttaaacgccttcagctcctattctaataccaccattgaccttgacctctctgtataaccacttccacagtgaactcaatgttcactgaacctttagccactgagccagaggctcccaggcttctgtgctgatcatccatgaaagcctgagggtagtcaggcaaagcctgacagggaagactagggggtacatgtcacccacccaggagctggcagaaatgctgggtaaagggcaagactctcagagagacaggaagatacttttccccagtctcaaagatggcaacagtgatgaaaatgtgagctgacctcaaatgtcatggtgcttttaggaaattgtgtttgagttaatccctagcccatagaatgaaggatgagcacttttaggagtttataaggatgcctgtggtgttttgccctcataaattcattcatgcaagcattaacagcaagcattaatattcagccctgagctgttcaactcacaagaggagcaaaagacatagtccttgccctcaaaaatcttcaatatgtacatgaaggtgagtcttctgtgtatgtctcactagccccacctaccccaaccaacatgcttgtgttttctgaccatattgtacttgtttcaattccttaaatgcatcatgctctatctcattgccaggatttctcccacgctcttctgcctgcaacgtttttctcccaatcccactatcgcatctcagttctcctggatgattcatacttactcttcaggttttattgtagtttaaatgtcatttcttccaggaagcctgcctggatcacagacgcacagagtagatacaaagtctcccttccacctgtgcttccctgattgtaggactcaccacatcacattgtttctgcttatttcattgtccatcttccatccgtatcataagcatgaggaagagaaggcatttgtctggatttcaatatcttcagtgcttaacacaacatgtcataggagctaatatgtggagagaatggaatggaaggaacttaaaccaagaatctaaatgatttctaccagtgcagttcagttcagttgcttagtcgtatccgactctttgaaaccccatggactgcagcacaccagacctccctgtccatcaccaactcccagagcttgctcaaactcatgtccacagagtcggtgatgccatccaaccatctcatcctctgccgtccccttctccttctgccctcaatctttcccagcatcagggtcttccaatgagtcagtttatcacaccaggtggccaaagtattggagtctcagcttcagcatcagtccttccaatgaatattcaggactgatctccctcaggatggactggttggatctttggtgtcttctctaacaccacagttcaaaagcatcaattcttcggcactcagttttctttatagttcaactctcatatccatgca

SEQ ID NO: 26036 - DNA, 1528 bp, Bovine  19866880470150
  misc_feature (1)..(1): n is a, c, g, or t
nacttctgtccctgtcctgtgcaggagccctttcccatcctaatgaattcatggtcaacacttagcccaagttgtgggcgatttcccacaaagcctgcaggtgtactctccctgctgaaagcctgtttctctggggtagactttagtggacaccagaaagcttctggggagtcctggggagatggcactctcctctgatcccctcgagttctttccatctccctctgggattgctggggccctggctgtcctgccctttgggaggatcctgtctttccgccactgcttgtgttacactgagtcaacattcaatgaataataaattataataataataacttgaggaaatttatgccctagtttcaactaggtccaacgcataaagggaaaactcactgtaaattataccctgggacttgcaagtgaataatgcaggcgcccttccccagagacctccaaatcaactcatttaaatcaataaatcccactctcctctgtgcccgaataacaggcttatttatgtgtcttgaaattggccgaaatatctgagcaagggaacagagcaattagattccttctgtatacagagagctctttgagatgcagtctgagcttgctaactcttattttggctgaacgtaggaagagagaggggaatagaaagccacactaacattgaattcagcccgaccagtggattatttctaaatgtacaagctgccaagtaacgaaattgactgaatttttcactttccagtcaattcttctgtcttttctagcctaaaaaccctgatttagaccagtctttcttgacagtccttgcagaactaagactagaaactagtttgttctgacaggtctcctactgacactcctggaactgtggactgaaatttacaatatttaaggaaatggggggctctggcactgacccgtgggagggggtgtggcatccccgctaccccagatggttaactctttcatttctatatctcagggcagtaggtgttgggaatcctgaaggagaggcagggttggggcgctggagggctcgacacagccatggggatgaaagcattttaatatttcagtagtgccaaggactgaccatctagcctgcttctacatactgtgaacagctggggagggggtgggttctaagctgcctttgtgagtcatttgttcctgttctttccctctcacctaattcttcttgctcagtcacgtagtcgtgtccgactctttgtgatcctatggactgtaacccgccaggctcctctgtccatgggattttccaggcaagaatactggagtgggttgccattctcttctccagggcatcttcccaacccagagatcgaacccgagtctcctgcattggcagatggcttctttaccactagtgccgcctgggaagcccagttcttcttagactgtccctggtctgtttgttgtctccactccagctcacacagcactgctgctgctgctgctaagtcgcttcagtcatgtccgactctgtgcgacc

SEQ ID NO: 26037 - DNA, 2076 bp, Bovine  19866880476010
  misc_feature (1)..(1): n is a, c, g, or t
nactggatttgtcacataggagccattctgtagaagcctgtggaatgaatgaagaagtgattggcattggaggcagagttggtcacccaaggagggtctctaatcacccagggaggccccagccagactcggagaactgtgagtgcatgaatgtgtgtgtgcacatctgtgtgcatgtctgcaaatgtgtgtgcatgtgtacaagtgcgtgtgtgtgcacacatgtgcatgtgtgtacgagtgtccgtctgtgcttgagtgtctgtgtgctgtgcatccgtcctgacagcgctggaagctgtcagactgtcgggctggctggcctgggagcagcctaatcatgcctgacagattgattacaggagaaagttgctgtgtctctattgcaacagacagggggagcgtgtctccacttaacctttcccttcacacagggatggagggggtgcaggctggggcagggcggaggggccggggtgggtgtccgtgagcaggactgaggagagtcagcggcgggagggggagcaagcccagggcagggagagagcgtggaaggaacaggaggagaggagtggttgactgaggctggaagacaagggaggcggacatccgggctggcgtggcaagggcagggcttgtctccacgacgtgatccaaggagccccagggccatggatgtcccccttagagctaagcttctccctctcttgtcctgagggatagatgagaggggtgatcctacagggaatctggagactctaaagcctggctctgatcatgctcaggagggttgtgaaggcgtgtggtcaggggccttcagagcagagccgggcccacagcaagggcgatgctgagggtcctttaccctcagctaggggcagagaagagtgctcagttgacaaggctgcagaggaccttggaaaagaaagcagctgtctgcccctcctccctctatggaggggggaagcagtccagtgcagagaaggaaccctcccaggtcagtttctctcccaccatgggtgggatctattgcctgctgggggccgaaccaggtgaaccctgcaaggaggtggatgatggatgagatgggctctgaggaccattggtgaggatcttcctggatctgttccttctgtcctggaggcctcacaggaggggactggaagggtccatgataacacagcagaccctggagaaggaagcaccttactccacctaggcctgaggtctttcccacaatcccatcagggtcacagggagcaaaagagatgcctgcattttcattcagtccactcttccccgggtaaagtggccctgttgcttctagcaaccagaggactaacgttctgaatcattatactttttaaattaggaatatctagtggcagatattatgtgtcaccgagtcactctttatagtatctttgtgtagaacttgtaaatgttactggtgactcaaagttaaaacaaaaactgaacatatagtagtttaacctaaaatactttattttagaatgattagggaggaaaatgaaactggacagatccaacagagggataacagtggttgttgctggggaatcagatctgggtaacatttatatacaattttctgcatcccttcagttttatcattacaacaacaggcattgctctccaaacagcagtatgcctggttttgaatacacaaaggatcccagttcggtaaatgaaacacacatagcaaaacgtctgaaaaataaaatttaaaaaaagagaaagtaacaatgtctgtgtttttgaggctgggagtgatttcttttatttttctcctcttttcatcttcctaaagcatctgcatcactaaaactgagggtgcagggtgggcatcggcctagagggaaagagaagaacagtatttcaaacaaataaggaaaccattccagtcattcctttcactggcttcgagaggaagagaggaagataattgctgctttgggtatggatcggaggcccttggaataactcactcaatgccatcagagcaacagtgagcagatttgctaatggccttctcaaatctgttcccctctttgt

SEQ ID NO: 26038 - DNA, 1518 bp, Bovine  19866880541228
  misc_feature (1)..(1): n is a, c, g, or t
nggattgaacctgtgtcttctgcattggcaggcagattctttaccactgagccacctgggaagtgattagagcaatgaacagaacagacaaaagggcctgccctcctggaactgacattctagttggggagatagaaaatattccataaacataattaataagaaaatcaagtaagctgttccaaggcgataagagctaaggagacaggaaacattagaactgttatcagcaggattgctagaagagatcactcctgcatgagctgatgccattctccactgctccctagggcagccggtaggtgtgagagtgggcactgcaggtgagggcattaggaagtcgcctcccaatcctgaccttgtgtccctcccttccaggcaccacggcctgagtgaccagaccatggagaccctgcttggcggcctgctggcgtttggcatggcgtttgctgtggtcgacgcctgtcccaagtactgcgtctgtcagaacctgtctgagtcactggggaccctgtgcccctccaaggggctgctcttcgtgccgccagacattgatcggcggacagtggagctgcgtctgggtggcaatttcatcatccacattggccgccaggactttgccaacatgacggggctggtggacctgaccctgtccaggaacaccatcagtcacatccagcccttctccttcctggacctggagagcctgcgctccctgcacctcgacagcaaccggctgcccagcctcggggaggacacgctgcgcggcctggtcaacctgcagcatctcatcgtgaacaacaaccagctgggcggcatcgcagaggaggcctttgaggacttcctgctgaccctggaggacttggacctctcctacaacaacctccacgggctgccctggggctctgtgcggcgcatgatcaacctacaccagctgagcctcgaccacaacctgctggaccacatcgccgagggcaccttcaccgacctgcagaaactggcccgcctggacctcacctccaacaggctgcagaagctgcccccggaccccatcttcgcccgctcccaggcctcggctctgaccgccacgcccttcgccccacccctgtcctttagtttcgggggcaacccgctgcactgtaactgtgagcttctctggctccgcaggctggagcgggacgacgacctagagacgtgcggctccccggggggcctcaagggccgctacttctggcacgtgcgcgaggaggagtttgtgtgcgaaccgccgctcatcacccagcacacgcacaagctgcttgtcctggagggccaggcggccacgctcaagtgcaaggccatcggggaccccagccccctcatccactgggtggcccccgatgaccgcctggtggggaattcctccaggaccgccgtgtatgacaatggcaccctggacatcctcatcaccacgtctcaggacagcggcgccttcacctgcatcgctgccaacgccgctggggaggccacggccacggt

SEQ ID NO: 26039 - DNA, 1734 bp, Bovine  19866880553553
  misc_feature (1)..(1): n is a, c, g, or t
ntaagaatttgccagggagaggttggaggctgacacaaacaatcaaaccaaaagcactgcccaaagcctcctaaaatgataaaaagaaacactgccagatattctcaaagaacgaagagtagtgtctggtctagctagctgaactggaaaaccccataatataatttcatgtaaattatatagtgtactcagaaggatcttgcctcaaaggtggggaataattagccctagactaaacactgcaatggctctatctgacaaatctttaaactaagacctgaaaggactgaactttttccaagtaacttaactgaaacccagaacaaagctcaggaatatttataggaatacagaaatatccaaaacacaataaattaaaattcctaatgtctagcatctaataaaaattacctgatgtacaaataagcaggaaaatataacccacaatgaagagaaaaaatcaattaaaaccaaccagaattggcagcaaatgttagaattaacatgggattaatacagaataaacattagagaagattagtaaattttttaagacacagcaatagaaacaacctaaaacaaaacactcagcaaaatcataataataaaaaaatgaaaagagcatcagtgagctgtaggacaccttcatgctgcctattatacctatgattggagtccccagaggtcaggatagagagagaccaaaaaaatctgaaaaaaatactggctcaaaatattaaaaatatgattaaaaatactaatccacagagtcaagaaggtcaacaaacctcaagcacaagaaacacaaagaaacaagactaagtcaaatcataacaaatttactcaaaaaccaaaggtaaagagaaaagtttaaaacccaccagataaaagtcaaaaacaatacaagcaagacttgaagcagaatcttcaaaatactgaaagaagttaaatgtcaacctagaattcaatacccagtgaaagtatcttttgaaaactaatgcaaatgaagaattcacgccctgcgggaccacactgcaagatttgctgaaagaagtccttcaggctgaagaaaagaataccagatggaaatacaaattacacaaaaaattgaagaacactgaaaatggttgctatatggataaataataagatgtatttattatttaaatccctttgaaagataatcagttttaagaaaacattgtagagtttataatatgtgtaaaagtgaactctgtgacagagatatcataaaaccttcaagtagataaacggaaatatgctattgagagatttataatatatatgatgtaatataaaatcatttgaagataggttgtggtgaggtaatgatgcatactataaatcctaaaacaaccactaaaatagcaaaacaaagaattataaaccacatgccactgaaggatagaaaaatgggagtaaaaattcaaataattaaaaagagagcaagaaaagaagaaagtaaaaataaagtttatggggaaaaacagaacagattgcaagatgatgtacttaaacctaactatatcaataaccacattacctgtaaacaataaagaggcagagatcgttaaaatggataaaaaagcaatccccagtattgctgcctacacaaaactcactttaaatacaaagacccaaagaagttaaggtaaaggaatgagaaatgataagaccaacttccttatcttctttccttcttttcatggggaa

SEQ ID NO: 26040 - DNA, 2086 bp, Bovine  19866880556908
  misc_feature (1)..(1): n is a, c, g, or t
ncccagggactgaaccctcatctcccctgtctcttgcattggtaggcgggttctttacccctagcgccacatgggaagctcacctgggtgtgcgtggtgcggcaatttgcttcactgtgaattggaaggacaatgcagaagctgaaactccgatactttggccacctgatgggaagagctgactcatttgagaagacactgatgctgggaaagattgaaggcaggaggagaaggggacgacagaggatgagatggttggatggcatcaccgactcaatgggcatgagtttgagtaaactctggtagttggtgatggacagaggcctggtatgctgcagtccactgggtcacaaagagtcagacacgactgagagactgaactgaactaaaaaggagaaaacaggcacgagaggggaactctggcacaaggggaggactttgataaaaatctagggtcccagttccaggtctgggaaagtagctcaggatattgggaaagctgtgtgactcctaagcctgtttcccctcctttcatggtgaggatgacactccctgcctgccctccacacagggcttggaaagctactgtaaagtgaggggttttacgctccagcaacataaaaggcacacaatgcttttagagagtatgaagctcagggtcaaagtgaaggttgaaggacctgtggacagactcctcccaggccgctgttctcagcactgatgagtccatccaggaagggcaagatccttcaaggagcaacttccacgtcccagccacaggaagttcttatccaggaatcgttatcttcttctccaagatcttagtcctgtgtttgctgatatgcttgtctaaattctctccctcagactggggctccttgaggcaggactgtgtgtgtctcttattcccaccagtttcaacagtggtcctaaatatggaaaaaatgttgccaagacccttaagctcggaatccccagatcaggtccagggctctttgagcaggtgtgggaactggcagtagggatcctgacctagactgccatggagcagagagctcatgttaagggaggttgtcctaattttgtttgtgtaactttccacttgacttatttataggtgtccccactgagtgagtttactggcagtagatctgcaaactttagggatctctgtgctgaatgaggtgggggtacagggtggggaagcaagaggagtgaggggtgacaggaagaagaagagggcatttcagggcagagccagtaaggggcacaggccctggacccaagctcccagactcccacaagaagttatacgggccaatctgtgctatttcacatactattttttttcagagattttggtacaggaaatattcctgggaagatgaaatttatttctgcctggaggcctggcctggcccaaatcagaaatgggtaagacaagtttttggctgcagaccttacctcgctaggccttccatcttgcaggtttctacctggctgagctctttcatgtcctgctcaacctacttgccttgtgtccccgacctcaggaccctattctcttcacctctgccactttatgctaatgctgggtcctccagatgacaacccccttgtgaggacagcccgggatcaataccggaggcactgaacacttctcttccagcagggtctgctctgagaggctcacagtcattaacttggttcccctcataagctctttatgatggagcagccaatgttataacccattttacagattaggaaactgagggacagggaaatcaaatgacttgcccaaggtcacaccatcagtggcaaaggtggtttaatcccaagctgtctgctcccggtggcgagcacctcccagaacttgggggctcagagtaattcctgcaacttgccctaaccccaactgtgttcgcttttccttcttccaaacaagtggcatctttgttcatgatataattttcctttgtttattgtttacccctgatcctttgtgttccctgccagaccaaaaatctccctgagagtaggcacttcccggctcctggaactggtttgtcacataggagccatt

SEQ ID NO: 26041 - DNA, 1535 bp, Bovine  19866880665008
  misc_feature (1)..(1): n is a, c, g, or t
ngatctggagcaagggagggggcatgatctgccttgtgtggtcagagattgttgcttacccattctccggagcctcatctattcaagctggcccattgcctccccacaaagtctcctgtccctctgtgggaccccatggacccctcttgactcatttaacaatgttcagtgggtgcctatctcatccccatctcaggatgttcctggtgggcaggcaaggggcaagatgtgccctggccttgtcaaggccaccatcgaatggaagagagaagattccctccccagcagtgcctacgaagaatactgggtgggactctggtgtccctggccctgactctactctgccactattacgctgtgtgactttgggtaagcagcttaccctctctgaacctctaatttcctctctggaaaatcaagggtttggagcctgtgatctgaggtgccttccagccaagccactaattctcctggatccgaggaggaggaggacagttagggcaaggtttcccacgggagctctcatctgagtcccagaggtaggggaagctgggaggtgaggttccattccttgtctgtcctagactctcttcttgctcagctgtcccctctgcagctcccctcggctccatctgtccagccccagctctcctgccagccccatctctggctctgagcgggaagcacattgaagctgccaggtcaaatcagatcctcacacgcaacaatttaacaagagatggatctgacgtatgtatgcggcttttaaacagaggttcctaggagccggttatttcactcagaatgaaaacaattgattttctttagagccacttactaaggcttatcagccttgatacaaccggccaggtgtttccagaggtccagtgctgctcacttgccctcaggtgaggccctgctcccaggaagcgggtgagcatcacagcatggcagccagggcccccacctctgctgggaggaacaggactcccaggcaggagggggcggatggggctggacagggaggtcggcctccctgcagacctaagctcagacccagctctacagagcgtgaggcattgagagtgggggtggctacaactcaaccgtgccccgggagctgggaaagcaggagaggccacagggcaccccctcccaactcactgctgagtcggcccctcgtcctgggatctgaatgacaaggaaacccagttctgaccttgggggcttcccagtgtgcaaatgtgcaaggtggacaatagcagtattcacatgcattctgagatgtccggtgtagtatgggcttctgagaacagagagtaggttcagggctgggagaggaaggggctatgaggcctgggggtggtcaggaaagacctctcctaggaggggacgtgtgaggcagctgggtcttgctggagaagagcttcagggcagaggggacaccctcgagtcctctgtgcatgggggcctgaacgaaggctgggcttagaggtgaagagacacccctgctcccgtccacccgctggggcttc

SEQ ID NO: 26042 - DNA, 3052 bp, Bovine  19866880690139
  misc_feature (1)..(1): n is a, c, g, or t
ngagatgcagagatgcagtttcgatccctgggttgggaagatcccttaggaaatggcaacccactccagtattcttgcctggaaaattccatggtcagaagagtctggcaggctatagtccacgagggcacaaagagtcagacacgactgagtacacaccacagctgtccacagttattttgcataattgggctctaagctccggtttcattgggaggtgatagtccagagcaatgggaaataaatctcagctgcttctatttcctcaacagtcagagcagaaacactcacactcagactccttatgctaacagaacccaccccttccccagggctccaccgggcacaaagtactagccagagactatttctcagccccttgtagggttaggtgtgacagtgtgatcttgtattttcaaaggaaagtgtgcagaagtgatgagtgcagcttctgcatcgcttgctctaaggaagagcctttaagctcagcttctctttccagtccccacgtgttagaaagcaaatgtgccagcctcacagctccaaccacgcaaatgagcacaatgcccaggggagagttgagccacaagatggaaggaacctgggtctgaacattctgtcaatcacagtggtcccaccagcctgaaccaactagactgttatatgagagtaaaacacactttcctcttatttaagccactctctcaggactctgtaacagcaacttcacctttatcctgacatactgggtgaaaagaggctgcagtgaatgctttagttgatttcacacatgctttccaagaacccatagggccaattgcaacagaagcaatctttcctgtttatggaaactggctaaacattgcttcttccctaagaaggaaagccaggttcttctcctaggcaggcaggctgggggctctgaagagtctagtgatctgttgcccccatcatctaacactcctctttccctattaatccaaggaaactgtatctccagcttggctgccacattctcaacaaagtggacagagtctatgatgggactgtcaaaggagtaaagtcttagatcagaggagctgccatggaaaaggcccagctgacacaggctgacacaggccccctggtatccctgcccaggggtgatagatgggatcgggtaagagacttggggaggatgtgagtaatgtataacttgtttgtaaatttcagtgaaattgaaaacatttttcatgtaaatagagatattttaggtacagatacaaacatatgccctttgtcttgatgcacagcccaccatttcttgcttcctaatggcctccatctcctctctgtcagtcttatctatcagtcttgtcaggcccagaacaaatgctacctctttcccctgaaaaacctgcatgttgtccacacccagatcaatttctcccttctccaaactggtaaagcatttttatctgtgtttccttggggacccttggaactctgtgccttgcagatgagttggtgaaaacacataatgaaggcttgcagagtggctggagagaggtccttttaatgagagcatctaacatctgtctctggctttctgctaaaggactcaaatatatgctcacttgattttttaaaattaacttttttatttttttggctgcactgcgcagcatgtaggatcataatttcccgaccagggatcaaacccatgccccctgcattagaggcgtggcatcttaaccactggaccaccagggaagtccttctcacttgatttttatgtcaatcctagacagtgaaagtgaagtcgctcagtcgtgtccaactctttgcgaccccatggactgtagcctaccaggctcctcagtccatgggattgtccaggcaagagtactagagtgggttgccatttccttctccaggagatcttcccaacccagggatggaacccaggtctcccacattgcaggcagacgctttaccatctgagccaccagggaagtcaatcctagagtcaggtactattgttacctccacttgaaggatgaggaaactagcaccaagaggttaaggaacccatggtcaccaagctaacaactggtggagaagagatttcagcccaggaagctgcagtagagagctgacagttagggtcattgcataccgctgccctcattcatgagagggacaagcagatacccaagaagctgggcacaaggaaagtgttcgtgacagaggaggtgctgcagacaggaacaggcacccctgtgttcagaagccccttgggcttgtgtgtggagccatcacataacagcaggcttgagttttgagctactcagctgagacagcaaaacaattctgccaattaagccaaacatctggtcaatgtagtgaaaaatcaatcacgaggggtctggccacagaccccagggctcctcccaggtcccaggtgatggaagcgaggcttccctagttcccagaccctagttcgcatgctcccctttgattgactggggagattcacacctaatgcagacctaaggacatcaggagagcaaaggagggacaaatcctgtgggctctaaaaagtgcttcagaatggagagccgcattcaccgcagatccaaaaagcacattcccaagccgggtggtaaattctgtactgcctgctgtagaaatgcaaattgccataataaatgccgattatcccaattacctctaattgtctggcttgtgtagcaagagcattaccataggagagaccaataagggacccggtgtatttagcagaatatcctatcctgggagttgggttacaaatgaagtaggtgagctgggccaggaagccccctctgcggtccctgggaggggatgtcgcagaaagacacgggggcttcacagtctcccagctgcttggggacagcactgatgcagtgacatctttatgcaatggtcattaaatgctattttaaaaattggccgtgtgctggagagataagggcagagaatatatgcttgttctccatgcttccttccttctggccagctgggtctgcgg

SEQ ID NO: 26043 - DNA, 1570 bp, Bovine  19866880780727
  misc_feature (1)..(1): n is a, c, g, or t
ncaccactgtggaaagtgaagtgtgtgaaagttgctgcaatgtccgactatttgcgaccccatgggctgtacagtccatggcattctctaggccagaatattggaatggctagcctttcccttctctaagggatcttcccaacccggagattgaacccaggtcttccgcattgtagatttgttatttaccagctgagccacaaggaaagcccttgtggaagtacatcgcagcaatgtctttagagccaaatagggctcaatgcgggctttcctggtagctcagatggtgaagaatcctcctgcaatgttcaattcctaggtcaggaagatcccctggaggagggcatggcaacccactccagtattcttgcctggagaatccccatgggcagaggagcctagtgggctacagtccacggggccgcaaagagtcagacatgactgagcgactaagcacgcatccacagggctcaatgcactgctcaggccccaccacatccccaccccagcagcagccagtattctgaaacccattctagtttgtactgattactagtatcattcccgaactgtactctcccccaggaggaagtcagcttcacgtgccgaggctgaaacgctaagtgttctggaaggaactggaaataatcctgagaccaggcagcgggtggtgtatgtggctcatggcagatgggggagaaggagactctggctccctgagaaattctccttgttacaaagtcctaggctgagcatgaggcttggagatggaggctgtccatctggggtagcagcgttgggggcagatggggaggatgcgggtgaggaaggtgggccctggcctggcctgcccgcctctctgcaggttgtgggaggaaggggctaaatatccaaggtggtgtgtgggggatgggagatgggcaggcctgcggtgtaagaaatagtgagttaaaagaatcattcagtgcgtacagagaaatatcaggaatcaaattgcagggaagatttcaagtaatcataaagggtttttcaaatatattcactgctaagagctacagatgtcaggagagaaaattggttcacttaccaataatagtcgtggagactgggggagcaggatgcagacaggaaagtacttaaccaggcatccccacctccttctctcctgggatgcgtgggggtgggggaggaggggctggagcccctcgcaggtgggcgaacggccaggccagagcaagctgagtgggaagacagcttggaggggagacaggaggaccaggtggctccagtggccccaccactttccctccagacccttgcacaggttatgtggcggaaggactgtgcttggcactgagcgggaggcttgttgctcttgtcactgagaatttattgatggtttatgatgagcagagccagctgtgtgacagatcggagacactcagacacgtggtacctgccctgggctcacaacctggttagggagacaaaaaccacacccaggggagaatgagagagacctcggccccacgctgggagcaagggactaattgggattgggggtgagagg

SEQ ID NO: 26044 - DNA, 2134 bp, Bovine  19866880786954
  misc_feature (1)..(1): n is a, c, g, or t
ncatcaccgactaaatggacatgaactttggtaaattctgagtagatggtgagggacagggaagcctggtgtgctgcagtccatgaggttgcaaacagctggacatgacttggtgattgaacaacaacaaccatgcggaatagggaaatcttatttttccaaccagggatggaatctgaacctcttcctttggaagcgcagtaaccactggaccaccagggaagtccccttgccccagcaaagaaaggcactgctctcacacattccattccaggggcctagagatccctttctagtagctgagggcaaaggccagacctctcctcgtgtgtgtgtgtgtgtgtgtgtgtgtgtgtgtgtgtgtgtgtgtatgctaagttgcttctgctgtgtccaattctttgccaccctatggactgtagcccgccagcctccactgtccatgagattctccaggcaagaatactggagtgggttgctatgccctccttcaggggatcttcctgactgagggatcgaacccatgtctcatatgtctaaccagagttggcaggcaggttttttttttttttttttttaccactagcgccacctgggaagcccagacctctccttaggtatatttaattcttcactgcacatgagtccttgtgcaggaccctgactgctctccaggcccatggaaagccttgttcagactgtgagctttatggtctagctggcctgcatcagtttatcagatggtagataaaggatctagaggtatttaattcaatttttaaaagcatatttgttgtcttgctttattataaaattaacaaatgcacataataaatttttctaacaatacagaaatgtataatatagaaagttccccatcatataacataatccagaagtgtatataaaacagaaatttcctcataattcaagaaataactgttcttaaaaatttggtttatattttccattttttctatgcatattttaacatataaatatgtaattactttgaaccaaaatgatatactatacctagcgtctgtaacttgctttttcttcttaacagtacatcatagatacgacatggaaatgtcaccacgtataaatgaacctcattttttttcaacgattgaatagtattccagtgtgaatgtgtcacgatttatttaaccaatcgcttattgataggcatgtaggttattaccagttttttttctaatgcaagcaatgctgcagtgaacatccttgtacatatataattgggctctgtgctaaaatttctgtagggcaaattcttaaaagaggaattgctggattaaaggataggtacattttacagtttcatagatcttgccaaattgtagtctgaaaagctgatccaatttatactcatattaaggatgcctggaaaatcccatggacggaggagcctggtaggctgcagtccatggggtcgctaggagtcagacacgactgagtgacttcactttcacttttcactttcatgcactggagaaggacatggcaacccactccagtattcttgcctggagaatcccagggacgggggagactggtgggctgccttctgtagggtcgcacagagtcagacatgactgaagcgacttagcatagcatagcatagcaaggatggatgggagtgctggattcctgtcccccttgccaactggttgttattaatcctttatgtaaatccaaatgtttaatgtgaaaccagaattatgctcttcttttcctgaactggatggctgcccatttctcttcaatgtccccatggggtagatggctctcttggccccagaccagacctatgaagattgggtggtagggaaagtagtgaccctggaaaggtgaactctggagtaaagcagttaaatggggcctttcttaacattttgttcatgtagacacttgatttgaaatcaaacatttgaaacatattcccctgggtgtgcctagtgccccactggataaagtaacctaatcacttcgagtgactatctcatcctatttccaagtctgacccaccatcaagcagaggggggttatacaggcatgaacagcagtgcatggggatattggaagggtgctctggatttctgcttatcct

SEQ ID NO: 26045 - DNA, 1646 bp, Bovine  19866880859222
  misc_feature (1)..(1): n is a, c, g, or t
ntaagtgaagtaccttgatgtccctggcctcagtttcctcatctgtaaaatgggttcaacagtcataaccatgacactggtttgttatttaacagcattttccagcaatgttcctattcaatggtcagtcctattccatccagagtccttccctcatttcaaatgagaaggccctgaggtttctagattctgtggagacgtccagacacagcagccaggaccctcagacatagaagcaagccctttaaggtctctgcagcggctagagctacctgagtgttcagagggcagccaggactccaccaggcgcacctggaaatacccagtgtcaagacaggggaggcacacagctatctagctttaaatcatgcattcttaatttcctgatttaatggacaggtgaacaggcagtccgtgggggaagagacagacaacgcagggtggctaaggctcactttgggaaacacggtttccctgcttggagagggtcaccatcagataatcccatactagacatgattggggaaaaggaggcacaggacatctgggtgggatcataagcagctgtcacagccaggactccccctggcagcaccccagccctgaggctccttcacacgctcctctcttcttgttcgcgctctgtcttcatccccagctgtcaattcgcgtgtctcaaaatgacatgagttaaatatcttgaagaactagggattcatcatacggcaacgttgacccagaaatcagtgcttcctcgagcctgtcacaaacccaggggtttttatctcagtagtggatgattacagggtccttggtgctattaaagacctatattcttaagtgttatcgtctgataaatagattccagtggcccagtgggtaaagaatccccctatggtgcaggagacacaggagatgctggttcgatccctcagccagaaagatcccctggcggatggaatggcaacccactccagtgttcttgcctgagaaataccatggacatggggttgcaaagagccggacgtgacttagctaccaaatgacagtttcagtgctttgttacaatagccctagaaaatgaatatgggcggaagtgcaatatttcagtggagacagctgaggcatggcaagaaggaaggtatatgatttaagaggtccctggaatctcttctctttgtctacccagcaggttctcctctcttttctttcctctacgtccctgctcctctgtcaccaatggatccgtcgatcaatactgaacagggtcagcgacccgccccatgcacctcgctttgtgctgaaggcggaaatggacacagaagcatcgcagctgaactcccatccatgacctcctgggcgcctgtggaggtggtaaaaggtgtgggctctggggtcagcaccctctggcacgaggccacaagttattggccgtgtgacttcaggcatataattaaactacctgagattacttcctcctccatgagatagggaaaaactcatctgcttcacagggtccttttggggaattttgagataatatacggtaagcgattagcccaaacaatcaatcaatgctaattattattagtggtgggggacttgatgtaatacagggatgaagtgtgatcaatgctggctcacag

SEQ ID NO: 26046 - DNA, 1663 bp, Bovine  19866880883128
  misc_feature (1)..(1): n is a, c, g, or t
ngcttactgatgtcctgccctagacagcagctctgaccgtgtgcagtctgagatggatatttagaatcagactcggaaggaaacatgggattttgtgaaatcagttcccctggagagcttcatgccttgctctcacagctcagtgctgctgacacttggcataggagcatgtacctaagacctgtttgttgaatgaatggatgaatgtatgagtggggagtgagagaacaaatgaaccggcttcctcgtggatgacgtcataatgcccttaaccagagtgctcagtggccaggcgggctactcctgaggctggtgtgtcccttctcctcatccccatgtggtcttcctgaagctttgatgttcatctctttgcttctccttgcttgttcccacatcttggtctttgcttattcatttgcctaaaagattctttcagagtctgaaatctgtccccattagtttctacaggaaagctttgattccctccaacaagctctgaaaaccctgagcaagtggaggagctgctccccctgcctggaaggggcaggcagggtacacgggttgggctgcagccaccagagccaggaggaggctgggtctgctgatgggacggtgcaggcccccaccaaccctgaccgaggggtcaggaagaaaggctggggactgtgctgcaattctctgactgcccaggactcgatgaacaggttactccttagagacccaggatctcaactcctggccaggaggaaaacccagtctttcaatgatgtaaatgtccaaaagtggttacctgctcacgacatcccaaagggtcagccgcatccttactctctgttgcccagaacatcgcacccagggctttgaggcttcattcattcatgtctagagtgttgggatttggagagcggtcgcagaggctgttggccaacccatcctgcagccccatgtgctgcaggaggcctccagaaagggaagcagcgagtttccagcctcagagctgctgtctgtgcttagcgttgccctgaaggcgccatgcatgctggttccatctcccctctgcttgtgcctgccctcttttctcctctagcccaagccttctctggcagcagcaggcagggagaacgatgtcacaggcaggccagctggaaggggaccggctgggctgggaaagagtgtgaccactgtccactggtgctcgaagtagggtatggctttctcctgggcggctttatgtctgcatatttcagctcccacatctgttcgcctccagggagtcccgaggcatgtaccatgatccctaagagagggggatgcactggcatgtttgaggaagatccaggaggcggtgtggatggcaccaggggccaaggggaaggatggggagatgggaccagggcagggctgaggggccaagtgtggtttccagaaaaactctgcaaggcactttagcacactaccttgtgtaatcctctcgaaccaaaacactcagatgtgagggcgattattatccccattttccagatgaggaaaccgaggaacagggaggttaaatacgtttcccacagggcacagagccaggattcccacagttcttacccggattctgcactcttgacctctttgctaagtggcctgtaggagtgactcattagctttagagtcg

SEQ ID NO: 26047 - DNA, 1241 bp, Bovine  19866880896577
  misc_feature (1)..(1): n is a, c, g, or t
ntatacacgtgttccccatcctgaaccctcctccctcctccctccccataccatccctctgggtcctcccagtgcaccagccccaagcatccagtatcgtgcatcaaacctggactgacgactcattttatatatgatattatacatgtttcaatgccattctcccaaatcatcccaccctctccctctcccacagagtccaaaagaaggggtttctaatacagcatcttatacccagcgtcttataccaggcagtggttaactggagagagaaacttttgatatccttacaagacacagctcataggcagacactccagtccagccctagttagggctctccactctatgacaaaagcagactgaaaaggtggcagaggggagcctggagctggcagttctgggttctccgtgtggctccacactcagcttgctgtgtgatggtggggaagccatctccctctctgagtcttagcttcattacctgtgaaatgaaagagttggacgagatgttcttttagggtcctttcagctctctgattctctgatgagttgtcatctgtctaaacccaataagctgctttactaaaaaaaaattaaaacgggggatggtgagagctaaagttgggggtggcggatgggcaatttattccagtgaatgcctttgagtcaccaagactggctgagaaaaattttttctctatagaaatggagcaggagggtttggaattgtccactctcccagagatcaggataggatgaagtttgggggaactgcttgctatgtttgtgcagtgaatcggctctgcacaccagagagaacactgttaccctcatttcagggcaggggtaggggtgggggagggcagacgctcaagagtcagctgctgtggctctttgaaccctctggctttggagatggaacagcagcacccactctgtgcagctagaaatagtggatcgctttaggctagaacgtctgccttacattcaaatccaaagcagccactagactaaactttcagttgtaaaatatttattcacttccttcttatctttcttttgttcccctgcccttatcaagctcttggactcaagtttcctggtttaatgacgcttggaccaccccttactcattcccacctctactactctactctggatattccccccagcctgtcctctctgaatatgctctgaaattgccttttcctgctttaaattgcaatccacccatactt

SEQ ID NO: 26048 - DNA, 1003 bp, Bovine  19866880908329
  misc_feature (1)..(1): n is a, c, g, or t
nttactcctggctgatgagaattactccaggaatctggatcatagtggaacaggtctttactctcctcctgggttacatttccatctctgggtgggtccctgggaaccccactcccctgagagttccctcttcagtctctgacccccaggcttgggatttgtttgttactgctcctggaatgttctccagcaagtcctttttccctggtcatcatctcagtcttcagagtggaatttgtcaatgactagcaaggctctcttgctcatatgccatatgtcgttaggctaaaaggccccatcaccattagcaatgagctaaggaggatcacaggattagcagggatagacatctacatcttactccagaaaataaatacaaattcatcaaaaggatgttttatggtggttcccctggcaaatgaccatgcctacaatagcctatctctgatgccagaattttcatcttttggggttaaagtactgtttcatgttaaactaaagactctttccacccatctcattaaattatgatcatatattattctcttaatgggaatgagtttgtgtgggctttcaagtgtgcaaatgacaggaagtgggagagactgattaatcagaatatgctgatagagtggaggggtcccaaggatcaggatgcctggaggttgctggtgggaagaatgtgaggaagcagtcttcagccttgagtttggagtgaagggtgtaactgagtcatggaacctggatcaataagcctcattcctaccttcctttagttactcaatacacattcaccaagcgagtaatggggtggatcattttacagctaaactgtggcattttttagggtgaaagcagtcactattaacatctatgctgggataacaggcaaacctagatatacagtcaccttttgtgacacctgcaagacttgatgcaggacagacaaaattacctgctgcatcaagaaacctgtaaatgagacggaaaaatatgacatggt

SEQ ID NO: 26049 - DNA, 2052 bp, Bovine  19866880925314
  misc_feature (1)..(1): n is a, c, g, or t
nggtcagtttgactgtcacttctaaacacactcccaagtggtctatctgaaggctccctttttagctgaaaaaaaaaaaagatagcaaatattgcattctatgccataatttttaccagtaattattttcatttgaaagcaaagtttcgaaatactatccaccaaatgaaaatgttggtccaacaagatgcacaatggtccccctgtggctttggtccttccagcacaattgctgggtgtccctgggtagtcggggaacctagctggagaatcagagggttaaagtgttgtcgccagaacatcactgcacaattgcacatacggctcctaggaggtgaaaaccaactccctcagtcgccagtctgtacccaaaccttgtttaagacaaaactccacgggtactcccagccagtcggtgccagggcacaagcctaacagggtcatttcccgctcctccaatctgctcacgcctttctgtctcttgctgtttctgccagcggggctgctctttccttcagtgcaggcttcaaagtcaagctcaaagctacatcatccccctccagagcagacccccaggctatcatctcttctccttccttgttttcttttcttttaaacctatattgtggctcacaatcctttctattcagcattagagttatttatattgatcttttgaactcgactgtgagctccttgagggagggaccatacagagttgaactttttattctgcacagtatttagtgctgtactagacatggtgtgagcatgcagaaaatgtttgttcagtaactaaaggacaacattcaccttttacatatcaacattggttaattacattttcattcctgagaagatggagagagcatgaaaagggaaagtgaaagtcactcagctgtgtcaactcttctgcgatcccatccatgggatctccaggaacatctatgggatctccaggaacactccggaatactggagtggatagccagctattcccttctccaggggatcttcccaacccagggatcaaacccaggtctcccacattgcaggtagattctttaccatccgaacccatcagggaagccttaagaatggtgttaaggaaagtcagtgcaacaccacagaacagactggggctgaggcttctggtggagaaggcaatggccacccactccagtacgcttgcctggaaaatctcatggacagaggagcttggtgggctgcagtccatggggtcgcaaagagtcggacacgactgagcgacttcacttttacttttcactttcatgcgttggagaaggaaatggcaacccactccagtcttcttgcctagagaatcccagggatggcggagcccggtgggttgccatctatggggtcgcacagagtcggacacaactgaagtgacttagcagcagtagcagaggcttctggatctcactacaagcaatttgggagtttcaaaaagaaaaagaaaaggcaccctactccaacacatgcacgtacacaacttgggtacaattaagagacaacaaagaggctggaggctggcctctagccagctgaaacataatcacctgtgacacttgtaccaagcctatgaaattggaatttttttgcatggaacccaggtatcaacatttctaaaagctcccttggggatttctaagtaaacaaaactttgaaaagcactacaagatacccatgaggatgaaattccataaaaatggccaacaggtacatgaaaaacatgttcaacatcactagtcatcagggaaatgcaaatcaaagtcacaataagataccaccacacaccttgtcagaatggctatcataaaagacataggtcgtaagtgttggtgaggatgtgaagaaaagggaaactttatgcactgttgatggcaatgtaaattggtatagccactatggtaaacattatggaggttcctcaaaaaattaaaaatagaatgatcaacctaacaatcccatttctgagtatatatagaaagcgaataaaactaatatcaaagcgatatctgcactcct

SEQ ID NO: 26050 - DNA, 2878 bp, Bovine  19866880930254
  misc_feature (1)..(1): n is a, c, g, or t
nttgagccttgcagggaagagagtcgaaggtactaaggaaccctgggcttggaaagactgtcttcaaaagcccatcatcttgagaagcttagactgaaaaaaggaacaccaattaagagttgggcgtcttggcaggagaaagccttccttagaactgatgattatcttaatgaggggataagaagtattgaaaaggccacaggctgcatgggaagcccactactgagcccaagacttaaatgagcatgcacaaaagacgggaggaaaggccagccccccgcccctgcatgcctactgcaccccaagcagacaggcccctgcgattcccacatgctggagtcactgcctgctgacatggctagctatttattagtctttaacaaacataacacttaccatgtaccgggcactattatgtgcattttatgaatactaactcatttcatcaacactgtatgggttatttttcccctcatcccccaaagatgccaaggttaaataacttgcccaaggtcatcactaatgtgggccagaacctctggctccttcacaacaagaacatatatttatctgctcagcaacagacaatagtaagcactcaagagatatttaagtgctttctaaatgaatgaatgtgatcttatttccctctgaggccggacagccagggtccaattcccagttccattgcttactgtgtgaacctgggcaagatattcacctctctccacctctgtttacccacctataaagtagggctaataataggctttatagggttgttgtgaggattaaacaatttttaaaattaataaatgtaaagaataacaatccctggcacaaggaaacaatcaataaagtgtaattgttatttcacatgctatatcatatctcatcaaaccactagcttctgtaaatacacattaaccatttcttttcattcttgtcactatctagaatgtgttaggtggacatttctaaatatcctagaatagagaattgtcttagttgtctattgctacatagcaaagtttagcaacttaaaatgatgtgcattcattttccaaccatttctatggcttagaattctaggcattacttaactgggtcttctattatatgatctcttataagtctacaacctagatgttagccaaggctgtggtctcatctgaaggttcaactgaggaaggatctgcttgccaagttcagtctatgtttattggcaagattcagttcttccatggctgttagatggagggcctcagtcccttgctggtcattgatgggtcgtggccctcagctgcttgccatgagggcctctccaactcactttatcacagcaagttcatgagaagaggagccaggaagagagagagttggtaaaatggaaatcactgtcttttgcaatttaaccacagaagcaacatggatctttcttgccatatcctattggttataagcaatgactaggtccagcccacactcaaagggaggtttgggggtccatgtcagaagctgctgactccaggctcaaacgtacttactgactgaacccaagagtcagctctgcttcagatgaaggtagggaacatggagaggctgatgtgggtcatgtaaattccaactagccctgcctctagggaaagcttccttgaacccttttgggaccttggtgtccatccctatagaatgagcagctttgactagaagatgcctcaagtgccctccatctaaattctagattctttgaatttaacagatcttgattcaaccaaactgacaaagttaagagttctctgcattcttggaaagttgccaagatcatgcgcatccctcccagccccccaggtgagggtggatcactgtctcccttccaccacccatgctgtgccgtcccacacacagccttggtagatggaaggaagtgggcgagcagagtcctcagcaaagaaaaagtcccaagtgttgcacttgcttcacccacctccttgccctgaattgctctggaggctaaatcattgcctggcccaattggccgggcaggccagcatcaaaccctcagtgagattaaaggccctattgaggtgtataaatcagagcagcacaccctactgagagcatgtgattagaataaatgtgtgtccctggggctgaacacaactctgctgcatgctgggcacctgcgtcctccttgggatccttcctatatattgtcccactgctcctgttcttcctcaacagctcagcagcagcccacccagcagacagtccctttcgaacaacaccctcctttccctatacagagagtgccacatgagcacaaggagcccgagaaatactgtgggggatagggagtctggagaacctagtgtgggtcctggctgtgcccctcgcctgcagtgtggccctgagggggtccctttctttgctcagcatcagtttcttcattccatcgatcaatagattggaccagatgactccgcagatctcttcgagctttcaaatcctacagttctgatatttatctcaagtgatcagggaaaacaggatgtccctagatgagagaggatgagtttggctctaattagctgaactgtgacccccccataaaagtggcttctgcgtgttatctcaatcagagggagagagagaggagatttcagggttggcgcagtggttcagcaatgttactttcccatcttcctctgttgtcaacaccaatgagagatgtccacacgcccctggggggagggggctgagatggccacatctttcagtgtcacatttttctgtgatggtgtcagactcaggagggagacagagtggtgggctctcctgggtgctatatgttactaggagaaggcctttcccaaag

SEQ ID NO: 26051 - DNA, 2338 bp, Bovine  19866880975885
  misc_feature (1)..(1): n is a, c, g, or t
ntcttttgactgtgacatttattagtggtttttacaagttggtttgactcaaattatatttttcaaaatctagtctgtgcttgaacacttgaaatattttattactaggtctacagtacataacacagtaattgtgtaattaagagataatgttgatgctatggaacgatgttgacaagataatagcattctgaaaccacatgaatgtcaaagcaagggaacacatttataggtggaaaaacagaaaaacaagtgacaaatggcccaaagactctttgtagtccaagttggttcatttgcttcacagctcagtttccaccgggatactcaagtgcggcccatatgatgctcctgagttcctattgtgtgacgccccgccccaccgccaagcatatgggtcaacattaaagaaagcaggatcatctacagaagccggtcctcctactccacgtgcagacgctcagaaacttagtcacgtgattgccaggcttggtgagactggagatcctcaggttcaaacactgggaagtgcccaccattgacagatgaagaggctgagatgccaactgaggaaggattttctcttggcaacctctgagctggttcttggaaggaggatggagtcctggaggcttttcccagtttgttgcttttccttattctaaccagaatgcctgccttaaatcaggtttctcaagagagcaggaaggagctagaggtggaggagggacaggacacgtgaccttgaaacccaggtcatggtggcttccaggagcagacaaagggtcaggcatcggactgcctagaaagatgaaagttggaaagggtggaagcatgaaggtcataagtggggaaggaggcttgtcctccacaccttacagccttgggaaagagctgcacacccttgacattgaggaaaagaaaaaatggagcaaccagagagctgatggtcatggggggaaatggtgaggctcttctccacaggaagagtgacatgagtgtaacaacgagcactggctttgcagccagaagaactgagttcaggccagtaatttgcaaggtgaatcaccagttcccctccctaggctataatttccttgctcctgaaatgcggccgatgaaccggattggtaactccaaaatacctggaacagaggcaaacgtctatttccaactagctttctgggtgatggggatgaccagaggggctaggagctccacgtggcttctccccacactcacatccacagagcttatgaagctatcaggtggattcacacagttctgataaatttctgaatgcaggggctataatggaatcctaaatatagttatggggttgaggcacccctgacccatgggagtaacgtcagcggtacagtcccttcacctccctgttggacacagaactcaagggcaggtggaccagaagtccaaagaggtggcgccctgttctcccacatctgtgcctttgtacacgctggtccctccacttggaaccctcttcccctccaactgagcaccttccgactcaaccagtgggttaccaattagggaagcgttgttgattcccctcagcagagttaattgctttccttgtcacactgaattatttaaattctgacctgtcaagattatttgttttcagattcatctctctggttagacttcttgagggcagaagctgtcttttctcctttctaaatcaggtaatgagcgtagtgtctacacagtgcaggagctcagtaaactactgttgaatgaaaggaagggaagattggaagtggcagggcgggagggagggaaggagagaaagggagaagagcaataaaagaaggacaagagacgctactattttcctgtgttggttcacagggatgtggttttgattagttgcaatcactatgtgatccaattttttatgctgtttttccatttcatattaatctgtaagcattttccattttgctacacaatcctcataattatccctttaatggctgcttaatatcccatcaggttgatgtgccataattttcttaaccatgtccctctttagaacatagccttttaaaacattaaacagaaagcctgacaaggttttaaaatagatggggaaggtggtttcttggcaacgtgtgtggcatttctgaggtgcacgtgcttagggaaggaggcaaactggcctgaccagggtctggagaagcaggggtgggtgctggggcctggctctaggtgggtgagagccaggaaggagaaggcgaggtcggggggagcagtctgctcccagccccaactcttccctcggctgccagtctgcgccttagtcactgatgat

SEQ ID NO: 26052 - DNA, 3770 bp, Bovine  19866881077511
  misc_feature (1)..(1): n is a, c, g, or t
nagggaaatcgtgcacatccaggccggtcagtgtggcaatcagatcggtgccaagttcctgggaggtgatcagtgatgaacatggcatcgacgccaccggcacctatcatggggacagcgacctacaactggaccgcatctccgtgtactacaatgaagccacaggtggcaaatatgtccctcgtgctatcttggtggatctagaacccggaaccatggattctgttcactcaggtccttttggtcagatcttcagatcagacaacattgtttttggtcagtccggggcagacaacaactgggccaagggccactatagagagggagccgagctggttgactcggtcctggatgtggttcggaaggaggccaagagctgtgactgcctgcagggcttccagctgacccactcgctgggtgggggcactgactccggaatgggcaccttgctcatcagcaagatccgtgaagagtatcctgaccacatcatgaacaccttcagcgtggtgccctcacccaaagtttccgacactgtggttgagccctacaacgccaccctctctgtccatcagctggtggagaacactgatgaaacctattgcattgacaacgaggccctttacgccatatgtttccgcaccctcaagctgaccacaccaacctatggagacctgaaccagctcgtctcggccaccatgagtggagtcaccacttgcctccgcttccctggccagctcaatgctgacctccacaagctggccgtcaacatggtgcccttcccacacctccacttcttcgtgcctggctttgcccctctaaccagctgtggcagccagcagtattgggccctcactgtccctgagctcacccagcaggtcttcgatgccaagaacatgatggctgcctgtgacccccgccatggccggtacctcaccgtggctgctgtgttccgtgggcagatgtccatgaaggaggtagatgagcagatgctcaacgtgcagaataagaacagcagctacttcgtggaatggatccccaacaatgtcaagacagctgtttgcgacatcccaccccgtggtctgaagatggcagtcaccttcattggcaacagcacggccatccaggagctgttcaagcgcatctcggagcagttcatggccatgttccgccggaaggccttcctccactggtacacaggtgagggcatggatgagacggagttcaccgaggctgagagcaacatgaacgacctcgtctccgagtaccagcagtaccaggatgccaccgcagaagaggaagaggatttcggtgaggaggccgaagaggaggcctaaggccaagtccctatcaccttaggcttcttaatcccctcagccttcttcctcaacgacccctttcctctccctcagaatttgcattttctgcatctatcttgtttttcttttttgggggggattctagaacagtgcctggcacataataggcgctcaataaatatttgttgtttgttgaatgtctcttctctctttccacttttggggagcctagattttctgcattctgggtaaccctgtcaattttctttctggtgcccactcctcccatctgtccagttaacatttccctctctgttttcgagatagctctccaagaggctggggttcctcaaatctcatttagaaccgtgtgctgaaaacctggattggtgactgccatcctaggccgatgtgctggcccaggggaaggaaactgagcgagtagaagtccctaccagaaagggttgggtttggagaggggcatccagggtactgaagtcctaggtgccaggtatctccccgctcctctcagcttgtgcagaggtgttgacagtattatcttcattttcagtctccttccaagttctgtcctaagctattacctttgcaagtttctggcccccaccctatcaagtgggaatcccttcctcttccactttatctccttcataataacgttgaattccctcctttctcctgtttgagaaagggggtcaagagaagcaagagatagccttggtctcttaagtctccagaaagcccctccccaccccatcttatctataaaaaaaatgatacgtatcaaccccttctgtacttatatggaaaggtatgtgctgccacctaaacgtcattccccagacagggggacagaacaccttccatcttttggcaaacatctcatctctcctgctactgcttccccacttcttgattttgtcctattctacacttcagatttctattgtgttgaacttactgctttttttcatattgaaaagatgacattgccccaagagccaaaaataaatgggaactgaaaagaaaagaaaaaaaaaaagagtgtaaacttcattatttggagaactggaaaaaattaatcaatcaagagtcccataagtaaaaagaaagataaataagtatttcactgaacacttagaaaacatccttttatatatcttcaaagtcctgcctgctgcttttagtttctctgaggaaacctttctcttcagaatggaagagctactgcaaaagattaaagcttaagaatttaggggtagtgtgtgcttaagattcctggtcagtacctggtactatgtacaaaattatttttatagtaggaaaaacaatgataaggaaggtcagaatagctggggtttgggaataattgcttggttgagatctataaaaagctattaaatcaatgcactagaggatgacacatttttgttattctatatgagcatgagcataatagttcaactccgggagatagtgaaagacatggaagcttggcatgtcgcagtccatggggtcgcagagtcggacatgacagagcaactgaacagtaagtatgcagactgattctgggcttcagcatattatcacttaatatatttctgttctagagttgcaaatccactaactaaattttaacgtatttgttgttcagttgccaaattgtgtccagttcttcgtgactgcagcacaccgggcttccctgtccttcactatctccatacaataaactactagagtatgtgtgtgaaataatattaaaaatccttactttccaggctgggtactcatgaaccagcaatgaaaaagaaaagattttttaaaagcctgtgttcaaaaagcacacctgctacttgaaacattttaagaattaattcttccagtatgggttatttcattctcatattgtgatcagcaaggtaaaacttggctttgataatatacaaacaatttacataagacacgtatagctcagaccctatgatatgtttgcataaatgtaaatatcattttaagatcccttcttccttgcttcactgataattttcccaaagacagaccaacaatgttcctacattaattaatccatttataaaaacagacggagcaaaacaaagcccattgtccttgccctcatggaactcattgaaaattaaataagaatatcctgccatagttctcctgcccttagcagaggaagagaggtgtatcaatcagggacccagtaggaaacaattgacaagttctaaaaggtggttgaacagagtgtgaagaaggaaacaccttgcaaagattagaggcagttaacggagaccactgaggagtgatgaagaaatctgaaggccaggaatcaacttatctgtgtcggggactgaattaatgtcatttctaggctaaaatctctgcagagaatttaaatccgtgctcccaaaagtt

SEQ ID NO: 26053 - DNA, 1353 bp, Bovine  19866881131451
  misc_feature (1)..(1): n is a, c, g, or t
ntccctcatttgacattggaggaaaaatgaggcccggaacagtaaagtgacttgtccgaggcccgtggcgtgtcattaaatccccgtgggcttaacatcagaaggtctgggtctggctggggtctcatctaactttggttgtatcctctctgtccactgggatcagcaaccagtttccagaaaggtaggaccaggctctgccttactggtctttccaagaggttcaggtacctttcccacagaaagaactgaaaatttgagattcctgcttgtactccagctgctaaatccagggagaacgtctcaatccctctgtgctctcctagctaacacctcccgtgcacctgtcccagatacccacagggaggcacatagggcatgtggatgtgtctctgcagcccaggactggctcagctgcttaaatctgtaatctgaaaccctgcctcctctgtgcactgtgaagtggatgaaagtctgcccaagtccaggcacccagactccccgtgtgcggcactcccgtgggcactcagggaaactgccagatcatagttctgcggaccctggaagacaggcacttccttgggggaattctagaaaacctaagggggaaagggcatggtcaggatgaaactcaaggtacatcagagtgggcaagaaaagagaggtagaaacggggtgggaagagatgtgtgctatgcttagttgctaagtgtctgactctgcgaccccatggactgtggcctgccagggtcctctgtccatggggattctccaggcaagaattactggaatgggttgctatgctctcctccagagggtcttcccaactcaggaatcaacccaggtctcccgctttgcaggccgattctttacctctaggccatcagggaagggaagataaatgatgaaagcaaggaggaaggagaggttgagtagaagaagtgggggcagaaataggaggactccccaagggaagaggtgggggaaggaatgaatggggggaatcagcagggaggttttcttccttgtttacctttgattttgcattccataggtgggaattctaagaggaggagttaggagtggaaggacgtttagcttagattctcctctctgaattcccctccaagggtcaagggcatcagactagattatccccttcaccagtcacccaggagaggaccggaatctagcggcagggataagatgagactgggaccagagcagaaatgaagctgcactcagaaaccaataagacattaggatggcatgaaggccagggatgctgggggtagcccaatgcctgctccaaagggaacccaatacgccatgaggaagttgtcccaggacttc

SEQ ID NO: 26054 - DNA, 796 bp, Bovine  19866881169783
  misc_feature (1)..(1): n is a, c, g, or t
ngccctgtaaggacattctccccaagtctctggctttcctccagccccagggattgtctttccatgacctaaaatggcatcctgcttgcctttcatctatctgaagccatggacctcattaactttttaaaaagcagtgtccattcgcttccctccaggtttaatgatggcttcttaaggacagcacatgtctgactctttgcaaccccctggactatacagtccatagaattttctaggccagaatactggagtttgtagcctttccctttttcaggggatctttccaacccagggattgaacccaggtcttccacattgcaggcagattctttaccagctgagccacaagggaacctcaagaatactggagtgggtagcctatcccttctccagcagatctttctgacccaggaatcaaactggagtctcctgaattgcaggcagattcttttaccaactgagctatcagggaagcctaaagagagcacatgcccattcaaacagaagttcactgtggacagagacctgtcttgttcatggcttaacagtgcctagcatatagttggtcaatcaatgtttgttgaatgagtgaaagaattgttgacttccttcccctctagactgtagccttgttgtcttggtttacggcagtacttgacatatattagtcactcaataaacatttgttgaatgaataagcatgcagattactgattttttgacaaataatttttcttacagtgtcaccagcacgtattcaatgaataattgagcctcttctacatgtcaaacc

SEQ ID NO: 26055 - DNA, 782 bp, Bovine  19866881170452
  misc_feature (1)..(1): n is a, c, g, or t
ncttgagggtgcccccctaaccagccctgacagacaaaagcgtacagccacagccctccaccatccttgggtccacgttcctgcatgctcctgcagttttaattaaacaccgcgtatggcggctcattaaagagaaaacagttgttctatttctaagtagcctcaggactcctgactatttttactgcttgaacaacattgcagagaattttacagtgtttgaacttggctttacctctgagcccagcaagacctccaggccagggctaagagaccattctccccgctccaggacacctccctcacggcaccagggatcccccacaggcccctcctcccgccagcagcatccttctcattactggtggtcctgtaattactggaggttcgcctcacttaggagctccagtacacaccattcggcggtttggttccctcttttgttcttagtgcttttctgggaagcagcccatcaacagtattagcttatccttggatagcacttcctgggcaccaggcactgttctaagctctttaactgcataaactccctgaagtctcacaacacaactgtcagctaagtagtgtcattctcccagaaactgatggggaaactgaggcaaagaggggttgggctccttgcccaagattataaactcttagttggtgaagccagggctcagacacaggctctagaattggtactcttaatcactatattatgccatctgctaataatctcccaggtttggccctgcttgtgtctacgacctgcttcaggg

SEQ ID NO: 26056 - DNA, 1366 bp, Bovine  19866881185787
  misc_feature (1)..(1): n is a, c, g, or t
ngcacttgccttactactgtgggtacagcaattcccgactcagtgtcaccacctgtgaccaggacaggctaatcctcactcctcctctcccttccccatcacctctctgggatgctgtgagataccaggagaggacaggcgctgtgatgtttgaaatcttgtaaatctcccccagtgcagaaacagtgctagacccagggtcagggtcatgttgctggcgtggccacagacaatgcatgcttgctaagttgctttgtgaccccatggactgcagcccgccaggctcctctgtccatggggattctccaggcaagaacactggagtgggtttccatgccctcctccaggggatcttccccacccagggatcgaacctgcatctcttatgtctacctgcactggcaagcgggttctttaccactatcacacgacatgaggcctgggcacagaccatggagcactggcaaatgagtgaatggatgctgaatttgacttggttcaataccagctcaagcccaccaagtcccaggaacttgagaaaggctctgtgcctcagtttcctcatagagtgcatggggaaaacactacccctacacctgatagtattactgcaaataaaatactcagaatagtccctggcacttagcaagtgctgcggacatgtgggcgatcaggagcttgctgggtgaccttgggccagcctgtgcctcctctgggttgcaggtgtttcatctggtaaatgaacaggttggacctaagctcccctctggactccgaactttggtagagcatcttccctctggatcggcagccctagacccttagttagggtctgcccactccccatctctgatggcacagaggcctggagcatctctaggtgccgtggctggggaggaggagacagccagagaggtcgtggatgctgcggttgtctttgtggatctgctgtgactggcagcatggggaaggaagatgtcgcccaaggggcagccagctgcctctgctgagatattgctgagagcagaaaacgtaatggtatcttcattatgaaagggaagcttggagtggggctagccttctgcagagacatgtgtttctttcctcctttgctggagggcagctcggcctggtggtggagacggcccatgggcctggggaccaagagacaagtggacccgcagaggcccaaggggcatactaggggcctgcggagcccagagaggcaaagctctccttgatggaagaggggagctggcaaatgaagtccttctccagcttcttcttggggctggaaagagcctgcctggagggtgcaggaggcccctgggaaagagggaaagagatttctccccaggaaaggagg

SEQ ID NO: 26057 - DNA, 1046 bp, Bovine  19866881191244
  misc_feature (1)..(1): n is a, c, g, or t
ncttcagtatttaaatctcccatgtgagtctaacatccgggattgagaacctgcaccagctgacctttgagggaccattcagtgctcacatttggccttctaggaagtactgtgctacatcactgaataagttggaaattatgtcagtaggactctgtttgttgggtttctaagagaataagaagtaaacgacacaatacgagaacatctatgatgcaatttgtccatttgtctatatgacagatatcgatgagcagtatgcataatggaagctggtagaaatcaatgaacacaaagtgcagattgcaatcttttctcaaccatgcctgcaactggtgactgtagttgtaagtgataaacatggtgggtaacatccattaatcactctctggcttacagaggctgtatgtattgggaggtgggggcagctccagtttgtaagaacctcagtctaagcagcttaaagacattgtgaccacatcttcagggtccagggtcccttctgaagcaaagttggagcccagatatcattaaagacatcatccttgttcagttcagttcagtttagtcgcttgtagtcgacactaattaacagggctccccagtgtctggctctgatgccagaaatgggcagaccttcaagggccatgtctaaactctgtgattttggccccggcagtctttttttccaagaggtttcttgggagaaattccatgcttccgactgctgatatccttggcatgtttctgttatcagcccatcatgcatccaggttgttgggctattcttttgattttttgtgagctgtcccactatccttcacacaaaatttcttctttatttaacaatttctatttcttgcagccaaaagaatcttaactactgtagcccccatccttaaatttcccaacccagggatcgaacctgggtctcctacattgcaagcagattctctaccatctgagcagccaggaaagcctttaaatagtaacaacttccacttattgaatatctgatattcatcaggtatttaactatactatta

SEQ ID NO: 26058 - DNA, 763 bp, Bovine  19866881283662
  misc_feature (1)..(1): n is a, c, g, or t
ngcaaagaaaacagttgtctgtttttcttgaaggctgatgggaaaacttcaattctcatctataggaacctgatcccaccctctccaacccctcgtcttcccaggggcctctgaatttccctaaatccttcacaacagagttggttcccaaaggacagagggagatcttccccttttcactgtctgtcattcattttggatctttttctcattaccttccttccagttctaatttagtccctggtgcctctctcgtcctgaatgacagaaccagatgaaaatcagaaagagaggaactttctgcagaggtgagagtcaggtgctttggggatatctctctttcctctagggatgaggctgattttcctaaatctattattataagatgaacaaaaccatttcaagaatttataactctcataagacattccagatgggaaatactcctctgggacttggggtgagctggctcttttttggtaaaagcagagatgcatagctatcatactgagaaggtagcagataatgtagacccagtggagaaaaggaaaccttcctatgccaggaagcctgcaggggtggaaaaagcggtcctttcatggggtagagtgatgacgtaactaccatttagtgtaaccacaggtgttgtgctaagtgtttcacatgtcacccacaccaccactcacaatgtagctcctattattaggcccattttacacgtgaagaaatggaggcatggaaggcaatgtgcctaagaccatag

SEQ ID NO: 26059 - DNA, 1065 bp, Bovine  19866880461164
  misc_feature (1)..(1): n is a, c, g, or t
ntatagtggttaggactccgtgcttccactgcagggactgtgggttcagtccctggtctgagaagtaagatcccacatgctgtgtgtagtgtggccaaaaaaaaaaaaaaagtttctggtcagagatgtctcctcttggcttcctaacaccactgctcatttgcctttcactgaacttagttaagtttccctatgcattatggttcggtattctaggtttgctgaagatagagtttgcattctgttatttgccatccatttttgttttgaggtgatttctaagagaaggtagaactatttttgctctgcctttctagcattggagagtgagccagagttcactccagttccatctaaacactttgaacatttcttggcaagtgcaattgcaaataattacacaaatgtatgatttgattttctcatttttaacaaaattggggctgtaggaaataaatttggcaggaaattatctggctcactctcctatgctaaaattggcttccaaaaatcaaattaatggcaggagctacaatcacaaaattgtagagttgaagattgatcctcaaaactattttctgattttaaactttatgaataagaaccaacattgcttagttcacttttctaaattaataggaatgtgaattaatagcaaatggaagatatttatctgcacagtattgtggtattaaaaaccaagttgtgtaatattggagtatccaaactttacaaatttctctgaggtgtagttgcactaaaaaaaaaaactattataccaaaattccatcaacattcaaaagtacctacatttgtgaagacctatttttcatcatgcaagtgaataaaattaaactcttaaaacactaaaattaaacacctaaaattaaactcttaatgaaaaaaaatctagactgattttttttttcttttggccacacctcaaggcatgcaagatcttggttccctgaccaaggatcaaacccatgccctctgtagtgaaagcatggagcctttctgctaaaccgtcaaggggtccctgaccccccaggatctaatgcctaa

SEQ ID NO: 26060 - DNA, 6660 bp, Bovine  19866880541860
  misc_feature (1)..(1): n is a, c, g, or t
nagatgaggggttttaaatttatatcgcagagaatccggtaatcattcaccagagtgaaacccagttctttgatgttgaacaattcgaaacacagccaggagggctgctactgctgctgcctttgctgttactattactactactccacccttaccggcctagtgctactaaataatgtttatgaagtttttacagccagcaattgtgccatgcattttagagacgttaatcagttttaatcaccgcagcaacccagtggaggtatccacattagacaaattaggaaattgaggtttaaattgctaccaagtcacaggggttgtgcatgactggtctagacctgatttcaaaggtctttgtggtgataaattttcttctccaccactgccttaaacttcctttgcatgcatgtgtctgtgagtgagtgtgtgtgtgtgtgtgtgtgtgtgtgtgtgtatagggactaaaactctgtagggtaccaagacgtcacctccaaaccttgacaaagtaaatagagttccctgggggagaatttctcaaggccaaagagctgcctctggagtattccaaagcagcttccacatcctgaaaacagcaactacaatcaaagatagcaccttacgaacatacttcctttatttaaaaaaaaaaaaaaagctactaccaccaacagtccctcctaagatcagagatacacacacggatctggcaataagcccagacgtatcaaaacatgtattgtctagagccaagacctgaatcccactgtccgacagagagagaagcatttatagagacaactcattccccgaataggtacgctcccctgctgaagtgacagggagctggaagagcagcatacaacaaagagtagttacaagcaggcagccgaaggcccccagcacacccaccagagcaccagcccacgtcctgctcccttcagttcagccgggcagtactccggttgactctcgttaaaagtccacatttagtcagcttccagaatatgggcagaagctcctgtgagttatttcctccccatctctggaatcccttttggacatgaccaatgagttgcagctggtttttaggcagcgcggcatactcattaattggccgtcaggaacagcttacacccttcgatccacgatgaaatgaactcagatctggattcgccaaacacagattccaaacaggctgggaaagcaaaaaccacctatgaccgtctttataataatcgtaaaactgcaatgtgtacagtctacaaagaggcctgttcttcttctatctcctgtgaaaaggcttgacaaagacaaaagctttttatgcactagagtaggacaaacagggcaaagaaaactcttgtgcaactgatttcggagttaagagggcacttcttgccagcgctcagagacagagcgaaaagcacggggaagagtaaaatactcaaagccaactgattgctgttatagatccagtccctcttttcctttgttcacagtgaccctttccttgctcaggggtaagtctgatttgtcagagcttgtgggcaattccattcctctggcaggaggagagaagagcagtctgcttgggaccataggaaagagactgtctctcctcctggagacattgactttcctgcaagtgccaccaggagcagtcatactggtcttgtaactctgggggagatacactgagaacaaacataaggtggcagagcagaaggttagaaagaacctgatggcccaaggattttaccaactgaatttaacctgctaaattaaccagttctgaagaggcatcatctccaggctttctgttcatcatcataacatccttgggacttccctggtggtccagcggttaagacttcaccttccaatgcaggggacacgggttcaatccctgatcagggagctaggatcccccaagcctcagggccaagatagcaaagtgtaaaagcagaagaaatattgcaacaaatttaataaagactttaaaactggtgctcctcaaaaattttttttaatccttaaaaagacagttgagttaattcagcaggttaatcccctattgtattctaaagcatgtccctctcctccttttccttggatccgtgaaaaaaaaacctctctcatgtcaactaccttgtaggagccttgttggagggaagcattgtagtttaaccattgttttcctatgatgatatttctcagagtaccagccagaggaccatgttgcttatttacgaaacaggttactgaatctgtcctgaatctaggagtggagtcaggaatctgcatttctctagcattcttttatgagatctatgaaaggttattacccaccacctgaggaagagaagctagaagaggaggaggacctccttcaggcaaagagaaggcgtagaagtcagtcgaaaacctttgttgaaggtttactccatgcagaagacaggaagtatgctaggagctgagtcaggtgggtgggcaatttccctgggaattttccattggtggcgtgatctgcttagcgtttgcggatacacatctcaggttggagcatggatggtcaccatagctttgactagtaattgtgccttaatgtaaatatatataaatattatacatttatatgcggctttaaatggagtgttttaaatgactccttctgtatggcaatgtgtatttacatatatcatgggtaaaaaattcatgccacgggtggtcacattccaaagaaatgaacacatgcacaaaatcacccaccagtgaatgcagagaccatacaggacaggggattaaagggagatttcttgagcagaaagccacagggaggaggttcaagagagaagagacatacatatacctatggctgattcatgttgctgtatggcagaaacacaatattgaaagcaattatactccaattaaataaatgtaaatattaaaaagagaaagaaagccataaggaatgaggagagctgtttgatgatatagatgagaagctggatggaaggacctagcatctgatgagaaccaggcatctttattcttcctcacattttgctcacagacaataatacatgaagttgttaacaccatagagacaggaactgtgtctattatttcctatatcgtagacaccatggaatttatagctaatgtttttaacaccatcacataatagagcatgtgataaatggggtaaaaaagcaatttattagcatttatcacaggaatcttagctttcacagttctgcctgaaatttttttccataaacttttcaaagagaataaaggaaataaaagggtaaaggaaagtgtgtgtatatatacatatataggtatatatatttatgtacacacacacacacacacatatatatatatatatagcagggcaggatttcaacttttatagaaatctagtgaaaaacaagctgctatttatatttctaaaacatattgagacttttaacaaaacttttcagaactgaaagtagttttctgatactgacttctcctttaagaacattagaagccttcttttgaactaagatcttttaatattgttacattaaaattcagtttttcctcttgtttgaccatttttcttctcagtgaagtcatagccccagaaagctaggtctttatgatctttttaaatgtgtgctctttttatggatgatggttgcttatagcactaatttttaataagaaaagaagcacagaataagcagattgctgcagcagtgtgggatgatagaaagagcaaaagatctggaaccacgtgacctgccttacagttgtggcttcgttatgtactggctttgtaatcctttgtaagtcactgagtgtctttagggttctacttcctcatgtataaatctgaacaggggcacttttccgcagatggctgttgtggagtacatcagaaagtacacattaaatcactttgtaaaatgtattatttttgttattgttcctctgtgatcaaccaaaatagaaagtgcagcatcaaatcaccttaccctgaattgtaatgaaagaaagtttgattcagtgggtatgatcatgaagtaaagttcggagagacatttctggaatggtcaaaacaaatacatagtttttagaatgaatataccgatgctagggtcatccgttgtagagcagttgggctgagttaggtagtttagggggtcggttgcctgaaactcccttaagtttcaaatagagactttggagacaagcccaatgaaatgtgaggtttttctgaagaaggaagggagacattttaatttacagattctgaagaaaggaacattaatccagagaaaacctccagggaggatccaggaagaaggtattctctggaaagacgggtgtgctgggtacactctggaagtgtgagaatgtgaaagaaagagagctcacttctacaactgtttaaaacgttaaaggatttaagctaatgttcgggaatagttaacatttctcggactgaatatgaaacttcctccaaggaaaacaactcaactgctaaagtcagccccaggctaatgccaagaaaatactgctaaattagggttctaggagagatatgactcagttaagtatcgtagagctctcaacccataaactatccctttgtagtccttgagagcataagagattacaaataaatttactgactctttccttaaagaaaggaaatgcctaaaatcatgattcagctttttaaattcggtttccatgtgtaagtagtatagctgctgggaaatgctggctcctcaaatcattttgtaaaaccatttaaaaaaaattttattggagtgtggttgatttacaatgttgtgtcagtttctgctgtacagcaaagtgaatcagttatgcatagacatatatccagtgttttgtagattcttttcccatataggtcatcacagaatattgagaagagttccctgtgccacatagtaggtccttattagttacctattttatgtatagtagtggtaaaccatttttaaatgttttatcctacaatcccaacagatgttctcagtatcaaagaaggtttctgagtattgattctaaatctcgctcattaaaataaaagtaattagaactacttaaaagtcacatgatttctatcctatgctgctgctgctgctgctgcgtcacatctgtcgtgtccgactccgtgcgaccccacagacagcagcccaccaggctcctctgtccctgggattctccaggcgagaatactggagtgggttgccatttccttctccattctgtcctgtgcacatggacaaacacacaagaaaaggtattacatgtgatatgaaaaattgtgtctctagttcatcaagtccaaatccaatttcatgtaatcagactgaataatctgtcaaatgttaagaagacgttgtgtcttaagtagacattcaagtatgtctccaacagattgggagtattgattattgatcatctcctcgcgaggagtcagacatgactgagcaactaacacaaacacacaatagaatcctatagtatacagtttaatttccattatctcatagatgtctacgttatccattattgaacattagtcttgaactgtcaggataaagttgacattaactaaagtttgaatttagtccatagcatctacgcacatgtgtttgatttgtcaaaacccaacagcataatgtttcacatatttattcattctcctttgttgctgttagccatgtgtgcatttgcaaaatgaactagctttgtgaatggttatagagagaaaacaagaaatatgtaaagagaataaataaataatttgcatctttaaaaaatacgtagttagtgtttctgtctaaaaatattgtgtgatgaagaaatagatccgaaacaagagtaattcttttcccatgaagcaacactaaccttgcaatttttactcagctcctttgcgtaaggatgaattcttccccccaaatcttggagaattgtaaaaatggaaatgaaaagttgactcttgagacgatgtattcctttaccccacctgtgtgtaactgtctacttcagaatgctttatatccccaaagtgcagccatcttctctaagataacagtgcttgttaaatgctgcaacttaggagcataccaaagtatcatttaaaaattagtcataattttaacaacactcctgccattgctgcattttgttttgttttctgattttttaaaacttaattctaatctttacctttccaaactgaaagcaaagaaaatttacttctatctgtatttttttgtgatagagatgaatgatattttaactctacatcaagtcttcaaatttcttgtgttttcttttcttcagtgaacttacctctgctttctcatgttccccattagaagggaaaatagctcttctttcttataattatccttttttgtaatgtgatgaacatgcttctctatgtttgattgcattgaacataggagaaaattaacctaaaatgcacattatactcttaatatctatttcctcatttgtctcccagttagactctaggattcttgagactaggaaacatttcttatttattttgtacacccagtccccatcttgatgtatactttatca

SEQ ID NO: 26061 - DNA, 1445 bp, Bovine  19866880567251
  misc_feature (1)..(1): n is a, c, g, or t
nttgcattagtttcccaaatcccagttacttccggccgcctattattaatggtcaaaatcttttctttccacagttacatcagttttatcctgtcaccaaaacaaataactgctctttatgttttcaaatacatactctgcaaaggtctatttgggattgaacataaaatgcaagcaccttatgaataaaatagcatgaatcattgttaagaatttcaaaaagcttaaaatctacgcttgagcaccaactgaatacagacacacccaaatactttaataaacataagtgaaagtttttggtcattgaaatttaaccttaatttgactcttcggagaacagtctgtgttgctgttcttactctgaagactatgcattttacttcttgcagtgattgtataagtctgcatatatttttggcaaagagttcacttttctttacaaattttaaagaataaactttaactttacaaaggtgtttatacaatgagggcaaattcaaggagaccacttctacagcttctatatttaagcagcaaccacggaaatgttgctttgtaaaacataatataatgtcacttgtcccttggttttgttacttgagcacttcaaacttattaaaaatttgttttttcataaagtctcccagaaaatgtaagagaaaggaacatttcccaactaattttatgaggccagcattaattggcctcataaaatcagaaaagatgtcactggcaaactacaaatcaagattcctcatggatacaaagccaaaaattcttaacaaaaaattatggaagcaaactgtcagctctcatatgattagattctgaatcaatcctcaggcaataaaaagaaaaccaaatctatccctgaggtaaaaaggtactatttttttgttatcacctaccgctgttataaaaaatatttctccgttgcagagtcgagtaccactttcaaagtcatgcttatttttagcaaaaccaggagtaccaccattaaagtctttaccaccagcttttaattcattatttcgttgactgttgaaggtattttcagggagtaactctgagagatatgcattcttggtacaacaaattttatcaccaactccaaattcaagtctattctgatggtttctgggatagaaaattagaatacagtatgagagtttggaaaaccttaatttcattttctttatgcactgactcccactcagatctgatccagttctcaaaataatttccacagactctttacatcacttttggtctccaaaggtcaccaagaaatcaggaggctcccacagctgtggtctgattacctacactcactgaagcacctcaaactcaatgacatttcccagctgactttttcccaagccagaaattttggcataaaggctgaggtctgactttcccttcacattccaaaagttagcaaaact

SEQ ID NO: 26062 - DNA, 898 bp, Bovine  19866880570678
  misc_feature (1)..(1): n is a, c, g, or t
ngatcggagaaggcaatggcaccccactccagtactcttgcttggaaaatcccatggacagaggagcctgttaggctgcggtccatggggtcgctaagagtcggacacgactgagcaacttcactttcacttttcactttcatgcattggagaaggaaatggcagcccactccagtgttcttgcctagagaatcccagggacgggggagcctggtgggctgccgtctatggggttgcacagagtcggacacgactgaagtgacttagcatagcatagcatagcatagcatacagaaaggataaagtgtatgaggactctttatactctcttctgaatttttctgtaaatttaaaactgttttaaacaataaggtctatttgaaattaaaaagaaaaaagacatgtagaccttggagtttgataacctacaacttccctctatgacttcctcagggtcacaaatattgctgtgttctttcagctgcatctcacagcctccctaaagtacagccacttctgccatgaaagaaccattcagtgagccatttcaaacacatagccctattttcctagtagtggaaatcaatgaagaccacccaaatgagaacaagcaaaggctatttattcaaagcaagggagtcagcccccatcgcttgcatttgaccgagaggcaaaggcaagcagagaagtggaagtactatagctcaaaaagagaaggcttcaggtatgccccgaatggaggctgttggcacggggaagctgcacacaggccactagaagtgggacattgtgtgtgataagggcttccctggtggctcagacggtaaagcgtatacctacaatgtgggagccccagggttcgatccctgggtcaaggaaggtcccctggagaaggaaa

SEQ ID NO: 26063 - DNA, 1210 bp, Bovine  19866880641206
  misc_feature (1)..(1): n is a, c, g, or t
nttttaagctagataagaaattaaaaatccttaacacagtcccctttgtattaaagataataaaatgtataatcagagaagataaattacttgttttaaagttgcattggctaggcagtgtggagggatgagagttagaaataggaggttgctgtttctgagatggctcagtggtgaagaatcctcctgccaatgcaagagacgcagcagatgtggattgatccttgggtcagaaagacccactggagtaggaaatggtaacccactccaggattcttccctggaaaatgccatggtcagtggagcctggtgggcttcagtccatggaggtcacaaaaaatctaatgcgactgagcatgctcgcacacacagactatacagagtgaagacctcattaatacttcctgggaaatgcttactttaatgtttaaggatttctcattagtgaagggaccaaggaatctaggtcccagggtttaagtttcttttaaaaaaattcactggtaaatcagcatccacttaaccttctggtagattgatcaccagatatatttttgagaaatgagaatggtcataaccagctctaattatctttatcacagggtgaaagataagatatgaaaagctctttgatagttcctagcatgattctttcacatcaagccactccataaacattaattgaaagaattccttcctgtctacgccattgcagcttgttttctgggtggtgtgcgttgtaggaagaccccacgtcataagagtatccttgtgaaaaacggacagacagcttaccaccattcacacgtattagacgctttgggcatccagctttcctaacactgtgcccccagagtggagagagtgaaagaaaaagagaggaattggaatcagaatcacgtgcatctgagcccctacctcagcagctccttctggtccctgagggtctccaggctcggagagttttgtgtagtgttggcccgagagacggttgtcctttggacagctcagctgtgtctgtctcctcaccgaaacagcatccgattttattcagatgtagcatttgccttccctccgtgacatccttgggttaatcacgtgcttgctggccaggatatgtaaataaaacttggctacaaaacacttaaaggattatgaagcaatcttgcttaatagtagtaaacaaaacaaaacaccactccagcaaatc

SEQ ID NO: 26064 - DNA, 1533 bp, Bovine  19866880659420
  misc_feature (1)..(1): n is a, c, g, or t
ngcattgcacgtggattctttaccatctgagccaccacagaagcccagattcacataaaattacatgaaaaaaaaattttttttaactgaggatttgatatttttaactgagactctattttagcagtgtgttccttaccaaaagattttaaggaaactcataaatctgatagcatttaactgatctatactgatgtatggggaaaacgtttttctctctcaaggaacagtttgatttcttcttcccttcagatagggcagctgaaagatatccccaccagtgccatgttgatgcaactcactcagcaatatccgtgaactcagttagtaagaccatggtctttccagtctttgagacatttttaatgccctacagtgtctttctgttagaactggcctgacttggaggccacaactgaaagaaagccagatccaaaatgaatctctattttgtgtgtgagatgaaggggagggagattctggatccaaatacatgtgtatatatataggcttcccaggtggtgctagtggtaaagaacccacctgccaatgcagaagacataagagatgagggttcaatccctgggtcaggaagatcgcctgggggagggcatggccacccactctggtatttgtgcctagagaatcccatggacagaggagcctggcagtctacagcccatagggtcacaaagaattggacacaactgaagcagtttagcacagcatgacacacatgtgcgcacacacaaacacacacacacacacacacacgtatgtatttgggcttcccaaatggtgcaaagaatctgcccgcaggagattcaggttcaattcctgtggttgggaagatcccctagaaaagaaaatggcaacccactccagtattcttggctggagaatcccatggacaaggagggctacagtccataggattgcaaagagttggatatgactgagtgactgaacacaccacacacacaatgtatataaatggatatatacatatacatctggcaaggtcttaaccaagactgtgcttttggacagcagtttcacaggggctcccgacagtaccgaggccgagcaagaggagaacttctgggcccaagcgctggaggatctggaaacctgtggacaatccgggattctgagagaactcgaaggagcctcggtcctgccacttactctcattgtttctacattcattttttttggtccttttgagttggcattggtcacaccagttcatttaaaagctttaacccctttccacaggagaaagctgacaggcgtgtgtctttgagaaacatgaatctcttggtagctaccctttctgtttatatttttgcttgtgaagctgccttccctgcccccttgcctttcggacagtgatttgattttatccaatgcagttaaaagtatttctttcccctttctgcccccaccctgagcttactgacctgtggcttctctgccatcgctccttgctaaccctgactgcccctgtttgccaccggatcgctcaggcga

SEQ ID NO: 26065 - DNA, 1023 bp, Bovine  19866880701003
  misc_feature (1)..(1): n is a, c, g, or t
nccccactggggaataggagctcacattggaaagagctgggatcaggttcttgtggaggcttccagtggctgggccatgagaggtggttgagcagaggagtgctgtggtcagaggtcgttaggtgcccagtgttctggggaatgggttaacaggagggtggttagagggaaagagaattcttgaaaggctatgggtaggccaggtagcaaaagataagcaactgagctgatattctggcagaggaaacagagaacagaagtatgttagtaaaactgtgaaatcattggctgaatccttctctgtcacagattgtactctgggaggggaggaagaaaaacacatgaaggaagttttaagctggatggtgatctggggttagaaaatgggttcactgaacaccagagaaaatgggggtggaggggaagtacatttgtttgcctgggatgtggtggcaatggaagaggaaaaatatgtagcctgaagtgatgagtgaattagccagggaggcagcagcctagaggctggggatgcttcccaatttctcccaaagctcactgatgcagaagccagattgaagtatacatttccattcactgtgaacaccaagtgtacccagagaattaatagtgaaaactagacttggggagactcttaaatcttaaaggaacagatagttttctagaacccacttattagaaacaattgacttgctgattgcaatttattctcaactgtctcttctattcatgaaagagtttccttcaaaggattgacttagaaactttattagtgatgtttcaatgaccatatatccttaaaaggaatccagatgcatttctttacaaatagtcttcgattcagacattttaccagtttcagacccacctgatttctaatatgtttgaataaataaggctctgctgcaaagctaatctgtttcctgaggatttgagaaataacttggaaatcaattgtaaaccactgttttctgggaaaacccaatgctctgtagcctgattctc

SEQ ID NO: 26066 - DNA, 1159 bp, Bovine  19866880708534
  misc_feature (1)..(1): n is a, c, g, or t
ncaggctacagtccatagcgtcgcaaaaagttggacacaacttaagccacttagcacacacagagccatggatgaaattttaaaaaaaagtctaggggaaaagtgtacttttcaaaagagaaaatactcagatgcaaggaaaagaaggctaatgaccaatgatgaaaaccctagttccaaatactatttaggtatttatacttagacaaggttgtaatcacacaaggactgtattttgtcatcaatggaatctttaaggaaaataatttccttctgaaaaatcatgattgttgacctggagtggcagggagagggagggaagaaagtcagaagtggtagaattgttctttttcctgaaagtaaaagaataggcccaaggtggtttaacacatgtaactcaagcctctaggagctacactgaagatgtcaaggagcactgtgatatcttagtggggtgtctgtgggaggcaactggactgcatccaggcagacagtcccaaggagatgaaggagaatcaaactgggagggactgggatgtaccattaaaagtcctaaaaaatttaaaaaagtcctacaaagtaaagaaaaaaaggacactgggagaccatgtatagggcatcttttctgcctccactgggcacagacaatacagaaagggaaactggactcagaggtggatacacaaacaacctggaaagaatcttcaggattaagttaaatgaagacatttagcacgtgggagagactaaatggttcttttcgtcaccagacaacatggaactgaaatattagtccttagttgtatatggtttgcgttaccaaattctttggacacacaaaagtcatacaaactctttgtaaaatgcattttccaatgtgtacaaaactatacagaattattatgtaaactctggatataaactaaaacataaaattctacatgactctttcctgattccatcacttttcccagaggcagccagtgttaatagttctacatgcaccaaacacacacactcttttatttcatatgtgtgtgtgtgttctgcaattttttttacagaaattttaaaaatttatgtatttgtttcatttgtgggctgtgctgggtctgtgttgctgcaacgcaggcttcctttagttgttgagggggtgggg

SEQ ID NO: 26067 - DNA, 864 bp, Bovine  19866880764594
  misc_feature (1)..(1): n is a, c, g, or t
naattattctttggttcttcctattacaatttccacagcggagcggctttcaagcagctggctggatgttcgtcacattgaaaaatatgtagaccaaggtaaaagtggaacaagagaattgctttggtcctgggctcagaaaaacaagaccatcggtgaccttttacagatcctccaggagatggggcatcatcgagctatccatttaattgcaaattatggtaagcatttattcaaatgatattgctcttgattcattttatataaatcgtaacttgtaaatattgtattttatccaagacattgactagtcatgttgtatgtcagtgattacttacctacggcttttacctgaaggggagtttgcagcttcatatttttgtgacactttcttttcttattgcctaacttatacaacagattcctttccaccactttatagttgctttttaaaatttatttacaagttatacttcttaaaatgttcttacttagttaagagaatcagctctctttccaagaatctggaactgagtcataaacatgatcagaaccacaatatgagtaaaatgaaaataatgctgtaatttattttaccctataataacaaattaaaaataattgaatttcccctgtgtattttagggctttcttggtggctcagtgataaacaattctcctgccaatgcaggacacatgggtttgatccctgggtcgggaagctttcctggaggaggaaatggcaacccactctagtagtcttgcctggagaatcccatgggcagaggagcctggtgggctacagtccatggggttgcaaaaagttggacatgacttagcagctaaacaacagcaaccatctgt

SEQ ID NO: 26068 - DNA, 1290 bp, Bovine  19866880776462
  misc_feature (1)..(1): n is a, c, g, or t
nttaaattgttgccgaatctgagggggcgccctgagtgttgtggcagagaagtaaacattacctcatgattaggcctttatttttattttttccttgaaaacatcagaatgtaagataactgtaaaatgttgagccccattttgtccaaagttcacaaaagaagaatgcctgccattgccttttgtaagtctgttcctccacacctaataccagctgcagctggaagggcattttggtgaattccccatgtaaaataaaatattgggaacaacacacttcattaaggcaacagaataagagcgaaagcagagaaggctgaggaggaagcctgggggctagatgtccagagccctgcagaagagctaaccacaggtcaccagcagagcctggcaggggcgggggtggggaccttgtgcacagggccaggtgacctcctagaggatgttggggcttaaaacagaaacagccgggagctcacgtcccacccttgacactaatctgctgtgtgacaagggacaagctatttgttcagcctctccatgtctattctttatgtataaatgcggacttagaatatttgtaaaataattgacactctcaggggaaaattactgtattgctgtacaattaagatcagtgttgtaaaattaaactgatctggttctaattgcctcaaaggccgaagcccaggcatttgaaatggaaagaagcagagagggggttgacttagctgattggtatggaaacagttgggccaagagccagaaatttttctttgtagcaagatggctggttttactctaagaagcttggctcggctcggttgctgtataacattgagtctggtgggatggatgtcattgagcacagtaaggtttttatggctctgagcaatggtgatacgcactggtattgccgccaggtgtgaaggtacagtatatgactgatatatattgtgtttgtagccttagtgctaagcccaaagtatagcttttaaaaaataatattttgtaaatttttgaaagcttatgaaaactgacatctttccttatcagcaccaagaccaaaaataagaaacagaaaacacgtgacaatcttaaagaaatgaagagaaactaaaatgaaaagttgtgatcaatccaagtgtcagtgcggtcatgcccacatccttctgtgtctccacatgccacctggtgaggccctgacctcctgtgatcttcactgtcactcgggccacacctttgccattccaggcccatcgtgcttcttcctccctcggctcccagatg

SEQ ID NO: 26069 - DNA, 880 bp, Bovine  19866880794505
  misc_feature (1)..(1): n is a, c, g, or t
nggttggatctccttgcacagtaatgtttgataaaagaataaatgaatgaatgaaggatgaacttggatgaagttgacagagtttttaaactctcgtatcctggtacttccttagtggtccagtggttaagaatctgccttgcgatgcaagggacgcgggttcaatgcctggttggggaattaagatcccacatgctgtagaacaaggaagctcctgcgtcacaactgctgagcccgcgcaccacagcgaagtcccagtgcagccaaaaggaaaaaagaaaaaaacctcttctgtcatcttctagaaattatttcttcctctgtcccccattagattctctttgccacttcctcctcccttccctagccagtgctcctaaatcttcctgcagcatcaaaatacgtctatcctgtcacattcccacagggactccgccctcttctggccagtatgggaactgactccatttcaatggcgcttgaggatttattttccttctcaggtatttttatcttaatcagcaacctctggaacatcaagaccttgacgcaaaataaagaccccaaatccatttctatttaataatgggtataaattcaagtctgttatcaaattcgtgaatgatgaattcctaaatataaccatagcaaatgtcatctatcagttcaacacttatttattaactatctacactggctgtgaaacttagaactcttcaaggagcctcggacccaacagtggagaaagatactgtaagtaaattaatgaaactgtcccttctgtagatcatccccatctcatttcctccagggggaggaaggatgagccctgggttaaaattttcatcagctcctatacactacggcacgtgtatgtgtg

SEQ ID NO: 26070 - DNA, 1241 bp, Bovine  19866880845972
  misc_feature (1)..(1): n is a, c, g, or t
ncctccctctttcaacttcaaggctcatataaactctacagtctttatcacaccaatgactcttatataaccccctgacatctttcacttttatggatgttagtcttaccttctcaactagactctagattaatggttacgtttcatgcctcattatttatctatataaaatatccgcttggctgggacagagattctgaataatacaggggtggaagataacaatgtaaggaaaactgggtccaaatcatggaaaaccttgaaagccatgttaaaagattgactttagcctttaggcagaggtcagagcatgttccaccgtgtccatcagaggaaaggcaagcatccttttctccgtagatcaccgttactagccaagtgcttaccaatcattcattacaaagaaaagccctgcagaaggaaaaacttaagggatactgtctctgattcttaacatcttgattttcattttccacagtttcctaaaagctattatgtgtgttaggtgagaagttaattaaatatcctgcacttgattatgcctctcttttttattggaatagattgaatctggtggtctccttgagatttctaagcagctgtgttccactcagttgaaataggtgatgatattactctggactaaattggaaaagcagtcatccagtagcatttgaaagaaactcacaaaagaataaaaaaatcaagtattacacttgtagaatcttttgtttaatgagctcttatcctgacaggcaaaaattttaagaagttagttaaaattaaatttagaaagtctgaaaataaatgatctttgtaaaactcctcttctatatgaaacaatgctataaaccaagagttgtgcctttggactcagagaacttaaatgagcaaaaactaaaggaatgtatttagtcataatttggtttttttttttttagtcaaacatttaggctgaaagaacaatgtctcatttttctgctgaaatgtagtatttctttgcctggactagcttaatacctatgtcaggagggagtcaatctacactattcatagattttgtaattacagattttccaatttgctacaatttatttgtaaccctaaaatcaatattcagagcattcggcagtcattcaccatcatagacagagtggcaaaaggtttgatttgttcaatacacatattcccagctgaggttaaacaggactatactctgcaccttctgttttggctccata

SEQ ID NO: 26071 - DNA, 2096 bp, Bovine  19866880854269
  misc_feature (1)..(1): n is a, c, g, or t
nagtcaactcttcacatgaaagtggccaaagtattggaatttcagctttagcaccagttcttccaaagaacaccccaggactgatctccttcagaatggactgcttggatctccttgcagtccaaggccattcattcacaggaccacactgcatgtatttatccagtgcctgccctgagccaggcacctgtagtaactatgagtctacaactgtaaacaaaacaggtaggagccttctctggatggagttcgtagttctggaggaagtcagaatataaataggcgataaatagatacatgatagacagatggacaacagacagatagaaatggattagagagatgagtggatggatggatggatggatgcttgaatggatggattggatggatggaaggatagatggatagattgaatgaatagatggattggttggatatactggttgaatggatgtgtttaatgaatatattggatgtatatataaaggtggaacactgaagaattgatgcttttaaattgtggtgctggagaagactcctgagagtcacttggactgcaaggagatccaaccagtcaatcctaaaggaaatcaaccctgaatattcactggaaaggactgatgctgaagctccaatactttggtcacctgatgcaaacagctgacttgttggaaaagacccctgatgctggaaaagattgggggcaggaggagaaggaggtgacagaagataagatggtaggatggcatcactgactcaatgaatatgagttcgagcaaactctgggagatagtgaagaacagggaagcttggtatgctgcagtttatggggtcacaaagagtcggacatgactttgtaattgaacaacaatgattgggtatggcaacagagcatccactacaaaggccacagttagatgcagggactagaatggtctctggctgaaattatctaacaggtgagagtacagtattacccagcagccattatttgatctacttttgctttgtgttatcaacaagggagtcacaagtcagccagccaacaagcatttgtttaatatggaaagggtacaaaagagcctgaggggtgtgggtatgtgtgtgtgtgcatgcgcacgtgtattcagagagaaaataagtgataatatgataatagtagttcaattctaggagagtcagaggaaatttgtcatgaaaagccatgtcataatgtcaatcattacttcttaccaaagcgatgggagactagaaggactggttgcttctccagtgtacagtcttcacagtgatgatgtttgggaataaagctttcatgctgccgagaatcccacaggcctagaggtacagacattcagttcttgctaaggcaatcaagggaggtctgttgctcccagagctgacctgatgttcaccatattgggaaatgaaggccagtttcctctcttaagcatccttatctttccttaggatatccttgttccctcttccatctttctcaatagtgtacagagcctcccgtatgccagcttagaatgcaaagggggagccccttttcttacagctcttcttgctgagaaattctgcttcttgacttttcagtgctcttatgtggaaatgtgttacttacaatgcctgaaatatttggggtggaaggggtggaagcagggaaagtaataatattggcaacacatcataaatcctcagagacagggatgctgaaagtggcagaattaaggactttggaaagcacactgggtcagctgtgaagagggcactattgtgaaacactcgagggctgttttcttaatcctggtgtgcaatatggtacagagagcattcaggagttacactattagaccactgatttcacatgagtttagtatttcatgttaatcgttttgacatttccagacattggctaatattggtccccattctgtaacagcctatttccctcttctccacatgaaaggcaaagctgttgagtgttccatccccgttgggtctggatttttaccaattgtttgttttaagtgaagtagatttttaggtataaaggagaactaaattttctttctagccggtctttt

SEQ ID NO: 26072 - DNA, 3264 bp, Bovine  19866880868851
  misc_feature (1)..(1): n is a, c, g, or t
ntagatctctaatccagtaaaattaattaaaaaaatagtgatgtgttaggtacatagtttttctcctccaaatttcattgaaacacatgtcttctagaacttaaaaattattaataaatgccatagttttcactgtaattctcgtaatagttatcagtctttatcactcttataaaacaatatgaactttattttcttaaagataacctacagagaactgaagcttttgcgatgtgaagcaaattggacgtcatttcgtcaatgcaagtctcttttccagttaatgacagatttggaaaagaatgcattaataatatattctcacctgaaacagatatgtagagagcaggggcacacgtgtgttgaagaagctgacttaacttttcaactgtcggacctcatgtcttttcacgatgcttggcagtctctgaagttcttgaaggatattggtgtggtgacgtatgagaagggctgtgtctttctttatgacctttaccaggctgagagaggcattgcctcttcagtctgtgacttgatgaccaggcctccatggcaattacaggttgatgtcaaaaaggtgcttgcgtctatttgcaccacaagacctgagaattcaggaagtggtgatacactgaataaaagtaaacctgatgaaataagattagaagatcttgtggatattttggacacgcaagacagcagtgaccatatttgggatgatggtgaaaaggaagtgaatgcagaaatgagtgagggtcaactggatcaggaccagatgactgctctggacatgatttgctccaatgctgtgacagtcataagtgggaaaggtggttgtgggaagaccacaattgttagccagctttttaagcacatagagttgttggaagaaaaagaagtgaaaaaagcttgcgaagattttgaacaagactggaatgtaccagaagaatggatcaccttcgccgagcaaagtcagcaggaactggacaaggctatagaagttttacttacggcacctacagggaaagcagctggcttactgagacagaaaactggttttaatgcttatacactatgtcaggtaaaacctcttacattttttctacacataaaacagttaaagatggacttaatggttttatttttcatttcttcccgacaacaattagtgggcatttattgaatgttttctagacccttaccttgtggtagctaatcatttagatcagagatgccccagcttccaggccatggactggtgcctcctatctgatcagctgcagcattcgattagaaataaagtgtgcggtaaatgtaatgcccttgagtcttgaatcatcttgaaaccatcacaccctcctcctgcccccatctgtccatgaaaaaattgtcttccacaaaaacagtccctcgtgccaaaaagggtggagacagctgatttaactcaatgcgactcaaaacagccagtctataaactgttactgtttacagggaaataggtgctcatgctatcactgtgctgcttccttctttaagacagtcttattatgataaaaaaaagtcaactaaagtgtatgcttaatgctgtagttcggagaaggcaatggcaccgcactccagtactcttgcctggaaaatcccatggaccgaggagcctggtgggctgaagtccatggggtcgctagagtcggacacgactgagcgacttcactttcacttttcactttcatgcagtggagaagcaaatggcaacccgctccagcgttcttgcctggagaatcccagggatgggggagcctggtgggctgccatctatggggtcacacagagtcggacacgactgaagcgacttagcagcagcagcaatgctgtagttagttttgattctggcatatggccctgttctcattgcgactggttacaaacatgtcagagtccacattctgtggaatgaaagctccgtgaaagtgaaaacttgggtcatctggtttagtgctttatcttcttctgcctacaacagtgcctggcaaatagtggttgcataataagcatttcaaatgaattaagatgcttaaaaaaaatagctgtggctgtagttgagagttatgaagtttcgaacttataaaagagttggagagtttcctttagctctgacctgccattttatagatcaaggaacttagtccttggaagatttctgaaggaaaaaataattggagtctaatggatggtgaagctcaggtaaaagaatgttttatttaagggaaaggccttcccagaggcattgaggaaaatcatcaagagggtgtagagattttgaggggactttgttgaaaggaatgaagtgtgtgtaaaataatggagattgcacttggtttagactgggaatttgagctttaaagtttgtattttcctgtttcataaagtcgttgacaaaggagtgaagtgggaaaatgatgttacctgcattttacagaagagccagtagaaatttgaggatgtcaaacagttggccccaaacttaaccaagggcagagctcgccctgggcttcatgtttgtaacctcccagcttgctgctctttccaccgtgccacgattcctttatttactacagactttgaacacctaacaaacaagcctggacttgattactggggagtcatttaggttcccaggcaaaagagtgaaatggagaaagcagctctgaggaaggctgcctagaatcatgggattccctggtggctcaggtggtaaagaatccacctgcaatgcaggagacccggttttgatccctgggtcgagaagatcccttcatagacccacgcgccatctcagaaattacttttgcgttacatttatcacatgagtgagcatagtgctagagaagttcaatgtagctcattggtgggggaatcttcttatcagtgtatgattttgtccattatgccttcatgtctggttagtctgaaggactgaattagaagaggagaggccagcgaaggatcattactgattttcatcttatgttccaactctgatcaattagtagtatcttaatattgggttggaatgctgggaggacatttctgaagctacatttaggctcaggagagccctgaggtggttgttatatcatttatttatcatttttgggctagggataccagcagataatgcagataattttttagtgacaatgagcatacacacacacacacactgcacatatatatatgcacatatatatataaacaacatagaaa

SEQ ID NO: 26073 - DNA, 1539 bp, Bovine  19866880877624
  misc_feature (1)..(1): n is a, c, g, or t
ntaaatacatatatatttaaaagtaaatgactttattaaaaaaaagtatttgttgaggcattctttcgggtcaaaatactgaacattctttgtatgaaggttagagttttatgttagacttgttacttgtcataacgtttttagtcttattaacccgttaattattagtcctaaaagaatgtattagtgttttctactatgattgtatgtttgtcagtttctccctgtagttttattggtttttacataatacattttgaagctatgctgttgggatcttataaattcactaatggataaaaaaagaagtaacagtagctgaaagagtggaatcacacacaacccattgtgggcataaatgtgagcaaacagtgagaatagccaaatggtagacaacagaggaagaattaatgaaaatacggcttatacccattaagcaactaggctttgggatttaaactataaatggttgtgtgaggaagctctttgctgtgagactgacaaagatggggacccaacttacggctgtttatctggtcttcccactggtgttgctcaggtcttccatcacgtgcctgagaatttagaagcagacactaacattatttgacaggaaaagaaggggagacaggagagcagttaggggtgtctgggagactgcgagctgtgaagttcggcggggaggcgaagatgctggcagcagatgtcgttagctgcagcagtctggtgtctgacagctcgctgtgcaaagccccctacagatgctgccccacttctcaaccttctcaggaggttttctcttgatcagtagacccccaggagactcccaaatcatgccatttcgcctttgcgtatgcttctccttttgcctggaaaagtcctcatcctcctctagaggacttgctgctcacacatcacttcctccataaagccccccttcccccagcatgccccaacgcaccccacgtggcagtgtggctgatctccaggcgcggtcgtatattgtgtgttgtcaaccaacatccacctcactatagctgtgatcagcggtttacctacctctgtcccactgtactctcaagtctagcttgtgttggattcctttatgttcaatgcacagcatagtgcctggcacattgaaagcccctaaattgtaccttaaaataatggaatacaaatgtaaacaaagccatttgtatttgcattttaatatcattgctttataggagagctcaagtacaatgaataaccctgtaggaaattctaaagctgaacgctgattggaagattaaaaaattaattttcaaatgtgaaagaatgacatagagggtcattatgaggcgcttcttgaaaaaagttttcttgggattcaaaaagttgaaatgtggggttcagcaaaattaaaaatgctgctgctgctaagtcgcttcagtagtgtccaaatctgtgcgaccccatagatggcagcccaccaggctcccccgtccctgggattctccaggcaagaacactggagtgggttgccatttccttctccaa

SEQ ID NO: 26074 - DNA, 1038 bp, Bovine  19866880885285
  misc_feature (1)..(1): n is a, c, g, or t
nttgatgtaacttgaatttctaatcctatttagatggtgtttcttgaacactttctttgtgttgcaggaaattttaactatggttttactatggtactcattcattctttacaagaaaaagatgtatatgatttaccaatgtatttatgttgttcacagactaaaatttctttagtttccttcttcctctttctcaatttttcagccttcccctaagttcacttcattttacagataagattccagtttctgagagaaagtgataaccccaactgaacttaaaatttgacttttcacttaattccatgatatataacaccctactaaagttcttaaagacctttcattggctaaaatgttccttgtcagtgaagttttacttgaaatgtaagactgaattgctatgtttctttttatcagcaaaatacctatcaatcatcttgattttatatgcacggctctactaaaactagaaatcatgattacacagcactaagtaaactgcacagagttttctttgataaaatgaaatataaattatacttcccttttctctgctaggcaaaacatttttctaggtcttgacttatgattattccccttgttcttttctgttgttgtcattaataattgaaattgctttaatacctgaagcatgtgcacttgaaaatcatattagtctaaggacacaaaaaacttactgtatctttaaacattaaaatgatcacttttcacacctggaggttattcaagtccccttcaagtgagcattttttttttttttttttctccatggggtaatatttcctactgaaaaatcttatacggattaagtatccagtagaattatcaataattgtgttaataatgttaatgaaagtgtacagttaaatgacagagacaattagttcacaccatttggtttatttatttagcagggagtattgtttaacatgtcagtcccgagaaacagaaacagccatgaagaggcttaacattactaataaaacaatcagtatcaaaatattttgtgtaaca

SEQ ID NO: 26075 - DNA, 1376 bp, Bovine  19866880905420
  misc_feature (1)..(1): n is a, c, g, or t
ntaataggttatagataatttttcccctgtttattttataatcttgaatcctatttatttaaatttatttatgactgtgctggatccttgctgctgggcaggcttttctctagttacagcaaggagggcttccttgtggtgcagtggcttctctcatcgcagtgggttctcttgttgcagagcacaggctcaatagttgtggcacatgggcctagttgctgggcgggatgtgggatcttctcaaaccagggctcgaacccatgtctcctgcattggcaggtggattcttgaccactgagccaccaggaaggcccaaaatgtccagttaggagtcattagcatataatggtggactagtttgaggagacaccacaggtagaagaggagaccttaagactttttttggttggatactcctaactttcagagatctggcagagaaggaggaactggcaaaggagactgaaaagaagtatgagtgagagagaagggagactgaagtggtggggaggggacgaaagcctgcctagagtggcttggtcagggactaggaggtgagggagtaacgggaaaagtagagccagggctctagaagaaggtttctatgaaaagaagcagagagagttatatgtggatggaggactcatggtcaaggaaagctttattggtttaattatttttggaggatcctggaatattaatggaatggttcaatggaaaacaagaaattcatgattgagagagaggggatcattgcaggaatggagtcctgaagtgggtgagatgcggacagtccagagcgtgagcagataggattgggaacaggggctccttcttccactgcacttgaagggaaggagtgcagtgtgttgttgggctgtgtggagggaagatgaagcagttcttgtcgggttgccttctcccgtcctttctctttccctcgcagagtccagctcagtttctggtttgttcctaaagtggttgggcggcacagtacgccccctgtgctgcacttggagccgctgtctgcttgactcttgaggacagcgtttgtatcacatgactgctcatcacatgataacactttaaaaatgcacagcgattaaaatgtaaactgagtatggcagggaagcctcttttaaaaaaaagaaatcagacctccagcgtattcttttaggttcatgctcaaagtcctacttgttcttgtagtgctccctccttgctttaagaattcctttgagaatcacttttagagacagtaaaagatccttttgaatgtttataagggaagcaaacttctactgagacctcttttggtttttagaaataatccaaaatcatttgtttcctagttttagaagttagacgatccaagt

SEQ ID NO: 26076 - DNA, 1140 bp, Bovine  19866880911493
  misc_feature (1)..(1): n is a, c, g, or t
ntcataaaagcaatggacaagttaaatatacacttacttttgactttaatgctgaccagtaaggattctattggtaattattttcttgtatctaaaggggaagggagggctctctgatttatagttcacttagtaacactgctatcacaaagtcctgcaggtcagctggccatcagtatgatcagtgtcataaataatgacaaaagcttctgaaattgctgaaatatatgcccataatttcactttgatctctttttccttaagacatgaatgacaacatctactttaggcaccaccactcaaaaggaatataaaagactttgaggcgtttataatggaatgacccaccctgtgggcaggatttataagctatgctaatatggaaattctccatgagtatccagactcatattcccattcactggtgtgtgtccagtcttatgatgttggaatgcacttaagtttcccctcacatcccaaggtgcagtggacaatttccacactggctgtgatgctgttgactttgccctttctcatagtaacctttatttttaactatgaagactgttcgtggggctcaggtctttgatgagagagggggagggttgagctttgggggtataacagagatatgggtgctagttcagaaatcaagaaactggatgttaatacacaactgagtaaaatttactaagcacctagtttaagctaggcgctattctaaacatcacactaggtaaactcttcctgcattcttatagctcatcatctctagtagactttcccaaggcttcaaagaattaagaaggtgctggaaggaagagaaaagattagtacctaatgaaagaaaggatttttgatgttgcctttcttatcctttgactaaaggaattgcaaaggttgccacacgaatagatcaacagcaaaaccacacttttaaactactaattgctctacacaggatacaggtgtttctaacaaagtctttagactactagaaacagttatcaccctagaagactaataggtccagctttgttgacaaaccgttagaactattaccaggtgtttagtgctgtctttgagttgagcagctctaaccctagcagactcaggaaagtgttaatagctcccttccca

SEQ ID NO: 26077 - DNA, 1371 bp, Bovine  19866880940558
  misc_feature (1)..(1): n is a, c, g, or t
ntgaacactcttaaagagaaaggacatgctctctgtggtgaagaaacaggagaactttcagtcgtcccactaggcccgtgttttcccggctctgcagcactcttgtaaatttgtaaatttgccacagctcacttgtaaatttgccagggtggcagggacacatgactcttagctgggaggcctgccagccatcagaagcccccaactcttaggagggagtcgggggcgggtgcccagagaccaccctgggttatatttatttggggggatacttgctggttctgatagcaaatctccctagacagatgcagcccacattggaatgtctcggacagaattccaccaactccccagtatcagacctagcaccttataaaataaatctttacactataccaaaggtaaggacagacgtccctatgtagcccgagatgtcacctgatctttcaggttcttctgcgcctgagtccatctcagcagaaaccccttgtgtattctccataggcagaaacccgtaattcttactcgttttatcgattctccctctgttcacaaacctccctttattcctcctcgttcctggttacctcattgtcccttggcctccaaagaatcatctcacacccgcaagccagacagattaatgtctctatttcccaaggtgtgtgtttggtctgactccagctgaccactgggattctgaagccacgatcctaccctgaggggaagcgccttcccttttcataccaaatgtatgcatattcctgattctcagtttcagcctgaaaaaaaaaaatgtaacttctcaaacatttctgagaggaaacttaacactctcttatcatacacaaacctcccttgaacctttgaaccctgaaagaaagacaggccctcttagcagtctggaatgattcacattatggtctaattttgaatcagtatctctcaacttgggcgatttaaccagggggggttgctgaactcaggcactgatgagatgagctggcctgctcatccccgctgaactcaccacctaggatctgcccttacaggaactcagaagcatgcccttcgcatcgatgcctggaagacgggcctagggacgcagggacctcaagaagtgctacgtcctcttgaagaaaggaggggagaaagagaaaaccttctagaacagtctactagcacaacttttactttagagatgcccctccaactatcatagttttattggcttatttcgccacagtttttgaagaagcagagttatgtgcttcttgcttacaaaaaaattacttttggtcattatagtttttaagaattcagtatagttttcagagagaaagttgaatgaacatattctatgttagtttt

SEQ ID NO: 26078 - DNA, 2524 bp, Bovine  19866880968169
  misc_feature (1)..(1): n is a, c, g, or t
ntaaagctctttgtatgtatttttaaaaattacatgtatatgtgaaggtatgttattttatatcaggttaatggttctcaatttagctgcatatccaaatcaactgggaagctttaaaaatacagattcctgggctcctatctccatatttttttgaatgagcatctttaggtcagtctaagggatctgtaagagagactttttaaggtattttaagagagcttccctaggtagttctagtatttgagaactatggattgggttcactattccctgaccccttccaatctttcacatactaaggttgaaataaaaaataatcagagatttgtccaaggtcacaaagtagttagtggcaaatcttggcctaaagtcagttctcttctttttaaaaaaaatttttatttatttacttgtttatcatttttggctgcactgggtcttcatttctgcccttgggctttctctagtttcagcaagcaggggctactctctagtcgcggtgctcaggtttctcactgtggtggcttctcttgttgcagagcataggctctagagtgtgcaggcttcaatagttgtggtacacaggcttagttgccccgcagcatgttatgtcttcttggaccagggatcaaacccgtttccccctcattggccggcagactcctaaccactggaccagcaagacactccagatctcttgatgttgaattcagttcagtggcttttctactttgctttaagtcacttaatttagttattaacatgaagaattttagctaatctttaattccttctcatttcaaattctataaagacaatgtgttagttgctaagttgtgtccgactctttgcaaccccatggactgtagaccctatctatgcgattctccaggcaagaatactggagtgggttgccattcccttctccaggggatcttcccaacttagggataaaatccaggtctcccacattagttaaacttatttcatgaaaaaagagaatattccttaataggtagacagaaaaaaaggttaaaggagaggttattgagacttcattcagtgtgtgtttgtttcttggttattcaggtcctaaatattcttgaaagtactcaagccagcttgtattttgcggaagatcctcccacatccctcaagtccttcaggagtccttctcctctgttcttcgataatgttccgagcattccagtggaagatgacgaaaaccagaataatccatcgccgcctcatgatcaaagtttgagaaaagatagaatgactcagaagactccctttgaatgcagccagtctgaggtcacattcctgggctttgacaaaaagacgggtagtagggggaatgaggactcttccagtaggtccgggtctccttgtgaggaaagctggtctccaaagtgtgcaactccatccctggacttgagggcccccagtgtgcatacagacacttctgcagaagctccaggccattcctataggagcaggccagtggagactagctgttcctccatattttcatggaatgaatgcaaactgtacaaaaaggcatcggtttctgatgaggataaagaagaaagcaagaattgctgaggcactgagtaaggtctcatctggggaagccactgtcttcatcagtagtgctggaggataagggatgatacatttggctgatgcccatcaacagtgtgaccaatcccattccattccttcccttccaacttgtagaacagagtggcttaaaagtttgttttagtaggatcattgcctcatgatccagcctgggctaaattaaaaccattcagaattgtttaagattgtggactctgacttcagacagagcagtcaaaacctactagaaaggatctggattacagtgtcttctctgtcacatccatgtgagtccttagagcctccaatctgcttccaagtatgttcagttcagttgggttccattgttttggtttagcctgcctgcagaggttgcaggaaatgtctgatttgtaaatgttaatagaaatctttttaaagaattgcctttttgcttatttcgattgactcttagtatgtttcttttatccctgtcaagtctgcatatgtgaaaatgagccagtttcacccttggtcacttacactgcccaagatctgtatttctgtatttaaatcttagattatttcatataatatagttgttatatgactagtattataattttttacatacttagagactattatatcctgagtagatgatgaaattttaatcaaataattcttgttcctaagaaactggctggtcataaaagcctcagtcagctttttgtttgattccaactctatgcctttactcctagtgtttaccagatctctcccttttgaaattctagccagtctttcagggcccaccataattgcctcctccaggaagctttcctaatctttccagccaatattacttactttatcagcatttccatagcaatttctctttttttttcccatttgtaaa

SEQ ID NO: 26079 - DNA, 1211 bp, Bovine  19866881001719
  misc_feature (1)..(1): n is a, c, g, or t
nttttctgaagaaagggtcttaaaatgttaacaggcctctgggccagaagatgatgcaaatcacctaaacttttgcatatgataagtttgcaggaagaaagcctggcttattgcatgactctaccccttcccccattattctctatgcataacttaaggtataaaaactactttggaaaataaagtgcgggccttgttcaccgaaacttggtctccccatgtcattctttctctcaccttcaggcagaattattcagcctcttttctccaaagaatttcctcactgagctatctttatttcagcctcttttcttcactgaattttcctactgagctatccttattctattactctttatatccttaattaatgtttaattaagcagttgtttcctgatcctcgccgacgctgtcccctcttcgaattccctggatccaccggggctggaccccggcagtatatgaattattttttgtgacagttacatcgttaaaagcagagtcatacataaaagaaacgtacagtataatgatttccttgaaaactcctacaatgttagattcagaggcaccttcagactatttgattgggggaaactacttgctgagctattttaataggtaataaatccagagaagcagcttgtatatattattaatactttgttcacttgcatttgagtttaaaataagccccaaggaaaacaatgaaatgtatatacaactattagttttcttacttcatgatataattatatcaagataatgaatttaactgctttaacataggtatattacccatttttgttcactttaatgtttctcttgaaatagcatccctctcctacattttgttttcttactcaaattagatattaacctaaggtcaaagcaggaaagagaaaccactgagatgaatgtcttcactaaaatatcaataaatttgttaagctctaataaataaattaattaaattaaatataaatgaatgtgagtcacccttcaggttgactggccagcccagttgaaaatataagaatttaaagaaaaaacattcaaaagttgccaaggtaaccagttagtttgtttataatagaaaacagtgatagggcaaccacatgagatcacatttacaaaggtcatatcaaatttgtctagacattagcaaagccagaatcaactcttgtttctgtgggaagtccaagtaatgg

SEQ ID NO: 26080 - DNA, 684 bp, Bovine  19866881047501
  misc_feature (1)..(1): n is a, c, g, or t
nctggttgatgctgacacggctcacatgactggcgggaacactacttaagtgttcggtgtttgctctctatttatcaatagggagatatttctctgagaaaagcgtatcctttgtcttctgatgaaaagtttgtccttccaatggggaatgatctagaaagcaaacaaactgatcattcatttcccatgtatgagtcccatgtgtaagttttcattttaaaggtttgaatccaaatataagaaatgaactgtggccctagaaataccagatacttaacttctttcccatagcaatatgatttttaatagctgaatatgccatctctccttgagcaggttgcttttatcaccagtttaaagtatacgttattgttataaatactattaattatttgaagataatatcaccctggaaataatttttaacgtcctcagtctcaaggtataaaataatgcattgctgggtttagtatgttcttttaggcaaagtgctttcctatgtggctacatggacctagcttgagcctgcagactctgggagacagaaaagtggaaaatcagacactaataaagtatagagaagggtcttctgattttctaacattatgttggataatataaaaaatgtaatttttttatacctctacctaaaattaaaaactcccaagcgctccttatgctcct

SEQ ID NO: 26081 - DNA, 1104 bp, Bovine  19866881085511
  misc_feature (1)..(1): n is a, c, g, or t
natgaatcccggaaaatgtttatgcacaagaacagatggtttaatatctcaacacatcattgaaagaaaaagcaaacacatataccaataccttacccactgagttagtccacagtaaatgttaatgggacttcatccaatcattattcttagcttctagcaaagaatgcaaaacattctgttcactataattaattcatgatttaaacctctactcaacgatctgctataatttcaccagagaaatataaacactcagcagttttactcatgttatatttcagaacagcaaattgttctgggcatagagcacaaaaacaaaaactttgaccagtaaatacagctttcctaccatctgccaatgaatttatacagtattttcccaagctttagtgaccgtcaaagagcatttgatatttcctttggtttttaaaaaaattcatggtccactgaaatgggctaaaacaaaataatagtacaggcaacaaaaatacatcaaattcatctctgtcatccttctaacagaggaaaataacactgacctctggacaaacccacacagcttggcagagaggtttgaaacttcaaatgatctacaaacatgtattggagaaggcaatggcaaatccagtactcttgcctggcaaatcccatggacagaggagcctggtaggctgcagtccatggggtctctaagagtcggacatgactaagcgacttcactttcacttttcactttcatgcattggagaaggaaatggcaacccactccagtgttcttgcctggagaatcccagggacaggggagccagggggctgccgtctatggggtcgcacagagtcagacacgactgaagcgacttagcagcagcagcagcagcagacatgtatggaggccatttcatgtttactaccttcttctgtttctcttttaatcaagttccaacttgaggtttgaaaggttcatcagggtggatgtccactggagtgatgaaactgaacccagaagtgggcccaaatctgtaagagcccctgacacggtcactaccatgcttaccatgcatgtttaaaggggccagggatttggggctttgagggctcagt

SEQ ID NO: 26082 - DNA, 1223 bp, Bovine  19866881099757
  misc_feature (1)..(1): n is a, c, g, or t
naccccgctgcaattttatttggattatttttcggaggtggggggcaattagcagagtttgagaaagctgggtggcgggtgggaaacaagggcggggggaagggcagtgacttcctgggaggtgtaaaacaggatcctaacgcggtgtaaagtgtcgctcgggcagagcgggaaaactctggggcctctagattggcttgtttcctttgatgatttcaaaaaggtacaacaaacgcaatggcaagcaaacattgttcggtttccccaccttgctctaggtagctttgggactccaggattattttctactcggcctatttgccctgaaagaagcgctttaaagctaaagaacgcagaagtagttttaaagcccgcggaagcggagtttaaatgttctcaatagacaagtcccgctcgagccctacccgcgaaggcttggaaattgccgcgaacaaaacccctccgccctgggcgctgcgcgcagctctgcaagcgcctgctgcacgcttaattggttgcatccgcagacaaaaccctccactcggcggggtcccgggcgcccctcgatcgtcccctcccagaccccagccactcgttctggaagggtacatttaatgtctgtagcgctgaggcgcgggatccggaggcaaaagggggactgggcgcctggcgaggaagtgaccctagctaccgtgcaccctcttggacactactttccactgcgcccttagccaaactagttaatcttgtcccgtggggacgcaggatctcctgcagcccctttcctgggacaccctcagcagcggcggccgcaaatcggacgccgcgccgcatttaaagagccctaacagaaccgggcgggcccacgagttctttgtcgggagggcgcgagtctcaggccaccgagaacttggggagggcgccaagggggcggctgcggcgcgccagttcccggccagcgagcagcccgggttggcgggagaaagagcctccgggtccccaagacttcagcccctccaaccctgaaccgccagaggacccctgcctcctgggccactgtgaagcgactaggaaagtgcttgtcgagtcccggtttgtcggacccggccgtttcccgtcaccaggagacaacgcgccactcgggccgggcacaatagcgaaagtccgaggacgcttcgcccgaccccacctcctgctcgcacccggccggccgccgctgctcc

SEQ ID NO: 26083 - DNA, 1160 bp, Bovine  19866881106021
  misc_feature (1)..(1): n is a, c, g, or t
ntcccatctttagcagaaatgtctcagatgtcattcattcgttagattctgaacatcccatcagtatggcctcatgtcaaacacgccagttagtacagagatgtaaaatccatgctttttatactcaaggcttaaaatcaagtggagaagataagaacctagttgtattaatctagttgtacaatacaagacagtttaaaggcacattaaatcctttctgctctaagcaaagtgttagtaggaagggagtcatgtaaacaaataaataacccatttgcagcactggattaatgcttcacagggagtataaacagagagccccgggagttcagaggagggcaagatggtttccagcagggctttcctgcttccatcccctccacgcagccccaccagatcaatcttcctgcagcaacgctttgatcatgccactgctgttctcagaaacctcctgtgaccctccattacctggcctatttccccatctgctgtagaaattactgtggaggtcattgtgatagggttgaaagcaccccggagttgttccaaacctgggtgtgaaacctacttctgtcacttctcagctaggtgaccttgagtaacccacacagctttcccagattcagcttctttgttagtcagctgttgatactgcccatctaatgggtttgatataagaattaaatgagataatatgggtgaaaattctttgttaactatcaagtgttttgtgagtccaagatatatacgtctatgtgatatacagatttacaaaagctctggataatcatgtatttataaatatggctaggacttctgtgtgctataggggcttccctggtggctcagatggtaaagaatcttcctgcaatgcaggagacctgtattcattccctgggttggaaaaatcccctggagaagggaaaggctacccactccagtattctggagaattacatggacacagaagcctggcagtctacagtctatagggttgcaaagagttggacatgactgagtgactgacactctatgctatctgtgcctataaggaaactttgatgtttggttttgactctgaagggttgatggcatttttgagaatggcatgaaagtacatatagagattggaaggcacataatgtgtttggggaacagaa

SEQ ID NO: 26084 - DNA, 1701 bp, Bovine  19866881108897
  misc_feature (1)..(1): n is a, c, g, or t
ncagttttgtgggtttggggtttcctactaaattttcagtgcctcatgtttcctatgactgatggatggatcatcacctgactcatagaatcttttgctatggatcaccatagtgtagcttttcaaattcagtaatgtggcacccagatgctcagagttttaatatggagggagaaacactgggaatatgcaatcagtgctttgaaatggacttaactgagatcacttctttccagcctttggcaggattacaattaaactggtctagactcatttctgattcttatttttaaaagacctacaatgcccactttttcgtctaagtaaagtagacatcttagtccattgaggttgctgtaacaaaataccatagactgggaagcttgtaaacagaaattcatttctcagagttctggaggctgacaagcccaagatgaaggcaccagcagattcaatgtctggtgagaatctgcttcttggttcataaatacccaccttcttcctataacaccatgtggcggggtgagagagctcatttggggctcttttataaggacactcatactatttgtgagggctccacactcatgacctaatcacctcctgagagccccaccttcaaataccatccaatcactgggattagatttcaacatataaatttggaggacacaaatattcagacaatagcagtcaggatacaataacatctgagggttttttcccccagattaaggtcatgccaccatcctcaacttcagtattcctaaaggcaaatctttatttattcattcattcaatgaatatttattggataaataagtgtgtccacttattgagacagagagaggaattaagatgaggcccctgacctcaagaagcttaaagatgaggggtgggaaacatacaattaaatatggcacgtgccatgacaggcaaggtcacggagtacaccaaacgggtaaatgacagacctacaaaaaggcatgtctggaggcaagatgtcagggcagaagatggctatgaaaaggtcagttaagcttgagaaaaatgcagattgtgagcagtactacggaacgtgtaaggtatgcaatcagggagagaagccaggagctggatcttaaagagctccatgacgactttctacggtgcccaggaggagccctgaaaggtttcagcagaggggtgacaggagactgtatgcagaggtgcttaggagagattagatgagggcaaaggaaggttgtaggtaagcagattcgttaggagccttatcttgataacccaaagggaaagggcattgagccggaatgaaaataagctcagtgggaacagagagtaagtaaaggaactagaagagggacttccctggtgggaagtctagtggttaagaattcgccttgtagaggatgcaggttcgagccctagtcaggtaactaagatacgacgtgcagcagactacaaagcccatgtcctgcaactactgaagtgcccccaacaaaagatctcaaatattgcaagtaagacccgaagcagccaaacaaacaaaaaaatttttaaaaaggaaatagaagaggcagagcctggggatggactctgggctgtggctcagggtcccgatgatcagactcttgttgttggagcccaatcccctgccccaccccaagggcacaatccttggtccttttcttttttctctag

SEQ ID NO: 26085 - DNA, 1660 bp, Bovine  19866881109693
  misc_feature (1)..(1): n is a, c, g, or t
nattataattaattccctctacactttcatgtagatattacagacagcctaaaccctaattacttatagctgcctatagttacacatggactgaggtgacaattatgtatcaaactcaccagggaccctttgtggtgtctttaatatagctgctgaatatcatcaagtttaagaatagcttataaataatactaaattacattttaaatctacttatagttagggaaaataatttaaattgcagcttataagcctgctaatctagaggtttgatgtcatatgttgttcatcaattcagaaagtagaatttctgctgtttgcctcagtaggcacatgcagagctgttctggcttcttagaacctatttaggtatctgttagtcaatccttttgccaggtgaaactaggcatttcgtgtttatttgtatttcttcattttggccttagaaaggagcccatcacacaattgatttactgatggaaaatatttggcaaaagttttagagagtggagctaaggctcaagaatacatggcaataataaagatgttaaccttgtgtatgaaatgctccatccagatgttgctttgtgaagcagctagtgcttctggaggaaaagaagcaaggacaagataataaagaataaatcagtgggaaccagggatgtttttaggtgttttgttttcagagtatctttatgagaaaggaaattaacaacgggagggaaatactccccaatatgaattaatggtttgtaaagggaaaaaaaaaatcattctggagatactgaaattgacctagaaattgacccaagtaccagatgctgaagcttaacttcaattggtcactagaaagttactaacaaaccccagctgttttctcagattgctgattctcttcttttggtaatggggtgtgcggtatgttgatttaaaaatatgcatttccattccatctcttttgagagacagttgtctttcttttataaaagaacttgtaatcacgagaaagtgatgtaatttcatttgttagtcaaacattctagataggtggcaagagcttttgtttttctgagtttgtagaaatctagaaacttaaattatgattttaaaatcaagtgggaggaactaaatcagagtaaaacctattacaactagactgattgaaactctttgggtttcttctaaatattccaagcattgatgtattgaagaacctggaaatctactgttgaaaacattgggttttcatttccattattttttccctccagatgtttcttacttttttttaaacttttagccacttgtaatttaatacttgcttgtttaaactgaaaatatttcttctatgattagaaagaaatatccaataatgcatattgcaaataattgtaacattttactgagggaaagaaatgactttgatagaacatcaaaaaccatctattaatggagtacgtgaagataaaaccatttttcatttgaacatgtaaaaacaacatgctttaaaaacctagagatgcttcctctaaaacacatgagtttttgacatatgctcaataattataatacaaattttctgatgcttataaggtgttcagtattggtaaactatattttctgaaactaccttctttgcagtatttgtaataaaatggag

SEQ ID NO: 26086 - DNA, 1069 bp, Bovine  19866881137809
  misc_feature (1)..(1): n is a, c, g, or t
ntcttgcctggagaattccatactgaatttttcaagacttagtacaaaaaatatagaatatctcagtaataatttatttagatagattatatgttgaagtagtactttgctacattgggttaattattaagattaatttttttagaaaaaggaatttgaattttaccccagaagccaatgggaagccattaaaagataaaagagcagaggaatgaggccatagtattttgtcagtgaccagtgcttgcaatcacttactgaagcattaaagatgcatttaagagagtccgaattaactctgtttctagctcaggctgggggaagcagtagaacataatgactaagaacactagactgacttcacaagtgacaagctggcgaacttgggaaaattaatttctctgagtattagtgtcctcatccataacatctattgaatgtctcctacacaagactgttttagggatcaaaggaggcgatatatttaagcactcaataatgtatggcactaagtaaggcccagtgaatgctgactaccaacagccattattaggatgttttaaaaattaattttagctttattttactatagccaaactttttgaaacacttgggagtatagtggttcccctccctatattctgtggctgctctgcctagaggagcttttgcatttgtcatctttcactactacagagaataaatcaagtagagtcgatgatgggtgggcttcccaggtggtggagtggtaaagaatctgcctgccaatacaggagacccaagagatacctgagttctatccctgagtcgggaagacccccagaaataggaaatggcaacccactccagtattcttgcctagaaaatcttatggacagaggagcctggcaagatatagtcaatgaggtcacaaagaggcagacacaactgagcgatggaacacacacagagccagtgggtgcttttctgggtctgagcattaaaacaacggctgttacctaattaccaagacctcaaagatgcaataacccccttgaaagaaaacctatagccttgtctgcatctagat

SEQ ID NO: 26087 - DNA, 679 bp, Bovine  19866881159127
  misc_feature (1)..(1): n is a, c, g, or t
ntgcatggaggttacttatttttcacatagctactggattaagctgtaagaactctatactcaagggtctaagattaatagtacacgtgggagaaacaaatgctccttactgctttcctggatggctttgttttggagagatcattgttggctgacaccttccccataatagttgaccatgacctcacattttgagaaaaacgactttcttatatctcgcacaatggtcttcaaaaatctccacctgttatttctttgctaaaccatacaactgtgaaatgatgggggtaagcacaaaactagaggcttaaaaacagcacaatttagtctcacccatttcagctcaagctccaatgctctggccacccgatgtgaaaaagtgactcattggcaaagaccccgatgctgggaaagattgaaggcaggaggagaaggggacaacagaggatgagatggttggatggcatcaccgactcaatggacatgagtttgagcaagctcctgaagtcggtgatggacagggaagcctggcttgggcagtccatggagtcacagagtcgaatacaactgagcaactgaactgaagtccaaaatgggtgatcaggactgatttcctttgggagactcgaggggacagctcatttcttacacatcactccaacctttgtctccaacatca

SEQ ID NO: 26088 - DNA, 1181 bp, Bovine  19866881176510
  misc_feature (1)..(1): n is a, c, g, or t
ntcagacacgattgagcgacttcactttcacttttcactttatgcattggagaaggaaatggcaacccactccagtgttcttgcctggagaatcccagggacgggggagcctggtgggctgccgtctatgggctcgcacggagtcggacacaactgaagtgacttagcagcataatagagaagtgatggaaattttgctctacacagagatatgtgcacatacactcaacagatgaggtattactatatctttttgcactgctaaaatggtcacttgaattaaaactcatcaattttaattttttttacaaaaacagtagcaattgaaactgttgttgtgtgtgtgtcactaagttgtgtccaaccctttgcggctccgtggactgtagcccgccagactcctttgcccacggaattttccaggcaagaatactggagtgagatgccgtttcctactccgggggaatcttcttgacccaggaatccaaacccgtgtttccaatgtctcctgcattggcagaaagattctttactaccagtgccaccttatatcttattgtgctgctaaaatgatcaaaacacatcattgtttttttttttacagagacttagtaagttgaaacttttaacaagcctaataataaaggccaaaagcatcaagtatttatcaattctaatgaaaagttaagctttcactgattatacgatggacttttcttagtttgtttatctaataaccttttgaaaaccagagacttctttaaattatagataatgattttaaatcttcttaattgcaggcaaaaagcaacaccaacaaaaaaggaggaactctatctacttgttttaatcagaaagtgtgtgtgttgggggaggatttcttctaaaatgaattgctaatgaaaactccaaacagataatgagccaggagacctttagttagttcttgaagttgaaatttttatacttaaaatggagaagaaagagtaaaaatttagtcctccaaaggatgcttagaggataatatcattcaaaaagttggtgccaacaacaatttatacacagcatgaagagcaacaaattctgcttctgtggtttatatctggagagcaaaacaagtcaaaaggaaaaattccaaagaaggttcaaatttattctccaacctcagagcctagttcagg

SEQ ID NO: 26089 - DNA, 755 bp, Bovine  19866881218855
  misc_feature (1)..(1): n is a, c, g, or t
ntggtcgccgagagcccggttcctgttggcctgcacactgactgttctggcaggcagaaataggtgctttcctgtgtccattgggtaagcatatgtattttcactggtgcatcttagctgctgatgcctgaaaatttggcctcaattgtttatagaaaggaaaagcaatctgagctgtcagccttgatattacctaaacctgcataaaatgtggaaaaataatgcaagatttgttttttaggcctgtttcatattttccaggcaatagatcaaatcagttcagggttcatttttagttctttaataagctgacacagtatgttggcagtaaaataagaatgcacttttaacatggaagtgccatagagtcgaagttgctatttgtgctgtttattaataatagcgagccctcgagaatggagcttagtgctttcagtggggaaactgagattctagtcctttccgttgtaataagcaccgtccttcacttctctctcatcgtctccatttggtatggagggacagaaaaccccattcccttgtcaagcccttctttctttccctgcagtttataagtgttttatacaccaaatgagcacagtgaaaagaattaataaatcgtctctatgcctcttctcgcatattcttccctaaatcttgactcctccatctgctggaaatgttctcccctagatctgcttcttcacttcctccaggttcttatcccagagttgccctgggagaactgccgttga

SEQ ID NO: 26090 - DNA, 1564 bp, Bovine  19866881268063
  misc_feature (1)..(1): n is a, c, g, or t
ngtgctaaacaagccgaggatagacccaagacctgaccccagcccgaggctcttctcaccacggactcagcagcagggtcgccaaaggccaaatccaattcagtaaacacagacttctgggaagcaagtgcgcttgctttccttcggtgtcagctggaggttgcatttgccttgagcactaaaacattctgcagagaggccaagtgcagaaatctgtgtctgagattttctacttttacaagaagaatgaccatgtggggcgctcagccaaggtcaacctagaattggaaggctgagcccaggctcagcagagccagagccaaggtggaaagctccaggcgctgggagggcagggacggggcggctagagtaaagggccaagtgtgggaatgtttattgaaaagaacgtgctggggagaacccagccctcacacctcggggactggggagctggccgtctggagcggagagccctgccagataagttcagccatttccacttcataaagttcgtggtacaaaaatgaatggcaaacccagctatgaatgtgatttctgaaaggagattattgaaaagatagtttcagtttttcagatttctcttctggtggtcaggagcagggaagtagggagaaaatttccaagacacttgcagacatccccgtcccattccagaaaccacgatgtcctcactgcaggacgagggggcactacatcttccaaggtttttcaagagaaggagagggctgaaacctgggccaaaatgaacccatgagtctggatctggttgccagaagacagtgggaaaatggcaagggtgatcctgaaaattatatgaccccaatttgccctccgggtgatggaacttcaaggcttacattagacaggcagctcaaggaagagatacactgattacatatctaatttgctgtcactatcctcatgacatcactgtggctttctcagattactcttgaccctgaatacccaaatctattttccctgatgagttggtttgaatttttttcttggcactggtttcagtttcttacttcctgtcagcctcacttcttagatctttgctggtgtttttggtgtctccgaaactcccaaatgtacagaaactttttctagactgcagtcttctggtcttcctctctcctgatcactcagatgatatatcaaatcgtctggcatggctgcttctggatatatatagctcagcttttccccccttgatctttctcactgtgttcagggctagggtaaagtgaagtcatcacaattgctctttcaagcttaaggaatttgataaatgaagtcgtgtggggtcctggcaggcgatgtgcttaagcaaagtacaatgaccatctgtggaccagtctccttatccctttattatggcacatactcaagttcaagttgctttgtgaaacttctttgtgtgtctctctctttttgtatttcagctttatacaattattcccaaatcttgcaaactgacagtgagggagagtaatcgaaaagactgctcaacttcagtctttgaacattgcaccatcgc

SEQ ID NO: 26091 - DNA, 982 bp, Bovine  19866881346882
  misc_feature (1)..(1): n is a, c, g, or t
naataactttattgacaccttacaatagtattatgatagagtaatattattatccttatctacagacagggaatcagaggcagaaagaattgaaataaaccacccaaggtcatgagagagtaaataggggagctgggatcagagcccaagtatctggctccacagtgatgccaacccttaactactacgttccacttctactcaagtactagtctgtgcaaaccgaaccatagagagggcctacctagctcaaaggactgtgcaacttatgggagacccttgcaaggcaactgtggtctctgggtttcagtgctggagaacggtctgcccatgtgctgttcactagaggacatttcattgctttgatgcttaaaataattacttccaaagatcagttcaatctttatgggaaaaaaaaaaaaagttgcttccaggataaaataataggaaagctttcttttcagtgatggctccactgaagaaaatcatccttggttgtatttaaagcatataatctctttttttggctttcgaacatggaccctgtaaatgaaaccagacagatgtgtgcatctttctcctttctctgattggttttattttaaagtattagatgtcttaaatcttgtttttcaatattaaatattgcctctaagaggaaacatgagaataaaaacgatttccacgatgagtccactcagactgagggtaggagaagccaattccgtcatttgtcttctgtgtctgccttctcgtatttgtttgttcaaatgaattcaatttcttatactcctgtctggtccagtgggatgatgttttagacatacactgagtttactgactgcaacatctgttttcagaaatctcagcacttctcacctttagttggaagctgctaagttctaccccaagaacgaggtacactttgagcagttaggggaagagtttaccaggccctcttcaacgttcatatcttttatgc

SEQ ID NO: 26092 - DNA, 1438 bp, Bovine  19866881358063
  misc_feature (1)..(1): n is a, c, g, or t
ntccttccttaccctgggcctaagagggcaaatctctatcattagccttttctgcaaaatgcagtattattcaccacttcctcccttcttttacccctagagcaattcctcagcttgtaggaagcatttttcagtcagaatgtaacttcgaaggcgactattctaaactctcagtcaggaaggttcagaattggctttcacaaaggggataaaccctgcattcaggaagtctgaccggcaacaattccagggctctcacattaccggcttcctcctcgttattacagttgggctcttcctggaagggggagtctgctgcttgattaaacattccaatcacatcaacactgagcaaaatcacaaaatcagcctggtcttaatcaaatgtgcttacctctccttgggaaaggccttcaaaattagaaaacgtttcacagatcagatatgtaggaacaattcccctatctctctttcttgcttcagtggcatctcaagtccctgatcataggataccagccaacgtgtaccgagcacttcctaacggccaggcacgccaccaagtgcttttgcttacacttcctcatttaattttcagagcaactcggaggaggagggaggatctagtctgatccccattttatagatgagatgactgaggtccggaagactaagttgtccagggctgcactgtcaaccccagagctattaaaatccaacagcagtgtggataggtcctcagcagacctggttcagccactgcccagatattgctactttctctctggcctcagtttcccttcttggagacgatgtggccactctgaaagttcccttttagcctgacattccacagcctgctgctgctgctggcgggcttctttgtttccacgctcagctgctctggccggggcctcccccggctctgccctgttttgtttttgctgctggacctactacagacgcactcctggcagagcagcccggagcatagccgaggaggcttcctctttcgctcagttcctggccgctttagtatgaacagaaaaggtgggcaggggccaactggcagaagccacagaaatagcagcacatgattctcctacgagcagcagaaaggtcggcacgcaggaccccgccatctgctgagctttctcattgactaaggttgctcttggcacgcagagccacctggggtttccacgctcgtttccctccggtcagagtagacagctctgctgatagacaacttggagggggatgcttcgtggtcccgtgctagcaaccggccagggacaggagatggacagctttaactgcaaagccacacaggaacacccccctgccacaggcacacacatctgaatctctctttctgcagactgcaacctcctggggaggtcctccctgggtccaggccacctctgagcacacaggaaaa

SEQ ID NO: 26093 - DNA, 1243 bp, Bovine  19866881424330
  misc_feature (1)..(1): n is a, c, g, or t
nataccaattcaaagagaactgacagatcagttacaaactttgcagacgcaagccttcagtgaaaaccctctggttttaaactatgattattcttcctttacatttctttgaagattgtctttgtggagttaaatgtcagattatgaaatgtaaatttaggacaactgattcaagaagtttgacatagccttccctcagaatcctgggggcacgggtttgatccctgtgctgtgcttagtggctcagtcatgtctgactctttgcaaccccatggactgtagcctgccaggctcctctgtccatggggattctccaggccagaatactggagtgggctgccatgccctcctccaggggattttctcaatccggggattgaatccaggtctcttgcactgcaggcagattctgtaccatctgagccaccaggaaagcccatgaacactggagtgggtagcctatcccttctccaagggatcttcccgacccaggacttgaaactgggtctcttgcattgcaagattctttaccagctgagttaccaagaaagccccaataccaaaatccaagaatgctcaagttccttatacaaaatcactttatgcagtcggctctagggaatccgtggttggttgaatctgtgattgggaaccctcggagagctgtgcttgaaaactttacactggtgtgtgcagaggtgtgggtgcacagtgtgtaggaggtgcaacaaaatgacttgtgactgtctctctccttcacctgttttgaccaaactttattactcatttaatggagtcatgacaaagaggaggaatcaaaacacagggggatcacagaggctgttatgtttattgtgcagaacagacagtgataatccactagagaaatattttcaacaagcaagcgattcaaagtacaatcatagacagcaactctacatgaagaacaaagttagaagacactcatagaaacaggaagaaagtcaactgcagttcaacgtcttgatacttttctcctggaaacatacctaacttcagaaatggtagaaaagttaaatgtccagtcttatttagcctgagaccaacaacagcaaagaacagtcctataaaatttatctcccacaaaaataaactatatatataaaaattttatgatgttcttactgttccattggccacaagctttttttcagtatgaaaaatgaggtatactggggcttaagaggtagtagtgtgttttgat

SEQ ID NO: 26094 - DNA, 937 bp, Bovine  19866881600569
  misc_feature (1)..(1): n is a, c, g, or t
ngtttatttatggccttatttaacatgaccctgttttacttcaatcgctgtaaaaggaacacgatggacctcagacaacctgagttttctgtgaccagaggtggtctgtgagatccatgattctgagtggtttgccatttttcttaggcacagagttaaagtctgcctcctggaagctggtgtttgggagaaaaccactcagtttatggatgaagggagccaatacatcgccaagagctccatggcaatgcaacctggttattccctaattgggatttatgtagtcattctcttttaaagtgttagttgttcagtcacgttcagctctttgtgactccgtggactgtggcccaccaggcttctctgtccatggaattctccagacaagaatactggaatgggttgccattcccttctcctagggatcttcttgactctgggatcgaacccaggtctcctgcattgtaggcatattcattaccatctgagccacaaaggaagcctggtcattctctttaggaagactaagcaattgtttgtttctttgagaaaataaccatcatgtgagggattactcctgggtaaaagttagaaagggagttcacctctcccacaggaaaggcttgcctctcaataggaatctagatttaggagcaatctccaaacctgaacacaatatttcctggattcccaaatttagagactgaatttgggggtttgccaaatcctcaaaaacatcaagggtctactaaaatataataggaaatgatagagaaaagggaaaaacacaagcaaaatgtaaaagattttgcaaaatgtgtattttagatccagtgcccctcttgctaaccacgtgggcttgggaaaggtctgaccatagctatagatcaaaaggaaactgctcctcctcagtaactggtgtgccctaagaaggggg

SEQ ID NO: 26095 - DNA, 1552 bp, Bovine  19866880347894
  misc_feature (1)..(1): n is a, c, g, or t
nttttcagcctcttttgtccactaaattttctcactgagctatccttatttaaccactctttgtatctttaattaacatgccgtctccccttggaaacccctgactccacggggctggaccccggcagttgccagtgctactgtttacctgttaatgtagagtagtgtgtatctgttaatccctcttcctaatttatctttccccctttcccctacataagtttgtactctataaaagattgtcattcttaaagcagtttggtcttaaatagctctaccttttttttttttttttttggccaaaggctgaaatccttcagtagccaggctggactactgcgacattttgagatttccgtcatgtggaccttgttaggagtgatggacgacgggcactttcagctgcagccagatgtccccagggcgccgttctcagctcagcgtgactgtcctcactgaatcacaagttaaacaggagcctctgacttagagaaagtgaggttaagttcccaagaggaaagtgaggtaccaggcagagaatctaggaggagctggaaggggaggggtttactacgggcagtgccaccactggaagcatgtcacaaagtccctgagttccccgtgagtcactgggtaaatgcccttgcaggcgctccattccggtgagacactggcagggtctgggcaccagggagatttgaaagatgagacctcctgcgctaatgttgccacacagctgtgccgaaggaaatttaaaaaaggttaacaatcacgtcaggtcgtcactcactttccttacagagctttcccatgggagagcccttaacttaatcattgttaggaattatcaagtgtcagcatacttttcatgaccatttaacccatgcattgtactcccccagacacagtggaacgcagggatacgatgcaggacatgctctctgacctcaggcagggtgtcggggagaccttttcctttttataatgaagtaaaccccatcccatccccaggtgaccacagagctgttttctgtcgctgtaagtctgcatcttctaaaggttcatatgaatagaatcacatgctgtgtactttgtcttctcaggcttctctcactcagaataattattttgacatttatccatattactgcatgtcaataactgtttatgccttttcttttttttttactgctgaataatgttccatggtgtaaacatatcacaatctgtttattcattgacctgttaatggacatttggattgtttccagtttttaactatcacaaatgaagctgctttgaacatgcatgtctaagtctgtgtgtggacagatgctctcatttctcctgggtaaactcctgagacaggaatggctgggtcgtgcatcagacgtgtattcaaactttttacgaagctccttagaagttccccaaaacggttgcaccatttcacattcccgccagcagtgggtgagaaccccacatccttcacatcctcagcaatatgtggtataatcagtcttttgattttaaacatcctgatacagtggtc

SEQ ID NO: 26096 - DNA, 1626 bp, Bovine  19866880360784
  misc_feature (1)..(1): n is a, c, g, or t
ncttggctgaagcccccaagtccttctcaaatccccggccgggatgcctcctttctagccccacagccatcagcctccgtagccctcagctcctgctggaagatctgtcatatgctgtgggtgctgggccccccagggctgtcattcccaccccgagacattgctctgaaagcctggacaatccccactcccttcctaccaaataatgcacacgagggacttccctggtggtctggtgggttaagaatccgcctttcaatgcaggggacatgggttcgatccctggtcagagagaagatcccacatgccacggggcaactaagcctgcgtgctccaactactgagctcgcacaccgagcctagagaagactgcaggccgcagcagagacccagcgcagccaaaaaacaataaacgaacacagcacaccagggctcgttagtcatcgcttaaagacctcccatttggggctcgctctttgcctctgtctcagccactcacccgtgtccctcttgccccagatcacggtgaccagcctggcctctcgagtcatcctataatctggtctcgggcctgacctaggaagtcctccccaggacctgtccctctcgtgcatcgtcccatggacacggacgctgcccacttcaggatccctggcctgggccttgctccttccagggccggtgccccactgctccctgagatcctccgggacgagggcctggcctcaaacatctgtgtccccaggcgacacctaggtcactaggtcactaggcgctcagttagggttgtcagctccccagcagcacgaggtctggacagacctgcagtagccattgacgatccttccagagaccaccttccggaaaggctcccagtgcttggcttctccgtccacaggtgcgcccagcaggacgacgtcctcaatgatcccttggcaatctggagagagaccccagaaaagaccgtcagcgcccctggccacagtgggtcctgcgagggaccgtccaacagccgtggaagaaatggatatgagacccacgagaaggcacatatgcactcactattgttcagtcgctcagtcacgtctgacaattacgactccacaggctgcagcacgccaggcttccctgtccttgcaggcgcaaacacattcgtgcacacattcatgcaaacgcacaccgtactgcggcttctgttcacagaggctcaggccctgggtcaagccctctggtgcctgatccattcctacaaagcccgcacaccgagcctgtgccccacaactagagaagacggccacagcaagacccagcgcagtcaaaaaggaatgaatgaataatccaagcacacatcatccccgtttcagagtttaggaaaaccaaagacattttcaggatcacatggccagtgggtagcacagtccaagtggggacccacatctatttccaccatccgtgaagctcacgactgaccgtacactcagatgggagtgtttccctttagaagggactcatggtccctggcatgttgcatgtgccaggcaggagataccacagccttcctctggcaacagtccctgggggcctgtatggcctggcggtaaggcgggagtgcagaggagagggggg

SEQ ID NO: 26097 - DNA, 2271 bp, Bovine  19866880365991
  misc_feature (1)..(1): n is a, c, g, or t
naaggatgaaggatggttttaggtggccttctctccctgctccagcgtgagtcagccacctgcatctccagctggggtcagactacagtctttcccaattatcccccaactgaaagcccatcactgactacactgttcagtgggcatttattgtgtctgtgggggtgtgtgtcgcgtcagacgctgtgccgagggcacaggtgtgggtgctgctccgtggcggggcaaggtggggcagatggctgcttacctgtgagtgaccgctccatactccccggccaaggccactcgactggctgggaccagctcctggctcattgtgctaaagatggcttcgctggatgagcctgcctggaacatccataacgggtccagaattacacgggtccgagaagcccaggccctccttgtaatctggaccgggacaactactgcctggaactggctttgactttcaagctcataacctctctgagtggcaagccaagcctagtttctccagggagaaaggaggcagaggtgccattcatgccaacccagaggatgctgcccacgcctcaaactctcggcagctcaggttcccagggccggaggagatgttgagacgaccacggcaggggctcctcttcctgccacagaggcctccgggcaccaccaggctcagacctgaccaccgagcacgaacactcacctgtgaaggctcccttcagcagacaggctgagcccgacaagcccaccctggataaactcgcactgaattacagaacagccctctatcaaccagcaaaaagcaacaaacaatgaggaaaagccccgtattttcctcatttcattatgaacagctctcaggactggcaacacctataaagaatcctttaagaattaagtcttttagcttttgtgaatgcatttgctgtcatgccccaaccagtgggagttttgatgttaagactggatgtttcctggcagtgggcgtggggtggggggttggctacttgttagctatcagcccagcgtggaagcacagtctaacaagcttcattccccaaatcaaggcacaaaccacatccttcagggcccagcatgagctatgtggctgtgtccccctcagccttggaaagaggctctgggcagcagaaaataccatcaagtcttgatgaatttcctaaccctcctcccaccatgtaatggcaagatacagaaactactctaaatggacagaaatctttgtttttgggtgggaaaaatactcaacttgccaaagtcttgagttctgcaagggttaagagcagagagctggcacatcagtcttgggtctggagtgtggtgggaggcgagctcagaggaaggcacgtggctcctccttccccacgagcaggtcaggaagcgagaggacagagcacactgcagccctgaaatgcgctcatccgcccggacgcaccgggccctcgccactcagtgtgggtcgcagcccagtggcctgggagcccattagggaggcgggacctcaggctccaccccacaccggcgctcagaacctgccttctaacccgccctcaggtgacgcatgggcaggttacagtctaagactgcaacaccgcttcagactgctgcacgagagcgtgaggcacctgtcctgtggagaatcttctggttcctatatacctcctaggagaaagtgccgtctggttacccgcccaacaagaaggggattttgaaaaaggatgactttagagatggaaggccccactcttaccgagatgttccacatcatcttgatggccaaggggaaggccggggcccgtggggctggcgcctcctctcctcgtggaaggatctctgggcccttccctggaagaagctggcccaggctctctgcctcctccaggctctggggcaacacaggcatggcggcctcatagacggcggcactgcagcccttgccaatggactgcccgatcagatactcctccagccggaaaccctgccagcgtcgggtgtccagtgggtctgggagcagcttgtttttctgggtgaaaattgcctgtgaagaaaaccagcaggcaccatgagcttggcagccccgtgaggcttcagtgaagggatagagtggtacagcgaggccaaatctccactggcagatcgagcgctaataaaacaaccaaactgggtgctactgttggtcctgggctcaagccagcctctgttctctccttattaagagtggttctcaaactgccacttcatggcagtcaccgcgacagtccaaca

SEQ ID NO: 26098 - DNA, 1875 bp, Bovine  19866880367471
  misc_feature (1)..(1): n is a, c, g, or t
ncctgatccgggtatgatgggtgtccttattcaaaggggaaatttggaggcaggcacgtacacggggaggatgctgtttgaggatgggggtcatgctgccccaagccgaggaaccacccagatgccaggagaggggtctggaagagatccttccctcagccctgagaaggagtcagtgctgcagacaccttgatgttggacttatagcctgcggagctgtgggacaacacttttctgttatttaagctccttgtctatactgcctttaggacagcctgagttcttccctgactgtatccccagtctagagtgctgctgttcagttgctcatttgtgtctgactctgcaaccccgtgaactgcagcatgccaggcctccctgtccatcaccatctcctggagcttacccaaactcatgtccgttgagtcggtgatgccatccaaccatctcatcctctgtcgtccctttctcctcctgccctcaatctttcccagcatcagggtcttttccaatgagtctgctcttcacattgggggcttccctagtggctcagatggtagagagtctgcctgaagtgtgggagacctgggttcgatccctgggtcagaaagatcccctggagaaggaaatggcaactcattccagtattcttgcctggaaaatcccatgaatggtggagcctggcaggctacagtccatggggtcacaaagagtctgacacgactgagcgacttcactttctccacatcaggtggccaaagtattggttttccagtttcagcctcagtcctcccagtgaaatttgggattgatttcctttaggattgactggttgatctctttgcagtccaagagtctcaagagtcttctccagcactgcagctcaaaagcaccagttctagtccagaatgggctcagcatttagtaacacagttgcttgtggctctcgaatgaacgaaccttgctggtgacatgcagtgaggaggaccaggtcccggatgaccatgtagctggaggagaggaccttcaggacaggacagaggtgcagggcagaccatgggctggtggctccatcccttacaaagcccatctgcccgccttctgttctgctttccaaagaggtgagctcttaccgatcagattccatctgtctcttgcccagtgtgccaagctcatgggacttgagggcagctcggatgcccccaccttgggggcgtgggggaagagaactggccccggtctgctcaccgtctgtgaacagagtcccgaaacaggggccatgggctacacaggagttgcctcagagagtgcaccatccaagggcggagacagagccctgtttgggaaacaccctggtctgatggaggaaatgagatctgtgcccttggagagcctcccacctgatgtgggtgcacagccgctgccccaggggaagagattttcaaggacgatgggggagacatacacgcataggtgcactaataaagtagcccattagaagctgctcccgggaggcctggaaaggtgtcctgaaggaaatgggtttgcacagagttggggtgggcaggagggggttctccgtggtggggagggggaggcgtgggcagggcagggagggaccaggttgttacctctcctttgcagtcccaggtgagctggtctggtgtctggacacacgggtgaatacgtggcctgcacagcctttcagtgggcttcttggccatcacgaatcacccatttttaggagagaaaaaaagactgttggcaggggacaggaatagcttctaaagcctcccttcatccctgctgctcctcttttcccagatgtctccgcaggcctggggtctggaaggcagtgcatgcccacagcaccct

SEQ ID NO: 26099 - DNA, 1557 bp, Bovine  19866880407752
  misc_feature (1)..(1): n is a, c, g, or t
naaactctgctcatgttatgtggcagcctggatgggaggagagtttggaggagaatggatacatgctatatactgagtcccttcactgtccacctgacactgtcaccacactgttaatcagctatactccagtacaaaacaaaaggtttttttaaatgaaaatttactttggctaaagtgagagactggagtgggtgagcctagacccaaagagagtagtgaataacccatgaggctgtgggggtggagagaagtgagcagacatgagaactcattaaaaggtagagtttaagagatctggcttcgattggatggggaggtagtggggagggctgaacaaggaagacgcttgagttgctgatttgagcaatgtgatcacgaggattcttggatggcaagtgacagaaacagaacctgggcaaaagggcaaatgcattacccacccactcaccccgccctgaaaccaactgagaagaggccagaggtggagctgccttagaagcaactggaacccgggcctcaggtaccttcaggatgccctcttctgtcttggtaccaccctctacccaactgcaaagagctcaggactcttatcgttagagccctgttgtcatccagggaaggacattttccctaccagttgccattagaaaaatcccaaggaagagctcgactggtcaggcgtggccccaggtccgtctctgcacttggtgctgtggcctgaggcctgggcaaatatgactggcctaatcgggatgcttcccacccccacaggcagaacaggcagaatgataacaggctggttctaccagaaactaaaatggggggagggagggggcatccctgggcgttcagtggttaagaatctgccttgcaatgcaagggacgctggttcgatccctggcctgggaagatcccacatgcgcggactaactaagcccgtgctccacaactgccaagcctgcgctctagaacccgggaaagacacagctactgcagccctcgtgcctagagcctgtgctccgccacaagaggagccaccgaggggaagcccgtgcaccgcagtgaagagtagccccactctgcagccagagaaagcccacggaaccgcaacaaagacccagcccggccaaaaataaaatatgataaataaatagataaaaaaactaaaatgcaagaacagttatgcaaagagagaggtgctgttacctaaagaaacggggaaagaagaatggaacagacaggcaaaaggattagatggtgctgtcatttccggagcaagagagaagggcagggaaaaaccaagtggaggagatgacgcagaaagcaaacgggtttcgttctggctcgggggagtttaaggtgcccgaatagcattaggtggaaacccccacacctcaggaggaaattggagttcctctctgggaattccacatggcttcccgtgaactttggaagagctgcacctcctttccccaaagccccagggacttctggggccaaacgctctccgccttgattggtcctccctggcccgttagacacactgactcatca

SEQ ID NO: 26100 - DNA, 2331 bp, Bovine  19866880417661
  misc_feature (1)..(1): n is a, c, g, or t
ntttgaatgactgttaccatgacccagcttcagttcagttcagttgctcagtagtgtccgactctttgcaaccccatggactgcagcacgccaggcttttctgtccatcaccaactcccggagcttattcaaactcatgtccattgagtcggtgatgccatccaatgatctcatcctctgtcttccccttctcctcccaccttcaatcttgcccagcatcagtgtcttttctactgagtcagttcttcgaatcaggcggccaaagtattgcagtttcagcttcaacatcagtccttccagtgaatattcaggactgatttcccttaggatggactggttggatctccttgcagtccaagggactctcaagagtcttctccaacaccacagttcaaaagcatcaattctttggcgctcagctttcttcacagtccaactctcacatccatacatgactactggaaaaaccatagctctgactagatggacctttgttggcaaagtaatgtctctatttttaatattctgtctaagttgatcataactttttttccaaggagcaagcgtcttttaatttcatggctgcagtcaccataaaaagcctttattgagagcctactgtttgccagacacactggggcggtgtggtgttcctgttctttttggaggttggggagaagcatttgaagggtgtctcctctgcacacatttcctcacttcctggcaatccaggtgggtgtgtcttgacgggccacgccccctccctgtggtcctgccacctgtgggtgtggcctcaggccccatcggccctgaagacggccctaaacttgctttttcattggtgtgtgtgtgtgggtaaaactgacggtaacagcccccagctgtaacagctggggcctccttgtcccggcctcaagggcccaacctgctgctacacacagaggcagagccctctctctgagaacccctcatccgaggaaaccaactccagatcccaggaaaactgggcccctcacgtaggcagacttacactggacttggagataagtagcatcggtttccagccagcactcatgcttcccaacctgtcccttacctgtggaccaaaccaatgtcaccgactgtgctctgctactgtgactgatgaaaagaggagttgattcccaaactagctgctggtgggttttcttccgcttctcagatgtttgagaaagccaggttcctcctcctttcttcctgctttcggaaagtcctctggaagtttcctctaaatcctgacttgccccaggttttgtccctacccttatttggaggggtctcctgagatctgagtgcagcctaccccaggggaccagccacccagctcacctgcctagctggaaccttcgtgacactctggcaacttccactgtggggtccaaatactgcctcaagatatttgcatattggaatgtaggtggtccccagacacaaatgcattcttcgcccttatggtgccctggggagggaaagagaaggcagccgctaccccaggaagtaggttgtgtgttcactgctatggcatttggaagatctttttttaccaccccccccccaccaacctagcagggactagagaaaacaaaaaaatgggcacatggctcagctgtgccacactctgcggagccagcgtaaaaataaccagggcaggggcgggtgcagcactttgcagctggatagtctgatctacagagatccaccccaaggtcagaaacttggcagcatctcccggccaggcctccagcccccacaatggagctccctgacccacgtgttcacccagcccccagcctctccacagcactgccttccaggtgacctgacaaagtgggatttctcctgttcatgctgcaaatctccctggctaggagccagctgtctggagcctacagccgcttcccaaggccaagcgcctcgtctcactgcggctgaacacaggtgcactgcagtccagtcactaatcgcccagacggcttcagctcaagtggcatggccggtgcttgtccccccgaccccagagcctcaagtgcctaccgcgcaccaccccacccctgcctgctcacctgtaatatccccacacttctcaatcttggaccacgtctcacctttctgcctggtagccagttctgtagacactgtggaatcctggacaccagcgtctaacgtccaccaacagttagtgcatcccaccctggagctgtatgcctgtgcctgttcccagcagaatggcttctatgtatattacacagtggctactgttctcttaaaggcttttagctcataaaaactgtt

SEQ ID NO: 26101 - DNA, 2191 bp, Bovine  19866880424609
  misc_feature (1)..(1): n is a, c, g, or t
ncagcttcagctctgccggaggtcacccatgctctttgtgtttcctcttttctggcaatgcggagttttattatttctgttttcaatatctttaaaaaatgtttttgattgcatgtttggcatagaagatttggagaacttgaacaactagaagcaatttaaaatcatttgtgaatccattcatcaccattaattttttcagtgaaattgacatataacattgtgtaaatttaagtgtacaatatattgatgtgatacatttatatatcatgaccttgtgttagtgcagcaataactagaatttctatcacatcacataattacaatttttctttgtggctggaataattaagatctagtctctaggcaagtttggtgattatgacacaacattgttgtctatattcactgtactgtctaggacttatttactacttgttgcaagttcgtacacttatacaatacttatcctagccccccacccccgaccccactttctgtaaccaccattttactctctattttaacatgtctgtacacacacacacacacacacacacacacaaatggaatcttctttacgcactcatccattgatgggtgcttaagttgtttccatcattaacattttcgtgtcaatgttatcctgattctattactctctgtatatatattctttttcctgaccaaattaggtaaagattacaggtagtacattgcagtctgtcttttcatttactaaaataacttaaacatatttctatgttgttaagtcatctcttgcagaaacattttgaaaggtagccttgtatgccattcatttaaagaatcccctattgttgagaatatgggttatttccaatatcatactattctagaccacacagcaggacagtgaaaaaactctttgagatgaaatctcgtccctgcctagaatcgtttctatagggtgtactcctgaagtgggcttgctgagtcaaagcacacctacaatttgaaggcaattgacatgtgttgacaacttaccctgcagaaggtctgccccagtttaaaatgggactcctaatgaggcaaatgacgtggacccagcccaactagggtggaggtgctgatggcaagacatgcttgacattacaaatgggtagtctgctgcaaacgctctaccagtaacccctaaggtttcccggagagtccacgagagcagaaactgagcttctttggtgcctgtcagatggctgttcaagagcatagagcacaggctgacctctttgctgccagctaactggtctacccaaaaaaagtcaggtcatggctgggtgatctccctctccctcttccctgtctctttaaaatctaattttcctttattcctagactcagtcattaactgatcatctcatacatgaaaaagcaatctgcatgcaaaatactaagcagcaaatacatgaagtctcttctggcatagtcttgggcatgcctcccccatgtgtgctctgtagccatatgctctttccctttatgctctgaccactgtgggaccttcctgtgcactcttctaggcctgtggttacccttctgagccccagcttccccctgagttggtctcaatcaggcagaagcaaaagtggccaggacttctgctgattccagaggtctttgccctagtgggagagaagacttgatagatgctgcaaaaagtcttcaaaatctgctgtcccagacattcccataggtcccagggcacagttcaaagggaacacattcaaactctagcttcttctcctaccatcttgggaccctgggaaagtcatttgacctcaagagccttgctttcctcatgtgcagaacgtggacaatgtggaggcaaccgtccctctctcctctgatggtcgtgggctttagagaccacatgcacacaacacattgcgtgcaacacaccctcagagagaatgccgttatggtgaccgcacacagattatgtagcatcacatggagacaaagaggccggcgttccagatgcttcccgggagaaagctgctcagctccgtgtcttccattttctcacgtgtgaaacagggtggtgagaatgttacggaaccaaacttgagtccacttgcccagaaaagccagtctattgacttcaagtcatgggtgaagtaaagggcattggttattgcagggcaccaagcaa

SEQ ID NO: 26102 - DNA, 1991 bp, Bovine  19866880450241
  misc_feature (1)..(1): n is a, c, g, or t
ntggctgccaatctcttatctctgtcctcagcaatggtaaggcaaataccctttccacagggaagagagatccacggtttgttgcctttgccaataacgaaaatgtttgagagccatgtggcaaagctgttgccgttcacatctttcacatgaactacatcaaaagaacctggatgtctctcccggtttgtaatcacaccaattcttcccaggctagcacctccagtcaccatgcacaggttaccagtgtcaaatttgatgaaatcagtaatcttgccagtctccaagtcaatctgaatggtatcattcaccttgatgagtggatcagggtaacggatggtacaagcatcatgggttaccagatgagggattccttttgtccccacaaatatctttcttactttgcacaatttatacttggcctcctcaggtgtaatacgatgaacagcaaagcgacccttggtgtcatagatcaaacgaaaattctctccagtcttatcaatgctgatgacatccataaaaccagcagggtaggttatatctgtgcagactttgccatcgatcttaatgaaacgctgcatgccaatcttctttacttcatctccagttagggcatacttaagtctattccttaggaaagtgattagggggagacactcccttagcttgtgggggccggtagatggacgaggggcaaacacaccagtcagtttatccagcatccaatgttttggagctgctacgcatttcaggggcttcttgggaccccgagccatggctgcgctaggcacgaaaagaagtagggttttgctttggatctgtagatcactctgggtaatgtgttagaagaacagatccagtggagtgtgtgtgtgtgtgtgtgtgtgtgtaaaagaattgactcattcaattatagaagctggtgagtcccaagatctagagggtgagtttgggtagctggagacccagaagagcctgtggtttagctctagtcccaggttagaaggcctaagaaccaaaccagtagagctgatattttcagtttgggtctaaaggcaggaaaagaagctgatgtcccaggtccaaaggctttcacgcaggaggaattctcttacatgaggaaaggttgcctttttgttttattcagcctatcagctgattaggtaaagcccacccacgttgtcggggggaaatctgttttacccagttgactgatttaaatgttaatctcatgaaaaagcaccctacagaaacacccagaataatgtttgactaaatatctaggcactctgtggaccagtcaagctgacacataaaattaagcacctcagatagtatgggctgcttgacaatatttagtattccagtctgtgcagacagatgcctttccatttatttgtctttttcagtttctttcagcaatgttttgtagtttgcagtgtacaagttttttgactccttgcttgagtttattcctcagtattttatccttttttgctgctaatgtcaatggaattgttttcttaatttccttttcaaattgttctttgttagtgtatagtaatacaactgaattttgcttttggattttgtgtcctacaactttgttgaatttgtttattagttctaccagttgtgtgcatgtgtgtgtgtgggcgcatgtaatcttttgagttttgcatgtacaaaatcacgctctcttcaatagagctaattttacttccttctgatttggatgccttttatttcttttgctttcctaacagctctggctatgacttccagttgttgaatactaacataatggtgagagcaggcttccttgccttgttccttatcttagaagaagagatttcagtttttcaccactgagtatgatgttagttgtggcctttattatgttgaggtaatttctttctactcctagttcttttactgttttatctcatggagtgatgaattttttatgcatctatagagatgttcatgtg

SEQ ID NO: 26103 - DNA, 3678 bp, Bovine  19866880490421
  misc_feature (1)..(1): n is a, c, g, or t
ntggactgggagtcaggaagcccacctctggcaggagcaaagtcatcaccaagcaaagtgactctgacgagttccctgtcctggccgggactcggatgcccacctgtcaaatgcctatctgtgtgcatgtggggagggttgggtgagatgatccccaagctggataaaactgctggctgcctcctatagctaagtgactgcatgaccagttcccaggagagggtgaaaaaacagtccaaagtatattatcaaaagctctgatttggggattccccaggtgacccaggggttaatattctgcctttcaatgcaggggacacaggtttcatccctggttggtgaactatggtcccaactgccccaaagtgtggccaaaaaataataataattttaaagccctgtttctattctaatttcctcaactagagatcaggatagtattagtccaaaggaagccaacgaccctcatgagttggtctctctcagaaaacaactacctcccttgtggtgctaggaagctttggtcctcttcccatcaacccagccctaaaagcagtccatcctttgagtcagtaacccctcttccagaaatctatgctcagaaaatcacttaaagtatagggaaaaaaagcttgaacacaaagaaatgcatcactctgatgcttgctacagagaaaacttagagtctattcaaatgtccaaatgtaagagaataacttccctggaggcttagatggtaaagaatctgcctgcaatgcaggagacgtgggttcaatctctgagttgggaagatcccctggaggaaggcatggcaacccactcccgtattcttgcctggagaattccatggacagaggagcctggcgggctacagtccatggggttgcaaagagtcagacatgactgagcaactaacacacaacagcagaagggaatggtgaagaaaattagggtacgtatccccaaccggaatattgtgactatcattggcaattacccttactgagagttttcactcacaggaaattgctttctctctaatgttaagcagaaaaaataagatgccagcagagtgtgttgtatgattttttttaagggcatagaaaaaaaaaattggtttagggtaaattttatttcttgaactctactttccaaatctctacagctagcatgcattattatgttctagaaagattcataaatcatgtttaaatgggccttgaccgagagacaacagggtttgacagctcttggttcacaccctaactctgacaccctccagccgtgacttccttgacctctatgcacggggatgacacccagcgtgaagctgggatgagacagcaccccctagggcacctagcgcgggactggacacgcagtgagtgcacaggaaaatagctgggtgccgtgtggccgtcgccccagacccaggctggctgaggcctcgcagccgttctgaatcttggcctctgccgctcaggctgctgtctggatttgctcatgctctcctggctccatctctggccccatttggagattctgcccctgccccctggctcaaggccattccaagatgccagccaccccagatcctgctcaaggagctgctctaagggttcctccaggatgcccagctgagtccaacactcccccagcctcctgctgcccgccagaccactccccagccgtctccagcctggtgggctggggtctgccgcctggccaaggattccccaacccagctgctccagagaaattctccagccctggggactcttctcatagcctttggcgctttctccggggcctctggggaagatgcagtcgggcctgagtcaccccgagcccggggcagataagcatcttccgatgaaccagccgggagcagcaccccacccaccatgcctggtgacagactgttttacctctgataattccaccgctttttggcacctatgaggcagggagagacggagcagagcaggcaagagaacagtgaatattttgtgggagccggaggcgactgaagatctctgctgatggcagacaggagcaggctggggagacgtgtcggcgctgcggggtggggaagaaggggtccccgcgggacatgagcctgaaacccatcctccccacctgcctttcccccctttcactccttcttttctccttctgttttcttccctcccgtctttccttctccttttccttcccttccccttccctcttttcctccttctttctttccttcatcccttcttttgctcattcactcattcctatttttattttttttaaactttttattttacattggagcatagctgattatgttgtgatggtttcaggtggacagcaaagggactcagccgcacatacacgtgtgcccactctccctaaactcccctcccatccaggctgccacatcacattgagcagagctccctggactcatccctactttcactcctcttccctctgtctgttaaaaggacattccttctgctcctgctccgtgctgagtcctgttgctgggcgctggggacacagatcaaccaaacagagcccaggtcctgaaggacacagagcccaacaaccccaccactccagagcaccggggagggcggcagcagaaaagcctggaccaatgtatctggaaaggcttccctgaggaggtgcccgtcgtggagagccatgaggcctctgccagcgggcaagccagggcaaggcacccgggcagagaacagcctgtgcaaaggcacagaggaggaactgcccgggcgtggccagacgtgagagtgtggcctcatggcgaggaaatgatgccgctcgagttacttcctgtgggctgggcatgtcggtaagcactgccccttgtgcaatggggaaactgaggctcagagagtcgtgggacttgcttaacatcacacagccagtgaatggtagagctgggacttgaattcagacctgggtggttcagaaggccatgactgtgcctcttgaccatgacaaacctcagctcagtagttctcaaaggtgccagtgacagccatcgggtgactggtgaagcccgcttctgcagccttggggcacacatggtacttttctgctgtccacagaggtaaggagcctgtgccctgcaggcaggagccctcctgccaccttcaaccactggggagaaagcagatctccccatttggaacatggagcagggtctggctggaaggtaagcccaaaatggctttgaagggcagtgccctatcctaagcactttcacccccttcaggctgggcatcctccctgacacctccaggagtgaggagcaggaggaggcagcagctgcttcccctcaaccctgccctgagcctcccggaatcacagagttgccaaaggtgagaactaggaacaggccataaagaaggctaagcactgaagaattgatgctttcggactgtggtgttggggaagactcttgagagtcccttggaaagcaaagaggtcaaagcagtccatcctaaaggattcaaccctgaatatgctgaagctgaagctccaatactttggccaccagatgtgaagagctgactcattggaaaagactctgatgctgggaaagattgaaggcaggagaagaaggggatgacagaggatgagatggttggaggcatcatcaat

SEQ ID NO: 26104 - DNA, 2161 bp, Bovine  19866880542132
  misc_feature (1)..(1): n is a, c, g, or t
ngtggactccaacgagctactgcatatgcaactgtctccaaaaaagtgttctcatgtgtcccttcttctcccacattttatttatttatttgtggccacaccacaaggtgtgtgggatcctagttctctgagcacagatcgaacctgggccctcagcagtgaaagcacatgtcctaaccgctggaccaccagggagtcctcccagtcccacactttaatcatatacttacttctcgctgacttactccaagctgccttcatcacacaaccctgagtgattcaactcaagcctcttagttctgcaccccagtattcccattctgtgcatattactatcactgcctaatttgagggtgtctggccttcctcgctactaaaaccacagctaaaacaaacacgcaacattcctatgtattcctgaagtcctactcagctcaaagtctgctctgtcttaactccaaggcccttgtgtgtactccactctgctcacagcctgagcctttccacactcccaagttcccacttcgtctttcacactcaatctggctgctggggagtttgggagccttctcggcattaaaaaaaagaaaaaaaaaatgcctgcccaactccttgttaatttaatctattttctgatcaactgtgaagaatgtggggttttttccccttcaattttaaagcctttcgcttgtaattaagcagctctgcagctgaactcagggcggcacaggaaggtcagaactgcccaactgttctgccaaagagaagctcaactgggaagctgactccccctctctgcccaccctcccccactcaaggaagggctattaattcgccacagcttctacagaattatcacagacttggcttctaactcccacacatgcctggggaaggtttaactgtcagtaagtttggtaacttagaaacctcttccttaacaactttgatggggaaagtcatgtgttctcgcaggctctctgctggattatttttaacagtaaaacttgactgtgtgcatgcactttctataccttttggtgctatataattatccatgttcagggggtgtcatagtcaagacaccctggtcataagataacatgactttgagctatctcagagggaaaaaaatcctcaattatgactaattcctctaagcccactcatggttatttagagattaacacctccttcaggtaaaagcgttccatcgaacctgctttcataaccctctgcctcctcgcgagtgcagggaccatctgctacgtggagggaacaccagctctccccagcttcccccgcagggagaggggaggtgggggagacaggtgtctggggacctgggccagcggtgcctttagagtctcaccttgggtctcacactctacctgggaggcttctgccacagccgtcgtcaaccctgctcagctcagctcaccacctctgggcctggcacattctcaaccacaaagtgatttttgacaggatctaggcgtaggcttccgtcaagctgccagctgaataggcaagtggcctgtttacttaaaacataatagctgtacccagaggcctgctaggagtcagaaaacaaacattgataactgttcccaaggaaccgccaaaggacaggtgcccatttcttaggattaattaccaaatcagctggaaagaaggagaattttgactggagaagctaaagtcatattcctgcttcccaaaggttccgacctccccctagcaggtcaaaccaccctatatcactcacaacccaaatctaagcctacgataaatgcaataaaataataagcacccacataccatctgctggtatataccaagaatacatacatttgttttgaattggtcttctaaaaatgtttatcagttaatactctcccctgccaattcccacccctccttgtgaagatttcaggatgaaaacactcagaagaatcaggagaggacagttggcctgaaaatgagaacactttggtaccattcccagttctgcccgggactaatgattagaatacactgtcctgtgcagagagccacgttcaaaaggggggagtggagaaacaggaccacagggccaccaagtgatcaaaggtttggaaaaggaattgggggatgattccaacagcagtgaggagcaggg

SEQ ID NO: 26105 - DNA, 1651 bp, Bovine  19866880560181
  misc_feature (1)..(1): n is a, c, g, or t
nttggaggataattgttttataatattgtgttggtttctgccacacatcagcatgaatcagccataagtacacatgtgtcctgtgatgactggaggggtgggatggagcgggaagcaggactcggggccttggggtttgaagaagcagagtcccatggacagaaagatccatatcaccctttacagaggccactctggcagctgcttggatggtgttttaggggcagggggaacctggaggggcctggtgagtggtcatgaagggagaacctgcttgccccgcccctagacccttcccccagtacccaccgctttgccccaaacacacacaccccctgtcggctccctggccttggtttttcctaagatctcaatccaccctcggaacagacagcctgggagattcagaaggtccaagaggcaagtggtagctaggggtgaggccaagccccttcctcttccaggagtgctttaaaggctccaggcgggagtcggggctgtggccagtggtcctggggggccttccccagagctcaagatgaagggggacaggctagagtctcgccctcgcatctggaaagatgacgcaggtgattcttgtaggtgttcaggttccgctgcaggcagaaggccaacgtcttgtcacaggcgcacagctgctgctcacaccagctccccttggtggctgcgagggagtgaaggagggcacttaagcggtctgccccttcccgtggtagggtgggtcgtcgcccctggaggggagctgctgaaggcagctcagccctcatccaaccctttggtgcccttcccgggtccttggactctggctctgtgaccttgggcatggggtgtgacctccctttgtgccattggtccttcgttcattcatccgttcagtaagcaactgagcacctgtccttcgggagtcttaggagggagaggagaacagaatggacacctgagtttacactcccctggggcggggcgggggtgggcaaatgtcagagaagcgtgtggtcgttgttgttcagtggctcagtcctgtctgactctttgtgaccccacggatgccagcgtgccaggcctccctgcccttcacagaagtgagtgcaactgtgcttacccggaagtaaggaacaaggcaggggctctgagctggtgactgatgggactgactgagtgtcaaaagccatttgagctgagatcagaagagtgagctgttgctcctactctggaaagccagggtggaggagacggattgttcctggcagaaggaacatcatgtgccaagaccttgaggaaagacggaccatggtgcttcagtttcaccatctgtcaaatggggataagaaagccggacctactgcttagcgtggggacctctgctcagtattttgtaataatctataagggataagaatctgaaaaagaatatgtatacacacacacacacatattcagattaaaataagaaggcaaagcctttagcacatagtaagtggtcaataaatgttggccatttcagttgttgccactaagttctcagttgacagggacagctggtgagcccattcagcttctagccccgggacttgctgccttttctccgtgcgtggaccctgcggcttggtgacctgggttacagctcagg

SEQ ID NO: 26106 - DNA, 1561 bp, Bovine  19866880562937
  misc_feature (1)..(1): n is a, c, g, or t
ngctttcaaatgagggtacaggttcatgtacagactatttcatgaatttctgcactcattccatcatcaaacagatattgagtttctaacatatgcccggcctttgtccaggaagcagggggacaggtctgagtgagtggaccccacaattgcatggcttcgggcatcattctctgtggctttatgagagtgagcacccaccccctccctggggctccccagagggttcagcggtaaagccatgtctctcccccagtgcaggagacatgggtttgatccctgggtctagaagatcccctggaggaggaaatggcaactcacttcagtattcttgcctggggaattcaagggacagaggagcctggaggcgggctggctacagtccatggcgtcgctaaagagtcagacacaaccgagcatgcatgcaccccacccccacccccaataagtgctccccaatctcctggagctcaaactccaattgaggggagagttgatccataagtaaacaaataactgagcaagatgagatggtggcaggttgagccagattctaggaaaggaaaaggatgatgcgtcagtgagtggaggtgttgttgtgagcagtaaactcagcaaaagagaaagatctttgcaaactaaaaactccagtggttacctggttcaccctctgccttgggcagagggcagaatcacaggctcagagatggaggtgacagaggggcctcgggctggaactctggctctgccacccacggccgggcccctctctgcccaacagatgcgggcacacatgggtggagggggcatcaccacttaaaatccctcgcgaattccaagtgcttatgcaagcccactcaagacaggactaacggcctccccgattgcctgagggcagccgtcaccactccgcaagttggccccagggcttgggttccaggcctttctctgcactgctctcccactgacatttcgagacatggacagaccaggctgtttttctcctttcccttcgctgctcacaccaaccacatccaggagcagccgctggttgctaggcaacctggaactaggcttgggtgccagatttcagaactgggaggcttgggaggtgattaacccttgcagggcagttctttgaactgcagtgtaactgaggattgtggtgggggcagggggagagctttcatcctataaggggttaatgacattagttcaaggggagaccaatgcagaaatctcaacggtaataaagaaaatcccagtgcttaactacgatgtaaaggggaaaaggaaactagggttaaaaaaataaaaagaaatctcaacttctgaaaggaaaggtattaattacgcacccgctctgggtcagacctctgagttggggagttttggggagtgctcagtcttttgcaaccccatggactgtagcctgccaggttcctctgcccatagaattttccaggcaggaatactggagcaggttgccattcccttctgcaggggatcttccagacccagggagggggaagtctcctgcatctcctgccctggcaggcag

SEQ ID NO: 26107 - DNA, 1040 bp, Bovine  19866880666930
  misc_feature (1)..(1): n is a, c, g, or t
nggtatttctgtgatgatggatatggaccaggagcaggtaaagcacttaaattctttctcaagataactaagagcctgggaaagcatgtaactttggcttcaaacagcactaacagaaagatatgccaatcacaagtaaaacagacacaaagctggcttaaataaaataatggaggttttctgagaaatctcgatttagtcctaatttaaccctactcacatgagattccacactacgttctttcccctcgatgcggcaagttccttgagagcagggcacatttcaaaaccattttctcacgtcttgagggcttggcacaatgccttgtccaaactagttttgtataaacatgttttaaactagttgaaaataaaattatactatatgtccacaaatggaacactgagccttgtgaatgaaaaaaaaaaaggaagcaaagagaatgccaagggtgttcttcctattagtggatttttaatcaacccagaggggaaagaaagagaaacggcagccaaaagttccatttcaacatctacggttttcaacttcccaaattaattaggagatggaagtatattctgaacatgccagagaattacacttacagcagttacaaattaccaactcactttagcccctttgaagtagtaaagaaacactgcataggaagggcagaatcagtcatctatttgcacagggagccaaccccgtcctcagctcttccagtgagtaactggatgcatttgcaagaaatctggccagggaaagtggggtgacctgaggccaggaagcagcaaagcttgacctctttgttaataaaaacaaactacaaacagaaatgtgagttgctaagagctcccatttataacgcgcttaaaagcatgccaagcgctttcacttccatcatctcatttgatttcctcactataatcttgtgattaagtagcacttcctgccttggtaaaagccgcaaccagtatgctcagaactacagccacgtggggactcttcgtcccatttcatccctgaggaacccagg

SEQ ID NO: 26108 - DNA, 817 bp, Bovine  19866880695967
  misc_feature (1)..(1): n is a, c, g, or t
ntgtttttaagaacccatcaaggttaaaatatttcctgttttgaaactgaatccaatttatgtggggccaccctgcagacaacacaataaatatgaaggtggcccacgaagcatcacaacaccccataagcggctccctgattaacccatggcacactggtccagcccacatgcaggctacattacagaacaccagctggtttattcccaagcacccaaaggttctagcacgctacaaatgccacactgccaacaatgaatacatttatatagcgagatgctatctcgggctattcaatattcttatcagaccagaatggaaagtcagaagagtgcagagttgattattttttcattacctaacttcatatttcaccaagagtactcaagaaatatcaacaaacaaaataatccattgatatctaccaacccgaacaaacacaggaagcaccacccactgcacggtgataaagcctgtcttcaccatatccaaaactgacaatgctgctgctgctaagtcgcttcagtcgtgtccgactgtgtgtgaccccacagacggcagccaccaggctccccggtccctgggactctccaggcaagaacattggagtgggctgccatttccttctccattgcatgaaagtgaaaagtgaaagtgaagtcactcagtcgtgtctgactcttagcgaccccatggactgcagcgcaccaggctcctccgtccatgggattttccaggcaggagtactggagtgggtaatactaaagaggactaaacagcccactgcatggcacccatgggaagaacttgtgaacg

SEQ ID NO: 26109 - DNA, 2071 bp, Bovine  19866880730775
  misc_feature (1)..(1): n is a, c, g, or t
ntctaagtccagctttgtaggtccagctttttgaaaggacacggggtaaacagatgggatagtaggagggagagaatggatgatgggaaggaaaaacgaccccaggaagagggatatggatccaggagtgtggaggaaagaagaaaaagggaagggagaggggaggagatcagttagcatccccattgtgggggtaggtaaacgggagtctggttgcaggagtgtgcactgtggaagaggcagtattaataacagcctggctattgtttcttccttcatctgggggctcagctaggcaaagaggcaagaaagatgaagctgaagaccgtatagaattgccttagccttaatcgtggaagaggagcaggaaaacgttttttggattacattatgttgcaccttattaatcaagactgtttatgacctggccttaatttacctttcccagttttcctacacggagaaggcgatggcaccccactccagtactcttgcctggaaaatcccatggatggaggagcctggtgggctgcagtccatggggtcgcgaagagtcggacacgactgagcgacttcactttcgtttctcactttcatgcattggagaaggaaatggcaacccactccagtgttcttgcctggagaatcccagggatgggggagcctggagggctgccgtctctggggtcgcacagagtcggacacgactgaagtgacttagcagcagcagcagcagttttcttacatatgtgcagtgttttaggcagattggatttagagcttgattgcaatttattcgccaccacctaacacactgcctggtacattaaaggcattcactgcttttttgttgaataaatgatgataagaatatcatagaggaaggctacctaggcccttagcagggcccctcaaagaggtgttttcttagtggagtcgctacagttcaaaggttgctttgctgggtcttgcttttagcctaatagcttgatttttgtcaaatatagtttattaaatattctgggcactagccactcataagcacaagacattggtatataaaccgaagtactagttgaatttggtgggtctgagctggtgtctgactcttccttacaaatgattggattgcttgtgtctgctatactggggatggtattcccactgtcagtgtgtccaggaaactgacatactcaacagaaggttgcttatgagcaggaattgcggcacagggagttgtaagatcttgagggagttttcataatgctgtgggaaacttggggagtactgcttctgctcccctgcccctgaagagagcgtatttctttagttaattcggcaagcgttggttgaggaacgtgctgggaatacattgcctagtaagagagagacaggacagcacgtctcaaacattctggtcttaggatccctttgccctctttggaatgaatgaggactccaaagagctttggcttatgtggattacggttatcagtgtttactatatgagaaagtaaaatagagtaaaagcatggtatgcaaacacattatattagctttcagagtgatagcatcagatattgtatatcaagtagcctctagaaaactccagtgtacacttgtgagagaagtagagtgaaaaggataactgacattggttgcggagtcagaactctgaaaaggcctcagagacaccctcccttcccaaactgggccgtactctaagaatgaatggtataaatacttaaaatacaagttgacatattctttacagtgactgattacagcatactatcgagaagaaagcggccagcactccctgaagtggccagggaggccgcgtccattcagcacacgttcatcgcaacctgccctgcgctagatgtctctcagagaaggccatgctcaggctgggtcatgaaggccaatagaaatacgccaggagagcgttctggactgaggagtaatatgtgtagaggcacaggagtgctttatttttgagagatctgcaaagtgttgagtatgacaaggccggaggccagcttgactgcagtgctcacgtctctccctt

SEQ ID NO: 26110 - DNA, 2162 bp, Bovine  19866880734675
  misc_feature (1)..(1): n is a, c, g, or t
ntgcattgggcactgcgctaaattattcaaatgtgcaaagctttcattctcccaacaactgtataaaatctagaactcaccccacccctgtttttgcagatggaaaatcaaggcaccaaaagctttcagaaacctgctccaggttataaagccatcatcaagtggcagctctgggaccggcagtcaggtccatcctgtgcccaagcccggtctgaccgcctgtgttaaattagagacggcatctgtctggatgatcttccggctgcccagactgcaaacctggagggtggctggtgtctgccaggagccgctctgtattgtgagtggcagccctctgccggggctggactagacccgagatgagaagaccccaacttggggctttggagctcagagcggaccccagggacgggctgcagtctcttccactggcctcatctcttgggccacagttttcctccccaagaatagccatccctctgagcagggcatctgaggatagctccccttcagcctccccaggcagaagcctggcagaaggaacgctcctccacccacttggtttcctatcccgtgatggctcttccgtctggctagttcattcacatatttattcaacaagttaatattgagcctcactctctgctctgtggtgatcaaggtattgaagttcagttcagttcagtcgctcagtcgtgtctgactctttgagaccccatggactgcagcaaggcaggcctccctgtccatcaccaactcccggagttcacccaaactcatgtccattgagtcggtgatgccatccagccatctcatcctctggcatccccttctcctcctgcccccaatacctcccagcatcagagtcttttccaatgagtcaacccttcgcatgaggtggccaaagtactggaatttcagctttagcatcattccttccaaagaaatcccagggctgatctccttcagaatggactggttggatctccttgcagtccaagggactctcaagagtcttctccaacaccacagttcaaaagcatcaattcttcagggttcaactttctttacagtccaactctcacatccatacatgaccactggaaaaaccatagccttgactagacggacctttgttggcaaagtaacgtctctgcttttcaatatgctgtctgggttggtcataactttcctgccaaggagtactgaagggggcggagaaacgaatacaaatctaggaagcagtatgagacgtgagacgcttccatacaaacaggagcccgaggtgttacctgatgaggacgacgagaacaacacaggccccgttccgcgtgaggccgataggagaggtggccctggatctggcaggagtggagcatggctgcgcattaggaaaagttccgaggaggtgggattgggcctgtgagagggtaggactgaacacatgcggccaaaggaaaggacattcgaggtggtgagaatggcagggcccgcgcctggacgttggtgcacacggcgaggtctggggacctgggagcaagtctgtataagaaggggaagaacagaagtcaggacagcatgggtggctggagctgtgagctgggcccagtcactccagtcatggcccagcccctcccgagtggggtcaggagagcaggaggtaaggccccagaggtcccgggaagaggctgggccctctgggacatgctgcctgagttgtccctggctgcgtgttgtttctggaaagccctctgtagccatgttcacatcccagcatcacttctcaggcccaggtggttaagactccatgcttccaatgcagcagacacaggttccatccctggttgaggaactaagatcccgcatgctgtgtggtatggccaacctccacccccaccccccaaaaaagaaaaatctgtagggttccatgaacttgggcaaactctgggagatggtgagagacagggaagcctgacgtgctacagtccacggggcagcaaagagtcggacgtgatgtggcgacgtaagctcccattattcaactggaaccccataaaccccaaagggaaaacagagaacacgttccagttacagcaggttggggcgccctccccattccatctccccatcactccccacagcagcttctggggcacacctgg

SEQ ID NO: 26111 - DNA, 795 bp, Bovine  19866880775386
  misc_feature (1)..(1): n is a, c, g, or t
nttatactgagaattaaatgagacaatgtctataagtgcctggtccagagattggagcagatcaggtgctcactattgatgacttatgaactctacgcttcctccaaggaccaggtcaatgctacctcctccatgaaatactctctctccctccctagtcaaggatcatgtcctgcttaccatgtgttcttactgtatgttgtttgaaatgataactcatctagttttccttgtcacccactaggctgaaggccagagacaaattcgctttaacctttgtgtccctgggttgtgggtgatagtaaatgttcactaaacattctttgaacacaccaatgaaaagaatagtcctagccatggtcttgcctcttgtgagtgtggaaagttctgtccacttcttctcaccctctaggacaggctcatctgtgaaccaggaactgccttgagggatttgacttaatctgcaggcaggcaggactcttgaatttaagcaatcattctcaagtttccagagactgatccatgtttttgtttctctgcttccccagtgacttgcaagatgattttatctcaccctgtggggcttgcagacaggtcatgagagaggtaagcaacttccctttctttctggaatggatctcccctcctcttccctgctcttccaggccctgggagccaagccaggccaagtgaagagacacagtgactgtcctattagctgggttggctgactcctaaggccttcccaagcttgcatgaatcactggaaattattctttcattcagcaaatactt

SEQ ID NO: 26112 - DNA, 2122 bp, Bovine  19866880842172
  misc_feature (1)..(1): n is a, c, g, or t
ntgtatgctacctttctcctgcgttgttttgtttttttttaaacatagactcttctccttttctccatctctgtgcccctggcattgctgtgtgagtgttttaaggaaacgagcagctgtcctgtaacttctaacgtgtgaggccctagctcttacttcctaattccaggatggtggatagaaacagaacagctacttagggagcaaaggagtcaggagaaaggccatcatcctaacaggaagtaaggtgctcgggatgctaggcgcgtgatgactggccctgttgtgctctccaccagctacccgtgtaccctgcgccagtaccttcgcgggaacaccccgagcccccggctggccactgtgatgactctgcaactcttggaaggggtggatcacctggtccagcagggcgtcgcgcacagagacttgaagtccgacaacatcctggtggaactggatgcaggtagctgcccgccccgccccgagctgtccagggtggcctgcacttcagggcttggggacatttggggcgtttgggtcttttctggtttctatgttctaagttgtgtcttagctctgcccacagagataagcactctctccttcaagatggatggttttgttctttggttctggtctttgtattgtaagaatattttcagcaagtactgcttgaatgtcagcccagctgcctctggcaatgagctccccatcattggaagcattcaagcaaagctgggtggctacttgcctgggggttctgtaaaggagagtcattgttttgttcttgttgtttagttgctaactcatgtctgactctctgcaaccccttggactgtagcccaccaggctcctctgtccatgggatttcccaggcaagaatactggagtgggttgccttttccttcttcaggggatcttcttgacccagggatcgaacttctgttccctgcaatacaggtggattctgtcatatggtcagttttgaactaaaaagatttaagataattcaatatgcgattaaattctagaggaactggcttttaaaggaagtctgcatgaatccttttccagataactaattgataatgtgctgattttagccagttcttggctaagggaccttgatttcctggaggcatgtctgtatttgtgttgctggtcccactcagctctctggtgagtgggcagctgtccaggccttgctggcctgtgttcctgggtcagcatgtcctgagagtggcttttgttgttgttcagtcactcaggtcatgtccgactctttgtgaccccatggactgcagcatgccaggcctccctgtccatcaccaactcctggagcttactcagactcatgtccatcgagtcggtgatgccatccaaaccatctcatcctctgtcgtccccttctcctcctaccctcaatctttcccagcatcagggtcttttcgaatgagtcagttcttcgcatcaggtggccaaagtattggagtttcagcttcaacatcagtcctaccaatgaacaccctgactgatctcctttaggatggactggttggatctccttgtagcccaagggactctcaagagtcttctcccaacaccatagctcaaaagcatcaattctttggcactcacctttctttatggtccaactctcacatccatacatgaccactggaaaaaccatagccttgactagacagacctttgttgacaaagtaatgtctctgctttttaatatgctgtctaggttgatcataactctccttccaaggagcaagcgtcttttaatttcatggctgcggtcaccatctacagtgatcttggagcccagaaaaataaagtcagccactgtttccactgttttcccatttatttgccatgaagtgatgggaccggatgccatgatcttcgttttctgaatgttgagctttaagccaactttttcactctcctctttcactttccttaagaagctctttagttcttcactttctgccataagggtgatgtcatctgcatatctgaggttatgatatttttcccagccatcttgattccagcttgtgcttcctccagccttacaaggcatccctaataggcatcaaacctgggtctc

SEQ ID NO: 26113 - DNA, 766 bp, Bovine  19866880863458
  misc_feature (1)..(1): n is a, c, g, or t
nagaaaagagctacttttcattcaccagcatccccctgggtgggggtgggagggagtcttcccaagccacctgtgtcataggcccttcatcacacagtttcctgttcctctctccaggtggcctgtagcttcccacattaagaatcttgctcatgggaacttccctgctgctccggtggttaagaactttgccttccagtgcagggggtaagggcttgatgcctggtccaggagcagagatcccacgtgccttgcggccaaaaacaccaaaataaaacagaagcagtattgtaacaaattcaataaagactttaaagatggtccacatttttaaaaatcttggtctactaagatgggtgtgttacgctcctgaggttcgtgggcaggaaaacgatatagtacccactgaatcaggacagagcagtggtttataaacttggattctgagtttcaaccccagctctgccactcacggggctcactggactttggaatcttcttactctcatctgtaattagggacaatcgtggcaccaacattaatgagttaaaaactgagacgtttgttgaggaacagggcacagagtgtgtgagtacacagagccacgccgacaacattccccaggggccccaggcacccccatcctcatttttgtgtctgatctttaggatacaagatgaagaagcgtgttggggccattgaggagttcacatttctgcccctgacggaaggcaggcagctgcacatcaccatcgccatcacggg

SEQ ID NO: 26114 - DNA, 2164 bp, Bovine  19866880936423
  misc_feature (1)..(1): n is a, c, g, or t
ncaggacctgatcatgcaaaggctatgcctttaagcaaaataagcattagacctattctcttaggccctggggagtatcagaaacccttttcctccttgccccaataaacaaagcaggaagtaggagacaaatttcagcttaatacatgattttcttaacagagttgcacagtggcagactgaaataaaatagtaagctaaaatagtaagctgtcacaggaatgtcaattggaaaatctagtgaagatgttcgtttggttcaacaactagtcttctgctaagccctggatatatgcacccagcctcaaataggggtttggactaggtaatcactaaaggttattctcagtctaactaggactccatctgaattctcaggatcaactaccaccaatgcccctttacagaaaatcatacttatggtacagccattttctctttccagacaggcaaacctaagggggcggggggcgcaacggtgaaggaactgttcatctttcttatcaggccctttaatggagaaaacccacttctcagagtagcagagccaggagttctaaggtctgcaacaacacttgatcccacagtctttagctctgtcttctggtaaggacatatcctctcctaagcccagagtgaagtgaagtgaaatgaaagtcactcaatcgtgtccgactctttgtaactccatggactatagagtctggaattctccagcccagaatactggagtgggtagcctttcccttctccaggggatctcccaacctaggtctcccgcattgcaggtggattctttaccagctcagccacaagggaagcccaagaataccggagtcggtagtctatcccttctccaacagatcttcctgaccgaggaatcgaaccgtcttctgcatttcaggcagattctttaccaactgagcgttagcatttctcttctctgggagcagcagcgcccagggctggcgacccattccatcccaggaatgcccacgatcctaaagacagctgataaatcagagttctggggcgacccgcagcccttaccttctaccgaaggggagaaaatgatgagattgtcataaagaaactccccgtacttaatgagggacaggctggggtcatctgcggtcttgaatgtgagtacaaagccgcgatctggaaaaagagaacgagggagctgaggcacataggaggcaaagaggaaccaccactgcagagaccatgaccgtcatgccccacccccgttcccccaccagccccctggcggcaggtcagacctggaaggccagctcgggtgggagggagaggggtcggtgtctccgggctcagggaccttgccaatccatcgggccccaatctcacccttcaggctccggaagaaaagcgaatgcgtctcccggaggttgaggttgtccagcagtaccaaggtgcggggaccgctggcgccggccaggccaagcaaaggcagcagcagcagccaccagccggaccacacacgggccgcgcgggtcgccatcttcctgttccaaagaaaccagacgcctgggcaccggaagtgccccttccaccgtcgcccaatcgtggctcgttgtcttggagtgtcacccggaagtggttcgaaaacgccggagccgggcgtccggaacctctgcttggacggcgaggcgcgaggaacccggccggaaatgtccctgtgagaggcgggttctcggcacactattggtgaaagcggcgcgcagtcccgcccccccgagaggaaaaagctcaatcctagagagacagctgtgcggccgcggccagtcagtagggccgagagcccttgggttccgcccattgccgactcccgccggagtcccggccggctcccgcctcctcatccgattggtcttggactcggccgcggcgttcgggtcggggtccgggctggaggttcgctggcccgggacaggttcgactggaaccaggccccacttccactctctccagggaggagatggttggaaaaaggccggggacgggtcgcgggcgtgggggctgcgggaagagggccggaatctctcccgctgctcatgggcgcagggccttggcgcgggcgcggcccacccgcaggccggaggcagtgtggactgggcatacattcagaacctgtagctgggcg

SEQ ID NO: 26115 - DNA, 1635 bp, Bovine  19866880939959
  misc_feature (1)..(1): n is a, c, g, or t
naacgtgggggcaaaagtcagaacctccctctgcgcttctcttcaaccaatcctgctctcaatccccaatgactgctccaggaactcctgccccacagcccagccctcctgcccttcagcccatgattgccacatcagtccacttctcacttagacccgatggtgtaggcagtcactgagcagttggccacagctcacagaatccagaggctcttcacgcaggtctgcacctaaactcatctcggcagccttatctcctctcggtccctgctcagggcttccatggaacaggtctcctcccaccttttacataccctgatcttcccacctcctgccttttgttcacgaggaccactctaccaggaaccctctccccacattcccatcttaagggatcttctccatccttcgtggtagccccacccactgctgctcccttcacaaggacactattccccatacaaacctgattttgcattctcttgctcaaagggtgcactgcagcctgcctccccttaggctgatctctgggtttcctaagcaccttctgccctggcttctccagaacatgagctccttggcccaggcaagtagcttggggcaggtaccacagtagttaatacaaaatatgaaggggaggactggaggactaacagcacctgctatgcagcaggaactctacacactatctcatttaaccttcacagtaaccctgtgagggcttccccgatagctctgttggtaaagaatctgcctgcaatgcaggagaccccggtttgtttcctgggtcaggaagacctgctggagaagggataggctacccactccagtattcttgggcttccctggtggctcagctggtaaagaatctgcctgcaatgcgggagacctgggtttgatccctgggttgggaagatcccctggagattgcacaaagaactctatacactatctcatttaaccttcacaataaccctgtggggttggtattatccccatttcacagatgctcagtgtgaaatgaggctcaggacagcaccaaagccttttccctcagactgggcccctcccacagagcaggcctgggatacaatgggcaaggggatgggtcagtcttaggcaactgggatggcctggattcatttctagcgatgttagcacgcacggttccaacacagcccctgagggcatcaagacctgggtcttctctggacctcagccagatgtggcccctatttcccaaaacaaggagtctgctctcctgggtcccagatccttcaagaatctaacaccggttcacatttatatgctctctgctgaaaaagctgcacttatactcaaaattgcagggagttgcagagacctggagtctgcaggctgttaagaacccctgctccaggcttccctggtggctcagtggttaaggattggacggccaatgtaggggacaccggacagatccctggtccaggaagatgccacatgccacagagccactaagcccatgaaccacaactactgaagcccgtgtgcccagagccctgctctgctacaggagtcaccacagtaagcctgtgcatcgcaatgaagaggagcctccactcaccccaactagagaaagcccgtatgcaggtg

SEQ ID NO: 26116 - DNA, 1235 bp, Bovine  19866880979375
  misc_feature (1)..(1): n is a, c, g, or t
nccctggctgagggggagacacgggcccacaatttacagaacttaggaactatcaactcaccatccttgagtgagaagctcagaagatcctgagggaaaagtaacaggaattagcgataggttgatatgtaaccagcctgctcactggacatacatttactgactcttaacaataagtgggaaaacaaggcagacaaaatacctttgccctgcatttgagtggcaaggcagaccaacaagccagcacataaccaaacaaatgcgtgagaacttcagggaatcagatgaaggagggcaagggctgttttaaatctgctctgctggcaccgagagcccgggtcaagcgtctgcctgcttcaaatgcacacggagcaggtgagtgacacacccaacggcacacagcaaagctgatgcttccgaaaagaggcaccgcagcttaacggctaggaacatgggcttctgagtcagatggcaagcttcaaatctgctgtgtgacctcgaacaagttactaaacctctctgtgcctcagtgttctcatctataaaatggggatgatcactttacctacctcataaaaatgctctgagaattaaatgagttcatatgagtaaagatgctggcatataagaagcaatgtttaagtaataaatcaatagtaaatattcgataatgataattcaacactagctacaatcatcatatcatcagatattatgatgcaatatttaacctttgaactccccccacacagctagaagtgatattcaggctgactttgagaggaagctgtctgctttccccagcagctgctacctgggcagtgggtgtacctgagtgatcaccagtgggtcatctttcaagatggggtccttcaacaaaacctcagcaaacacgtctgctccttcgcctcccagaccactggcaaaagcagtcatggtaggcaagacggcttcagacaggtccagccacttcaccaggccagccacaaagtctgtgcagaaggatctgaaagacaaacacagctgagaccctggaccatgcaactcacaagacgagacatgttaagggatgtgaagagctggcatctacaaaaaaccatggcaactgtggcccatggaatatagcgagagagccaaacctgatttcaggagagcggatctgagcttactccaccaaaactttaaccacaaagagctgataaaccataggaatgagggcaatgagcagttagtta

SEQ ID NO: 26117 - DNA, 995 bp, Bovine  19866880991597
  misc_feature (1)..(1): n is a, c, g, or t
nttcccttttgaagcctgaagcctaacccactaatgggaagtcatgcatcacacctgtttgtggacgtgtggcccctgttccgggggtgggtgcagcgtgctccctgtgatgattggtcctatcccaccctgcagcacgcagccggggacgtgcccggtggaggaggcttcgtgtatttattttcctatcacggtagcacaggaggcccagagaggaggtgacgccgagcagcagggacaaagaaaatgtgtgtgttctggcaaatttggggaattaactctgaggttgttccaaggagaaaatgatgttttgaattgggagttattatacatttgagctcactgctttttaaagaacaccttgtttacttaactgttctgtttacagatttatttatacctggctcactttgaaaaagaatgtgaaggggcaaattatttaattagatcgtgagtttcttaagggcagaaactaccctcactatctcccctcttctgacaggctaactcctgattgttgctgccctctgcccttcctagctgcattttctgcctctctatcgttgtaataatctgtctctgtgtctttgttttccagtgaactatgatgtattagacattttggtgtctcatccaactacctatccatccaacaagcaaacatgcatccgtgtgtgtgtgtgtgtgtgtgtgtgtgtgcttagtcactccgtcgtgtccgactctttgtgaccccacggactatggtccgccaggctcctctgtccgtggggattctccaggcaagaatactggagtgggttgccatgccctcctccaggggatcttcccaacccagggatcaaactcaggtctcccacatcgcaggcagactcttaaccagctgagccgccatggagttcctctctgggaattccacatggcttcccgtgaactggaagagctgcacctcctttccccaaagccccagggacttctggggccaaacgctctcc

SEQ ID NO: 26118 - DNA, 2726 bp, Bovine  19866881001702
  misc_feature (1)..(1): n is a, c, g, or t
nccccagcagagccctgctcactctttaaggccccagctcagcggccagcccctctctgcagctctccttaaaggccaggctggcagaatgaattgttccttcctctgtgactccctgtgctccattccacactctgttacagccgctcacacatttgcttatctgtcccctgggatcagcatgaatcttttcatcatggcagtcaacggtgttagaacctaaatgtttgctaaactgcgtgtgttggcttccttctctctctttgtagggacttgggaaccattcatttacacctcttttgagtatctccaggcaacatggggagtgttctgctgctctagcagcttctgtctgacttctggcagctccttcatctgggtcttgagacttgctgagcacatcagagccgcattgctttgtctttgagacgtgctctttgttcctgcatcttacctttccagtttttcttcctaaggttgtcatttctctttgtctaagggcatcggattgttgtgtcttctggctgacagggaggcacctgcgtggtccttaggatgctgacttcctggatagaacttgtgcatcttcccaaccagttagaacagcaaaatttatatctttacattaagactctagggcttagggcagatatctccagaattacccaaatcctgttggggttcttctgggtttttctctaagagtagtttcagctccacaattttattgaatcagtttggatttagtattttgccccaaccacacaataataggcccttctctctgctgctgctgctaagtcgcttcagtcgtgtccgtctctggggtcacgcatctcctgtgtcccctgcactgcaggcagattctttacttgctgagccatccgggaagctcaatcaactgttacaaaatagctacaaatagctcagatgatacagaacctgcctgcagtacaggagacctgggttcaatccctgggttgggaagatcccctggagaagagaatggcaacccaatctgaagttcttgcctggagaattccatgaaccaaaaagcctggcgggctacagttcatggggacataaagagtcagtcacaactgagcgaccaacactttcacactttccctttcttcctcccctcctagtacataggttcctttgtaatgggactctgtcagtcctcccattcagaggtggaatctgtttctccactccctgcatctagactggctctgggacttgcatcgactggtagaaaaggctgccatgggtgggtttcaggacgggagccttaagagggagatcagcttctgcctttgccccctgggaatgccaagactaacatggaaggaagccggtcaagccaagtggagggtgagttgctgcatctctcatcccgatgcagaaagagagtcgaggtgtcccagctgatggctggtaccaactcccagacctgggggtgaggccgtcttagacctccccacccagaggaccctccaactggtgatagccccatgagcaagtccaggagaaaccagtagaggaaccacacaatcaatccccagaaatatgagaaagaggaaatcgctgttgctttaagccacggtgttttgggatggctggtcaccagcaacagatacctggggactgatatctttcacatctgggattttcctcgctaagagtcccaccaggtcctgggccacggcacaggtgtggtttagaactgcaagaaaatggaacagattaggaattccctggaggtccaacggttaggcctcagcactttcacaccgtagacctgggtccaaccactggccggggaattaagatcctgtaagccttgaggtgtggccagaaagaaaccaaaaacagataaaaaattagaatacacggaagctcaggaagagcggtgggtttgtggcagaacccgaagcctcatttctcacctccccgcctgggattcttccctccagcctgtcattcagctgcttaatgtccgaaggagtaacatccctgagcgccagagcagtggtgacatccagtgatggattccaggaggaagtttgcagggtttcaggaactccagatcacaaaccaagaagccccaagtgttaggttttgggtacctggctatctccagggagggcagaatagcaggctctggaagaccaaagcacaaagggtcagaggaggcggctgaagtcagcttcaaagcattcgctcccaccgactcctgagatcctgagtttggggcacctgagtgagcaagggacatcagccctgtccctaagctcaccatggggaggcagcaggagcaacagtgtcagagccgcctgtcgtctgagccagcctgtgaacgggagccttggctgattactaccttggcaggatactgagcctaagttctaccgtctgtgaaacagaaagaccaagacccacgccacagggctgtggtgaaggtcaaatgtaaagccactggagtgacataggaggtgctgaatggacatggcatcaccatcagccctgactacctggacaggcagaccaaggaggccctgcccagggccccacgctctagagggctccacgtgtcacacacacacataaccagatgcacacaaactcatggacacagagggacgcacacagaggcacataggcacacagacacacgtgtccatgcccgcatgcacactggcagagggacacacacgcacaca

SEQ ID NO: 26119 - DNA, 768 bp, Bovine  19866881040450
  misc_feature (1)..(1): n is a, c, g, or t
nggaactctgaaactgtgtctggcagttggtctacttcctgacagtcttttccgtgtctagttctggccttttgttactatttgaatacacttatcttatctgctttcatctgttcttagatcacctttgttctgttatctcagcagttaaggccttgatggacaaattatttcagatctcaatctgaagatgttttgtatctaacatcaaagtgtaacaaggtgatcctgggtaggaaaagacttgaagatgttttaacccttggtgaggaaaaatgagaaagggatgggcctgagcttgtcggtgtttcacgcgtggtgtcatttaacgtcgagcagcatacactcgggaggtgtgatgatggggatggtaaagatggatgatgatgatgctgaagataaggaggaagggggcaggtcattaacatgatctttcccatggcacttaagtccatgaaatgtcacattgctttaactttccaaatgaaatcagtgcggctcacctgacccaggttggtgggcaatttaagtcatgttttggaggcatctcttccacctcccttggatttgtcccatagtcctcaggatttattcaggccagggcatttgggaaagaaccttggtacaccacagctgtacttcctagtggtcacttggcccatatgaaaagctgaggcttttctctctccaagccatggctgagcccacacatctttcttgaggtttctaacctctgcacctggtgttcaatctcacctccatgtacca

SEQ ID NO: 26120 - DNA, 1510 bp, Bovine  19866881160878
  misc_feature (1)..(1): n is a, c, g, or t
ncgtgagctcgtgagctgcgcactgttatatgagtgtgtgtcctggactccagttctaatgatcatgcgtgagctgcacactgttatatgagtgtgtgtcctgggtgtgggggatgtagtatctgccttgccccgatgcgcctggttttgagcactgcaggaggaataaggtgcttcctgtcccaaggtgggggtggggaggagcgtgtgtagactggagatggccagcctccttgctgcctgagctgcctggatcccaccgcaggagttagggtctggagtggagggtaccataacgtgggcagtgaggttcagggcagcccgccgctcaggccggcagagcccgcagaaccgcctcgggtcagggcacagggtacaggaagtgcacaaacaaggggtcctgacctggaggacttggaatctcggcaggaagaggaccgctacaggctgatgctcagtcgcagtgacagtgagaacatagccagtaactacttccggcccaagcgggccagccagatcctcggcacggaccccatgaagagcctgggtgagcatcccgcctgcctcctgccctccagcccctccctgagcgctctggagtcacacaggccgggccaggaacccctttccctctctgagcctgtttcctccactgtaaactgaggggagctgcctcctcatgtgatcggtgagacgaggtgggggagtgcctcccatctcctgtccccctccatttcctggggggcgaggtgccaagttggatcctctatcttcctgacacacagcaggcccttagcacatggccgggccccagcctgggcttgcccaggactcggtcagttcctcaccagcttcttcagatggcaactcattcccaaagcagggcaatcaggaccacaaaagcaaaacacgattttacaagcaagagttgaaagccactttgctcttaaaactgaaaccaaagacactgagcttccaatccaataccaattaaaaagcaaatctcagatctgtcctgaggttgtttgagagacagagtgggtggaggtgaggagtaaggagaggaaagctggactgtgaagaaactcacatcccatgagtacctggcatcgtgcctatgttgcagatgagaaaaccgaggctgagagaagcagctccccaaggttaccctcccatgaagtgacggagcagggttttgcagcaggcttgtctggcttgacaccccaggctgcacagtctgaggcttgaaaattcatgcacccagaccagaccctttgggcagagatgcagtgctgggcccaaggcctcagccagagcagctctcagagcctggggtcccagggcctctggctggggtggggggaccagactctgtaccccacacacagtctttcctctccatcccccgcatcctggccaacagcgtgtctcccttctgtgcttttccgcagcacaccacagctccccaccaggcctcagctccccgctcggtggcggctctgccatccca

SEQ ID NO: 26121 - DNA, 1905 bp, Bovine  19866881230325
  misc_feature (1)..(1): n is a, c, g, or t
natagtacttcagggcgggctttccagtcaccttctcaatcatcgacttcaggtccagcaagctcccctgggacagcaggcacacctgaaagacagccatgtccccggatgaaacccaggcatgcctgctcccactttcctgcatgctcccaccctttctttcaccttggggcttggagggaccaagatgacccttttttatccttcccactcgtgagaaaggaatgagaaaattgaaggcaaacagtgtagaggaggggttagaagtctggatgtggagaatgagccactgggttcaggtcccagctctattgctaatgcagagtatcacttcatctctcagagcctcagtttcctcatctgcaaaatgggggccctacaatgaatgcctaccttttggagacaccatgagggttgaaacaaggtaaggtatgtactttccaagcacagtgacagacacatagtgagtgaccaaggaatattggggataatgaatatggtatccatatgcagtaggcagaaggcacttcctttctctcctgatgacacacccctccctccctgaaacgaatactatttgaagcaggaggcacagaatcctagaacagcgtgggacctgcagggatctctgaagccagctccctcatctcacagataggaaactgcagctcagaggggcgggtgccttgcccagggttttacagtgtgccggaggccctctccctgcacctggcctcccgctcctcctgcagtctctagggatctggaaaggcatcaacaggacagcctgtcagaggctgtgtgcttggtaatgtaagtcatgtatgggttgtaggagagacctaaagccgagctcccctacactgggctgtcacctctaggtgggaggtaggagcaggtggggtgtgcagaaaacctggacaggcctgagcagagaatgtccaggatcgtggaatggagtattgctataagagtcttgttttctgatagctttatttttctttttatttggcatcaaagtaaaatatctgcctcccacatctacaagccccatatcctccacatagcaccatctatccacatctcctcctgggatcctgccccagcctggcctgtcagcaattatcctgtgtcaaggatgaggaaacagaggctcagagaggtgaaggctctcgctgaaactgacatgttcagggcagagccaagattcagaatcaagtctccaggccctctgtgactggtctccttcccactaccttactgtccacaagttcagggctctcagagcaagcacttactacaagccaggaaccaagccagcatgaggaggcccttcatctccagggttctggaaaagaaaacacagcccatgacatgccaatcagcagaggtcctcatggcctattcagaccccgctcctggctaaggagggctgctccgtggcccactaggccccaccctctcatgctgggcagtaaacaggcaactgaagtttgaaaagatgaggcaaaaacctcaaggagctgacccaggagatctctgggaggagaaggggcacccgtggggtgttgtccccatagagatgggagagaattttcccatcagaaatgccccaaacccaattgttcctccttgaaaattgttttccaattatattttatggctgtgttggtataaaaacaaatgcaatccaggctggattcactcttctacattcatgatattatatttatttttttctcctgactttaaaagaatttaaaattgaaatattcttaggacttccctagaaatccagtgttgaagactctgagcttccagtgaaaggggcattggggtttgatccctggtcggggaactaagatcccacatcatacagtgcagccaagaaagtaaaaaaataaa

SEQ ID NO: 26122 - DNA, 911 bp, Bovine  19866881239250
  misc_feature (1)..(1): n is a, c, g, or t
nattttcctgacccagggatcaaacccacgtctcttacatcccttgcactgtaggcagattctttaccagtagtgccacctaggaagcccctcatcctccacaaagtatttcttcaccttcctaagccacctgagctgtctctctcttacaatccttggacaaggagcccctatttcctgccatttggttttgtcccagttcactctttgagacccggctccatgctattttgcagctaatgttgctgttggcatattacatttgggcgatgctgtgatgtaaagatatgccaggagatgtggagtcagacaagggatcaatcttaatgttatgggtgaaatactgtgtgatcttgagcaagtcgccggacctctctgaaccgccgaggtctgcagtgtgggttcctgaaatgatgcctgtgagagtctggagtgctgaatggacaggagggggccttcctcggctcaggctctgccgtcctgtgtgctgcctggcctggtggtcctgaatgactgctgccagcttagggcacagacattcttccctattccgcatcccctttggggagcagagtttcagggctgtttccctagagaggtcttgctaagcagccttttctttctagtcccttctctccaggtgagatccaaggcagtggtgcggggtgggagggatatctcttttctcccaagaagactcatttcctctatcggttgaaggtgaacggagtccggactggcctttgagtgtttctgaggggctgtggcttccttggggactacctcctgtctgtgaaaacaggaaagcaccttggcggtgccttgatttccaccctgtgggttcccgactttaatcttcatcatgtttttctttcctgaagtgtggctttaacactctctgggggcctgtg

SEQ ID NO: 26123 - DNA, 1168 bp, Bovine  19866881316767
  misc_feature (1)..(1): n is a, c, g, or t
ngcagtgactgataccgactcatgcagaagaaggtccactggcttgggagtgaggacaccccttccaggtagaaccttccctctctgacctccggggtgcccctctgccaagggagggctgtgaatcagatgatttgagagcctcttttcactctaagccagatttctaatgggagggaattgaagcctgatgacatggtgggggcaatgtttttaggttggcatttgcgtgcttttcacattacgccatatggccagaaatattcctgctagagactgccattattatctcggataagacggtaaaatgttagaaaaaaagagaatcacaaagactcattgtaatggaaaactcaaaggacagagtgttggagctgcatgcaggggccgcccgagccagacccacgctatgtccccgtgcttagcacatttctgggtgctcgagaaacaaaggcgtgagtgaaaccggagactgatgaaccctgcgacacaatctgagggccagtgttagaatcctgggcgaacagtattcacatatcagaagaggggactgagatcccaggggacgggttgtggaatcttccgggtgtttcaggagccccctgcccccggtctggctctttttgagggcgctgtggccagggaggccagggacggtccagggctgagtctggggcctctcagggaaggatgggcttacgggaaaggagttttctggcgggagagcctttggtgctaaccctcccgaggcctggggccccggcagctggaggcctcagcgggaggcagagcgcacccttagcagggcggggtgggcccagtgcacagcttgttggggtaatgggcgtatttgcggttgtaggtgcccaggttgcggcgaaagcagagcgcggccttcttgtcacactcgcaggtctgtcgctggcagctggttctgccggctggatgggatgtgggcagtcagggcccgggaaccttgggcccgccactcccagccatgtgcagggggagcgtgctggggtccacgttctctgcccggaagcccacgctcaccagggggatgctccggggggatgctccagggttgggtgagagaacgggcagggtgctgaggccctgctggggccagggatgctggaagcctggagatttgtccttgctgtccctt

SEQ ID NO: 26124 - DNA, 666 bp, Bovine  19866881509764
  misc_feature (1)..(1): n is a, c, g, or t
nttggaaaactgagatcctacatgttgtgggacaactaaacccaagcactgcaacgagagagaaaacccacacactgcagctcagacctgacgccgtttcgtcactgagctgtgtgtctgactctttgcgaccccacggactgtagcccaccagactcctctgtccatgggattctccaggcaagaatactggagtgggttgccatttccttctccaggggatcttcctgatccagggatcaaacccatgtctcctacatggcagggggattcttaactgctgagccaccagggaagtccaagacctgacttagccctaaataaatttttttctaaacaaagagattcctgggatggggtggtggtggtggtgattctaatatatcctgaagctcacaagcggtagtcctgcgggcaatcatgacgcacgggcctcaacaggaaaatcctgattcccgcactggccctccctgcccccatggcccttctatcaggcaattcaaagtctccgggcggagagttactgattaaccctaggtttcaaggaaagaaataataataactgaagggacaacgtgagccaagaaacaagctgagcagccctgggagagtggtggcagacggctcaagactagaaggaggagaaggagactcgagccagccagc

SEQ ID NO: 26125 - DNA, 768 bp, Bovine  19866881961019
  misc_feature (1)..(1): n is a, c, g, or t
ngacctgcggggcggggcctgcctgggggcggggcctgagcccggcctcaccttcctctgcatcttctccagcagcttgctcttggccctcacttcctcctggatggagtcgtagacgttgagcagtacccagtccccgctgtcctcgtccgagttctgcagggccgccaccagctgcttcttgcgctcgtccgcgtaccgcttccgccgcctgtgcttctccttcaggtccttgttcttggcctgctcccccccgaccacctgctgctccaacagctgcaagctgccggcggggaggagaaagcaaacgtgacaaagtctgccgatcactgagcactggctgtccaggctgatctccccgactccttccaacaaccgcgcttcacagacaggtacactgaggcccggggaggtgactgctgttggctcggggtcagacccagcgttccttctgggcgagagtctccctccgcccagggctgccccacccacttcccggggctggtggtcctgccacagagcaagctcccggctgtgctcccagggcacctgcagatcagagtacccctaggttgtggggaatgacggtcagtgcataatgtttcatcagggacacaaacagttcttttttttttaatatttatatctaaaatgctttaaaaaattatagagttttgccttttaaaagcacaaatttgaaataactacaaaggctcaggtggaaatccttactcaactaaagcaccacagaagtgtcttggactgtgc

SEQ ID NO: 26126 - DNA, 1600 bp, Bovine  19866880482922
  misc_feature (1)..(1): n is a, c, g, or t
nactgagaggggtgtgaatgtacaatattaaccagatttccaagacttggtcccagaaagcaatataaaatacccacttattaatactgtttctaattacttttgaaattatgttttagatatactggcttaactaaaatgttaaactctacttctctttttcttctacttttaaaaaatatgattactgaaaaaatgtaaattacatatatgcttgcatgtatggctcaaattatctttttattggactgctctatcctggggaataatcttttaacactagagatctccctggctagtcattgtattattctttgttgatagtgttaactccctaagcaactagaatttagtttcttctttgcttttgctttaagatataaacttaattattgaatctccttttttaaatagaaaatcaaatgatctagcctgtatgaaccaccccttttattatttaaaatgagaattttatcacaaatgccattttcacaaatacctcactatgcttctggatatcttatttttctactacttattttaatattattgttattggaagttcccattaagtagttttatttacaaatttcatttgtttgtttataatcacttgttcttccaaacatattttgattctttgtcatacttataataaaatattacattaatatattgtttgattataaattaacttaaaaatgacactgagatagagtttacatcttttggaggcttcccagttggctcagtggtaaagaatccacttgtcaatgtagaagatgcaagagaatcaaattggatccccgggtgaggaagagcctctggagtaggaaatgacaatctacaccagtattcttgcctggaaaatcccacagacagaagagtctggtggatagtggatgggggtcacaaaaaatctgacaggactgagcacatgtgtgtgcacacacacacatattacattttttaaaatattgatccaatcttctgaaagcatatatcaatttcccaagcagtaggtttagttttatatttttccttccaataattttatttcttatatttatctgattaactcctatcctttatattatagtctcttcattaaggactttttcaatttatgttgagagaaatatccaactatattagaaattagattttaatagcatattttttgctataaaatttgagggctttttttaaaaattcccattacaaactcataattggtggtttatttggacacatttacaacatttatgatttttattttataatagctttttatgttaatttacctgaatcttttaaatgctaagcatctaacatacatgggcttccttggtggctcagatggtaaaggattgggaagaacacctgcagaagggaatagggaatgacaaccagcattcttgccaggaaaatctcatggacagaggaggatgacaggctacaagcacagggtcccaaagagtcaaacatgactaagccactagtgaaagtgaagactctcagtcgtgtccaacactttgagactccatggacttccaggccaaaatactatatgctactgccaatttagaagatgcaggag

SEQ ID NO: 26127 - DNA, 2040 bp, Bovine  19866880504883
  misc_feature (1)..(1): n is a, c, g, or t
ntatatggtacataacacaattcaatctatctgcccagactgttttttgaagcttctaactgataaatcaatttgtctatatcaaatgaacaggacttggttaatggataaaggttgccactatttactgatttcatagaacttaaattccaactaggtccagaattaaatttctttttatgaggtggtagggctgccacccagcttgtggtgggaccttggttcaccaactagggatcagtggaacctgggccctagcagtggaagcagtgagtcctcaccactggaccactggggaatttcccagaattaaatttcttaacagagaattctgcctgtgatctgccaaaagaggatacaatgccacactcaacagctcatgctatttgttaatacgatagggtctcagtatgaactttcattttatatctgccatggcttcctagttaaacaaatgaatattgaaatggctttacctatgcccaaagtagcagataatcaggacaaagacaaaagtaagcaaaccaattttcagaaacatgtggaacagagggatcatgaataaagcatttacatacagccagtgtttggtaaatccttgctgagtctatttattcatcaaggcttgacttacaccatgttaaaaaaaaaaaaaagttcttatgccaatgccaattatacaatgaaaaggacaaaaatacaaaatacttttaaaatcttttgaatgtgtctgattactacttcataagaacaaacacttaaaagttctgatttgtgaagtaaatctaccatgtttatacaggacaatcaaatatgatttttactaagctttcatttatacctatttcagtttctgtcaaaaataaatcagattcaattttatttggtactgtcctttacacaaaaccattctattactgtctgttaggtaaggatcatgataagggatagaagtatgagaaggttaataacaaacaaagctacaccttcattcttttattcttactgaacttttcctctatatatacaattctaaaatttatccagctcagccaataattaaaaacagaagttatctttttgaattgcaatgatagtaatttttttgtctcctaggtgaagagtgtgtggaaagacatattttttggtcatctccatgcaaataagcattgaactataattttagtttgtagtgctatattatttaccagttctgggaatacttgtaattcatgcagtagataattggagcattatcttcttttaaataccattaaaaaagaacaggtgcagcttctgagcagtaaggacaataagccaatctgtgtttggggcagtctgtctcatgtgaagaataagaatgctactgacataaagatttttaaactgtagttaatgttagcagacaaaagtttgtttcagttgcctagttagcagcctttctcgttcctttagcattttctcccaaaagtcacagaggatttacagtgaaactccatatactgtaatgaataacacagagatgatatttgcatgttatacttctcaaatcaagatagaataagagctaaataatgatagtaagaatgtgaatcagtcagttttcttagttgtctttcttttgttgtttctttttaatgatctttgtaagagaacagaggcattccttccttgataatgttaaatttgtaattattgggtgatttatcaaatcttttacaagatttttctctcaaagtgttgaaaaactattagcaaggatcatggtgtaatgaaacgtaatgttattcctttaaaatactgaagtatgtgtatagagttaagatgctgttatgcatttataatctgataaaagtatcatttttttatccaattgtatcacagccctcactattcatcttacttctccctttctcagcaaaatgtttagcacaaatatttaatgttatttacagaatcaaaaccagaacataataaaacatatttattcagagtttacaagatatagggctccattatgatctatgggttttgtggtgt

SEQ ID NO: 26128 - DNA, 1680 bp, Bovine  19866880542241
  misc_feature (1)..(1): n is a, c, g, or t
ntttgtacagttcttctgtgtattcttgccacctcttcttaatatcttctgcttctgttaggtccataccatttctgtcctttattgtgcccattatacaacatggcaaagtcctccggaataccagcctactgtttgaaaaacctgaatagtacatttagtgaatcaaatcattcacaggactcaatcacacctaacaccactagttatttaggggaagtaaaagaacaaaaggggacttccctcgtggtccagaggtttaagacttcccctttcaatgcagatggtgtagatttgatccctgactggagagctaagatccccgatacctcgtggccaaaaaaccaatacagaaacaatattgtaacaaattcaataaagactctaaaaattatcagcttcaaaacaaatcttaaaacaaaaggaaactaaatttccttttaaaaaaaaagaaaaaaggaaagtcatacccaaaatatgaaataaattttattcaattatttgtgcaggtaatgtaataattttgaagatatttgtaactttcatgtagtaactctttccaattttcaacaacttgtgctgtactttttaaatgtcaggcactgtactaatcacttgatccatttcaatttcactagcattggtaataacccagtgagggttaatgaaatcaatatttcctttatcctcaacacaggtagtgtaggtatctcttctgtgtatatatttagaatattgtgagcctatttctctagttaattgggtatacattcagtgatcactggtatattcataaattattagaagggcaagagcacttggtttctttctcaagaggtagttcaggaactttggagatctataaacctccagcaagttaaattatcctacatactacccataggtactattagaacacaaatgttcaacctttatgaagaatacacatttcactaaatctgtaggcagaattgttattttacatagtctactatgtgatttgcaagaattgctgttacaacaaccaagaaagcacttgaaaggtatctgaaattatttttcacacagggctatatatttctctatctaatatgacagcatgccattcatataaacatatttatggctgtgtcagttcatatcaagcacattgggacagtgaaaaaaatgtaatctagatgaaaaagaatttcatctgattctcaagagtccccactcctctgtaatgcattagaaattatgatcagaatgatataacttggacaccatcacatctcaggaatcatccattattgtaacagaagtgcctgaagcttcttttattctaatactatccttgtaaagcacctaaataaaaggctggttagtgtaaatatagtttgggacttgctaattatgatttctggaaaaataatactggtagaacagagataagcttgacacatgtttctgtgccaaagatgaatgctgacatagatattcaaaaggagcattattatttttcagacacagtgtaactttgttctgttatcgacgtttagctttttcatgtttggctcattgcatcaccttcactttcttgttttgcaacctccttatatcttcttcagtgtaatctgaaaccagccctgttattgagatgggatgagaaggggggtgccgtgaagggaagggatatat

SEQ ID NO: 26129 - DNA, 1419 bp, Bovine  19866880813809
  misc_feature (1)..(1): n is a, c, g, or t
ngtttattagtcagaggaaagactttttattccctaagttcatctttagaataagtggtaaaaatattccttccagattctgttattattgtgtatggaattttatttttacagttgtgaattttcatgttgttctgtgttcctgttgatattttaagaggaagtttggaaagactgccccaaggactgcttgttgtatgccatttaaagccagacatcctgaattatttattaacaaaagaaaaaaacttacatccaggtgctactgcatacctgctaccttgttaatgtcaatttagggctttgtcatttgactgcatatgtgtgactcatgaacacatttacaattatgtgctcaaagggatcatgatcttctacccagtttataaactcttttggcatatttcttaaataacacttagtaatattgtactcattttgatgatacttacagtgaatattctggctaatgttgcttattaattatgagacagatactgtttttttctctttgcttacacaatttaacccactgtataacactctgaaatatgcagagataagatttaaatcaatgaccatgtttttgaatctgtggttcttattgtgcttttctcagtgagtaagctcattcgtacaaatatcatgctgcatttaattcgcatctatattacaaatatatgttcagtgcttttcccaggaaggcagcttgcacatgacaatagtctggttccaaaattatccccctaaaactcctttatcttagtttggaatattttaattggagaagtttgggaaaagcagaagaattgtaagtagtagagctaccagtggaaagtatgcagtgaatactaggaagggaaaacatgataaaagaataaacaatgggattgtgatggaaaactagctaacactgcctgtattttcaaatatcttcatatgatttagaactagagctggatttttgcagcagccaaagccagtattttctcagcttgtcagtactgtcagtttttacactgtacacaggaattcatgtgtatgaatgtgaatatgtatctgtgggtgtttttgttggattttttcacccattaaaccccttggattttcccttttagtgattacaattgctatttctttttaattttcttgtgttgttataacttcctaatgtgatgagtggaaatcatctagacttggaaaatataaagctgattgtatacatggctgacactcgatccaagagtaagtaagaagttgtcatccctaggggtttccccagaggcttagaggtaaaatgtctgcctgcaaagcacaagatgcaggagcagccgtttcaatccctgggttgagaagatcccttggagaaaggcacaacaacccactccattattcttgctgggaaatccccatggacat

SEQ ID NO: 26130 - DNA, 770 bp, Bovine  19866881188922
  misc_feature (1)..(1): n is a, c, g, or t
natgttcttaattttaaaacattttagtcttacattgtggtcattacattatcattgtattttactagtatactctgcatgccttctatgtgataatctattttaatgttgattgttattatatttaaacaacttttataaaatgggtcctggtgtgttttatattaaaaatattcatattcttaattactcaatgctaagttaattgagacattttagaattccctagatcagaattaaattaaatttaatttctacaaggtggctaaaaggtcattagcattttattgtactatctactatgctatgttactcttctgccaaatcaaataccaaacaatggtgccacgcaaaaaagtcaatatatagttgcataaaatgcaaaataataagaagttataaatacataatttaaatttaatctcatctattaaaaacataaataatgaacattcaatcacattttagttgtggccatataatagctgtttaaatgtttttcttgcaaaatatacactactatatttaaaatattaagaaataaccaagaaggataatgacctactgtgtagacagggaactgtgctcaatagtctgtaaaaacctaaataggaaaaaaatttgcaaaagaaaaattacatgtgtgtgtataactgaatcactttgctgtcacgtgaaagtaacacaacattgttgactacattccaaaggggggaggagaacctcaagaacttatctcacttctgaattgtttgatggatatttctgat

SEQ ID NO: 26131 - DNA, 1089 bp, Bovine  19866881270504
  misc_feature (1)..(1): n is a, c, g, or t
nattattatgactgtattgatgatatagctttttattttttcttttcagtcaaagtcacagaaagaatttctaaaatgattttttttttcttgccactactttgcagaaagcaatacagacagagaagtcaaataatacccttcagactgaggtttatttgatgtttcaaaccctggaacacctttagaattatacctataacagtgccatggcatttaatgttatgttattttttccttctttctcatctgttttaaagtaggtttatagactagcattcaaagccagttaaacagagagatgaaagtttacagagatatagaaagaaggaaaggaaggctttgttgatagcagtaatagagggaagagattgaaactagtcaaacaggactgaagggagagaaagaaaaccaatagctgaagtaaaagaaagtaatcttgagaaaataatagtactactataacagttcagttttttactgagagtgtttaaaataaacttaacattggatgttaagaagttttaagtcaggagaaagaggtttttaaaaaattgtttttgatattatattcacaaatattcagtgggacagggctctccctttctctcctgctgtttgccttcaggctatttcgctgttcattagcaccttcaccagacagtgggctggaggaaaaaatgagctgaaacaggagtcagtcaattacagttctcattaggggcgctggcaaaaaaaataatgtgtgggtgggcggagtctgaaactaacagctaaagagaggtgtggggattatccagggtattttcttgtccaaatcattctgctccctgaatatcagagataattgcatgttgactatattataatacatttccatagcaattactgacatgtttgcagaagggaaacaaagcgaaagggtgaagtaattatctaggtcagtggttctcaaatttgagctcatattggaatcatctgcagagctttatgtaaaaaggcagattgtcaggctccacctatagagtttctgatggaataggcgtgggtcggtgcccaagaacatgactttcagcaagttatcaagta

SEQ ID NO: 26132 - DNA, 776 bp, Bovine  19866881784403
  misc_feature (1)..(1): n is a, c, g, or t
ntgtttttcctattttgattcggaaccttctcttatctatacacaataatttttagatatttacaattgcaccttcatattttaaaccaaggagtgttttaaaaccacatggggaagagcacaacaaaaagagccagctgttggcctttcaattaagaaaacaataagcctccacatagtgacaatgaaccaacaatccaatttcaacaaagcagtgaacaaagcaaaaactgcaacagatgctgttttcaatattatcaaacactctatatagaataaactcccttgaaaatttagcagagagatcatgccaatttttgattaattcaaatttgcctcagctctcgagagctcaagcagaaaactgacttgcccctatggtactagaactagaaacagtgatcagtgattcaaaagaaataaaactcaaatccagatggctatagggcaaaccataaacctttcaaggaaatttttaagtgaacgcattaaaaagcctttctctacatacaatgagacaactttttactgcctacccagcaaacaataactttcagcatcatctctaatgctttttgatttctgcctacttagtagaaccaacacgataccatagcagtgattctagtgggaatggttcacctacttgctccttcatttaatgcaatctcttttagcacattgcattgtgtgtatgtgtgtgtgtgtgtgtgtgtgcatgtgtacgtgtataactattaaggatctaattaaagttaaggttattcactacggag

SEQ ID NO: 26133 - DNA, 1077 bp, Bovine  19866881838216
  misc_feature (1)..(1): n is a, c, g, or t
nagttctattttgatatagcttgttagaacctggggaaaattcccaagattttttaattgaaacatttgacggttcctttcaaaagcctttagggaaaacccaactaggtagaatgcctagcattaatgtatttttatggttaacagcataatggcaatgctttattacctatacttataaaccagacacaatcattattaaaatagacaacttatttctcaactaaatatctaaacatttgggcaaacacacagaaagtcagtgtgcttataagtacacatggagaaagtaaaggcttcatttcctcagcaacttgctttgtcattctctttctacattctaataaccagcaatcagcatactctacacacttattttcatttcaagtattaaaagcctagttattccagtactttagcaatgtcaataagataacatttctagaaatcataaattgtaacgtgctggcttaaaataaatggtcaaataactaattcaagtgtaaatagacattttttcctctcagagaaactagtatcattaaaatacattttgcagtgcaaattctttcaatacaaactattttagtccaaaatatttgcttgaaattccgtattaccaatatataatattagatatgtgggcttcccaggtggcactaatggtaaagaacctgcctgccaattcaggagacataagagacacaggttcaatccctgagtcaggaagatcccttggaggaggccacgacaactcactccagtattcttgcctggagaatcccatggacagtggagcctggcgggctacagtccattgggtctcagagttggacacaactgaaggcacttatcacagacaatattagatatataattaatgttttttatctaatgaacttaagttgcatttttgtttagatatatgaatgtgtttgtaaagtatggtgatgcttttatcactctgctcttgtttaaatatttcataaacatttcttataatgttaaccaatgcactgtccagcccaggtttcctgttgaggtcatgaagttatttctcagagcacaaagaaggga

SEQ ID NO: 26134 - DNA, 1570 bp, Bovine  19866880517605
  misc_feature (1)..(1): n is a, c, g, or t
ntcagggggagggatgcagggagaaggggatgcagggaggaggaaggggtgcagggaggaggaacgggtgcagggaggaagagggaggccttgccggctgggaggctccttgcccatatggcccccagctgctgggtggctctctggcgagtccctcacccagatgtttgctcagcacccaggccaggctctggctggctctcaaacatcccaataacggaaaccatctcagaggaggctgtgttttcagccagtggccctggctgaggttgacaatggctctgacagtccagatagttactggacaggcaggaggcacagacagccaaggaggatcgaaggctgattctgacttccctccagacagactgtgagatgctgggagtcaccccacccttccttctggactgcacttgccacttgtaactggggaggatggtagattccacacagggggttgagcttcagaaagttgaacagaggacaagctcagctacaagtgctgtggccaagtgggagtcgtggttctccctgggtgatgggttttgtttgttttcattagttgatttacaaagttgtgttagtttctaggtgatagagttttttaaagtatttacttatttattcggctgtgccaggttttacatgcagcatgtggggtccagttccctcaccagggatggaacccaggccccctgcagtgggagtgcagagtctcagccactggaccaccagggaagttccacaggatagaatttgaagtgctgtttcttcccgtttctaattcttactttctagtatttctgacagtgagcatgtagtaaagtaaaacccaaaagtttcttttaatgatgcaaatgctaattgtgataaaaactttaacatatgtagtatgtcctagaataacaggtgtcttacttgaatttggtcaatcacaccttcttggtgtgttgatttttgtttgtttgcttttgttctttgtgcttttcttggtgtattgaaagaaagtttggaatgccagttgttagaccaatgttaatagttactgttggtggtgacacataatctaaatgaaagggcaacgtccctggtcgctgcgaccccatggactgtagcccaccaggcctcctctgcccatgggatttcccaggcaagaatactggagtgggttgccatttccttctccaggggatcttcctgacccaggaatagaacccgcgtggtgctaaagctgaaactccagtactttagccacctcatgcgaagagttgactcattggaaaagactctgatgctgggagggattgggggcaggaggagaaggggacgacagaggatgagatggctggatggcatcactgactcgatggatgtgagtctgagtgaactccgggagttggtgatagacagggaagcctggcgtgcttcgattcatggggttgcaaagagtcggacacgactgagcggctgatctgatctgatctgatctgatcttgcatcttctgcattggattctttactgctagtgccacgtgggagactctcaaactgggtaggagaaagcagagtg

SEQ ID NO: 26135 - DNA, 1797 bp, Bovine  19866880542916
  misc_feature (1)..(1): n is a, c, g, or t
ngcccaggggctggagtactattttcctccgcaccagctccttgacttccttgggggatctttccctcggtcccccacagcatggatgaaggcctcacgctgcttatcctcatggcatcctgtgcttccttacatgaatctattcatgattacacattgctgagtgtgattaataaatgattgtatctttgtgtggactctgagcgcaagggcagtcgggaagcatgtatgtctgtcaagccctggtggtataacacagtgcctggcacatgggggaggattaagtatctggatcggggaagagaagggagagaaaagaaggatagaaagatgcagaagtgggcctgggaatgctccctggagggatcgttagatgcagtcatggaaagctgtcctaggacttttttggacgctgatgccctacggcagagctgcagcatctgtgcacgcagtggcacctcactgcctcagttggaatcccagctctgcctcctctggctgtgtgacccggaatgaggcacttgaacctgctaaaccccattccctcttcggtagaactgaggataatattaataccacctcataggatccttgtgagaatttaatgagacaacacatgtaaagtgcttagagcatttcaaaggactcaaatagtaccagtcactattattcttattgtaatagctgtaatggttccatattcataaatatgctggtgtatgtcttaccacagaagtaccatgtgttggccagaagaacatactggaataaagagatttcttatataaatgctagcataaatctcttgggaattctataaattcaaattctcctgtgagtactgattgtgagacacctgcagcagttcgttaggagaagttagtggaatgtgtacgtgtaggtatgtgtgtctgttctcattcatgcttcagtcaggcttctcaactcaggagctaggtgacttttttctttggtgattgtatagcagagtgagtcttaatctagaattttgttgaaatcaggaaaacgagtggacttgccgtgtgaaaatctgacttatcagtgaatgcctaacctctaaataatcttctttttgtgcccttccttttttcttctgattattttccttttctctttggagacttaggccgcttatcttcccaagaaattctgacaagatttttcagaagcatcctgaaaactgcagacagcgttttgctcttggttgtgggaagcgtggagacagctttgccagccccgcggcacccaggctctttgctgcctagggaaactggcccgtggtgaagccgtaacttgttcccttctgattctcagtcgaagtttattagcttgtgatttaagcaaaccatctggtgctgctggcactgcacactgtccgcctagagctccctacttaatgtcttagtggaggcagtttaggttacatacttgaatccctactctggtctggacttttttttttaatgtcttaaaacatgtgcttttgaaaatcgtactgtgacccgaagcacattttaaaatcgtggagaatttcttcgttgtttggtgtggtgtgtattacttcttttcttctactcagctttcattaccttcatgtctgaattcttgttcagtcgctaagttgtgacttcaaggactgcaacacgccaggctcccctgtccttcactatctcctggagcttgctcagactcatacccattgagtcggtgatgccatccaaccatgtcatcctctgtcactccctttctcctcctgccctcaatctttcccaccat

SEQ ID NO: 26136 - DNA, 1699 bp, Bovine  19866880721771
  misc_feature (1)..(1): n is a, c, g, or t
ntgggccgcttccagggccgccagcccgtcctccgctgcccccctgcctctccatcccgcccacagggtcctgatctgtctccccccatcagctctgctctctgacatggaaggcagcgtgggagcccacacggtctccctcacagccagcctgtcgtgacgtgtttttgtgggttgtggggcatcttctccctgccgttcccttctcccttgctccctcccgtgcatgttgctttgagaatccagattgagttgctgttgcatttgtgattcttggcccgagtccctctagaaatcatattactactctgaattcagcgagggctggaatagctactaagaacagaatacattatcataacattcagcagacaaagccagaaaatttgtgccagaggcaagcttggtatcctgtatgggtcccacggtccatcttttgagaactttaacagcgtgggtgtctcggtgatcggttgacgcgtcgtgctacaaggccatcgccgtcagacagtcttgacttggagatgcttcaagtttaagaggtcttggaaaagttgcgggtgttccccctcccccggggttagcatctgttccttcagttcctcctccagttgtttttcgattgtctgctctgtgcaggctgctttgctcagcagccttggtatgtaaaaaagaattcattgaggaacttgctgaagcacagggggaattaaacatgtagccaactcctgagacaggagacaaaatgaatgcttcaacaacagtgttcacttccgacaaggggcgtctccatgacgaaggataagttagatgggaagcggcagtgtcggaggtaagatggtccatgtcccagggtgagggacccgcatcagagcgaaagcacagaggatgaccaggatatactagagatgaaactgggaaagtgggacgggacagatggtggctgctgtgccagagggactggactctgtttgtagggaggaaatcatttaaggtcttggaagaggaggagcaaacttaacccaagccatcttagaaggggttgagatggtgctgtgtgctcagtcccttcagttgtgttcaactctttgcaaccctgtggaccatagcccaccaggctcctgtgtccatgggattctctagttaagaatactggagtgggttaccatttccttctccagagatggttgtgaagctattgcaataagcagaagatgctaagatccaagagccggggtcaggtttgtgaccaggagatcagagaggaagaaactaaaccaaaagaaaggtggcctgaagaggatgttcacaggaattcctcaagagaggagatggccttataaacatatttttaaatgcttcgcctctgtttttggcttcactacgtagaactgcgaatgaaaacagccctgtctcattggcaaggttgcaggggaggtgggtgtgaccccaggggacccggaggatgggaaatggccacccttatgtgttgactgaaagttagcgcggctgttctgaacagtttggtgacatgtccagagctttaaaaaggtgtataccctttgatgcaggattctaagaagacagccgtagatatgcataggtttatgtttagaaaatttcaacacactaatattaatagtagtgaaaacagactacatttctaataattgaattcgtgaaataaattagaatacat

SEQ ID NO: 26137 - DNA, 950 bp, Bovine  19866880842090
  misc_feature (1)..(1): n is a, c, g, or t
nctcaatagacatgagtttgaacaaactccaggataggggtttgtgaagtgaaggacagggaagcctggcgtgctgcagagagtcggacgcaactgagcaacaacaatgtgagaaagtttggttgtcagcaacgtaaacggtgcttttaaagcagttcactgatttctgcagacttcatcattcttcatcagtgcaaacactgaagatgctgttgtcatgaaacattttattgataaacatatggaagctacgtgtttaacattcaagggtctgaggagatgtgacagttaaattcgcagccgtgatctcttcgccgtgtgtaatcattccagcatttaaattaggctccttcaagatgcacctagtaagtttccttgtagatggttgctctggtgtcagagttcgggtctcctttgttatggtgactggttatgaaatgaggcgcttgacagactgaagtgagactgctggaaatacgtcatgtctgccttcacggtgacagctggctacaaggcaaaccccaccagagcctctctgcagttgacagggacttcaaaggccaccggtgctgccacttcaaaggagggtcctgccatctctggctggttgaaagaagcagttaaatggccatacccagccgtagcagaaatctctgtgtttagacttctccttttgatcttagagagatgtatgaaatgcgtgttaagttaaaggaatgatacagtctgcagtgatggcaacccaatattattctgcatttcaatccacttgttagtggaaatcacccaaatatgttcaaataacagcaagtctaaagactcaagtgtctcagcgaacatttgaaaaagagttgaaagtgtttgaatgctgtagtcaccttcacaaatgcggaataaatcagatgtaaattaaaatgaaactctgtgtgttttaaaaactgtccttcagt

SEQ ID NO: 26138 - DNA, 4640 bp, Bovine  19866880858627
  misc_feature (1)..(1): n is a, c, g, or t
ncgccggccagaggaagctgtgccaactctaccaggagcacatggcctacatcggggagggcgccaggacgggcatcagggagtgccagcatcagttccggcagcgccggtggaactgcagcacggtggacgacgcctccgtctttgggagagtcctgcagatcggtgagcggggcgggcggggcctgcgggcaaggagggcgtctccagtggcgggtggtcagctggccctgtttcccacccagcgggcaaggcctcgagctaggggtcagggtccgcattgagtctgagcacgttgagaagcccactcaccaccagtgccccagtttcagctccagggcctcctccggagctgtgggcagagaacacagaattgcagccctgactacctacggagtttcatctcttccttttggactctgggagagaggctttgggtcagattggcagtggctgtcattaacccaacccagatccagtcctggccttttcatttgaaagagaatgtgtgtgaaagtgggggatgggcagactgaaggaggaagatgggcgcccaccggccactccctgaagccctcagcctcccccccacctggattcccacatttccctctccagctcctggcccaagattctttggctgccccattgcttagatggaggtgtgatctggggtctaattgttttaggtccttttgaaatgcagtcctcccctccctggcaagaaattgagaaatccggccctattctactggctcttatccccagggccataaaagaaaggtgttagagcctcaggtcccagctcacattctcccagaacagcttcccccctaaaggcgacattctggagtccccctcggctgcgtttctggcaggcagtgggcagagcagctcaggcttctctgcctctgttgtcgagtcctacctggcccacatggagaaagtgaggttggggaagcacacttggaaccttgcttctcttttgaatatcagcttgacatctgtgaaaggaatgctcatgagttcctgtaaccctcccactgggcaactttcccaaaagaatggacctgggggtcaggcggggttcattcatagtttatccttgttcagtcactccgtcgtgtccgactctttgtgaccccatcgattgcagcacaccaggcttctctgtccttcactatctcctggagtttgctcaaactcatgttcattgagccagtgatgccatcagcttctgcatcagtccttccaatgaatattcagagctgaggtctgttaggattgagtggttggtttgatctccttgcagtccaaggcactctttatcagttcttctcaaatagtcatttcttcctggtgggtatctgggtcagccgttctccctgcccactgtatctcaggtgaggaaactagaatggcccaggtatgttgtaggccaaaatcttggctttgtctgcctaccaaagctgtataaaaaatacggagaaagagtttggaggaaataggaaggtggctttaattctcagccggcagagaggggaacacagtaggctcatacctcaagaattacgcccccacatcaatttggtcttcctcgcaaaaggtatagagagtggcaccccgtagtcactgccagggaactagtgtttctttgggaccaagtgaatgcctaacattggccagattctgttcagttcatgtagttttgtcacgtcacgtgaagaccaaaaaagtgaggctttgctttagagacgaaggtgtgtcgggaccacagtctccgtggagtgtgccagtttgcgtggggagggcttcccaggtggtactagtgataaagaacccgcctgccagtgccggagacgcaaaagacataagtttggtccctgggtcgggaagatacctggagaagggaatggctacccactccagcattcttgcctggagaagcccactgacagaggagcccggcgggctgcagtccagggggtcgcaaagagttggacacaagtgagtgatttagcacgcacgctttcaccagtgaaagcggacaccagtctctgtgccctgttctgtcacaaacggaaccctgctgttgtccttgttgtcactgtccctttctgcaccttgcctgcaggcttgtgctgcctgggaaggtgggcggaggctgggttctcatgggccctctccctatgactgttgcggaacctccccttagagccactgcaagcatccaccaccagagggcagcagagcgccccagagggcaccaggccccttacctggaggcacctaccgggtggctgggcagctgtgggacagagggcgtgatgttgtcctgctgtctccctgttgggtggagatgcaccatgtctcaggagttccatggccgctggtttatcagcctttatcctctgaattgtttcccacatgggcttccttggtgtctcagatgggtaaagaatctgcctgcagtgcaggagaaccaggagaatcccgtggacagaggagcctggtgggctacggtccacacaggtcgaaaaaagtcagacacacctgagcaactacgcacacacacagagatgtccccacactgctcctcccctccaaagtccccagttacctgctcgctgagagcagcacgaggtccgttccgaggctcccctgagactctcgtgctgccccagtagggcggggttgcctgcattccaggcccagtgatgctccaaaacaaaggaggcagagagattggaagagatgccaggtggattcaccagagggtgatctcaccagctacatggtgggctgggaccctcagagccctggtgtctgcagtaaacgctcagctgcagaaacattgtttttaaaggcagttctgagaagggtgacctcagctctgcaaagtgtgtttactaaaaaaaaaaggaaatcagacatatgtaacttggaaaagagaaaacataaaaagcatattcgttgttttcaaatactgaagggctgtcagatggaggagggattagctccagcagagggaagtgataggaagtcatctttcagcttgttctgggaaagaacattctggtgattagtgtcatttaacacagacagactgggtggccttgggaacccaacatgattctccaagtgttagtgctagatgctcagtcgtatccaaactctttgtgaccccatggtctatagcctgccaggctcctctgaccaggggattctccaggcaagaatactggagtgggttgccgttccattttctaggggatcttcccgatccagggatcagacccagggatcaaacccaggtctcctgcattgcagacagattctttaccatctcaatcagggaaggccccgattctccaaggcaggttgtaaaagcaatgctcccgacagacagagtgtaggtctggtccagcttcagatggtatctgtcctgggatgccaggtagggtgtcaaggcctgttataagaagatttctcagacatgactccctcaaagggggatccaggccccctcctcccaaagagttctttgccatcttaccatcctgggtgctgacacagtctgattccctagacccatagatcctgactctggccgaagttcacaggggctcaaatgtcagtcccaaccactggtccccgtgtggcttcctgtatcacctggctttcctggtgctgttctactccatatctgaccagaagtcggcccctgcttaaaggagcaaaactgatgtgccccgtgtgttctggtggcaaacttcactgtgtcctgcctgaccatccagaagtagggccaggtgggagatcacactggacgtagcagtgacttcagaccgcctgcctcaccacctgccaagacaaggttatgggatggccatctttgaccctggaggctcagaagagggggacatggggagcagaagagtctgcccaattaaaaaaaatttttttttaaaaaggacttccttggtgatccagtggttagggcttcacgcttccactgcagggggcacaggtttgatccctggtcagggaactaagatcctgcgtgcaatgcagtgcagccaaaaagaagaaaaaaattttttttaattttcaaaaatgttaatttttttaatgtttaaaattttttaattttttttaatttttaaaaagttgaaaattttatttaattttcaaaaagaagattctgcccagtttcctcacggaaatcaggactgaatctcagttccttgctaagaacaccttccctgtttccatgtctgggtccatacgagtatgatttattatttctcataatgattttactgaatataatgcacattccatacaacacagcattttaaagtgtacagttcagtgtatattcagcaggctgtacagccagccaggatgttgttacagccctatggagacaccgagctcctgttcgtgggcgtgctccatgtcttctccctcctccccaaaccccagacaacactcatctttctgtctgtatgaaagttcatactgtggacatttcatataaatggggccatacaatatgtagccttttgtgtctgtccaatgcaggataccaaatgtgaagtgctcacttcctgttaatacctcaaggttcatccatg

SEQ ID NO: 26139 - DNA, 2506 bp, Bovine  19866880864163
  misc_feature (1)..(1): n is a, c, g, or t
nccctgctgctaagtcgcttcagtcatgtccgactctgtgtgaccccatagacggcagccccctacctttactcaaattcacagggatattctctgtgtaagttttcttacacagtaagttttcttctagtacttttaatagtttacaattttatatctttaatgtacatagactttattgctctgtactgtgtgaagtaaagatgtaacttatttttttctcaggcaccagttgttcagactccatttattgaatgatttatccttttcttactgttttgaaatgttacttttagcatgtactatatgctcatgtataatttagattctattcttgggccaggtctgtacagttttaatcactatagctttaaaaggctttgagtccttttgagaaatcccagggttcagatgtggttttggagtccaggttttttctccacgatgtccagtgggtgttatgcagtgtcctgtaattgtgcatgtcattttctcagtgaagtgtatgaataattacactaggtgaggtacttataagtgataagtgacctcatataagatcatgccagatattgctgctaaatgagttaaagagggggaaaaaagacttattttcagagtttaaaaaaattttgcattgtaaataaaggatcatggacctatagtgtatcaatatcttgctatctaggggacatcttcctttgtttttctgtttcagattgtttctgtggcggttgtgccttactcccccatttgaattatagagttagtctgtcaggttatgtgaggagtcttgtagggattttcattgacacgtggaggagctggaggacaaacgacacatcaacagtgtttgtcttctcatctgtgaacatggataactttccttttgttcagcaaagttttagtttttacaaaaatttcatgcacatttctgttagatgcatgtcagagcatttttatggttttgctgctattgtgaacggaattgaaaagttatattttccaactgtcattgctgatggacaataaagtgtccgtgtttatgtgttggtctgtgggtgagtagtttgttgagtcttgtctttgtcagttgatgaccttggattttccagttagaaaatgatatgttgaaacattgagttttatcttcttcttgccagtctttatgccccttatttcttttttccatttgcttggtgtggtttcggtgttctgttctgagacgtgctggatgttttaggaatgatgcttactgagaagtaagttgtgctgtgaacaaatgcaccagtcagcagatgctgaaaggggaaatcctcaagtaggggcagtgaaagtgtctgcgaggggagatgtttgctcctgcaagagctaacgtgcagtactttccgttacagataatggcatgagctgtttcttctgggttggacagcgagggcctgatacttctgatgagccttaagccgacttagagccatagcacagcctcccagagttccgtgttttgctttctgctgcatacctttcccggctcctgaacccatcttgcagccatgtatggaagtgcccgctcagtggggaaggtggaaccgagcacccagagcccggggcggtcccctcgacttcctcgttcccctcgcctgggtcatcggcgaaccaacagcaccggagggagctctggaagcagcgctggaggtggcggtgggaagaccctctccatggagaacatccagtccctcaatgctgcctatgccacttctggccccatgtacctaagtgaccacgagaacgcgggttcagagacacccaagagcaccatgacccttggccgatccgggggccgtctgccttatggcgtgcggatgactgctatgggcagtagccccaacatagcgagcagcggggtcgccagtgacaccatagcgtttggggagcaccacctgcccccggtgagcatggcctccaccgttcctcactccctccgtcaggccagagataacaccatcatggatctgcagacgcagctcaaggaggtgctaagggaaaatgacctcttacgcaaggacgtggaggtcaaggagagcaagttaagttcctcgatgaacagtatcaagaccttctggagcccagagctgaagaaggagcgagccctgaggaaggatgaagcttccaaaatcaccgtctggaaggagcagtacagagttgtgcaggaggagaaccaggttagttcgcgtgtgttctggcataaatgaatcagagttcatgcaaatgaaacgatttttctcttggttcatttcttttcgtttttcctgtttttcttagtactatattttgcgcccccatttcttggccttttccagactggtcctgtgccttaatttttttctggttaccgtgtctgcttgctcatcattctttcccgttttgcttctctttctcttcctgtcttttctttcagcacatattttcttttttctgttcttgtgagaatgtacttttgccacgt

SEQ ID NO: 26140 - DNA, 981 bp, Bovine  19866881010880
  misc_feature (1)..(1): n is a, c, g, or t
nttgacagtaccggaggacggaaattaatttaaaaagttgatgatgtaaatatttattaagtaccaacagggagtagcagttctttctgttgacgtttataagaaagtataacttctgaatcttttttaaagaaaaattctttaactggtcaaatttgaggattttaggtggaagaaaagcagcttggtatgattggttatgtatgagatataaattagactttcgtagaagttgaatgttaaattgatgttattgaatttatccttgagttaactagccatcaatatacctttctgttggtgctgaaaatatgcccatcaccaagatggtttttatcatcaaccaacctgaaaaagtccatatttacgaggaaaaaaattatcagcttacttctctattttcaaataattcaggcagctaattgtgcctgtttttaaaagctgtgtggataaaaaagcaaatgacagtaacctttctaattatcaagctacattcagaggcaaaatcttcgaatctttcgaaatgactgtggtgggaacttggcacttgagtccagtggacgtgaaacagtgcacagggctctggtgccaaaaataccatatgcgctgaaggagggtgaacgccgccttatctggattccgccccttgccctaattaaacacccgtgttggcaggaacagattcttcctgcacccactataattaccacacaatcctaaaattgtatgactttgctccaaaaaacgaagggtgcaattttaaagtaaagtgaaacacagcaatgagatatagagaattgagaatgctaatgaatagattacagtgagccagtctgggccctaattaaactctgcattcatcacaccctctgcagtcctcagaggtcagagatttccactttacaaagaagattggtttaataggatttacagtaattaaacaaatttccccatttcagtttgagattggggatttagata

SEQ ID NO: 26141 - DNA, 1712 bp, Bovine  19866881163163
  misc_feature (1)..(1): n is a, c, g, or t
naatactggagtgagttgtcattcccttctccaaggggatctttacaaaccagggatcgaaccccttgtctccggcattgcaggtggattctttactgcctgagccaccagggtagccccttttgatacattaagctgggaatttatggtgaaacatgacaccatgaaggaagacagcaccttcaggtgagagtctcaggcctggttttctacacagattttgcttgttagtgagctttctctccggtccagtgtagacatgattcctgaactctacctgatgttcacctgtttccagagagaatgcatacaaatgaagaatgtgtttcacctgatctaaaatgaattgctgttcacaccacaactacggatgctcgtctgaaaagaaaaacaagcctccactgactgactttcctctaaagctgctgtgccttccttctccccatcctggtcacactttttcagacttcagtacagtactgcagtcctgatttcaagcgggcagaactaagatctgtcagcccccactcctcctctggaaaaccgtcccagaacaccaggacaacaaaatgcagagacaaaccctacctttgatgatacaaggcttatgacacacacaagtacagcacatacagagaaaacagacatgcaaattctcagcacctgaaagtcgacccaaagtgcctgctgagaaggaagcagatttacctgtagaacccaaaaagacctcaaagatgctcaagtccacagctgtggaaaggtgtatgagccaaagaagtatactgggcttgctttacaaacagtggttctcaaacaacagaaatgactactgacggaaggctgttccatgctcctgacccgtgggatctgaatctcaggggatggctttctagactttcaagactctttcaagaaagtacttgagacacactatttctacaaagaactgacttaaaagaccaacagtagatccacactcttgccaagactgcgtttttaatatgtgtatttgcttttccaaattcactaagtacatcaaaacctttcaattccattgtaaaaccaatcagctattttaaactctaaaattctgatgacactgtagatccttgtaaaatggaccatcactgcacttgaaaatatcgtggactcctgtggtgtggctctagccaacagatggtctggaaggcaagcatcttataatgtatttacaggcaaatttcctccttgccattttgatggcaagggccatcacaagacaggtgaacttgaggatcttctgctttctaaatctctgcctgtaaaaatagctggcaagctcagggatttttttgttggggatttactcaaatcctaccaaaatccctagtgaattatgtcttaaagccaatgatttgtgttggaaatctggggttggggggtaaaaacagcttagcatgagcctcaagagatgaagttaagtagtgggctcacagtaacatctgggggatggatgtgtacaaaaagatttatatggccttttctttcattttgtctttactatttcataatagtatgtcctttaggcctgcctcatgtttgacggtataatgcgaacagaacattccagaacatgaacctcccttataaagatccagtcccttcaaaataacggtctgctggttatcatcacattcttactttgggttggatcatttactgtgtcttctttt

SEQ ID NO: 26142 - DNA, 782 bp, Bovine  19866881217231
  misc_feature (1)..(1): n is a, c, g, or t
ntatgcttcagatataaacatgcaggaactccatttcctccagagctgcttgctgggaggatgtggtgggggcttgtgctaagctcactgccggctgggacacctggacctgtcctcctacactgcccacaggaaccaagagactggattccacatagggctgcaccattgcaggaaagtaacccggggcagccagcgcctctgtcggcatgggaggggacaggactgcagaaggcaggcacacagaagctgcgctggaggagggggcaatgtttgagtctcctgggtactgcgatggcagtcgaggtgggaagccctgtgacagaaacgaggaagggaaattagtgcaggttgggtcatcaaatgagcaaaacagcaagacatgcaagggaaagagaaaaagaaaggcaagcacacagcaaagaaagtagcccaatctctaataatttaaagaagattttcaaatgaaatgattgactgatttcgatttagaggacaggacagtacctaactgaacttttaaactgctacttttttccgagatcattttaaataggaagaataaacataattcctccaaaaaaaaccacctactttccaggcagtccaacatgaaaatgcaaaaactcttgaagggtatcagtcatgccagtcacataacgacttgctagtattctaaatctaaaccctggaaggtttccattgataccatgttggctacccattactcctcccataaaaaaacgcagcctgatacaacctactggttgagtcataccgag

SEQ ID NO: 26143 - DNA, 1666 bp, Bovine  19866881261174
  misc_feature (1)..(1): n is a, c, g, or t
nctgcatgtctgcacctgttctgtccgctcgaccgctgcttctatttctgacctcccgggatgcactcctgttcagccttcaggaacatctgggactccccccagggtgacacaagcatcctcctgtctgcctcaccgcgtgttcaggcctcggtcaccgccctttcctggctgggtcatagtcatctgtgtacttgctgggctcaatggtcaaatccgtcgcatttcagcgctgagcacagagtaggccctcatacacgctggtgcagtgcatggaggaatgtcagaaagtgtttaaacaataggagatacactgtaaacaagcttggcttctctttggctcagtggcctgcggtagggagtctcgtgcactgagcagaagcacgtggcaggggcggggccctcccttgggcagggaccagtgtgcacgatcctgtctgatcacacatgagccccgccccctcttgggcctgaatgtgacggcgtggcctggtgggaggacacggtgagagcaccagggtgggatctcagctccacaggtcaccctctgggggccttggaccagcctctaaccttcatcttcaagaggagacatttgataacttctatactttcctaattgttaattctgatacaggaagacttcacatggaaactgactcttcttcatcatttcttttttctttttcttttttagcttcactgagctaaaatcgacacactagtaatatatttaaggggtacacctgatggcgtgttgtacacagacatcgtgaacagtttctccagcctttcggttgagttaacacacgttgtgtcacgatttcctctttttctgtatgagaacccctaagccctgctctcctagcagatttcagtgtgtgacacggtattgttgacggtggtcaccaggttgtacattacacctcagacctcattcatctcggaaatgaaagtctgtgcctttttaccccccacttccgtttctcacacctccagcccctggcagccactgtccctctctctgctgctagaatctgacttgacgtttctccctccgggtttccgtgtgtaggtgataccacgcactgtttgtctttctgggtctggctcatttcactgagcgcgatgccctccaggctcatccacatgtttgccagcgtccttccttggttgatgaaggataattctgaactcagtgcgaacaggcttgatttatttcacctgaatacgtctctcctttcagcttcagagcgagcaggagaaaggtgagcgggacaacaccgagttgcaggagtttgccaacgccgtcctgcagcaaatcgcggatcactgccccgacatcctggagcaggtggtcaacgccctggaagagtcatcctgacccctcgcgggaacagccggcccagcagcccgagcgttgaacccgggagccaggagaggaggcattcgaggaaccgggccctaggctcctggcaccagacacactacagaccctgtcccgtctcgcttaatccctccagtgaggcgccagcaccatttctcgtctgtcttctaacctgcttccttctttgggtgtcgtccccacactaactgtcctgccatcccagccaggcaagcagccgagtctccgtggagagctgccctccggccatcagcagtgaca

SEQ ID NO: 26144 - DNA, 2275 bp, Bovine  19866881261758
  misc_feature (1)..(1): n is a, c, g, or t
nggcaaaagcctctggacgggatggggagtaagagatgaaggagaggcaacagggctgcaggaccccgtccctgaagctgctgagctgcagataacccgggggactcaggagtccaagctgggtaagatgacagcacgtgcaggagacaagggaacgccactgcgtgacctcagccctgccttttaccctctcatagctgagagtggtccacagacagtctctccttagtccttctggtccatgtgtcaatccaagtacaaagaggtgtcaaaaaatgatacagggattatagagtaatgcatatttagagttatttttgataggcagctttcactcattagcccagggtgtcctgaagtggacacctggctattccttagtataattagtggaacagaagtacactccaaaagaaggctgaaattgggatcagaatctaaattagctgctgtgacttatgatctcacatctcataatgaattggctctaacatcccagagaaaaggtttgggcccctgaaaacttgcagagaatgggaagctattaggcctgcaagtgctgtccaatacagttaacatgagaactgaagagcaagtgccaagtgtactggagtataagtatgtaagtgtgttacagctgcttttacttacaactagttatctaacattaccataacttcaccgaaggggaaaaactctacataatagagaaaaaacaggcaaaccacaaaaataagagattatgatttaactatttttttgactataaatactagcatgttctttattcccatacagctaaataaaacaaaactttaatcaaggacattatcacatgacatacccaaacacctatatgaaatttacattcatcccaattgtgattatgaccactccactcattaaaaagagagaactgacctggactttactaaagagaaaacagtgtgttttcttccagctgcctaggagtttggggacatgtgagttctatgagtcaagaacaactacacatgaaggaaaccaccagacagcaatacaggcaacacaggaaaaggccacagtactaccctgtcttccaggctcaaaaagaggttctataaacatggggagtgaaggcaaggaagtgagactataggaaagtcaaactccttcacaattaattcaactcaagtagccaatattcaacagcttctacacacagatggagacagaaacacaagacaggatggccacggctgacctggtccagggcttttattccccaaagagctgctgcgactggacttgctccctttgcttttggtgggtcgcctccttctccctgcaaggggggctgctgggggaatgatgacagcaggaggaaccttgcccagtttggtgtataaagactcaatttcgtgcttctggcgactctgcaggtcctgaatctctttaagatgtctacaaaagataaccaaacaattaaaaaatagaataaccacctctgttccaaaaagaattaacatgatttcaccttcacgcacaggtttacttactaatgaatctgtccctcaaatgcacttaatctaacttctaccagcttgagattctcgtctgtcagctcttcttgctggcctctaccacccaagccaattccaaaaagctcctaagtgaagtgaagtcactcagtcgtgtccaactctttgcgaccccatggactgtagcccaccaggctcctccatccatggaattttctaggcaggagtactgaagtgggttgccatttccttctccagaaaaagctactagccaaccacaaatggctgatgatgttccagaaggatttcctgactttgaggctctatacaggatactgaactggcaactcaaatccagtttgtcaactgtgaccaagaaaacctgttcaagtattctacaccccagtgccattaccagattcattcagtaggctaagaaatggtcaagattaggttaataacgctgaagtgctagtgttaaaaaccacatgtagcagtcatgcacaggtgctgaggcagttctgtaactagggatgccctgagtccttccaagaactacatccagaggccccgctcctgtgtcacctctccagcaccaggaactgggtcctcacacagctctgccggccaccctcatgggagaaacacactcacttttcccgtagtcggcgaagctctaactttaagtcctcgtcttcaatgtctgactcattgtcgctgctcatgtaggaagagtgaaggaattgctgaggctc

SEQ ID NO: 26145 - DNA, 1436 bp, Bovine  19866881324174
  misc_feature (1)..(1): n is a, c, g, or t
ntcgctgggttctgttctgacggctgcctcccaccagtgtgaaacagaaggatgaccttattctgtgagcaggacaactgtgaaaggagctgtgtatgtgaaagtctgtggaaagacagagccacctagaatgtccctcccaaaccagtcagcagaaggtcttctgcagggggctcccaacagatccctgaatgccacagcaactccaggggcttgggacccggggactctccaagccctcaagattgctcttgtcgtgctcctttccatcatcaccctggccacagtcctttccaatgcctttgtgcttaccaccatcttcctgaccaggaagctccacaccccagccaactgtctcattggctccctggccatgacggacctcttggtttccatcttggtcatgcccatcagcatcgcctataccaccacccacacctggagcttcggccaactcctgtgtgacatctggctgtcttctgacatcacatgctgcacggcctccatcctgcatctctgtgtcattgctctggacaggtactgggccatcacagatgccctggagtacagcaaacgccggactgtgggccacgcagccgccatgatcaccgtggtctgggccatctcagtctgcatctccattccacccctcttttggcggcaggccaaaactcatgaagagatgtcggactgcctggtgaacacgtctcagatctcctacaccatctactccacctgtggggccttctacatcccgtccgtgttgctcatcatcctctatggccgtatctacatggccgcccgaaaccgcatcctgaacccgccgtccctctacgggaagcgcttcaccactgcgcacctcatcacaggctctgcagggtcctcgctgtgctcgctcaaccccagccttcacgaggggcattctcattccgccggctcccctctcttttttaaccacgtgaaaatcaagcttgccgatagtgtcctggaacgcaagaggatttctgctgctcgagagaggaaagccacaaaaaccctggggatcattctgggggcctttatcgtctgctggctgcccttctttgtagcatctctggtccttcccatctgcagagactcctgctggatccacccagcactttttgactttttcacctggctaggctatctgaactccctcatcaatccaataatctatactatgtttaacgaagagtttcggcaagcgtttcagaaagttgtccgtttcaggaaaacctcttagtcttatttgatggtgactcttgatatcttttatgtcctgaaaaccaactggaaattgtcttttttatttttcctgagagttgggttagttccgatatcttggggtttggtccagttgatagaattgtctggtgttttttttttgctgttgtctgacttctgagccaccaaaa

SEQ ID NO: 26146 - DNA, 932 bp, Bovine  19866881361735
  misc_feature (1)..(1): n is a, c, g, or t
ncagaactaactaacagactctcaaacaagcaaacatcttttattccgctgtagggtaagagaccagaacaagcagaagtattttcttaccagagaaacgagtttcattcaatgaagaacaagagttccacaaatccagattaaaagtttctgagacagaggggcaatctatctgcctaaagatctcactaaacaagagcactgtagtgaccagttattctcaattccgtcctgaggcagaagatgcatcttgttcacttctgaagacttcatggaaggttgaccaaagaaatggggtattatctactggtctatttgaacattctctgtatgagaagcaagagtggctaacgtaaaacatgggtagtaatgtgtgtgtgtgtgtgtgtatatatgcataggtacaaatgcacaatatatacatcaggatataattgctacaaattaaatctgaaaataaatcagtcataaaacagataccaaaataaaggggagaagcaaatgaacatatactggggaaggaacttgtgtccaacacagactttaaggcaagaacacgcatagcaactgatgattaaacacaagcgctaaattaaatggtcattccttttctcttgtgtactcacatgcagcattctataatggtttgaaggtcttacctgtgttttacacaataagacatcttacagaaaatacttagtaattctttcaagtaacttgaaaaactctccttgccccccacccccaaaccatttgtatgtctaacttacattgctttgaacagtttcaactttaaagtgctagagagcatgatctttaatcaaatgctgattagtttaaatcctgtgaacagtgtcttcacagagtaatgcatgtatcccaccctgcctgaaccactccgacggcactctataataaataacctgcctctt

SEQ ID NO: 26147 - DNA, 3339 bp, Bovine  19866881385217
  misc_feature (1)..(1): n is a, c, g, or t
ncctgcagtcccctctggctccaatcattccctggaaatggtcctcggtttggagagggacttccagcacccggcgctgttaggactaggaggaaacattaagggcctaaagctgtgtacctgccctaagtgagtgggggagaaggcaggatagcatctatctccgcggggagcaaacactcagggggatttggggaaagagagtcaggaaggctccaggggagggacaggaatttcagtaaaacaaatctagaagggagggcgccactgagccccgctattaacacgttcattctccttcctctaggaagaaagacatcacagagacagtaatgcctgtattttacatatttcactgttgctcatatatagacacgcctcttgcaagagaagggggaggggatttttggccttcctggtaactgaaaaagcaatagcttgtttttaagcttttcttagtgctctatcttgcccccagcagagcccccctcttccacatgtaacagtgtggctgagctcagttactggcaggatgtcacaggatggggggcagttttcatctagaaaatgctcagaggccctgcagggacaaggacggtatcaacccactgctctggccttcagtatgtaaaatggggtttggaggttctcaaaggcaagagaaatttctcacagtgtccctgaggtttacattgcaccaagatctcagatcctagatagcctactttaaaaaaaaaaaaaaaaatccagttgtaaaatagcagtccagggacttccccatccctgccagtactcagtccttcctgaggaaggttctgtgtaggtgtgaggacgtgggaggtgatggatggaggaggcctgctccttggaggtgggatgagaactcgagagagacagaagttccccacctggagcagatggaggccagtgagagataaagtgttgtgaaaaggtatggagcctacaggatgggggcccaaagacggagagcagacggaggaagccggggagggtgtgggaagggcagatggaaggcgcagcagagataagggctggaaaaagcaaacaaacaattaagggtgatgaaatgagcagccagcagaagtgaggtcaagattcgacagacaagaccggatgagggtagatgcctggtcccctctgcctctgcaacagagtcagagaaggaaaaccttcctccctgtgacctcttgctaggaggcccaggggagtttcctctgtcacgtgcgcccactcgctaaagagaagagcagagggcccagggccccctggtccttgggagctgcagctgagatggcgaggaacgggaagcacgtctgaaaggctccactgccctccagacacagataccacggagcacaggggatgcgaagacagtggaaggcaactgggcttctttggtgtctcagacagaaaagaatctatttgcaatgcaggagaccagggttcgatccctgggttgggcagatcccctagagaagggattagcaacccactccagtgttcttgcctggagaatcccatggacagaggagcctggtgggcccacggggtcgcaatgtcagacacgactgagcaactagcacaacacctgcaggtggtatttactgggatcctgaaaaatgggtagaatttgggcatttaggagacaaggtgaaaccttaacctttttttttgtttgtttctttttatcaaccaggttagatgcccaaagactggcaaacagagaggaggtggagcagatggaagaagcttcacaaacggctggcggagccgaacagcactggtctctgagcccaggttcacaggccagagctgcggcctggactcctgactcaccacagatgggcacccacgcctggctagacagcactctgaacacggactctgcagagatgatgctgggcaatgaccaagtctaatcccgatgtcagatagtgatggtgctaagtgtacacgcgggtcctgcatcctaccaagaccagggaccccaagtcacatgagaggtggttccagtccctctgtttgacatgtgctcctatgaaacatgagttaattttttttttaatttaacatagaaacactttttaagaagtatatccatatcctattattgaatcaccagtgaaccaacattaaatttctgaatttatttctcctccagaaactgctgttcctgtttttttttccactggctcatctttggtctcgtgaagaaccttgccaggccccgaacctgggtttgacatggacctgggtgtggacagctctcccggagcaaggtctgtgtgctttcctgagaggtcagggagcagaagggtctcctgccacccagcactcgggcctcacacctctctccagggggacctggatgcacagtggacacctgaccagcaaaagacagagcttccagctgagcaagccctctagccccgacagagcagaccctgcccgggaaagaggagcaagccgtgtgcccggaggctgggggctccctgagcaggtacagcggatgggcacagagctctccagcagccgttcaggaagcctagcgacctggggcgctctgcacatacgataaagccagcttcccgaaacctacgtgttacttcccactgaaattgaggctcagaagcccttgagtcttatatgagattgatgagcctgggccttcaaagggtggccaccttctgcacttccactcaggttaaagcacacgcacaggcaagaatctcagtggtcagactcatctcttcctggaccagccggcagcgggcagcacagcccaggtacagccgatggtgtaggtgtgtgtggggtgggtagggtcctccgtctgggtgtgtatgggcttggggggtctacagtttgggtgcttgtggggagggggattacatggtcactgcatatgtcccggtggccagcaagccgcccaggtgcacagggggcagagcccaccctccaggtatgcgtgtggcggggatcgcttaccctccggcctgcctcattgttctgcaggttcatgagcacgcggccctgttcctctgagcccttggcgaagttcttctccctttcgcgggcgtccacgaactccttggcgaagcggtagccgtagtccacgttgtcgccgcagccgccccacagccagtcccggggcaggtccttgggccgtgcggcccggctgcagccgcaggtggacagctcgccctcacggcaggcacggctgatggcattcaccaccccagccgcgctcacggcgtaggtgaaggctgtctcccggctaccctgcggacagaggggcagacagacaaggggagaggt

SEQ ID NO: 26148 - DNA, 683 bp, Bovine  19866881636281
  misc_feature (1)..(1): n is a, c, g, or t
naaaatgaatccagcttctacctaatacagagtccaagacagaaaaaaaagaatcagctgtaccaggagcctacaacagagaccctgtctggccaccgatcctgccaagtcccccaggaattaaacgctccccttttctgggttaagtgggtcattagctctgcagagccgtcaggcacctccccataaaccacagcacacttgtgacaagacaccccctgggagtggctgcgatggggagaagtggggcgggccctctgccacgggacaatggatcgggggagggcgatgctgggaaaacaaacccacccagaagtcactgaaccacagcagcgggaggagactgaacgtgggctaccccagacccaaagggaaaagcaggagcggaccagaagctgctcacaaagtgcttttcagcgaaagcatacggacgcattgtgtccagcggccctggcagccgtcccagaagtgcagatggtgggataaagatgcaggtccgccgcccaacattttcttctgccacggctattgtcaccgatgcaggcaggactcatttgtcaagggctcctctcagctttcttttcaagggtccccagattgtgtctttattcggcaggaaccactgcaggtgcaagcaagagcttccgcaccatcagctcatattacgactgccggactcctcc

SEQ ID NO: 26149 - DNA, 1573 bp, Bovine  19866880424694
  misc_feature (1)..(1): n is a, c, g, or t
ncactgagttggtgatgccatccaaccatctcatattctgtcatccccttctcctcctgccttcaatcttttctgacatcagggtcttttccaatgagtcagttcttcgcatcaggtggtcaaagtattggagcttcagcttcagcatcagtccttccaatgaatattcaggactgatctcctttaggatggactggttggatctccttgcagtccaggggactctcacgagtcttctccaacaccacagttcaaaagcatcaattcttcggcactcagatttctttatagtccaactctcacatccatacatgaccactggaaaaaccatagccttgactagacggacctttgttggcaaagtaatgtctctgctttttaatatgctgtcaaggttggtcataactttctgtatctaactgtagaaaacaacttttagaaaagcatgaagaaaatacattaaacaatcattgctttgatctactttgcttcagataaaacaggcaacctggatcaatcccagaaaataacaccctgaactcggcatacatattccctacagtcctgtacaccttttttttttcctgaaggaggagaggatggtggaagattctgtgctcacaattaagtgaattacttgctggctcatctctaactttaattactttctcttcctcaactttgcaattagctgatgttgctacaaatttttgtcacatacttaatctttatatagcgtttttggccagagcacagtccaaggctgtgagctatgctgatatctttatccagaggtaaggctcacgggccacgttatctgccgagctgtacccttgcagggcgggtacctgtggcgggcagggaagtctcagcttcagtgttcagcccctgtccacacctgccaggggcacagtgcctgtgaccgcacacgtctttacctctctccccatgcgatttgtgcaagatttgttctgcaccaggagctttgtaaaccctatgcctcttaatcctctgcagacataggtgcccacagggttctacccagttgacagataatataactgaatctcagaaaatttatactactcatctcactggagaggcggccaggagtttgcctcgtcccaaactttgctctccactatgtccgttgcatgctgatggaaatcactgcagtgctgtagagtcagatggtgtggaaggaaggagaaaatgtgcccattttaggggggaggtgtttatcaggcagggctctggggtgggaattagcaagctgtaatgagagaagagccagacaggtactgtgcacttactggtgaaagggcaagaggtgaattggaattttcaagttttaaatttagggaagttggaaggggtgggaaggcctcttaagtagatgtccctgaacttgatttcatgtgaaatctgaaagatatcctcatttgaaggatttagatatgttgtttcaggtgtcaaacctgacttccaagggtcctgtaggcattttgacacatgtaattcgtgaggaatcagagcaaaagatgtagaattaggagttacacacaggtcctca

SEQ ID NO: 26150 - DNA, 1242 bp, Bovine  19866880543256
  misc_feature (1)..(1): n is a, c, g, or t
ngcaggaagagaaggggacaacagaggatgagatggttggatggtatcaccaactcgatggacatgagtttgagcaaactctgggagttggtgatggaaagggaagcctggcgtgctgcagtccataggattaccaagagtccaacatgacttagcagctggacaacaacttttatttttaaagttgtagttagtaacctattctagcaaactaaaatagttgttaaaattaccagcaccttataattttagagcaggaatgacatcagagattatttattcctacatcttaattttaactctaaagaaaccaagagccagaaaatgtgatgacctaagatcacacagttaatttactccaggggtgaaaaggacactttggatgtattcaggtgatcacacattcttcaagtgggaagagaggagactttcacttttaaaacatttaaagcaaattattatcaagaatagaataaattcatctacacaaggaaaagtagtaggagactcttcctattaaccatcagaagagaaacattcaggatctgtttagtgcttattttattacctccgccagtagacagaacaactaagaagtgtagccctctgaagtttaaagtctataaggatggctaataaaaactttgaagttgtacagaactttacagttcttaaagcttccatgctgctatgatttagcatagcctccaaggatgcatgtgaagtgggctggcagtaactaggtccccctgatttgcctgtgagtagagcacttgcccagatccacaaagcaatatctcatgggagagatccatagaacccagtgctagcccagggccccaacagcacaccccacccacaaataacaccggggtgggcagaagggaagagaatgaacgtctggcagctaaaatcagggcagaaaacatgctgatcagcagcacaggatatttgggatgaagtatactggtatctgggcttcccaggtggctcagcagtattagtatgccaaggaggagatgcaggagacacgtgttcaatccctaggtcaggaagatcccctggaggagggcatggcaacctactccagtattcttgcctgaagaattccatgaacacaggagctttgtgggttatagtccatggggttgcaaagagttggacatggctgagtgactaacaacaaaaaaatatggtctttatacacatacataaataaaagaaatggcaccataacaacac

SEQ ID NO: 26151 - DNA, 960 bp, Bovine  19866880879563
  misc_feature (1)..(1): n is a, c, g, or t
ntgactgagctgacttagcagcagcagcagcagcagcaggcaggcaggttttaagcaggtagggagatactttcagtatagattttggtggagtcttaagggtcttcattaaacatctgccaaattaatgaaaagttggtgtctagtgctatcagggaaaaccgaaggcttccaactgagaggataaatgcctgtaaatgggtaagggttaaggagaaaaggaaccaatgcctccatgggcattcaaattattccaagtttctggagaaagtgactgctgaggggccataaatctcttcactgtgccactaattgctcctggggagagtgtgtctcacacaggctgggaaagcttgaggggataagatgattctctctggaattctccaaaagctgggttgttgatgaattctaaaggggtctgtgtaccagtaaacagacccctttgggccatctggtgctaaacatccataattaaaagtctgaatttgcaagacttccattcatcagatagcaccaatcaaagtgatactatggaactttaaactttcagatgacaggttagtgagaaagggaaattatgtttattacccactccgcatcaaggttcagggcctcttatttaaggcatcgatttccatggaaacagcctgtgaggtggagtatgcttattagaatgatttcttgtaacaaccctcagtcctctcaaggcacttgcaaccagcggaagtgtttaaaatcttaatctctacaattagattaacatttgttaaaagcaccgagcctccaacagatacatggggaaaattcacgaggagacaatgaacacatctcattcattcactggctactgactgagtgtccctcagcttctaggcactgagcccaactctggaggcaaaaagaaaaataagacgcagattctgcccaccagccccttatatataatattctaacaaa

SEQ ID NO: 26152 - DNA, 1327 bp, Bovine  19866880973308
  misc_feature (1)..(1): n is a, c, g, or t
ntcaataacaaaggcatcttgggctaagaaatcctgaacatttcccactagaccactcttccctaacaccccttcacatatgtcttgcatgtaactcttagttataggatcacttgaacttcaagggcacagggcacttaggaaccacagaggaagaggaatccccacctggtctctgtgtctgctatgtcagctctcctctctgaccccacagaccaccttactacctttaaggagaacaccaaaatcatttagcaataaatttcctccctacctctgcacattttctcattatgggtactagcttccatcctcttctttctgactgcctcagggcacgacggagcttgtacggattccgaatttgaccacacatcctaagcctcgctacaaaggctgcaaatgttttgatggtggttaagaatttgtcaaagtcccagcctattatactcggggggagcagggaagcccaccagttggcaggaagagagatttttttttcatgctggcaccacaatccaaaaagaatatctccaggccacattctgtgagactccagaacttctagtaaatgatcaaagacacagactattggcttagaatgggtgctgcagctgataaacaagccaacagcagcctctgccagcctcgtgaatcagcaagtgtgctggactgagacaagcagagtgctttccgaaataactttaaccaaataattattttactgtttgccttcttgattcagcccaagggtgtcttgctcgggaaagggttatgatcattgttttgatgaatggcactctgtaaataaatttggaataagatttagcctcgtggagctaaaaggagactcaagatgaaaaagaattgaagattaaaaaaagatcatgagggaatgaagatgctgtgacctgaccaagaaggaaaataagaaatctctgaagcttttccacgatacttgcacagcacaactagtacatttaatcttctaaagctaaataatcaagttatctgttcctcagaatcccctagtgtgatatagcttccagctaccttagttttgagggaataagcccggcatataggtattattcttttccaagttgattttactttgctctttatactgtaattctatgctttgatcttctgcacacccataaagctcagagtcaaaacgcaaaatttaagtacaaatgatgagcgcaaatttccattttattatgggtttttcccttaattcttctaataaattttcttaagcttctgtattttcagtatctttcatttatgatcaagctaaacattacccacattaaataaacat

SEQ ID NO: 26153 - DNA, 610 bp, Bovine  19866881018693
  misc_feature (1)..(1): n is a, c, g, or t
nataagcgattccttccctcaaggatctgacagctccaaaacacagacagcaaaaggtaaaaggaaaaacaggcgaggaaggggaaatgatagccgccccccgccgccaccccagggcccagacaactagggatgaagccagaacaagaagtcagggctcctgattcaccctcaacatttccctctgtgatccacggccccttcatgccaacagagctaattaccaagtgtggtaattacattcttcctccctaaattttcaattatacgagatgccgttccttcaagtcaagttcttgctgatcataaataaagctcttgcagatgatgaataaaactctcgataacctagacctgaagtgagatgcaatcgcatcctcttgtgactccgagagagccctggagggtctggtgagttctcgtgggtctccacagccaggctgcgtctgtgaatttccgggaccagggctttcccactggggaccccttccctagggtgccttctgaataaatctacaacttagttttgtttttatttgattggtttagttttgattgccatcatttaggggattccgagggtaaagaagccacctgccaatacaggaga

SEQ ID NO: 26154 - DNA, 1194 bp, Bovine  19866881118831
  misc_feature (1)..(1): n is a, c, g, or t
nttgcttacatattcattagttgatacaaactcacattttaaaataattgaccaactattcaggaagtacctactataagccaagttatgcgaagtgctggggttcagtgttgaatgttaaacagtgtagatatagtctctgctctgatggagcttaaggtttaatgagggagggaaacagtaacacacacacacacagatacactgataaggttgtgaagaaaaacagcaaggtacagtagatgaagtggtgggggcagaggtctccttaggaaaaggactgtgtctggagtggaggacagagcccctgagcaaagggtttcaccagggttctcaggagggatgaggagcatggaacagtctagaaactgagagagcccaccatagttttagggtagagactgtgtgggaactggtgccagtgaggtcagagatgtaataagaattttaagatgcagaaatttagagaatgttagaaacctgagattcctatatctcctttagagcagctgtaatgagatcagattaggggacacagtggcagatttggttaaactgaagtcgcatgaaggagttggatgtgatgtgactccagaaggtggcaatgaccgtagagaagatggacaggtgttaatggagaggatctgggatgggaggtgggagagggtgactcagagaagaaatgcttgacagtggagcagagttaaaatgaagctaaaaatcaaagctttacgaatgaatgctatttactgcaaagctgcccaataaaagagtaatgaccttcttgttgaagttgggaaatagaaagcaattctttttcttattgagatttcatgtaagtgggaaaaggttgcacagactataaggaaatatcaggacactgcagtcaattctgatactttcaacaacaaaattctattctctgctgccatttctattttgggatctaattaattataaacatagataccagattgaactcacatgtaggcagcttaagaaataaaatatgacaggcagaataggacactgcaattataatctacctttcaaagcactttgaggatgaaagtcaagtgatttctgtctcaggaaggtttgaaaagttatttggaagcaaatcttaaaaactttccatctaaaataaggatacattcagcccatttatttacataatttaaaatatacaaaaca

SEQ ID NO: 26155 - DNA, 1572 bp, Bovine  19866881172417
  misc_feature (1)..(1): n is a, c, g, or t
ntgattcctggtttcggaagatcccctggaggagggtacggcaacccactccagtattcttgcctggagaatcccatggacagatgagcctggtgggctacagtccatggttttgcagagtcagacatgactgagcgactgagcataggtgcatactggagcttagagacagggtcaggattggagataaacatttgtgtcactcatataaaagtgataaagttatctggagagagagagtccagtgaataagaagccaaggatatggtagggggaaaaaaaggctgagaaatggcagtcatgattgctaaggtttttggtagctctaaaattcagcagttctctggactagaataaaagcatgtatggtctagctgcatgaagctcttttgcaaagtgagccatctcctgtgtgtcgattttccgagcggtccagcgacagtttctttcatcctagcagtcagctcccggcgtgtctgttgtgtgtcagcagtttgtcccacttgtgctcaatctgatgctgaagcagctcacagaggcaaattgcagcagtgtggccccgtggctgctgggctgattgtcctctgtcaccacattgcgggtgaatttgtctatttgctcttaagtttgggtcgtagagaactctgacaaaacagtctccaaactgaatttgacatagtgtggattttgcatctgcttggttggatactttccctgacctgatttagaatgctgagtcaggacactcttcttcctaacctcccaaaggatgtggcaccctggattgtgtttatttaatcaataatagtagaaacccagttgatagagaaggtccaaggtggtctctgccaatgaagaatttatatgcacaaatatgttttgatttggtaaatcattcttctgctgctaagtcacttcagtcgtgtccgactctatgtgaccccatagacggcagcccaccaggctccgccgtccctgggattctccaggcaagaacactgtgggttgccatttccttctccagtgcgtgaaagtgaaaagtgaaagtgaagtcggtcagttgtgtctgactcttcgagaccccatgaattatagcccaccaggctcctctgtccatgggattctccaggcaagaatactggagtgggttgtcatgccctcttccaagggctcttctggacccagggatcaaacccaagtttcttatgtctcctgcattgcaggcagattctttgcctctagcgccacctggtaagccccttagtctgcattctcatcctaattaggtgagacaaggacagctgtagcaccctagttctcaggctttcccagaagtaaacatatatggactcaagtagcttttcaatcaattgtgatcttaactttacaagcaattatcaagtcttcgcacatacatgtgtatatatagacatatatttccattgcttgaacatgttaaacatcccggaaaatacaaatttttttctgactagaaaaattttctgattagaatttcataaattctaatcctatgaatttttcctaaggaagatgcataagaacatatctata

SEQ ID NO: 26156 - DNA, 1592 bp, Bovine  19866880391359
  misc_feature (1)..(1): n is a, c, g, or t
nattttatctgttaaaaaaaaaatgtaacatgaatatatttaacatctacctcagcaaacaaattaatgctaattaaatattaatgtgttgtaattagcattaaaaatgcaattaaattgtgagtaaatggaccaggaatagaaaattgtttgatgtctcaccgtctggcttttcatattctgccttttgtttttgcagcaaatagaggaagcggggcggcaggcagctcccagactggcgatgctttggggaaagcacttgcttcggtgaggaaatgttgaccttggacttcagatgtaccgcggcagacgggtgaactttaatcagaagtggacatttagaactttagaaaatggatggcaaatagctttgatttttggaaagactagcttccttgcataataatcattgaaaaaattgaagagagaacgctgaagattccagcggatggctggtctctcccatcttgcaagcgatactcaattatggatttgtggatattcttagggcctttaagagtatagattttctatcctgatgtcttatttttctctaaagtcatcggggggctcgttgattgaccagctaagactgactttgccaaagggtagttgtaaaacattttgaaaaagaaacttttaacaaatgaccataaccgaggttcaattgttgcttcattagcacttggcttctctgctttaagctaagatccagcatttcttccatattcaccaatgaccagtggtacccctttcttgtctgagggagtgtacctggtattgtcttcaaaagctaaacgtgatcatttgtaaatataagcagagatctgttgctctgacgtttagtctcttcagttggattctccttatcattggggcatttgatttatggtagccttgtgagctaaggaaaagtttttctttagactgagcgtccttctgcctcggaatcaaataccttaaatgtaatgaagaaggagttgagcaaaaatcttaggatgtaatgctgcccgacctcttgttttatggaggaagaaagggaggtttggtgtatctgtgtagcttcatggccatgcagccagaggaggaaacgggaagaaatggacagagccaaggtctgctgacctcagttcagtttcccccccactatcttcgagcagctcaagaactcttcttttgaaaaagtaattaagtttttcattttagaatatcggtactgtagttgattgttaagtgtattttgcaccttggaatttgtggatgaatcacattaatgctttgtagtttaaattgtggcatatttattcccgatgaatgaggatttgttgttgttgtttttctccccactgttttaagatctattctccagatcacactaacaacagcttttcatcaaacccttcaactcctgttggctctcctccatctctctcaggtacggtaccgtaaacccactgcatctgagtgtcagcttatagaacggtttcccctttacgcttcctgtgctgctgggggaaactcactccctccaaaaactcaaaacagagtgtttccgaacagaccaataggaagagggggagagacagacacag

SEQ ID NO: 26157 - DNA, 2517 bp, Bovine  19866880471174
  misc_feature (1)..(1): n is a, c, g, or t
ntcgtccctccccctgacactaataatctcctttctgactctagacttgcctattctagagatttcctaaacgtggaatcccacagtatgtggtagtcctttctgatgggcttttatcatttagcatagtgctttcaaggtttatatatgttttgtcctttatcagagcatcattcagtttttattccccccaaattccattgtttggaaaagaccctgatgctgggagggattgggggcaggaggagaaggggacaacagaggacgagatggctggatggcatcaccgactcaatggacatgagtttgagtgaactctgggagttggtgatggacagggaggcctggcgtgctgcagttcatggggtcgcaaagagtcggacacaagtgagctactgaactgaactgaactgagattccattgtatagatatacattaaatgtgcccattcatcaggcgatgggtatttgggttacttcagtcttcggctattaggaacaacgctcctgtgaacattagtgtacaggttttttgtgtggatacatcgtttcatttcacttacgtataaacctaggagatccattgcttaggtccctgccggtatgttcagttcttcgcagtgacttcagctaaaggacccaaagtaggttcatgttacgttgcttgggtttcgcatgtgaattggttgggtttattatttttgtttaagaagtcaaatcagtatcttgtgctcctgagtatggtggtttacaacgcatagggtcacgaagagtcaggtgggactgaaacggcttcgtgcgcgtgggaggtcgagatgcacggtgtgtctgtctcagtagatgatgtgggaccgtgggattacgtgtatcgtagttgtaccactccctattgatgaaaaagtatttgagtaaggtttaagcagatttgtccacattgtacttgaaattgcagtttttcccattacttctggaaggggacttgagagtgtatccctttttcaggtgattataagattcagcaaatctccctaataaagtgttaaatgatgacaatatgaggtgaccacatgggtgaagaacttacatgaggtagcagttagtgactctgtgtaattctgctcttcacagatgcctgtctttccagcaaacaccttagtgtcctgttttgttcctcacaggctctcaaaaagttgtgtgtatgaaggtctgttttccattatcactaagcatctcttatttaaagacgattccaaaaggagaatgcaaaataagcacaggttattctgaggctctttaagttgtcttcttcagaagtattcctctgccctcttttccatttctcttaataaaagattaagagtcccatcctgagctgtatattatgaaaacctgcaaccaatttgaaaccaaaaatactggtttataaatagaagcaatgaactcacttctaaaacgtggaaagatatttttgaatgccaaagctaaatcttttttttttttttttttgcttttcctagactctagcctcagaattcctcattgagtaaaaattgtttgtctattcgtggcagttgctaagagtttaacaaaaggaaaatctagattttaatttagcttggcctcaggtaacatgctaaatacactggggatgcatattatatgaggtttcagtttgtacagctctttctttaaactataatgtttaaacaatactgcttttaattaagaaatctggctttattaaaagccagatctgtgacttataaccatttctgtatatctgctctcaatcaagagaaaaatagtttaatttctgtagctgtgttcgttttgcatatgttaaacggatgcagcatgcacccagggcattccttcagagacagttttttttcttttttccataaatatgtaaagtttgctcttaaataccagatgtaggttaagtggttctttaaaataataaattctacagagatgcttttttggaaccatttgacctttgaattgcctcctctttgatttggaggtgggatatgaggaggagaccagagtcatctttggggatgggaagttagaccaacccagggggaggagaaggggagagaatgctgcacagcaatagaaaaggggaaataaccggccagagttacacaggagcatctttgctttgattttgaaggtggggaaaaaagatggcaaagcaataaaattgctagtttcagtgatgaggggaggtgcacactcactcttgaagacgtttagaattcaatcaagagtgactgcggagccatctacatccatagcgcagttcccaaaccacggccggaaaacctgctgccctgtgagccaaggacacctttacagtctgtctccttttttgtcaaaaatattcagggcgcccccggcgtctgagctcctcagcccagagccccaacgtgcgcgcagaagatctcatcttcgtttcttgccttgtgcaaaccggtatgaattttcaaacaaaagcatcagaacaaagga

SEQ ID NO: 26158 - DNA, 945 bp, Bovine  19866880543654
  misc_feature (1)..(1): n is a, c, g, or t
nctggagtgggtatcctatcccttttccaagggatcttcccgacccaggaatcgacctggggtctctgacattgcaggcggattctttaccagctgagctaccagagaagcccaaagggattgcaaaagaacgtaaaggagatgttcacttcggaagattactttggtatttctggggggcacgtgccacgcttgttttaccgcacagtccaacctctgtgctgtttctgaccttttttggtctgcatcaatattttcatcaaagatcataaaatccatgagaagaggaaactgttttaatcctttgccactctaagttgttaatatcatggcaaataaaaggaagggcaggcaatgaatttttttgaatcatgcatatgaatctctcttaaattctttatcctttgtcaggaaaccagcaagttaaaatagaacattcaaaatttaaataaataagagcccaagactaggaaatagacaatcctagagtgtaatagttaacactgttttgctcttatgaaacaaagataactaattcaaacatgtgaataaaaaaatattattttaaaacaagaagtcattaatttgagttttttttcttttaatgatgactgtagccagtgcatttttttttttttgaaataccaagattcttaattatcatttgaggagaacatacaaatctcaaagattcctgcttcaaatttagacagtgaggacagtaaatatgacaccatgtcgccacctagtggacatttcagaaagtgtctagacatccaggtttctgttgtcatgattatacttaggatcacaaaacccaggactcaggggaacttttcacgctgccctaaacagggctcttgtttcacgggatagtcataggtgcaatttgcattgcattacagtgcaaaccacctacatttgcattgtaaaatcaagtgtcaa

SEQ ID NO: 26159 - DNA, 2209 bp, Bovine  19866880606138
  misc_feature (1)..(1): n is a, c, g, or t
ngaaagcctattggactgaaggagtggttttcagtgttgattgtatggggggattacctgggagatttacaacctactgatgcctgggtcctacacccgaagtttctgtttcatttggttgcattcagtgttctggaggtctcagaacttcacaggtgatactaatgtgcagtgaagatgaagacccactgaactaaggaaagccaagacaagatatgaactttgcaccttctcatccctcagcatctacatggaataatgatgaaaaatgaagcaaaattcttcctacatgaatcatttcactgtgatatttcaagagttaagtgcctaaatctcaccaggaaaggtatttcgaatgtgacaaactggtgatgaaggtgttccttgtataatggagataaattgaatatgcattccaaacaagtgcccgcatttatcagggccaagtacaagactcagaaaaactcctttctgtacaatactttataagtcacgaagcacaaccctgaaactcaatatcatgatgacaacaagcactggaataaaaatattgctgtggctggacaagtatgtagaaattattgggagtttttcccaaacaaactcctactttctcaagttgttaggttccaaaaaatacagaagtataagtgttatcatcttagacattttcacatatttcaacttctgtggtgatttatttcatcaaatagaattaggtctttaatttttattcatggactttcatatgctttaattatatcattagtttacaaaattataaattaatggccagagtaagtccaccattattgaatctacccaaggatagttcactgatacagttttccaaaagaactgaatttttgcatacttaaactgctagaaaaacagtcttggaagcaaattaaattttagggatggtggtgattacataaagtaggatactcttcaaagtctagaaaatggagtaatttctgaagatgcatctccatatgagcaggtcattagtgaagacgttagaaatgcttgaaatgtaagataaatttcagagctgtaaattaagatgatgaagatacgccaagtagaaagaaaagtaagtaattttggcagagttaagcagaaatttcctggtgagacttaaaagaggtttaaaatcctcaaagattgaaaagaaaaaagagagcagatttagatgagtgaatttttattccccttgtggagggaaaaaaaaaaaaaaaaaatccctgctaggttagaaaaaaagtatttgttttcatgattcaaaactctagaaaatagaaaaaaaattaatgtaatagctgtgacaatggcccaaatacatataaatgaccctgaaaatttaacattataactattcatttctaaatatatatgctaagtgtatagaaataaatatcatttctaaatttatatacctatgtatatattttgcacatacacacacttatttgatcacgcagataagtagatagtgggggaagaaaagcttgtgcttcaagccaggaagacttgaatgcagctgagtcattttgaacaagtgtcttaatttctccaaatctcagtttactcccttagggaatgtagtaattaataactttcacccaaagtagctttgaggattaaacaaaatgaaatatgcagcatgccttcaaagagacacgtgtgttgattatggatgagaaaaagatgctgtctatgtggtttagaaagttgacatctttaaaagggttgttcagctctggtgatcaatttttcataaacagaatcagctcacactgttatttcaaaataggtcatggtcttaagtttgtaatgcaagtacacccctgcacatgtcactccagtttaagaccttcttaacaaagtactgaccagggctagactagaaacaggctcattccagatcaagcactcactcaattcaggtacctagttcaagagcacaggctcagagatgccctttctgactcccatcactttgtaactgtcacactgttttgctcttcttgggagcagttacccctccctaattaagctgtgcattgatttgttcatgtatttattggacacatcttcaattaaaataaagctagatgaggtcaggacagtctgtcctgtttatgccatatatttacctcttggaacatttcctggtacatcataaacacacaaaactatttgctga

SEQ ID NO: 26160 - DNA, 1502 bp, Bovine  19866880623968
  misc_feature (1)..(1): n is a, c, g, or t
nttgatgaagtggatttttgtcactgcagtttaagttggtttttaaacccccccccccctttttaggtataagctatcagcatttattgaaaagttttataccaatccatgtatatctatttactaactcaaccactaaccattaacttatgaattaaatgtcttgtttatagtgactcctactggagaccaaaaaaagtccagttgtttagcttctgaataacttaaattcagtaatacctcctgtcttcagtgaataggtacagcccagatactgacttggcaaaatttatcattcatttatgtttaattatgagaacatagattctgatactgatttcatcaacagaaaatgttttttaagtacctaactgtgcacacatgcttctcacacctagtaatgtgatttgattgcttagtagtaaagagtttagcatggtcctatattttaaaaatttttttgtccatattagttgacttctgagactgcctgttttgggtggagactgtttggtcactgctctttaaggaactctagcacagaggaaagagtagaggaagaacaagggaatccactctcatttataacaggccccgatacactgagcgagctgtccctcatttatgcctcaaaagaagctctgtgttaagaggaagaaactaaaactcagactcgtgatatgacctggcccctgccacactgctgcaggggagcaaggcagtgattcttatacagacgtgtctggccctcaagtttaagtcctggggattttatagctttatgatctatgaaatgtcatcccagactgtgccttaattctgtctttaaagtaggaatggtgtgatacctgtcacagggaactagtcataaagatgaaactagtgcagagtaggtacttggatgctatttaaattgtttatcagtatacatgtattgggcttccttgatggctcagacggtaaagaatcctcctacaatgcaggagacctggcttcaatccctgggttgggaaaatcccctggaggagggcatggcaacccactccagtataaaaaattttccaaaataaaataagttataatatttttataatgatgacatgttgaagggtcttcccaggtggagctagtggtgaagaaccacccgccaatgcaagagatgtaagagatgcaagttcagtccctgggttgggaagattccctggagaagggcatagcaacccactctggtattcttgcctggagaatcccatagacagaggagcctagcaggctacagtccttggagtcgcagagtcagacatgactgagtgagcgagcactgcacatagatgtgttagttgtcttatcaggtttttgatggggtagatatttacctaaaggtggtcattttctttataggtttgcttgttcccgtggtattatgtaatcctgtatgttgatgaatatctctattatccttgggatattatgtttagctaattcagctatactaggcaaaa

SEQ ID NO: 26161 - DNA, 2253 bp, Bovine  19866880643921
  misc_feature (1)..(1): n is a, c, g, or t
ncttaagccacatagtttgtggcgcttgttccagcagcctaggatatcagtgcaggcccccttattaagcatgaaatcagacatgggctgagagtgggctggcgggcagtgaagcagctcttgggagcagggttcgacagtggggctgtgatggagaggtttgagaagctggcatgtgtccgactttccatggacatgaccccaccactgccctggactgttccttccaagtacccccttcatccggcatgctgtctcagccctgcagggtagcagtgatgggagagagaccaagagagcaagatctccaggtcacatacacacagacgagataagatgactgactctctttaaatgtcaccggggaagctgaagattttaattccctacgggatgatatactaggattccaagtataccagttattctaaaaataaatgtagacatgtgaaggaaataaattaacaaaatagccaagtttttgtgtgaagactgctgttttcctgccttagaaatcttgcttcctcagtaaataaaaccttcgattctccaataggctgacccttgtgatgatgaacaagacaatccaaattctgtgtcaaagccccttactttcttcctctcttccctcttttcttttccactctaattcttaatagcttcttcctaaaaatgggataatgcatgtcttaatatgtgatgtttagtgaatagatatgtaagaaatgctcattctttttgttcagtttcctgtcccttcagttcagttcagttcagtcgctcagtcgtgtccgactttttgcaaccccatggactgcaggcatgccaggcctccctgtccatcgtcaattcccagagcttacttcaactcgtgtccattgagtcagtgatgccatccaaccgtctcatcctttgtcgtctctttctcttcccgccttcaacctttcccagcatcagggtcttctcaaatgagtcagttcttcatatcaggtggccaaagtattggagtttcagcttcggcatcagtccttccaatgaatattcaggactgatttccttcaggaagtatcttcagggtatatctccttgcactccaagggactctgaagggtcttctccaacaccaccgttcaaaagcatcaattctttggcactcagctttcgttatagttcaattctcacatccatacatgactactggaagaaccatagctttgattatgttgactatgtcctttaatggtccttttatcatatctttggaaatatatgtgccctaagcctcaagatattcataaaatcagaggttgtagtcttaattttatttgtgtaatggaattcagttccctggtggttcagatagtaaagactctgcctgcaatgtaggaggcctgggttcaatccctgggtgaggaagatcccctggaaaggggaatggcaacccactccagtgttcttgcctggagaatcccatggacagagaagactggcaggctttgtccatggggttgccaagagctggacacgactgagtgactaacacttaaactttaatttttaaaacagtgagattatataatttaaaaagtggatttccaattccaacttttctggagaaaagtggggcatctggccacaccggccacttctggctgaggtttagcagaagtcgccgctttggatagtgcatcctgccacggccccaccttgcgtgtttttctctagacatcgctaaactctcgccagggacagaagcctcaggaatagcagggggtgatttttgtctgcttcctcttccctgccttcacattattttccacatagctttgtaaccatcaaattccttctaacactattcttgatggaaagaaaaactggtaaacgtttgcattaagtgagtattagtaactttagccagaaagggctgcctctgtcaaatttggcagaatcaacagaaatctgcaacattagtattgcttaattagcatcaccagagacccatgcctataaatactttgagcttgtggttgacactttctgaaccctaattaataataaatatttccttttaaactacactttgtgagccaggtctctagtgacagaattggatagtggttgatccaataaaagaaaagaataaatttttattagcactcacagtttgcaaagttccttgacacgaggagtgtgcatcatcaactttgctttggtaatggtggggtgttggaatctcagcaatgaccacaggga

SEQ ID NO: 26162 - DNA, 1588 bp, Bovine  19866880664290
  misc_feature (1)..(1): n is a, c, g, or t
ntggacactaaatttgaacttatataattttctgtgtcatgaaatgttatttttcttttgaatttttttggaatcattaaaagatgtaaggaccattcatagactgtcctaacaggtgggaagaaggcagcctgggatcctggtcgtgaatggataaccaccacgccagcctgaccactcctctctcatttccagacacattgtttattgtctctatgggcatttcttttacttccaccattaaaatgttgttttaggctaagaacttaatcccggaagagacttcagaggaccaaataacagacgtagttctgctcagattctggaaataaaaagcagactttgcagagctgctacagccaaatcaagttcccctgaaacaaatagaagccacagtggctgtctaagaggatttaacataaaatggaaaattcttggcatactctgttaatttcattgaagattaaaggataaatgcaggactttgaatcatccacagaagctatttagttctaaattgatgctagcaaatattaaaattctatgtgggttttaacagcatgggtcattgctaaattttaatttttttctcaccagggaatctggccttaatgtgatagaaagactcttgatcttggtgtccaaaagacaaaggtttgaatttcagctgtgttagttttactgtgatcttgggtaagttaatatcacctgtaagaatcttaatttctttattagtaatatgaaattaataatactacttcactggccttttatctcatttttttagctctttactattaattatgaaaatttcaagtaggagcacaatggtagagaactatagaaatcccactgtacaattcattgcatttttaatcaaacttctttcatctttatctcaccccatttttccctccctttaaatactagagtaaaatattctctttaaaattccaagtgtaatattatttcaccttcaagtatttcagtatgtatgaccaacagataagatcttttaaaggaatatcataattccagtatcacacctaaaatgacaagaattgcaaataatgctttgcaaaaattgcattaattctttaacagcatctgttatccagtcagtgttaaaattcccctagtgttttttaaaaaaatgtctatataactggtttattttaatcaggagtcaaagaagacctggggtttcacaggtggctctgtggtaaagagttcacctgccaatgcaggagacgccaaattcgtggcttggatccctggattggaaagattccttggagtagaaatgacaacttactccagtattcctgcctgggaaattccctggacaggggagcctggcaggctgaagtccatggggtcacaaagagttgaacacaactgagtaactgagcacgcacgcactcacacaaagattcatgtattggatctagtcatatgtttcttaaaatgcaaaatttatgaaaatttctcttctcatctttcttcatataattattttgtggaaggaataataatatgtcttatagaattttatgtgatctggatttggctgttggcaaccttcacc

SEQ ID NO: 26163 - DNA, 2381 bp, Bovine  19866880698970
  misc_feature (1)..(1): n is a, c, g, or t
ntgctacttgcaatagcttcctacataggctgcttgtgaaattcttatctcagtgtctacttctgcggaaacccaagctaggatagttgatatcagaagtgattctatcaagcggaacctcaggatgggattctgaaaacaaggacaacagcaaggacctagaaggccacgaggacctcattgctgtccaagtgtggcagtgacatcccccagcactctgtagcatcataagtactaggagtctcacctctagtgaattgtaatgggatgtaggtggaatgggatgcgctgacttatataaactcttatgcttgaaatatattaagacaatgataactctaaagcatatgaagatggttagttgttatgaaaagccacagtagccttaaagaaagaaaatgacagagtcgggaaagccacatatcaatttgggatactctgtgaaaaccagaaggcctccatggctctgttttaacagacattcatctcctgaacacaatagattttgctgaatatttggttccaacagtagccttcagttagtgatctgatgtcagtcagatttcaatatgagaggggtagagttataaaggaggctgaaacaatctcctattgaaagtcagggatctgagacacaaggactcttagatttggaagggacccactccagtatttttgcctggagaatcccagggacgggggagcctggtgggctgccgtctatggggttgcacagagtcggacacgacttaagcgacttagcagcagtagcagcagcagcaatctgaggatgtacttagaaacatcaaactccagatttcactgaatttcaagggctggcttgctagaggaagcagccttccatttcccaaagactgtgcaaaggccttgttgaggtaatggccttgtaaagcgatacttttcctccgcaaggtcagttctaaccatctgtcactacttatgggtcaataaccacggtcaagtctcagcatggcccagttgagtaactcgtgtccctgtattggatagaagggattattcactcaacgagctgcagggcctggctaacaggtgtcagcagaactgggagaacatgtttgggaacggaacctgagggtgctggaccagggagagcaggctacgagacaagatgttggatgcgaggacattctcgaatgactcaggatttaacatcttgtcaacaatgcctagagccagtcctaacacccttctggaatatctccttgagaaaattaaagcgtcatcaatgttttgtaaatttgtatgcaggtcaatctaaatattcatcagcatagaaatagtttagtaagtatttttatggacagtattagaaagttgtctgttatattatttaaggtgaaataaataagctcggagaaggcaatggcaccccactccagtacttttgcctggaaaatcccatggacggaggagcctggtgggctgcagtccatggggttgctagagtcagacaagactgagcgacttcactttcacttttcactttcatgcattggagaaggaaatggcaacccattccagtgtccttgcctggagaatcccagggatgtggaagcctggtgggctgccgtctatggggtcgcacagagtcggacacaactgaagtgacttagcagcagcagcagcagcaaataagctatttgcgaagtctccttacctttctctctgtgacctcatgagcatacagagatgtttggaaagatatctctgaaactattatcagtggttattaaaaggaggaaaaaaataagtaaaaaaaagagtgactttcaatttctatattcttcagtaaacaaatgaaaagaaaataaagcagatttagaagaatcattttggttgttgtcttttttctcatttcccaattttatataacaaacatattcttttcataataaaggataaaaagaaacagagctaatatcactactgagatcaatgcttttgtattttaagtgcacttaggatacatataatatgtgataccttcttgagggcagtttggcattgcttttgaaatgaaaatagtatgtcacctttgaacccagaaaatccattttatagacagttaacctaatatctcatgcgtgcttccaaagatacatgcttaactaattttcattatactactgctttcttataacagcaaaaatctagaaagactcaactatatactattccaataatgaaatcctatgaactactaggattcaaggcttgcccatgcttctcttttgctccaacaaatacaagatttatgctgtgagagctccctggcgatctagaggttaggatccactttttttcctgcagtggtccggtttcaatccctacttagggaa

SEQ ID NO: 26164 - DNA, 1381 bp, Bovine  19866880718741
  misc_feature (1)..(1): n is a, c, g, or t
ncaccagacaggcatctacaacccacattcccttctctccaggctcttgggttttccttgaataatttcttttcctttgaaacatgcctttatcatacactttaaatttattttaaatctgtgagaagagtttggaaagggctgtgatttaacgagtataggctttacttttgtgttgaaccacagaatcagtgaatctggatacagaaaagtagagactcgacctggctctcaaagaccttatagcagagttggactggcatgcatgagtccacagtaaacaggacaagatagactggatttggagctaaatccaacagtgtagactgggagctctcgggagaagtgcagccattaggaagacacacttcctgcccagaaaatttgccactgccccagtggattttggaattacagtgctaacaagtcatgtctaagacccagaggaagccaccacttctccatgaaccttgacttgcttcagcaacctcagagatgactgtgcacccaatccttagaatatccagaatttgtaccacataactggatacctaattggatttttttttcctagcaatctttgctgtgttttcaggatggttagtcttccacttttaccagattgcaaacccactaaggcctgcgaacatatgtgtctgcatagaattgaatgagaccttcgagatctttctgtataatctttccatttctacagctgggaacatcaaagactaaccagttgtgactcacccaaagctcctaccgacccttcaagtttagaagactccttaagattcttttcttttctctccctttcatttatgaatcgaagggaagaagaatgagtgatgctatttctagggactttgttacagagtatattgcttgcttaggatttcctcacctggagatttaggagtagtaaaacacagcctgtagcttggttatagattttttttaagaacatgggttaagacttcctcagtggtccagtggttaaaaatccacctgacgatgcagggtacatggcttcgatccctgatctgggaatttcccacatgctgcggagcaactccacagcaagagagaccaacgcagtgagaagcccagcttctcaagaaagagtaccgccactcgctgcaactaactaaaggctgcgtgcagaaacaaagacgcagcacagccataaataaataaatacaatttttaaaaaagaatgtgggttagctatcaatctgagctggtcagcaagacttgaatgcagcagtgatgagattctacaccctgattaaattctttctcctaacgcagggtaaactagaacctgtaagttttctatgaggaagtcagttgaggacctaagccctgagcatggctagga

SEQ ID NO: 26165 - DNA, 1933 bp, Bovine  19866880779456
  misc_feature (1)..(1): n is a, c, g, or t
ntgggggagtgggagaggaaggtggagcgagatggaaggagctagggagagtgggaggggcattcttccctgtccatggtttaggatacctgccaggcccgtcgggcagctcctccgtgaatcctgcatctattcgtgagtgtagagggtctgtcttgttgtttagtcgcccagtcgtgtccgactccttcatgacctcatagactgtggcccgccaggctcctctgtccgtgacatttcccaggcaagaatcctggagtggcttgccatttccttctccaggggaatcttctcgactcaggggctgaacccacatctcctgcactggccagtattcttaaccgctgaaccaccagggaaggccatctttgagcttaggagttcactaattaagaaaatcactcgaagctttgaggagctcacttttcccctctccgggtcccctgagtctctctcttcagcgctgctttccccaggcactccacccctactcccacttctaatatttaagtatttgtaaaagctcagaattccagcctcctctaccaggatctagccccaaattgccccctggtggctggaggggcaaacgacaggatggagcatggggaagaggccacgcggatcctcttgtcccttgcctggttacctgccatggtatctctgtgtcgtgtcggtatgagcctgatctgactaggtaagtctgtctctctgctgtattttggatcattctgctgcggggctccctttgcctgttcttgtttcctacgttcttttggtttgatgtgggtttctacacatgttgtattgaccagagcctttccaaccgtactcagcacacccgaatgggtgagggagagagacacacggtgagactgagaacaggatagttgaaggcggtgcatgctgtcacttcatgggccgatctgagcagctccacaagggccgggctgattagccaagcgcgtgtcacctccgtgccgctcatctgccagccaagagcaagcgtgtcacctccttgacagctgtctgttgtcagaaggccatcttgtctccttttcattttgaccgaacacagcagagacatctgcagagtgctgcagctctgacggggtgccctgcctgccagccctcagacgcaggaagcggcataatggaagagctcagaaaggaacattaacccgttggccatcttggtttgggatatttttgccaaatatgtctcttgttgaggacagtactccatctaagggtgagagaaacatgagatccaatgtcttgatgaactgggctggtactgtatccaatgtcttggtagtgattggcccatgggatttcagttgatctgagtttataggatagggtggaaaactcattatcagagttaaaccctgtgtttcatggtgaggttagacagaagcagaagcatatcttaatcctaggatcacagcagtagtgtcttctttgaaggtcatagtgggacatttggcctgtgtaacaacagcaatgcctggaacatgtgtggtttgggaggaggtggtgttcttgttctttttcagacaaacctggtgctgccatgtttggtggagattctggaatcaccctgagatcatagcctctctatttcatggaatgtggactgcctcttgagggcatttcctataaaacttagcaatatcaagctggacttttgagatagggaaagattttaagttattatacacagttcagcacaggagttagaatggtttactctttgccttgtggaagtgtcttcccgtgaagctctttttttggctgagtcaggcagcatatgggatcttagctccatgaccagggattgaaccagtgtggcctgctttggaagcggcagtactaaccgctgtaccaccggggaggtccccgtaagcttcactgtggaggtctctcagga

SEQ ID NO: 26166 - DNA, 1106 bp, Bovine  19866880829169
  misc_feature (1)..(1): n is a, c, g, or t
ntatgctcagtccttgtctgtggctatgtagattgggtaaaatcagggcaaaaaagtatctttgaggtcaacatcgatcactactgctcgacgcagatccagtttaaaagtcatgtaagtgatcgtggtgctcgaggacttcatagactttttgtgtagtctgtggcttgtgaactcatcaggtgaagttttgagctgattattctccgaccaccctttggtacattgaaactcctttgcacagctgtgctcccaactcaacaacagagcacagaaacagtctttgctggaaagcaaagcgcagtcactatcccaactttcctgggaacttgcagccttcaggacgacaaaatggataatcacagtgacgattacagggtttggattaaacatattgcacagtaggatggcatggccccagtttgctcccatggcacaagtgccgtgaatgccaacaacattaagcactgcagccacttacaaagatttttgggttttaaatgtcagtcattggaccaccacttaaaatgaagcacctgcatttgattcaaagaaattaaggtatattaggatatgtggaggtgagtggaggtgttttttggggtttgttttttttttttcagcaaaagccacagataataaagataaaacatcttgagtattaaagtggtctgtttcctgcagtgtatggttgaaaatgacttagcctttaaaaaatttttcagaaataaaagtatataaagagggagataaatgaaatttacatctctgcagacaactctgcatagcaaatttaagattctagtattttccttccaaacatctgaaaattggcaatttaaaaggagaccccgacagattaactgttgcattgctaccagctgtctgtgatgatatcactaagttacgaaactttttttaaaaggtataaacaagtaaggtgataacttatttttgaagatgctttctaaaaactttcatcttagtaagaacatcaaaagtgtactaattaactgtctgaatatacttagtaaagttttaggtagatcagatgtaaataagcttatttcataaaagatagacttatgtgtatccagatctcaagt

SEQ ID NO: 26167 - DNA, 1302 bp, Bovine  19866880868762
  misc_feature (1)..(1): n is a, c, g, or t
nttttttaaattatatcattagaagtcattgaaatgagagtctgaagcaatttgagagaattctgaaaaatcagaagcattttttggtatgtctctgatatttcttcttgtttctttcattttaatattgagtcatcaggcttgctcacatcctgaattaatttcctttcatctctcttccacgtggaagctatctgtataattgttagtacgccatgactccgtcttcattcctcagatgactaaactgagagtgagggaccaagctatcagcctgggtatactttgagctctcagctggaaaagaactaacggatgcaaggtgttgtaattacaatttacagcccctgattctgcagtatgtcgcttagctactatctcacccaccttgcactctgatctctaccttccctttggggctatttctcgtcttacaaaagctatcatctggacacacctcactgtgactcttgtcttctttatctatgaaaatgagtcattttgatcacaaatttctctcctcagaaggtgaaaagaatccttggagaaaagtgtcaaatcaatttcaaatctattttcaaaactccgtgtctaccgcatctttaatgtgtatgcagtgctacagaacattccccataaaacgatgcatgtacaggtttgggttcattctggtgaatacagctttagattaaatgattataaatgcttttagaatatacccagagtgcatgaaccatctgtcttctacatagcacttttcagtaacagactcataaccaaaaattccttcaaattcagcaatatgtataaataacatctgataatatttttagctcaaaaatttttaatggttcccttctagtctgattgattagtataaaaaataagagaattttatgtaagatattttgtgttaaattggaaacagactagccctgtcattgtgaagactaaaaatctaaatatggaaataagacttaaagaaattacattaaaatgtatgctgttgtattattaacgactgatagaatgattcagatcctcagtggtgtgaagaaatcaaaatcagaaatagcctccctggcagctcagatggtatagaatctgcctgcaatgcaggaaacccaggttcgattcccgggtggagaaggtcccctggagaagggaacggtaacccactccagtattcttgcctggagaatcccatgggcagaggggcctgatgggctgcaattcatagggttgcaaagagtcagacatgattgagccataacactttgactttatatgctgctgctgttg

SEQ ID NO: 26168 - DNA, 721 bp, Bovine  19866880930754
  misc_feature (1)..(1): n is a, c, g, or t
nacattacctgatgctgacctttatgaagtttaaaggggaaggtgaatcggaggttttattggctccttactagttggtaaaacctatttctgtaaaagaataataaactgtctgtcatttattgtcaatatctttctcagtctgttatttggctttcttgtggtcatttctcggtcacagaaatgtaatattctcttgtgttcaaatctcatggacttggaaagaatgacaaatgcgaatgcataagtaaatacatctttctaatcaggaccttcctaaaagagttcggaaagggggtgggtatgtttgtggacgcaggcagctgctggccgtcgtcaggccagccccggccctctgatgctggcagggtggccaggttacagtcgggttccctgtcaccgctcccggagaaggcacaggctaggtgcccttcctgctgctcggaggtggataacctcacgaagaaccccgccagagagcgagttacttaaaataaaatgagaggaagactttaaagagatggaacatctgcgataaactcattttctgtgtgagcacccatggagacgcctgtctgggtcggttgaacggcgtttctagagaagttgaaaattcatttcatttcattattggaactgttcaggcaccccggtttggatcagggaacggcttcttaaacctgcaggaagctcatttacccctgctgaggctccagttccc

SEQ ID NO: 26169 - DNA, 751 bp, Bovine  19866880936752
  misc_feature (1)..(1): n is a, c, g, or t
ncggaagtgaaagccttggacctttgtatttgaagccttgggagggaaacagccatttcagagggagctaattattcactcgagggctggctatgttcaaagatgctcaatttctaatagcgtcgctaatgcgattactttatcagtttgcgtcctaaataaaggaaccaacttcaacactttttcctctaataggaaataccctgcagaagattacagggccgaccgggccccagagtccttctcgcttgtccctgagcacctgcttttactggtgacctcagttctacacctcaagattcagacattttgcaaaacagctttttaaacaaaaaccagctgttccccatctagactacagggggaaaatttttgggcggcttatagaaacattacccagagacgactgttctccaataactttcacacacttgcagctccaaaccagacccgtccctgcgcagaagctggggagcaggcaaatgtgaaattaaaatgtggaaattcaacaccgtggtttttgacaatacatccaattaagtgcttgaaaatgaatgtggctattgtatcaggacaatccaaaagatgtcatttaactaatatggacagagcttttggttacatctcaactttacagttctgagttgatttatggatctagaggaagctatcattatgcacaacagtgaatgtcaaccaattaggtggaatccttgcatttcagaaattcaatgttgcagcttcttcccct

SEQ ID NO: 26170 - DNA, 4592 bp, Bovine  19866881000839
  misc_feature (1)..(1): n is a, c, g, or t
natcagtcctgttccccgtctgtgactaaaggagatatgaccatcttcagcattttcttatgggaaagaaataggtataatacgttgaagtattgacaaaccttgacataacttcaacatgttaactgccaattttataagtgcatccttcacaattattagaaaagttctcttgaaaatctcagtctttaaacagataatatgtggccttccctggtggctcaaatggtaaagaatctgcctgcaatgtgggagccctggattcgatccctgtgtcaggaagatcccctggagaagggaatggcaactcactctagtattcttgcctggagaattccctggacagaggagcctgctgcctggacagctacagttcatggggttgcagagttggacacgactgagtaactaacactttcacactttagaaagtttagagagatggataaaaatcgcttggcgaaatctaaatcatttctttcctagttcctaatggacatcacatttaacgtgaaatggtttccatactggtattcactaaatgttccccatcctccatacatttgaccacagcacagaaataagattgccttgagtacacaaaataatgataaaaatgcatttttatttgaaaagtgtgcggaaacaatcactgaatacagttctcgactgtaatatttaaacccacacaccacaaaatcattggatgctctgacttctgaagctactagaactttggtacaacaaaatgatgccctgacagtctgtcaggcaccacagtctattcaggggcacagagaataaaaactccatgtttaaggttttcatttacattcatagcactagacaaaacagagatctgagtagatgacagacaaaacaatcgaacgtgcttagcctaaaaatgaggataatatcacttaaatgtagactgttgagatacagtgaagcacttcagtgttaggccaaaatgttgtctacttttaacacattaagcaggataacttactttcctcaaataatttcagatacagtcagtatctttcacaaggttgtggacacaaagccgtgtttatacaaggaggattttgaccaaattttaatatactatgtagaatgtaattggattccttgaaagaaatacaaaatgacctacagaatgaaatagaactcatatttgttttttcaataacttgagatatattaaacattttcaatcaaagacaatgaccagagctgactatccatttcaagttcccagtatctctactagaattagtgttttgtgccttctataacacttgtgaacatatggttgtgaaagtatgactgtgatatttttattattcttagcttgggataatagtgtcagtttgtgaaatggaatttaatttataaaccagtttctacatatgttctctttggagcctgatatgaaccctgtgagttacacaggatttataagccccatacgaggagaagccatatttaatgacatacccacagctcccaaattcctctatctggacactttcctttctataatactagtcttcctttcaaagagtgcttgaaaaaataacctagagaagagaagagtaaggataagcatgtgttattgctttgctagggatgaataatattttgatatgtcaataatagccattggttaaataagggatccattaggataagaacaggcatgcagctccaacagaatttgccaatgactaagtctgctgagggataatagccatgacttccaagacctgttggaaagaaaaggaactggggaacaaatttaaataattcaaagatgatttcttcatttttttttccttgaaagatgacaagtttttaaataaccatgttattttggtactcatctttttgtttgtttgcctgttattctcactaaatacggaaaaagagctctgcagaaaggcctttgtgatgctacttcttaaaaaattaaagtgcaatttatgaggaaattagattcagataggataaataaaatgggtctaagcatctcaaattttgatgccaatcatgaaatatttggtatttaaatatttttattagcttagttctaagggcctaaacttctacttggaagataaaaataataggtaaatatttgccatggtgctggtttagtcactaagtcatgtctgactcttggcaaccccatagactgtagccagtcaggctcctctctccatgggattctccaggcaagaatactggagtgggttgccatttccttctccaggggatcttcccaacccaggtctcctgccttgcaggcagattctttaccgactgagctaaaagggaagccccaaatatataaccctttctctatttttttttccctacataaaaatcaaccttttaagtatggtcttctccatattctcccatagttataaactctatttagacaacttgaatctctaatctttctttatggttctcactcaacagtgtcatcctggttgggtctttacccaagaactccaaggcaataagttcataaaattcctattcatctaacagttctactttatgaggcaagtgtctctgtagatttatacaacattgagacaacactcaactcagagcatattatctactttccatgtttaagagctcagcactcttccccagaaataagcttataccattttggtcaaagatcaagaagaaaatatagcttttggcgaattcctagacaatagttttaaatatagatagcatcttggtatctttaaaaatgataaagctttccctaaaatattcacaaacattagatatcttttaatgctttaaagcttgggagtagaaggtgaaggacaacttttctattgctttggctaacatagctcacagatcttccttttaaaaaattattaagtacgttaggaaactagaaacttcgatatgatctctttacaatttgagttttaaactctaaaattctttatggttgaggattctccctcatagttgtagttccaggttatataccacacctagttatatctctctacacatattgtttctcctacccaatgcacccactccattggtgagaactgtatgagcttcatcaaatttgttgattcccagtgcacaaaatttacactttaaagaatatttcagctgttattaaaatgttttttaatgtagtcagtccttctttatggtcaaagcttctctctcttacaaaggagacaagaaagggctggtaaaaacccttgcccaattcttatctgaatgggttggcagagaataacttgtactacaaacataacaaaagcactcactgatacacagaatgtcctatctggttaaaaacaacagggaaaatatttactttagtaaaatgctggttttgaattatttgtagcatgatagctgataatatggaaatgatagaaacttggctagagtggtcactggccagagttttaaaagtcttatgtcaagacccacaagttaaattccagtattcagcattttttctactaatctgtgacttcttatcctcatcacaagacagacatgttctctcaactgccctctgatacattttccaaaggattattttattttattaaaaggtaatcttgtacctaatcacagttagagtctcaagaaatgtccatttcccaaaaagtgaccaagagatggtggtaataatctttagattcgaataatatccttataccctttgctgaagacatcaaaataactttagctgcacttatgtctctgtgagcccttcctacaccatggtattacaggaaacgagctatgtggctatagccaaatttggtcgtggaggtatctgaggcactgattaggacaatgtaaacatcaaaccagtgtaaacacttcagaaatggtttctgtatcagaaagaactgcacgtacattgtaaataattctccaaaataaaatatggcttactaaagcatttgggagacaataagtaacacatgttgttgggtgttaatgcagttcttcaaaagcagtcttatacttcatggctccagatccatttaaaattataaaatgaattatatggaataaataattctgaaataatgaaagagtaatggttacatagactttggggtgttaagtcaaactcaacagagaataaaatattttagatcaagtatttataagtagaatactattttaaaataattttcttgactgtttttaattttgttcctcttggtattattacccaataattgttatttttataggaatagttctataattataggcatcatcaccctctgcttcgtgctatggctatcaaataataatcttaaaatagttcctaaataaaaagcttgttaaataactgacagggacagaatcttggcataagcaaatcaatcatataactggaaaataaatagaaaaaataaatatccaaaatagaatgcttcttggattttagaaagtctaattatttcctattatggaaatgcagggggacatcacaatttgaatccaaaggagaaatcgatttaatgaccacaagaattcaccaaaatttgccacat

SEQ ID NO: 26171 - DNA, 1334 bp, Bovine  19866881003614
  misc_feature (1)..(1): n is a, c, g, or t
ntaagtgaaagtgcaagtcgctcagtccgtccaactctttgtgaccccatggactatatagtccatggaattctccaggccagaatactggagtgggtagcctttctcttctccaggggatcgtcccaacccagggatcgaacccaggtctccctcatggcaggcagattccttaccagctgccccacaagggaagcccaagaatactgggtagcctatcccttctccagtgcatctttccaacccaggaatgcaccagggtctcctgcactgcaggcggattctttaccaactgagctatcagcgaagcccatggagtttttaggcctgtaacaaatactttttgcaaatggtaagaaaagaaaagatttatcaagcttttaaaaaacccctactcccctttatattttaaatgttggtagggctggggcagagggaggtgtggggagtaaaaaacacgggttgccgtcaaaatagaatacgtgggaatttattttctttctaaaagccctctgactctaacattttcaacaacacattgtatttaacggacaagatgtctgtactatttttatttttttccccctggtttcagcagcagtatctggaaacatgaacgatcctgtgtactggtcagttttcccaaacccaaacccccatgccctaatgcttaacgagctgacgtccctgaaaaacccctggtgactcccgctggaagaatctcaaggagcagggaggctcttctgagttacctcgggtgctaacctggggcaggcgctaggaccgcccagacgcccacaggcagcgcacttcaccgcccgtcagaggggctgagccgcctctgctgttacacaagcgagcaggcagcggcagtcacagctcagcgtccctcccccttctggtggatcggaaggtatttacttgctatttatcattcagattttggacgccgtcaatgtgcctttagtgttcactgaatctgatgctctgaaacgctgtccagcacctgttggctcactctattattttatgtcaatttccacagctgatgcaagcaacagtgccatagagaaatgggctagatatttccagaggctgagatctggaggcatttggaggtgtaagtacatcggtcacagatttctaatgtgctggctgtgttaactgtgtcttctgaccttctttcctcattgaaggagccccactgtaagatgccatctgcatatttcattcatgaaggaagcaccaagacggggacagaaagccctaatgatgggcctgaaactccactttggagtggctgtgggttccctcttctaacctgtgggtttgca

SEQ ID NO: 26172 - DNA, 1057 bp, Bovine  19866881029667
  misc_feature (1)..(1): n is a, c, g, or t
naatgttatatacatatatgtttaaatgtgttcttttaaaattgtaggtttcttttctaaggggatacttacatcaggttcaagtagctctgctaaaaatatgccaattttaagatatgctaatggcctaaacctaatgataaaaatatttcactttagttgtagtttccatgtgtttaattattagcgaggtcatctgtctctgtttatattcaccacttgcatttttttctatgacactcatattcatggcctttgctcatctctcttttcatgtgtctgtaagtatcttattaatttgtaagtgctcagtatatgtaaagaatatttaaaaattttttctgtgtgttaaaaacatttttttgcagcttgttattgactttgttttattgcatcttttcagtgtagaaatttgtggactttcaggcagtgctattcaccagtatttattttgattgcttctgagttttgatatgggatatacagtatctctagggcatcccacgtcatgccagtgataaagaacccgcctaccaatgcaggaaatataagagactcaggtccgatccctgggtcaggaagatcccctggaggagggcacagcaacccactccagtattcttccccgaagaatcccacagacagcggagtctactgggttacagtccacaggatctcacagtcagacacgactggagcaacttagcatgcatgcatacaatatctctacataaatataaatttacttttctaatttttaatgaataaggtaacataacacagtctgcatttttttttacatcatagttataaaagtacctagaaattacccagcaaatttcaccttacttctttccttaagttcatacagaactgaatcctggagatgaatatgaagtactgcctgagatctaaacactatgaaaagagctaaccaaacatcagatatgcagtataacaactatagttaataatactgaattatactcttgaaatgtcctgagagtaggtgtcaagggttctccccccaccctcccacacacacaaattataacga

SEQ ID NO: 26173 - DNA, 1121 bp, Bovine  19866881041592
  misc_feature (1)..(1): n is a, c, g, or t
naatagtttttcttgagttcataaagagatatttaataaccagccaatctttaatttctccttgtgactatttatcatgatttgctaagaaatgtgaaatgtgaagctgaacactacaccagaagctgaatactagaccaatttctaaaactgtgctggaaatggaaacctctgggcactctcttaatgccaaccgataatgtcagcttccaattggcttgactgaaatttggccaagtaactctccgagacatctgtaagagacacatttaatttcagttgtccaaatgccattttcccataccttcatctctctctctctgggcctttttcttgtcctctgtcattcacagtcctattcttgtctatctgccatttattaagaatatacaaatggcatgattacacagtctcctacatattctcagatgtctgacattcatcctctcgtaaccttatcagcaatattgtcattctagcacagcttacaggatatacatagtaatgtcactctaaatgaaccacttagaattctttattgtgtatgcacttttagctaatatgtccccctcaatgcaaacctaaaagtccaaatcagattctatataacaagtaaatccaacctttaaaaaaaagtcatccttctgtgttctcccttcagaaacctattcctgtccccagtgtgacaaggtaattttggttctgatggaaaacccactgatatctcttcttctacactcttttctatgttcatcttctttatgaaaaaacaaattgagtacccatgatggtacgatgacactgggaaatctttgatcttgtttggaggggcttcagggattactggtcaactcttctgaactctgttgactgttcaggtttttaaaaatttctggcaggaaaagaaagacatgccgttatacacggtttactcaacaacaatggtggggtttatcgctctttttggaagtgacgtttgcttgggttctggatggtcagaggctggggtaaagtctaacaggcacatttcttctctgctgacttctccccatccagctttccagagctgctcccattgactgtgtcggggatgtgggtcttctctacacactgttccattc

SEQ ID NO: 26174 - DNA, 1374 bp, Bovine  19866881044943
  misc_feature (1)..(1): n is a, c, g, or t
ngttcttttagctccccaattttcaccaaggctccttggtccgtgacagtcctggaacaacagaaagcaaggactttctccaggggcttgttgctgggagacctctgggggtggtgcagttactagaaagccatgtggctgctctttgccgggcagagggcgaagctgctgaatcgacagggtttgggcggggcagccggggagttcttcacctgtctcaactcctctgggcacagacccctgccactagactgctggggtagccagactggaatctttttaaaggttagcaagtttcgtctgatgccatctgttttgtgtgtgcgcactcgctcctgattctgtacaatgtgcaaatttagaacttccctggaacaatgctgagggaacaaacctcagctctggcttttgatcacctcggaatccaggggcggcagggaatgatcggagcagtaacttgagtaactgggacagtattttacaaaattcgaaaggaaaaggcaaagtgaagtcactcaggcgtgtccgactctttgcaaccccaagaactgtggcatacaaggctcctccatccatgggatttttccaggcaagggtgcaggagtagggtgccgttgccttctccagaggatcttcccgacccagagaccgaacctgggtctcccacattgcaggcagacgctttaccttctgagccaccaggcaagcctacaaaatgttaagggacccttaatttttctgttagtgaaattgaggactatagaactgagtgcacaaccctcatgagtgtgtgttcagtcgtgtctgacactttgtgattccatggactatagcccaccaggctcctcggttcatggaatttgctgggcaggaatactggagtgggttgccatttccttctccaggggatcttcctaacctggggaatgaacatgcgtctctttcatctgctgcactggcaggcggattcttcaccagtgcaacctcctgggaagccggagtgcatggctaaggtcacacagctaattagaggcaaggctgaccctgagcctcaggtctctgatttccaagctagggatctcttccatctattaatgaatcagtacattttataagccttttcattttcaaagggcttttaaaaagcatttcattttcttctctccacaacggagaaataagagcattgatctgactccattaagaggagctctgcaccaggtatatgcccttcgtccaaaccaatctggattcaattctgcaaatgttctttctcaaatctcatgggtttgtgtttattcttcttgttacctttgtgttctgtttagggttagcaaagttcaaaaccttttttccacccaaggatggtggggt

SEQ ID NO: 26175 - DNA, 1001 bp, Bovine  19866881070854
  misc_feature (1)..(1): n is a, c, g, or t
nctttagaagagcaactaaacttgaaatcttttaacattcagcaaaaagtagatgagaaagaactctttaagacccagtgaatttcagggcgagcttgatgcttggcagtctatggcaatgcggatttacttaaaaaagaaaaaagacacccatgaaaccagcgtttcagttattccagcagtttggaattgggtctcagcccagattccaaaggataatgctgtgggagcatcaaagaaattgtaagtagctttctctaaaggctatgaaagaagaaaaaagtggaaaccgatcaccttcttaatttctattaattttcttagtgttttgtttattttatgaactggcctgaagtctcctctctctttttcagaagtaccacaacgggtgggttgctatctcttcatgtgtattactgttagtgtaccctcttttcattgagagatcagtctttagaagctcagaatgctgtatttctcttgctgggagtttataaagtctctttggtccagaccaagcctgtcattatctcacactattttccacctcatttcatcctctgtcttcaggccacctgcatttgagttttcagtggccttttgcctatggctccttttgtttctagaatcaggttattcaagtatgtctttgtaaattctagtagtgaacagtttggtgtcttttcttgacgtctcaccattttactgcatcttgtttcaacacacagctttagatttagtatattaataaaagtgcaaattattatagatttcattaaatgccaccagtaaagagcagagcagtttccccaagttaattgtttacagtagcttttaaaatcttaaagaactcaacaaatgtgggctgagcccatttacaatacagatatttagaatgtgttatgacatccttaggccaacgaggaacaaaatgctaaatggaggggaatgataggtttgactttgtatcctcccctgccatcatttccagtgtccctcca

SEQ ID NO: 26176 - DNA, 1773 bp, Bovine  19866881122328
  misc_feature (1)..(1): n is a, c, g, or t
ntttgtaggatcctgaaataactggattgtcttttacctgtttctcttctagtataagcacactcctttgccctttactgagaattatataaccactttgtattttccagtgtaagatcaagaaattacccaggtgcccacactttgtagctaatgggcttctgcccctcttttaccaaagctgaaaagaatccagatatttcagaaattctcatattaaatgatttaaatatatataagtataaaaaaatatatatatataagtatataaatgtatatagatacacactctctacttgtaggatgagtaaaattatttgttacattttatttcattttgaatattgtaatgcatttaatgttttatcatcaaatatgggatgtttgtgtttttgtgagacctctttagtagaaactgactagacaatggatgctcttgatttgacatagttaaaaaaaacacatatgccaataagtggtcttttaaattaattcctcaggtatctaattttttaagtttcattttactcatgtaaagagtagaccaactgtcttttttttttttgctattttgatgtctaagctgcttatcacactgtattaccctgcattaatgagtattcctactgtgcaaaattctatcaaaaatgatggtgtgaatgtcatttttaattggaagtttatacagtcaaatttatagtatacaacaaaaaatatgtacgtagttctgctccaagccttttttaggctattgatctttttggtttaagtatacatttttatcaacctgactttaaatttagtgtgagaatctggacatatattactgagtttgtgataataccattcttgggagtgaggtaaactaaggcacaagcagtaataatgccttttaattataaggtgaacagatacaggaattaccaagaatctgttttcagggatcccttttaaacatgaaaacttgctgaccaattttatacattccacagaagtcataatgtttgatttctatctatttaattgttgaatacctcgaatttctatgcctggtaaggagacgagggttaaaatgagtgcaaagcataaagagctcatttcctttatttgatttttgcttaggaggaataaatacctcctggttgcctacctcagatcatttttttctaatcacaaagcacaatgaactatttattgatttagcaaaacactcaaatgcagcacacaagattgcattcaattgtttagtaaagagaaaaatgaaatgaaagctgcaaaacttataaaaggaagcaaacagacctgaaacatcatatttatccacagccattgtgcctaggtaattcagggcatatggtatgtaaatgatgtttggagattcttgccaaatctgcacacgacgggatacattaaggacaggtttcctgggtggaagtcccaccattgtggccgcacactccgctaggctgtgtttgtcctgttcttgtcttgcagcaagagcatcacacagcctttagtggccaaatctgggcctcagtctgctgctaagacattatttttaattcctaagaatctattttataattaaactgaaaatatagtaccagtttgctaaatcttccttttaccccgacgtttgagaagatctgaataattcatcagtatatatttggctattacccatttaaatgaatatttttgacaatggaaactgagtgcctctttgcccctgaagaaaggtgttacgaagtaataatttttctctagggtaag

SEQ ID NO: 26177 - DNA, 1252 bp, Bovine  19866881145034
  misc_feature (1)..(1): n is a, c, g, or t
nctttttaaatagcaaccccttaaaggagacacctttgccaacaaaagtccgtctagtcaaggctatggtttttccagtagtcatgtatgcatgtgagtattggactataaagaaacctgagcactgaagaattgatgcttttgaactgtggagttggagaagactcttgagagtcccttggactgcggggagatccaacagtccatcctaaaggaaatcagtcctgaattggaagaactgatgttgaagctgaaactccaatactttggccacctgatgcaaagagctaacttatttgaaaagaccctgatgctgggaaagattgaaggcaggaggagaaggggatgacagaggatgagatagttggatggtatcactgacttgatagacatgagtttgagtgaactccaggagttggtgatggacagggaggcctgacatgcttcagtccatggggttgcaaagagacagacacgactgagagactgaactgaactgaaaggagacaccatcatctttttatttagctccttctctcctactgtgtctcccccagtgtggagtgacttgtaagtactggttctcctattttatactttaaagatgtttacttgttctcatgtggtatattttcaataatgttttcagatcagtatttttcaaacaatttaaacaatgttgaaaagatggagaaaaacaaaattatggttatttagattcttaattaataggaaaacctaattttttaagctttttcaaaatcagtataatccagatatgattatctgtacatgaataggcatgagtgtactcaacaaagcgataaaaaagatagctgggatgctgtgtcaactcacggaggacagctgcgtggaaggatcgcctaggccacaagcaaataagaaataactgctcagagatggggactatttgttaccacagtattactgatcttatccagacgagtacaaagactgtatagcaccttaagtagtaaatgatgaacaaattttaagtattcatcatggcataatatgtaaccaattttatttgtccttgcttccattataatcaaaactcctctggctttttactagcttttatcaacatttaacatgcagatactgcaaaattcacttctattttgaaagggactggggacaagagaaagacctaaaagaccaagcctagtaccatgtatgtctatgttcagagagagatatcctttgaagtgatgaaataataggcaaa

SEQ ID NO: 26178 - DNA, 1354 bp, Bovine  19866881157126
  misc_feature (1)..(1): n is a, c, g, or t
ncaaaagtaaatacatccatgggaagaagggactgccggttatggtcgagctggttgtagagagacctgagctgcttatcggggagaccttgaccgtggtggagaatgttcctgacttgaacgtggtcaggtcctgtgtctgccagctctgccatctgctgtcacattgggagggttttctgtcccgtctaagcctcagtctcctccaagataaaatggagatactggtagtgtattgaagtgcttggcacaatgtctggcatatttaagttcacaaaatactaactagtattatttttttgagagataaaaaatagctcaggcagaaggaatagcgggtacaaatacctggaggtaggaagtgtgtgcggtgcccaggtacaccactaggagcaggggatggccacgtgtaggccacgtgcgaggtttacatagagagtgagtctgggtgtagatgcgccgggaatgtggactgaatgctgcagaaaccgtccacctgggcaaggattttaggacgggatgtgagctaggcagtgggtggcggggtagggcatgcatctgtcttgtgtttccagtggaggaggttggtggttctcaaagctcctgtgtacacgaaaattacctgaaaacctcgttaaagacagttttcttggccccaccttcaaagatccaggatcagtaggtctgcagtggaccccaggatgctgattttgaaatgagcacaccaggtgattggacataggcagtcctcaggcacactttgagatggactgagatccttgttgaggaaatgcttgctgacttactggcaggtctgatgaagctcagtgggagggaagatggaaacaaatgtcttaaaaataacatgtttacattcagtgcatgctatagctttgaatcttcttgccctggatcaaggagcacccgttgtacaggtattctttcaaataaaaaatatcagaagtcatacaattgttctgttaagtcttggagggcaagagaggtgtccttaccttctcaatttgcaggaggccactgaaggaaaagcctgttaaaaagagcaataagaggaaggaagactaaaagaagatacagcagcgtgagatcaggaaatgaagaggatggaaatgggaaagaatgggaaaagagcagtcagatttgattgggtgggaatctatttgtgaaggaaaccagccagtatttaacctgttttgaaaaagctagacttccagcatttttaattagtggattgctcgcttttgaaattgcccagttgggaatactcaagttttgatgtgttttatttgcctgctaattagcagcctgcttggttgaccatcattttccctttatt

SEQ ID NO: 26179 - DNA, 1504 bp, Bovine  19866881219664
  misc_feature (1)..(1): n is a, c, g, or t
ntgaaagagatttcttgattgttcgtttcagtgctgtcagtttcagtgttcatacatagaaaatatagtgttaataatcccttgtattaaatatggttccttacctggaggagactggcagtattaaagcatccttcaaatttcttaagatattttgataagaaaaataggttatgattcaagctaatggtcggaaatgcttcaattgcataagggaagacataattataggctgtatttccttacacataaactctagtatacttttgctataatttggaacctagtgacaatctgtgtgcccccagctattaatcttgccataagcaccattgtttctctaaaattctcagattgctcctctacattgtagtaattgtccttaaagatctcacaagattgaccatcagtggctgacccactgagtcaagtggcttactgtgatgcccagttaagttgctctgtcaaggatcactgagacagtgaatccgtgtatccattcacaacccagacttggctgatgaatgaaagtcaaagtgagtgaatttctaaatgttagtttgggctcattctagagggagctgacaggactaatattagctgccagtataagttcccaggctgatttaataattaataattaagaaaatgatgctcagagaggtaaagcaagcagaccaaagagtccccccagctaagtgtgagagccaggctttggaccctgaaatgcctggttttaaagctagtgcttttctaagttgggttccctgctgccggagctcatggtgaggtttttggactcagtaataggtctgtatgagagcccattggaaaaccactttcagtagagagtagagaatctggatctaatatactgcctagaatggaggatcttctcagggtgaactggagccatagtggtagggaaggcagagaggaaggcagggatcctcacagcccaacctttaaaaaaaaaaaatgaaaaatgtaccacatgtgactgtataaataatctattctgtaatgccctcaaaattagcatgtgcaatttcattaaaaccagtgaagatttcctgtgacgaggctggggtagaatatgccaattcacattttagcaacagcatgaacactttcttaaaaatgtatggattatctttgggccttcctttctgtgcggtgcaggcagaatatggtttgctgcttcacaaatttggattcttcgtagatcaagttattcttcccccaatacgagaactatatagagtgaaatctgggagcaatacctttttcaggctcctaagtgtgacctagtaattttttttgtgtggcatttaactcgtgaaatatataaaatgacaaatacatgttagaaacatacacaagttgtacagacagttcaggacaaccagtgcataaaaaccattgaaattgattcgaggtggtttataagacaccaaaaacatgaactccttctatcctaaatgaaacttcaccagatgaactt

SEQ ID NO: 26180 - DNA, 1146 bp, Bovine  19866881272202
  misc_feature (1)..(1): n is a, c, g, or t
nttttataagaaattacattcttgttattaacacttgtatacttaacagcactattaactcagttcttctgaatagtataattttaaatttttgatgaatgcaaaatatgtgtggcagagttttaaattaggtgtgaaatttttaatgttttttaataagagagtgattgtaagctatttgggaaatctgaagtatgtttcttagctaagcaaaaaactagttatttaatgcaatagtaaacgatttaaaattttgatggctttattatgtcctaatttataaaatttgaaattaaaattatataccttcagtggtattattaaaaaataaataaaatgcaacaagcctttttgttaaataagatttttagagcgtttcttcacaacaaatcatccactagatggcactaaacaactgccaaattttttctaacaaggccatatcaggtcaagaaaataagccaagaatcctaacgactgaaggaacacttgtgtcagacagacagatcaaatctcaaagaatctgaattgtatgtaaggtgatgctgaagaataactgggagctatttacacaagaaattttacttatcatggtcatttgatatacacagggccagcagctaaatattaacaattcaacacaaattggtaaatttattattaaattgcattaatttgaactccactaaatatctaaccaagacttggattttctctgtttatgaggaaatagtgttcacaaaacaataatgaaaaggaattccaggggaataatttatacacaatttgagctgataattataattactctcaatcaaggggtttggtgggttaaggtgcatataaaaatgttttcacttttttaggacatcctgtcatttagaccgatctttgtccaatgactgagcttataactaagttcataaaattataaatattgtaattatttctagaaagccagaacttcagaagaaagctccgaagtttagaaaatggccaggatatttgtaaatttggagatatgtcattctattgaaataatccactctttcttggaggctgatatgtattaagccataaaatgcatagtcaaacactagatggtttttgaagacatcttactgctttgttgccattttgttaaat

SEQ ID NO: 26181 - DNA, 1486 bp, Bovine  19866881309130
  misc_feature (1)..(1): n is a, c, g, or t
naaatgataattagtattatgcagtgtctggtatagaacaagtgagtgtaagagcaatgatatatgtttaaaatgtgacatccttttatgccctgatgtactggcaacatcccatcacagtatcgttcaagttaatttttttatagccgaggaaaggcggttgaaaacggggtagtttggaaccttaaggtttctgtcgcttctttagtgaagggatgtgcgttttcatttttcatacagtatctgtccttttcatgtgggcagattctgccctttggctaacataccaactgatacctctgagtaaatttgacttagtctttatggacagtgcaaccagctgagcagcatgactctttttttcctttctggtcactttatgtaccttgctgctgctgctgctaagtcacttcagtcgtgtccgactctgtgcgaccccagagacgacagcccaccaagctccgccatccctgggattctccaggcgagaacactggagtgggttgccatttccttctccaatgcatgaaagtgaaaagtgaaagtgaagtcgctcagtcgtgtccgaccctcagcgaccccatggactgcagccttccaggctcctccagtaacctaaaatttgaactctgtcatttagatgattttaactctttcctgtatgttatctaactcctccattaaaagcaagtgactgagcagtttaaaaaccttattttaatttaaaattcccctttaaaccatgagatgatcatagtaattagaaatttccaaagattaccgtctgctttaaaactgttttttgtggcatacttgtccaaatccagaatttatgcttaaattctgatattcatttatagtcctgttgcaatcattttaccgtttttgtgtagctggttgcttatggaatgatccaattcttttacaaccacaataacgtctataacaaaacattgaaatttcaatttcataaaaccaaatgctgctgtttacaaggtcctacctttgccttccaaaggcagtttgttgcaggttatgagtaactttcccatagcacattttgctctctttttttaaaaataatgtgggcttatcaaaataataattacgatttacaatatattttatacgtctcaggtgttttacttgcattatttcatttgcttgtaataaccttggtgcaattggctccattattattattccccccagcttcactatgatttcggggaaaatgtgaactctgcaaactttagagcccttcttatgcactgtacctgtgaagatgcagctttcctataataaggtgctggggtgagaatggtgggctccaatttctttggttcagagagatgtcagtagtcagacttccgtgctgattgattcatggcaaatgtaaacttatctgttattttatttacagaactatggagatgggactccctatgaccacagaccagcagggacctgggtcacatacaatctc

SEQ ID NO: 26182 - DNA, 1386 bp, Bovine  19866881603133
  misc_feature (1)..(1): n is a, c, g, or t
ngacatatcttggtgtgttcatagcttaaccaaaattatactcctggactgtccattttataatccacccatctttcaaatttgtaaaattttgagtgtattttgaattttttttttttactatgttgaagtccacttgtttttaattcattttctacaggagcggagtaaaaatgcatgtgttcagttcatcttgttaaaccacaaaatattctagtttactttcaccagaaaataaacctcagtctcttggaggctgagttgagcagatggagagacttatgtacaattggttgattgtatggcggtggggaagtgaactttgggtccggacattctgaatacagacttctaaccaaatccctgtgttcaccccaccagctggcctcctccgatggtatttccgcctccttggcttgagcctctcaggttacacaaggagttactgcttctcatccatcacccctcctacaggcaagcagtatacaactgctcctcttcctgatcagttacccagcttccatctgacttagatttttccaaactgcctattgcagtttatttatctcttgatttctctttatttgtctttaagatttcatagcatataaaaatgtattttggatgcagatcatttttaaagtctttattgaatttgttaaatattgtttctgttttatgttttttggccatgaggcatgtgggatcttaacttcctgaccagcgatcgaatccacacctcctgcattagaagccttaacccctgggcctacagggaagtcctccaaatgtgttcattcttgtgtcagaggagattggggagggaggaggtgtttaaccattttaaacacccaggtgcatttatttatctctttaccttagtgctgtatttattcagtgataagcttattgagagaaactatgtctattgaatttgtgctatgcaaacgccaggtgcagaaaggcttttttttttctgtcacaggatgctgtcaccttgttttcatggttttccagggttttttattctgctctgtctttggtcaaagtggccttcatgaagtggctgggaatcattttgctcatattctcccactgccatctcctccttggaaccctcttcccacagggaaggaaaggtccaccctctggagtagctgaagagcatgcccgtgtaacactagcgccttggagcctcagaactagaaacacaggccttgtgtagcaggtgactcctagagagttgtccctgcaggagttagccctacgaggcagctgacacacttaccttttagacaaggtgaagctggcaaagagagcagatggtaactgtgtgtgttagactttctcactagaggcactttccccttaagtggagggcaggca
